United States Patent Application Publication US 2011/0183924 A1 - sequence listing, part 289

SEQ ID NO: 918062 - protein, 667 aa, Homo sapiens
AGWGGEVGPGEGWPRGPAGLGRGAAAMIRAFSFPVSPERGRLRGWLEGSLAGLCELHWLRERQEYRVQQALRLAQPGMGGAEAEDEEDADEDEDAAAARRAAAALEEQLEALPGLVWDLGQQLGDLSLESGGLEQESGRSSGFYEDPSSTGGPDSPPSTFCGDSGFSGSSSYGRLGPSEPRGIYASERPKSLGDASPSAPEVVGARAAVPRSFSAPYPTAGGSAGPEACSSAERRARAGPFLTPSPLHAVAMRSPRPCGRPPTDSPDAGGAGRPLDGYISALLRRRRRRGAGQPRTSPGGADGGPRRQNSVRQRPPDASPSPGSARPAREPSLERVGGHPTSPAALSRAWASSWESEAAPEPAAPPAAPSPPDSPAEGRLVKAQYIPGAQAATRGLPGRAARRKPPPLTRGRSVEQSPPRERPRAAGRRGRMAEASGRRGSPRARKASRSQSETSLLGRASAVPSGPPKYPTAEREEPRPPRPRRGPAPTLAAQAAGSCRRWRSTAEIDAADGRRVRPRAPAARVPGPGPSPSAPQRRLLYGCAGSDSECSAGRLGPLGRRGPAGGVGGGYGESESSASEGESPAFSSASSDSDGSGGLVWPQQLVAATAASGGGAGAGAPAGPAKVFVKIKASHALKKKILRFRSGSLKVMTTVNGEEPCLTQFSF

SEQ ID NO: 918063 - protein, 207 aa, Homo sapiens
AGWGGEVGPGEGWPRGPAGLGRGAAAMIRAFSFPVSPERGRLRGWLEGSLAGLCELHWLRERQEYRVQQALRLAQPGMGGAEAEDEEDADEDEDAAAARRAAAALEEQLEALPGLVWDLGQQLGDLSLESGGLEQESGRSSGFYEDPSSTGGPDSPPSTFCGDSGFSGSSSYGRLGPSEPRGIYASERPKSLGKVGEGGALGPGKGQ

SEQ ID NO: 918064 - protein, 436 aa, Homo sapiens
MRSRDRDPPGQHGETPVSTKNTKISWACAGEDIRETGFYSYSYSYFGGGNVKWYRERGETQSAAGLPSPKQAGELEGGDVPGQAAAPAPQTPGPSLCRAQTKPQPRRSASRWLRERRAGSGATRKPRRSGTWGTSLSQWGETYLALTIAENSLNRPGSCISKMSLSNKLMLDKLDVKGKPVVMRVDFNFPMKNNQVTNNWRIKAAVPSIKFCLDNGSKSVVLISHLGWPDGVPMPDKYSSEPVAVELKSLLGKDVLFLKDCVGPEVEKAWEVYVNDAFGTAHRAHSSMAEVNLPQKAGGFLMKKELNYFAEALESPERPFLAILGRTKVADKIQLIKNMLGKVNEMIIGSGMACTFLKVLSNMEIGTSLFDEEGAKTVKDLMSKAEKNGVKIILPVDFVTAGKFDENTKTGQATVASGIPAGWLGLDCGPESSKKD

SEQ ID NO: 918065 - protein, 38 aa, Homo sapiens
MRHHAQLIFVFLVETGFHHVDQDGLNLLTSLSGCLLLP

SEQ ID NO: 918066 - protein, 185 aa, Homo sapiens
MSLLDLSSTAGGENRLVDLRCSKLAARSRTREASWEDRPGETRKIKATVNHDPIPLLNLNCTAAGERDLVDLRHGKARGEVHQVDLSPTLTADISLKINKQIQQYTGGPPRWEDHPGKTWESEFSVNRECIPLLDLNGTVTSKRHLVNLRRGKLMAKSNTCSRNWLECDRNLKDQLHRAGRSIEK

SEQ ID NO: 918067 - protein, 185 aa, Homo sapiens; identical to SEQ ID NO: 918066

SEQ ID NO: 918068 - protein, 102 aa, Homo sapiens
MGQRVPKRNPGAGQGVGVFSPTIKKTAGGDPDGLLTHPKGGRGGHTGDHNTRGSQGTGINPGGEVNTTTRKQTPRQVERHRAVSKIKKETTGATNKDNTHGH

SEQ ID NO: 918069 - protein, 185 aa, Homo sapiens; identical to SEQ ID NO: 918066

SEQ ID NO: 918070 - protein, 169 aa, Homo sapiens
VHIHFSSALWLQLGSQWPLSVSFRKMIPFSKGSLEEQSPPHQPWEECRLFKGSSWAAGLRRGTCPSQRQCTCTENLFAGLWVVFGFMFLRKPATVGYEGSDILDPGPPCWRGLPDKTQNPGKSEFQINTTDMFLANKGEIKTFSQERQQKEVITRSYSWAHGKNSHNSA

SEQ ID NO: 918071 - protein, 541 aa, Homo sapiens
QDIMLRESSQFSQQQSFVQILQEVNDFAGQRELVAENLSVRVCLELTKYSQEMKQERKMHFQEGRRAQQQLENGFKQLENSKRKFERDCREAEKAAQTAERLDQDINATKADVEKAKQQAHLRSHMAEESKNEYAAQLQRFNRDQAHFYFSQMPQIFDKLQDMDERRATRLGAGYGLLSEAELEVVPIIAKCLEGMKVAANAVDPKNDSHVLIELHKSGFARPGDVEFEDFSQPMNRAPSDSSLGTPSDGRPELRGPGRSRTKRWPFGKKNKPRPPPLSPLGGPVPSALPNGPPSPRSGRDPLAILSEISKSVKPRLASFRSLRGSRGVSEASGQEEVVALACPAAGGGTLGSLPAAGWAPLPWLPNPDLLCSVHGLAVKNHGWGRERNISDGCRVWQARLLDPKFSPLPTLQTVVTEDFSHLPPEQQRKRLQQQLEERSRELQKEVDQREALKKMKDVYEKTPQMGDPASLEPQIAETLSNIERLKLEVQKYEAWLAEAESRVLSNRGDSLSRHARPPDPPASAPPDSSSNSASQDTKER

SEQ ID NO: 918072 - protein, 416 aa, Homo sapiens
MAEESKNEYAAQLQRFNRDQAHFYFSQMPQIFDKLQDMDERRATRLGAGYGLLSEAELEVVPIIAKCLEGMKVAANAVDPKNDSHVLIELHKSGFARPGDVEFEDFSQPMNRAPSDSSLGTPSDGRPELRGPGRSRTKRWPFGKKNKPRPPPLSPLGGPVPSALPNGPPSPRSGRDPLAILSEISKSVKPRLASFRSLRGSRGVSEASGQEEVVALACPAAGGGTLGSLPAAGWAPLPWLPNPDLLCSVHGLAVKNHGWGRERNISDGCRVWQARLLDPKFSPLPTLQTVVTEDFSHLPPEQQRKRLQQQLEERSRELQKEVDQREALKKMKDVYEKTPQMGDPASLEPQIAETLSNIERLKLEVQKYEAWLAEAESRVLSNRGDSLSRHARPPDPPASAPPDSSSNSASQDTKER

SEQ ID NO: 918073 - protein, 606 aa, Homo sapiens
  misc_feature (30)..(30): Xaa can be any naturally occurring amino acid
  misc_feature (62)..(62): Xaa can be any naturally occurring amino acid
  misc_feature (71)..(71): Xaa can be any naturally occurring amino acid
GGGGGGGSSREGGTERGEQGEGRERHTQGXRDRGDREGKGGKERTEGEQADAKQRLDRGKKXRPKRPAKEXPEAKFSQQQSFVQILQEVNDFAGQRELVAENLSVRVCLELTKYSQEMKQERKMHFQEGRRAQQQLENGFKQLENSKRKFERDCREAEKAAQTAERLDQDINATKADVEKAKQQAHLRSHMAEESKNEYAAQLQRFNRDQAHFYFSQMPQIFDKLQDMDERRATRLGAGYGLLSEAELEVVPIIAKCLEGMKVAANAVDPKNDSHVLIELHKSGFARPGDVEFEDFSQPMNRAPSDSSLGTPSDGRPELRGPGRSRTKRWPFGKKNKPRPPPLSPLGGPVPSALPNGPPSPRSGRDPLAILSEISKSVKPRLASFRSLRGSRGVSEASGQEEVVALACPAAGGGTLGSLPAAGWAPLPWLPNPDLLCSVHGLAVKNHGWGREWNISDGCRVWQARLLDPKFSPLPTLQTVVTEDFSHLPPEQQRKRLQQQLEERSRELQKEVDQREALKKMKDVYEKTPQMGDPASLEPQIAETLSNIERLKLEVQKYEAWLAEAESRVLSNRGDSLSRHARPPDPPASAPPDSSSNSASQDTKER

SEQ ID NO: 918074 - protein, 230 aa, Homo sapiens
VVLCLDGGMVLMRKQVPSRFMYPKEWQHLTMFILLTLNGCVDFMSKNVLPQRCVGLEKGTLVLIIYELLLLMVSHVKDSEGVELHVYSLLILVVFLLLLVLTAELWAPNMCHLQLMETFLILMMGSWLMQAGFILYRPVSGYPWQDDDISDIMFVTTFFCWHVMINASFLLGIYGFSSFWYHCFRPSLKLTGPKEAPYYASTPGPLYKLLQEVEQSEKEDQALLLPKSSP

SEQ ID NO: 918075 - protein, 73 aa, Homo sapiens
EGVDGECLPGSPLITELAFNMQRAKQIKGFNGKESSPGGKNKSRDQQIHWEATMEAHAGGDGRFTRVLAMEVW

SEQ ID NO: 918076 - protein, 197 aa, Homo sapiens
EGVDGECLPGSPLITELAFNMQRAKQIKGFNGKESSPGGKNKSRDQQIHWEATMEAHAGGDGRFTRVLAMEEKFTDLGTECNGSIDGMMGIFTGPETGCGFMHQCLFPPGLVNRVLSWDIWSFLSSISYARYLVHPILIILYNGLQETLIHHTDTNMFYLFSGHRVLTFVTGLALTLFIEKPCQELKQHLLGHECSG

SEQ ID NO: 918077 - protein, 253 aa, Homo sapiens
MRLPRPHGTKEEVLMRAHLGVYHAPLPYGESWTELDLMEGKDLMGGEGPGISVMQQPDPVSHPLGVMWVEELLLPKCAKYWSQGYPHYSSPFKYTWHTRWTSYKKTLLSSAFCLEDDRDQMKDGIGESKMRLEAIVRQRDGGKKASQEAVRCGKNLDSKSGRGEGVWEDATLDLDAGWKDLAEYICRIYDLMTSILQSYLMDGYINIFACLRDSSSDKKKIKGGGFSSSTISADFTSQFSDLNSSHFLCKGLR

SEQ ID NO: 918078 - protein, 572 aa, Homo sapiens
SPRPLDVGGPAAGTPGVLSRPCPSTAALAPKPFCAAPRPQPDAPACAGATGGSCADFDSGVDFVRRRSSGLWGPQPPLSPVKNYTEMFQDPVAFKDVAVNFTQEEWALLDISQKNLYREVMLETFWNLTSIGKKWKDQNIEYEYQNPRRNFRSVTEEKVNEIKEDSHCGETFTPVPDDRLNFQKKKASPEVKSCDSFVCEVGLGNSSSNMNIRGDTGHKACECQEYGPKPWKSQQPKKAFRYHPSLRTQERDHTGKKPYACKECGKNIIYHSSIQRHMVVHSGDGPYKCKFCGKAFHCLSLYLIHERTHTGEKPYECKQCGKSFSYSATHRIHERTHIGEKPYECQECGKAFHSPRSCHRHERSHMGEKAYQCKECGKAFMCPRYVRRHERTHSRKKLYECKQCGKALSSLTSFQTHIRMHSGERPYECKTCGKGFYSAKSFQRHEKTHSGEKPYKCKQCGKAFTRSGSFRYHERTHTGEKPYECKQCGKAFRSAPNLQLHGRTHTGEKPYQCKECGKAFRSASQLRIHRRIHTGEKPYECKKCGKAFRYVQNFRFHERTQTHKNALWRKTL

SEQ ID NO: 918079 - protein, 363 aa, Homo sapiens
MNIRGDTGHKACECQEYGPKPWKSQQPKKAFRYHPSLRTQERDHTGKKPYACKECGKNIIYHSSIQRHMVVHSGDGPYKCKFCGKAFHCLSLYLIHERTHTGEKPYECKQCGKSFSYSATHRIHERTHIGEKPYECQECGKAFHSPRSCHRHERSHMGEKAYQCKECGKAFMCPRYVRRHERTHSRKKLYECKQCGKALSSLTSFQTHIRMHSGERPYECKTCGKGFYSAKSFQRHEKTHSGEKPYKCKQCGKAFTRSGSFRYHERTHTGEKPYECKQCGKAFRSAPNLQLHGRTHTGEKPYQCKECGKAFRSASQLRIHRRIHTGEKPYECKKCGKAFRYVQNFRFHERTQTHKNALWRKTL

SEQ ID NO: 918080 - protein, 572 aa, Homo sapiens; identical to SEQ ID NO: 918078

SEQ ID NO: 918081 - protein, 486 aa, Homo sapiens
MFQDPVAFKDVAVNFTQEEWALLDISQKNLYREVMLETFWNLTSIGKKWKDQNIEYEYQNPRRNFRSVTEEKVNEIKEDSHCGETFTPVPDDRLNFQKKKASPEVKSCDSFVCEVGLGNSSSNMNIRGDTGHKACECQEYGPKPWKSQQPKKAFRYHPSLRTQERDHTGKKPYACKECGKNIIYHSSIQRHMVVHSGDGPYKCKFCGKAFHCLSLYLIHERTHTGEKPYECKQCGKSFSYSATHRIHERTHIGEKPYECQECGKAFHSPRSCHRHERSHMGEKAYQCKECGKAFMCPRYVRRHERTHSRKKLYECKQCGKALSSLTSFQTHIRMHSGERPYECKTCGKGFYSAKSFQRHEKTHSGEKPYKCKQCGKAFTRSGSFRYHERTHTGEKPYECKQCGKAFRSAPNLQLHGRTHTGEKPYQCKECGKAFRSASQLRIHRRIHTGEKPYECKKCGKAFRYVQNFRFHERTQTHKNALWRKTL

SEQ ID NO: 918082 - protein, 335 aa, Homo sapiens; identical to SEQ ID NO: 776008

SEQ ID NO: 918083 - protein, 460 aa, Homo sapiens
SLLWAAYSMLFKKPLRHSMDFSLECGKAFKYSCTLTTHKIIHTGEKSHKCEECGKAFNWSSQLAIHKITHTGEQPYKRKECSKAFNHPTTPSSHKKTHTGEKPCKCDKCGKAFIFSSTLSKHEKIHTGEKPYKCEECGKAFRWSSHLTTHKITHTGEKPYKCEECGNGFKYSSTLTEHKIIHTGEKSYKCEECGKAFNWPSQLAIHKITHTGEQPYKCKECGKAFKHPATLSSHNKTHTGEKPYKCDKCGKAFISSSTLSKHEKIHTGEKPYKCEEYGKAFTHSSHLTRHKKIHAGEKPYKCDKCGTAFILSSTLSEHEKIHTGEKLYKCEECGKAFNHFSHLTIHKTIHTGEKCYKWRTHTGEKPYKCEECGKAFTASSTLSEYKTIHTGEKPCKCEECGKAFNWSSDFNKHKRIHSGQKPILDMAIIHAEEELYKPERCDSAVPNTSNVSIHKKIILV

SEQ ID NO: 918084 - protein, 197 aa, Homo sapiens
LHWGFPPMTRSHSSHRFCFWKATRSYLQYRGKKFKDRKSPPKSTDKYPFSSGGQGGRQQPLNDRLGVLASQVTSQACFQTCPSNRDLKLPRNYLPVPVPRRQTRYFEALYTGKAMHGFRVYKALGKKVLVPSSPETIKKGNGLTAQIWQDQTAMGISYSPFRLKGDGKKQRKAETARVTETCCHLYRSLSDTCQRVT

SEQ ID NO: 918085 - protein, 424 aa, Homo sapiens
SGSRLESPGDSDDPWVSSGMRVIASLQVQKSRHRVSRSQACPESTAAGAQARPGNQDLCVLCPCGVFLCSPLPHLSSREEQSLPNSGTADSLPQGTVCSSFPVQAVLRRTGTGPQDRASRVFQVAYVIIKAANAPRPGNWILERSLDGTTFSPWQYYAVSDSECLSRYNITPRRGPPTYRADDEVICTSYYSRLVPLEHGEIHTSLINGRPSADDLSPKLLEFTSARYIRLRLQRIRTLNADLMTLSHREPKELDPIVTRRVSPYEDEPCRPCNCDPVGSLSSVCIKDDLHSDLHNGKQPGQCPCKEGYTGEKCDRCQLGYKDYPTCVSCGCNPVGSASDEPCTGPCVCKENVEGKACDRCKPGFYNLKEKNPRGCSECFCFGVSDVCSSLSWPVGQVGGAICAAGFNEQVVLHKLGTSCVRRK

SEQ ID NO: 918086 - protein, 135 aa, Homo sapiens
MELESLDKSAQFNTCGWDPAVLLPCPCGCNLRRQIPTGNRRAQNSVRQGFPFGTHGLLPSPSLPPGVSWSPDCVLGPAAAKVTRLQALLLQEIQTSCLGSEQWEATHQENWSRQASRCGVGRGGHLYDNKILPLF

SEQ ID NO: 918087 - protein, 135 aa, Homo sapiens
MGLGASEQRAAPVREAGPHGSPQWEGGSGMAGCRSQALPHGEAAEACFLSKLQQKQQKFTTVLELAAQLTLASTFTVTLLFGSDPPATPCEYSAWGLECKGHWGQISCTELSQQSRRQQPPCEQLGTTEKWRCLS

SEQ ID NO: 918088 - protein, 135 aa, Homo sapiens
QGILREGLINIMAVYFCGRRKKVREKGLDGWRMEVKANITEITCSILVVGTWKSIFISSILNAYEPVRLTLIILTDGGRPEIVKGCGVQDPEAGNSSNDKMNLSTFLIMKSASSLEWDPGSRLLSHLAAMWNLFS

SEQ ID NO: 918089 - protein, 518 aa, Homo sapiens
MKETVESHFRDAYPTCEVVDVQLCYNVAKLIYLCKEKKKTEKSLTYYTNLQVKTGQRTLINPKPCGQFCCCEVLGCEWEDAISYYTRMKDRLLERITEEERHVQDQPLGMAFVTFQEKSMATYILKDFNACKCQSLQCKGEPQPSSHSRELYTSKWTVTFAADPEDICWKNLSIQGLRWWLQWLGINFTLFLGLFFLTTPSIILSTMDKFNVTKPIHALNNPIISQFFPTLLLWSFSALLPSIVYYSTLLESHWTKSGENQIMMTKVYIFLIFMVLILPSLGLTSLDFFFRWLFDKTSSEASIRLECVFLPDQGAFFVNYVIASAFIGNGMELLRLPGLILYTFRMIMAKTAADRRNVKQNQAFQYEFGAMYAWMLCVFTVIVAYSITCPIIAPFGLIYILLKHMVDRHNLYFVYLPAKLEKGIHFAAVNQALAAPILCLFWLYFFSFLRLGMKAPATLFTFLVLLLTILVCLAHTCFGCFKHLSPLNYKTEEPASDKGSEAEAHMPPPFTITWQASL

SEQ ID NO: 918090 - protein, 729 aa, Homo sapiens
MPEKETVESHFRDAYPTCEVVDVQLCYNVAKLIYLCKEKKKTEKSLTYYTNLQVKTGQRTLINPKPCGQFCCCEVLGCEWEDAISYYTRMKDRLLERITEEERHVQDQPLGMAFVTFQEKSMATYILKDFNACKCQSLQCKGEPQPSSHSRELYTSKWTVTFAADPEDICWKNLSIQGLRWWLQWLGINFTLFLGLFFLTTPSIILSTMDKFNVTKPIHALNNPIISQFFPTLLLWSFSALLPSIVYYSTLLESHWTKSGENQIMMTKVYIFLIFMVLILPSLGLTSLDFFFRWLFDKTSSEASIRLECVFLPDQGAFFVNYVIASAFIGNGMELLRLPGLILYTFRMIMAKTAADRRNVKQNQAFQYEFGAMYAWMLCVFTVIVAYSITCPIIAPFGLIYILLKHMVDRHNLYFVYLPAKLEKGIHFAAVNQALAAPILCLFWLYFFSFLRLGMKAPATLFTFLVLLLTILVCLAHTCFGCFKHLSPLNYKTEEPASDKGSEAEAHMPPPFTITWQASLLINGREGILVPLGILTCIFETVEEIESCLDSWPSPLVSVPCSLSFSAYLMPALRASDSERLGLGEDSTVSAAAAAADLWCHPQHQRDYPWTVLERTRAVWLLPPRRPEAGSHCSEKTQPEWPGLRPLAEWECVGTAQLSYQVPIFSGPSSGEESTGSLAPPLLTQFPSGTSFQLCSWGDIPSGLSPRPCGGLFAPQTDESGRIYGERDV

SEQ ID NO: 918091 - protein, 795 aa, Homo sapiens
MTCFGGSPGHRRRKLEPSDFLLFTFQRLELGRKPEQYRHTGLWVTSLPAVFPGQVRRTLFITGLPRDARKETVESHFRDAYPTCEVVDVQLCYNVAKLIYLCKEKKKTEKSLTYYTNLQVKTGQRTLINPKPCGQFCCCEVLGCEWEDAISYYTRMKDRLLERITEEERHVQDQPLGMAFVTFQEKSMATYILKDFNACKCQSLQCKGEPQPSSHSRELYTSKWTVTFAADPEDICWKNLSIQGLRWWLQWLGINFTLFLGLFFLTTPSIILSTMDKFNVTKPIHALNNPIISQFFPTLLLWSFSALLPSIVYYSTLLESHWTKSGENQIMMTKVYIFLIFMVLILPSLGLTSLDFFFRWLFDKTSSEASIRLECVFLPDQGAFFVNYVIASAFIGNGMELLRLPGLILYTFRMIMAKTAADRRNVKQNQAFQYEFGAMYAWMLCVFTVIVAYSITCPIIAPFGLIYILLKHMVDRHNLYFVYLPAKLEKGIHFAAVNQALAAPILCLFWLYFFSFLRLGMKAPATLFTFLVLLLTILVCLAHTCFGCFKHLSPLNYKTEEPASDKGSEAEAHMPPPFTITWQASLGINGREGILVPLGILTCIFETVEEIESCLDSWPSPLVSVPCSLSFSAYLMPALRASDSERLGLGEDSTVSAAAAAADLWCHPQHQRDYPWTVLERTRAVWLLPPRRPEAGSHCSEKTQPEWPGLRPLAEWECVGTAQLSYQVPIFSGPSSGEESTGSLAPPLLTQFPSGTSFQLCSWGDIPSGLSPRPCGGLFAPQTDESGRIYGERDV

SEQ ID NO: 918092 - protein, 727 aa, Homo sapiens
MKETVESHFRDAYPTCEVVDVQLCYNVAKLIYLCKEKKKTEKSLTYYTNLQVKTGQRTLINPKPCGQFCCCEVLGCEWEDAISYYTRMKDRLLERITEEERHVQDQPLGMAFVTFQEKSMATYILKDFNACKCQSLQCKGEPQPSSHSRELYTSKWTVTFAADPEDICWKNLSIQGLRWWLQWLGINFTLFLGLFFLTTPSIILSTMDKFNVTKPIHALNNPIISQFFPTLLLWSFSALLPSIVYYSTLLESHWTKSGENQIMMTKVYIFLIFMVLILPSLGLTSLDFFFRWLFDKTSSEASIRLECVFLPDQGAFFVNYVIASAFIGNGMELLRLPGLILYTFRMIMAKTAADRRNVKQNQAFQYEFGAMYAWMLCVFTVIVAYSITCPIIAPFGLIYILLKHMVDRHNLYFVYLPAKLEKGIHFAAVNQALAAPILCLFWLYFFSFLRLGMKAPATLFTFLVLLLTILVCLAHTCFGCFKHLSPLNYKTEEPASDKGSEAEAHMPPPFTITWQASLRINGREGILVPLGILTCIFETVEEIESCLDSWPSPLVSVPCSLSFSAYLMPALRASDSERLGLGEDSTVSAAAAAADLWCHPQHQRDYPWTVLERTRAVWLLPPRRPEAGSHCSEKTQPEWPGLRPLAEWECVGTAQLSYQVPIFSGPSSGEESTGSLAPPLLTQFPSGTSFQLCSWGDIPSGLSPRPCGGLFAPQTDESGRIYGERDV

SEQ ID NO: 918093 - protein, 114 aa, Homo sapiens
MMDSPFLELWQSKAVSIREQLGLGDRPNDSYCYNSAKNSTVLQGVTFGGIPTVLLIDVSCFLFLILVFSIIRRRFWDYGRIALVSEADSESRFQRLSSTSSSGQQDFENELVGI

SEQ ID NO: 918094 - protein, 904 aa, Homo sapiens
MLEQGKEPWTVVSQVKIARNPNCGECMKGVITGISPKCVIKELPPIQNSNTGEKFQAVMLEGHESYDTENFYFREIRKNLQEVDFQWKDGEINYKEGPMTHKNNLTGQRVRHSQGDVENKHMENQLILRFQSGLGELQKFQTAEKIYGCNQIERTVNNCFLASPLQRIFPGVQTNISRKYGNDFLQLSLPTQDEKTHIREKPYIGNECGKAFRVSSSLINHQMIHTTEKPYRCNESGKAFHRGSLLTVHQIVHTRGKPYQCDVCGRIFRQNSDLVNHRRSHTGDKPYNVMNVASPLVKVPTLQFIREFITGEKPYKCNRCGKCFSQSSSLATHQTVHTGDKPYKCNECGKTFKRNSSLTAHHIIHAGKKPYTCDVCGKVFYQNSQLVRHQIIHTGETPYKCNECGKVFFQRSRLAGHRRIHTGEKPYKCNECGKVFSQHSHLAVHQRVHTGEKPYKCNECGKAFNWGSLLTVHQRIHTGEKPYKCNVCGKVFNYGGYLSVHMRCHTGEKPLHCNKCGMVFTYYSCLARHQRMHTGEKPYKCNVCGKVFIDSGNLSIHRRSHTGEKPFQCNECGKVFSYYSCLARHRKIHTGEKPYKCNDCGKAYTQRSSLTKHLVIHTGENPYHCNEFGEAFIQSSKLARYHRNPTGEKPHKCSECGRTFSHKTSLVYHQRRHTGEMPYKCIECGKVFNSTTTLARHRRIHTGEKPYKCNECGKVFRYRSGLARHWSIHTGEKPYKCNECGKAFRVRSILLNHQMMHTGEKPYKCNECGKAFIERSNLVYHQRNHTGEKPYKCMECGKAFGRRSCLTKHQRIHSSEKPYKCNECGKSYISRSGLTKHQIKHAGENLTTKLNVERPLDVVGRETRKRNKRQRQSIEKEKGAPGTGALHMEDLRSWPWSLSSLSIY

SEQ ID NO: 918095 - protein, 962 aa, Homo sapiens
MALPQGSLTFRDVAVEFSQEEWKCLDPVQKALYRDVMLENYRNLGFLGLCLPDLNIISMLEQGKEPWTVVSQVKIARNPNCGECMKGVITGISPKCVIKELPPIQNSNTGEKFQAVMLEGHESYDTENFYFREIRKNLQEVDFQWKDGEINYKEGPMTHKNNLTGQRVRHSQGDVENKHMENQLILRFQSGLGELQKFQTAEKIYGCNQIERTVNNCFLASPLQRIFPGVQTNISRKYGNDFLQLSLPTQDEKTHIREKPYIGNECGKAFRVSSSLINHQMIHTTEKPYRCNESGKAFHRGSLLTVHQIVHTRGKPYQCDVCGRIFRQNSDLVNHRRSHTGDKPYNVMNVASPLVKVPTLQFIREFITGEKPYKCNRCGKCFSQSSSLATHQTVHTGDKPYKCNECGKTFKRNSSLTAHHIIHAGKKPYTCDVCGKVFYQNSQLVRHQIIHTGETPYKCNECGKVFFQRSRLAGHRRIHTGEKPYKCNECGKVFSQHSHLAVHQRVHTGEKPYKCNECGKAFNWGSLLTVHQRIHTGEKPYKCNVCGKVFNYGGYLSVHMRCHTGEKPLHCNKCGMVFTYYSCLARHQRMHTGEKPYKCNVCGKVFIDSGNLSIHRRSHTGEKPFQCNECGKVFSYYSCLARHRKIHTGEKPYKCNDCGKAYTQRSSLTKHLVIHTGENPYHCNEFGEAFIQSSKLARYHRNPTGEKPHKCSECGRTFSHKTSLVYHQRRHTGEMPYKCIECGKVFNSTTTLARHRRIHTGEKPYKCNECGKVFRYRSGLARHWSIHTGEKPYKCNECGKAFRVRSILLNHQMMHTGEKPYKCNECGKAFIERSNLVYHQRNHTGEKPYKCMECGKAFGRRSCLTKHQRIHSSEKPYKCNECGKSYISRSGLTKHQIKHAGENLTTKLNVERPLDVVGRETRKRNKRQRQSIEKEKGAPGTGALHMEDLRSWPWSLSSLSIY

SEQ ID NO: 918096 - protein, 210 aa, Homo sapiens
MGTATENSPASSCGRCKSCQRVKDTPLIRIQSEEFLMVPMTFIISMCTGQVVRMSFPLLIEVGGPLGKHGTVGRMMGKDGAGIKFSMEAVLALTFQKAYLLDGVCHWAAELWMFVSWKLQAVERYGQLAWVMRVLEDVQLDSAIGHKGSLGFSRTGHCKRGTKDIREKGYEYSMTTNWGSRISEPLKDLAPGGLEKTPIGMLGRASCKHL

SEQ ID NO: 918097 - protein, 155 aa, Homo sapiens
NKDLGKDETMGQDFCLLQICPVIFENPTYDEPELGSCPSPHSGVIILSWFGQDFLVLALKGNDHWMDPGTHWTHREVGAGSSLAFTSPYYDGKHNGALCPWISQSIQTLGPIILLVNKHPAGPQRPFSFWPFRERGVPVSGIELGEQAGVHRTLQ

SEQ ID NO: 918098 - protein, 139 aa, Homo sapiens
MAYSNNSHQQFHKGNPFILTRGPVALVKGLRTSEANFYTNVDVAGPRADARFPSCLHSSDRFSGIWYFSSLLLVLGFHIIQTAAATFHRSSSGSKAHLGPFWGCVPVALGRCPLTADEIFFQLNTDVAGFFLTYRMTTE

SEQ ID NO: 918099 - protein, 210 aa, Homo sapiens
ERTWIPQVMVQDSHTIMVLFYGMLLLVPLGELQPGGEISCLFTQCPLPSSAIEPKEELQDNFRNSVLQEARWEVGSHRSLSVDCVLQESVGSTKTSGNLHTANRNCPTAQSCSGNKDFSKAKQHLKTPVVRDNKTSIDPALFNGLLQKKPKVKVRAASLADTELNGESQRKQEKPVLQELPEETEVLPPYVPAYPPLPRPTAPPGTRFRS

SEQ ID NO: 918100 - protein, 838 aa, Homo sapiens
MQVDPPLHGPPNDFLIFQIIPLHSLSIMPRFLWILCFSMEETQGELTSSCGSKTMANVSLAFRDVSIDLSQEEWECLDAVQRDLYKDVMLENYSNLVSLDLEYKYITKNLLSEKNVCKIYLSQLQTGEKSKNTIHEDTIFRNGLQCKHEFERQERHQMGCVSQMLIQKQISHPLHPKIHAREKSYECKECRKAFRQQSYLIQHLRIHTGERPYKCMECGKAFCRVGDLRVHHTIHAGERPYECKECGKAFRLHYHLTEHQRIHSGVKPYECKECGKAFSRVRDLRVHQTIHAGERPYECKECGKAFRLHYQLTEHQRIHTGERPYECKVCGKTFRVQRHISQHQKIHTGVKPYKCNECGKAFSHGSYLVQHQKIHTGEKPYECKECGKSFSFHAELARHRRIHTGEKPYECRECGKAFRLQTELTRHHRTHTGEKPYECKECGKAFICGYQLTLHLRTHTGEIPYECKECGKTFSSRYHLTQHYRIHTGEKPYICNECGKAFRLQGELTRHHRIHTCEKPYECKECGKAFIHSNQFISHQRIHTSESTYICKECGKIFSRRYNLTQHFKIHTGEKPYICNECGKAFRFQTELTQHHRIHTGEKPYKCTECGKAFIRSTHLTQHHRIHTGEKPYECTECGKTFSRHYHLTQHHRGHTGEKPYICNECGNAFICSYRLTLHQRIHTGELPYECKECGKTFSRRYHLTQHFRLHTGEKPYSCKECGNAFRLQAELTRHHIVHTGEKPYKCKECGKAFSVNSELTRHHRIHTGEKPYQCKECGKAFIRSDQLTLHQRNHISEEVAVIKQFCEKPSRLPYYHFPQLGLMSIVNQNVCDLMDPL

SEQ ID NO: 918101 - protein, 210 aa, Homo sapiens
MAEKILEKLDVLDKQAEIILARRTKINRLQSEGRKTTMAIPLTFDFQLEFEEALATSASKAISKIKEDKSCSITKSKMHVSFKCEPEPRKSNFEKSNLRPFFIQTNVKNKESESTEPVEEHLKSRSIRPYLYLKDTTEMENAGPLNVLYSQHRQACRRSLGSTDFSPMFNIQSNAHKKEKDSTLFTAQIEKKPRKPLDSVGLLEGDRNKR

SEQ ID NO: 918102 - protein, 156 aa, Homo sapiens
ADSTSRFMHRSDGSDFGSRTVVHAEIRSTISNCSPSLSASPSLCSAVNSSLDALELLSGIPRENKSVSLNPIQLQPQVPEEYMQDDMQTIHMLFLAKMILSFGPNISANVDSQPKGVHDASPMERAYTSNPQGSPLHSPHGEQTSQNLSGGWSICQ

SEQ ID NO: 918103 - protein, 142 aa, Homo sapiens
MYVRTCSIACTHTMDDYSAIKKNEIMTVPATWMELKTTILGEITQKQSQILHALPYMWELNNVYRQTERGITDIGDWKGGRVAGRDEKLLHGQNVHYSVMVTLKPRLFHHMLCPCNKTACVPCNFINVVKLKRCVYVNTVNM

SEQ ID NO: 918104 - protein, 161 aa, Homo sapiens
CCRQGTVCLQIQMERNTFTPGEKVVFTTEINNQTSKCIKTVVFALYAHIQYEGFTPSAERRSRLDSSELLRQEANTPVTRFNTTKVVSTFNLPLLLSVSSSTQDGEIMHTRYELVTTVHLPWSLTSLKAKVPIIITSASVDSAICQLSEDGVLPVNPDHQN

SEQ ID NO: 918105 - protein, 185 aa, Homo sapiens
MGGSSLVTVAPSVACVFVLRSATPRRRGVLVGCGRVRLPVLMVVARAMEKLQFLYLSDNLLDSIPGPLPLSLRSVHLQSFPPSSLPFSSSSSVPSLSIHPPWGSSSHPCCVALALDASVSPVAPEQAELNNLIETMQRDVFCDPEEHKHTRRQLEDIRLDGNPINLSLFPSAYFCLPRLPIGRFT

SEQ ID NO: 918106 - protein, 185 aa, Homo sapiens; identical to SEQ ID NO: 918105

SEQ ID NO: 918107 - protein, 598 aa, Homo sapiens
MYFIDNLLLGHPRRLKVKPDSEILVIENGTAFPFQVEVLDESDNITAQPKLIVHCKFSGAPNLPVYVVDCSSSGTSILTGSAIQVQNIKKDQTLKARIEIPSCKDVAPVEKTIKLLPSSHVARLQIFSVEGQKAIQIKHQDEVNWIAGDIMHNLIFQMYDEGEREINITSALAEKIKVNWTPEINKEHLLQGLLPDVQVPTSVKDMRYCQVSFQDDHVSLESAFTVRPLPDEPKHLKCEMKGGKTVQMGQELQGEVDQYGNQIQAFSPSSLSSLSIAGVGLDSSNLKTTFQENTQSISVRGIKFIPGPPGNKDLCFTWREFSDFIRVQLISGPPAKLLLIDWPELKESIPVINGRDLQNPIIVQLCDQWDNPAPVQHVKISLTKASNLKVKAIYNKSIIEGPIIKLMILPDPEKPVRLNVKYDKDASFLAGGLFTDDSIIKNINPARISMKMWKLSTSGNRPPANDDYDNHTGIDLVGTIIATIKGSNEEDTDTPLFIGKVRTLEFPFVNDVKKQQQMAALTKEKDQLSQSIVMYKSLFEASQQLLNEMKCQVEEARLKEAQLRNELKIHNIDIPTTQQGIIADHLEVSLVVDWELIV

SEQ ID NO: 918108 - protein, 598 aa, Homo sapiens; identical to SEQ ID NO: 918107

SEQ ID NO: 918109 - protein, 195 aa, Homo sapiens
DLGSGMAAFYLYHPGLGVWVEHFPLFPMLSKSDPVLEGKPEKFSFGLLDLPFRVGVPFNIPLEFQDEFGHTSQLVTDIQPVLEASGLSLHYEEITKGPNCVIRGVTAKGPVNSCQGKNYNLKVTLPGLKEDSQILKIRLLPGHPRRLKVKPDSEILVIENGTAFPFQVEVLDESDNITAQPKLIVHCKVSLLEDI

SEQ ID NO: 918110 - protein, 730 aa, Homo sapiens
DLGSGMAAFYLYHPGLGVWVEHFPLFPMLSKSDPVLEGKPEKFSFGLLDLPFRVGVPFNIPLEFQDEFGHTSQLVTDIQPVLEASGLSLHYEEITKGPNCVIRGVTAKGPVNSCQGKNYNLKVTLPGLKEDSQILKIRLLPGHPRRLKVKPDSEILVIENGTAFPFQVEVLDESDNITAQPKLIVHCKFSGAPNLPVYVVDCSSSGTSILTGSAIQVQNIKKDQTLKARIEIPSCKDVAPVEKTIKLLPSSHVARLQIFSVEGQKAIQIKHQDEVNWIAGDIMHNLIFQMYDEGEREINITSALAEKIKVNWTPEINKEHLLQGLLPDVQVPTSVKDMRYCQVSFQDDHVSLESAFTVRPLPDEPKHLKCEMKGGKTVQMGQELQGEVDQYGNQIQAFSPSSLSSLSIAGVGLDSSNLKTTFQENTQSISVRGIKFIPGPPGNKDLCFTWREFSDFIRVQLISGPPAKLLLIDWPELKESIPVINGRDLQNPIIVQLCDQWDNPAPVQHVKISLTKASNLKVKAIYNKSIIEGPIIKLMILPDPEKPVRLNVKYDKDASFLAGGLFTDDSIIKNINPARISMKMWKLSTSGNRPPANDDYDNHTGIDLVGTIIATIKGSNEEDTDTPLFIGKVRTLEFPFVNDVKKQQQMAALTKEKDQLSQSIVMYKSLFEASQQLLNEMKCQVEEARLKEAQLRNELKIHNIDIPTTQQGIIADHLEVSLVVDWELIV

SEQ ID NO: 918111 - protein, 553 aa, Homo sapiens
VQFYTLIVHCKFSGAPNLPVYVVDCSSSGTSILTGSAIQVQNIKKDQTLKARIEIPSCKDVAPVEKTIKLLPSSHVARLQIFSVEGQKAIQIKHQDEVNWIAGDIMHNLIFQMYDEGEREINITSALAEKIKVNWTPEINKEHLLQGLLPDVQVPTSVKDMRYCQVSFQDDHVSLESAFTVRPLPDEPKHLKCEMKGGKTVQMGQELQGEVDQYGNQIQAFSPSSLSSLSIAGVGLDSSNLKTTFQENTQSISVRGIKFIPGPPGNKDLCFTWREFSDFIRVQLISGPPAKLLLIDWPELKESIPVINGRDLQNPIIVQLCDQWDNPAPVQHVKISLTKASNLKVKAIYNKSIIEGPIIKLMILPDPEKPVRLNVKYDKDASFLAGGLFTDDSIIKNINPARISMKMWKLSTSGNRPPANDDYDNHTGIDLVGTIIATIKGSNEEDTDTPLFIGKVRTLEFPFVNDVKKQQQMAALTKEKDQLSQSIVMYKSLFEASQQLLNEMKCQVEEARLKEAQLRNELKIHNIDIPTTQQGIIADHLEVSLVVDWELIV

SEQ ID NO: 918112 - protein, 656 aa, Homo sapiens
MIQLEIRKIDDPLQHHLQNQSIQKSVKQCHEQNMFGNIVNQNKGHFLLKQDCDTFDLHEKPLKSNLSFENQKRSSGLKNSAEFNRDGKSLFHANHKQFYTEMKFPAIAKPINKSQFIKQQRTHNIENAHVCSECGKAFLKLSQFIDHQRVHTGEKPHVCSMCGKAFSRKSRLMDHQRTHTELKHYECTECDKTFLKKSQLNIHQKTHMGGKPYTCSQCGKAFIKKCRLIYHQRTHTGEKPHGCSVCGKAFSTKFSLTTHQKTHTGEKPYICSECGKGFIEKRRLTAHHRTHTGEKPFICNKCGKGFTLKNSLITHQQTHTGEKLYTCSECGKGFSMKHCLMVHQRTHTGEKPYKCNECGKGFALKSPLIRHQRTHTGEKPYVCTECRKGFTMKSDLIVHQRTHTAEKPYICNDCGKGFTVKSRLIVHQRTHTGEKPYVCGECGKGFPAKIRLMGHQRTHTGEKPYICNECGKGFTEKSHLNVHRRTHTGEKPYVCSECGKGLTGKSMLIAHQRTHTGEKPYICNECGKGFTMKSTLSIHQQTHTGEKPYKCNECDKTFRKKTCLIQHQRFHTGKTSFACTECGKFSLRKNDLITHQRIHTGEKPYKCSDCGKAFTTKSGLNVHQRKHTGERPYGCSDCGKAFAHLSILVKHRRIHR

SEQ ID NO: 918113 - protein, 793 aa, Homo sapiens
SPGAWTSSESLASDDGGAPGILSQGAPSGLLMQPLSPRAPVRNPRVEHTLRETSRRLELAQTHERAPSPGRGVPRSPRGSGRSSPAPNLAPASPRPCPLQLVREQMAAALRRLRELEDQARTLPELQEQVRALRAEKARLLAGRAQPEPDGEAETRPDKLAQLRRLTERLATSERGGRARASPRADSPDGLAAGRSEGALQVLDGEVGSLDGTPQTREVAAEAVPETREAGAQAVPETREAGVEAAPETVEADAWVTEALLGLPAAAERELELLRASLEHQRGVSELLRGRLRELEEAREAAEEAAAGARAQLREATTQTPWSCAEKAAQTESPAEAPSLTQESSPGSMDGDRAVAPAGILKSIMKKRDGTPGAQPSSGPKSLQFVGVLNGELSAFPLLWQLLPGHRLGLEPQLCPSTGSVVWAILSFLIVKWERPHPHRRTPERAHRGGLADTSHPAPRYESSSSEDASDSDGDSENGGAEPPGSSSGSGDDSGGGSDSGTPGPPSGGDIRDPEPEAEAEPQQVAQGRCELSPRLREACVALQRQLSRPRGVASDGGAVRLVAQEWFRVSSQRRSQAEPVARMLEGVRRLGPELLAHVVNLADGNGNTALHYSVSHGNLAIASLLLDTGACEVNRQNRAGYSALMLAALTSVRQEEEDMAVVQRLFCMGDVNAKASQTGQTALMLAISHGRQDMVATLLACGADVNAQDADGATALMCASEYGRLDTVRLLLTQPGCDPAILDNEGTSALAIALEAEQDEVAALLHAHLSSGQPDTQSPERVTPWLPDSHTW

SEQ ID NO: 918114 - protein, 725 aa, Homo sapiens
SPGAWTSSESLASDDGGAPGILSQGAPSGLLMQPLSPRAPVRNPRVEHTLRETSRRLELAQTHERAPSPGRGVPRSPRGSGRSSPAPNLAPASPRPCPLQLVREQMAAALRRLRELEDQARTLPELQEQVRALRAEKARLLAGRAQPEPDGEAETRPDKLAQLRRLTERLATSERGGRARASPRADSPDGLAAGRSEGALQVLDGEVGSLDGTPQTREVAAEAVPETREAGAQAVPETREAGVEAAPETVEADAWVTEALLGLPAAAERELELLRASLEHQRGVSELLRGRLRELEEAREAAEEAAAGARAQLREATTQTPWSCAEKAAQTESPAEAPSLTQESSPGSMDGDRAVAPAGILKSIMKKRDGTPGAQPSSGPKSLQFVGVLNGEYESSSSEDASDSDGDSENGGAEPPGSSSGSGDDSGGGSDSGTPGPPSGGDIRDPEPEAEAEPQQVAQGRCELSPRLREACVALQRQLSRPRGVASDGGAVRLVAQEWFRVSSQRRSQAEPVARMLEGVRRLGPELLAHVVNLADGNGNTALHYSVSHGNLAIASLLLDTGACEVNRQNRAGYSALMLAALTSVRQEEEDMAVVQRLFCMGDVNAKASQTGQTALMLAISHGRQDMVATLLACGADVNAQDADGATALMCASEYGRLDTVRLLLTQPGCDPAILDNEGTSALAIALEAEQDEVAALLHAHLSSGQPDTQSPERVTPWLPDSHTW

SEQ ID NO: 918115 - protein, 168 aa, Homo sapiens
CVLTVMTLWTSACLSLGILTVKSNTEHPDQAPQASPASGIADEEKVKSSVHLWNQLLKSDPWEASLMCGAQSRDSGYTGMAIKGPLPVGTWIDDACQSPGGVGSAASPHADMRMSRPAFLLQGNAPGYNIDTKQFVEKTLDLMSWARAAWQVVGEQPVHASAVAPLAL

SEQ ID NO: 918116 - protein, 135 aa, Homo sapiens
NTAIMAVPSNFVPSQFQQSSLGSSDNGVCHQYTNCLKSGAETTQTRKYEDIDISHLMLIPLTFMSSVPSTKISGELYLRKNGGRVHAWKCYHSCSEIRGKWNYKKTPSDKAHKGEQLLWNTSKIYTSLKKDITQL

SEQ ID NO: 918117 - protein, 172 aa, Homo sapiens
MPAKLPPASTPAQSPVCLQQPLVTLLSPTRTMLGSGGIDTHTEDPLETVMSPGKEESSPLQQAASGVLMAGATEGHQEFPPCSPCERSRLRLAQAIRKAKQRDEPRGRSLLTHDQACPRVTDDEAALALETNQQAWVFPPQSTESSRRCEGQPGWERGNGGRGADRREAAPS

SEQ ID NO: 918118 - protein, 243 aa, Homo sapiens
MPLHSSLGDRASFHLKEKKKRKKFLQHVSSKYKLSTFLKCGKAFNQSSNLTTHKKIHTGEKPYKCEDCGKAFNFSSNLTTHKKIHTEEKPYKCEECGKTFSWSSILITHKMIHTGEKPYKCERCGKAFNHSATFFRIRKFILEGNHTMTPLKFKLDLPSNRPTLPEGKGPLTPMGTFFGGSPGSKKMGTVLQKSMAAVPAVVGDNCCTFYGGCEGPELWKPTLFISDQTNKQVVRTCGCGVNR

SEQ ID NO: 918119 - protein, 232 aa, Homo sapiens
TAHGFQPHASVEPACQAGTWNLKQLSQEGPRRYRRPRTRFLSKQLTALRELLEKTMHPSLATMGKLASKLQLDLSVVKIWFKNQRAKWKRQQRQQMQTRPSLGPANQTTSVKKEETPSAITTANIRPVSPGISDANDHDLREPSGIKNPGGASASARVSSWDSQSYDIEQICLGASNPPWASTLFEIDEFVKIYDLPGEDDTSSLNQYLFPVCLEDCILNPLALEMEGIRHM

SEQ ID NO: 918120 - protein, 235 aa, Homo sapiens
LWFSTQPGSASGVVRSSRWPRGLAGFRSEAADLLGAQLASPSGSRTGAAGGAACQSCAMRSHSSALGRSMGLGALEQGAVLVGKAPQRRWAGIAGGPSAAPGPGAKSLIARGQQGRPAAPSAGPAKLTPIRNSSWPASAARSPGSRSRLSLHTFPQAEGVGSGLGQPRNGLPQCRGGLKGSSSATKVGAQAEEVPRASEGSEDCQHAVTSHRKSLSDISFKDWGQVGSHCNLSWH

SEQ ID NO: 918121 - protein, 237 aa, Homo sapiens
MTHCILELLGSSNPSTSASQVGGTTGAHHHIWLIKKQKTKNPHKHIYILMLPGPTIATSATRPPPASNEVSTSVLSSTITPAPPMSVLSHHTLHITSNSSTSSSSTTSSTSTSSFITSSFTTSTSITSTSSTSSFTTSTATTSTSISITSTSSISSSITSTSTSTTSTSSNSTTSTVTSTSTSTSTTSTITSTSTSTSITSTSSTSTSTSSTFTSTTSTSTTSTSTTSTSTSATSSI

SEQ ID NO: 918122 - protein, 590 aa, Homo sapiens
SLSDYQLTLSLGLYLPSYDSLLAIAPNPVFHTPVAQATPRYAGPLQSLEHRTNQLLPLSWAVVGLPSRKPLPLPPAPCLPVSMQQTCAKSLLSVQYQTFLAQSLWALFTSSLAISLVFAVIPFCRDVKVLASVMALAGLAMGCIDTVANMQLVRMYQKDSAVFLQVLHFFVGFGALLSPLIADPFLSEANCLPANSTANTTSRGHLFHVSRVLGQHHVDAKPWSNQTFPGLTPKDGAGTRVSYAFWIMALINLPVPMAVLMLLSKERLLTCCPQRRPLLLSADELALETQPPEKEDASSLPPKFQSHLGHEDLFSCCQRKNLRGAPYSFFAIHITGALVLFMTDGLTGAYSAFVYSYAVEKPLSVGHKVAGYLPSLFWGFITLGRLLSIPISSRMKPATMVFINVEVLAAVCGAHPSQQLAMSVRKASAGPGPPVFTLVPSCSEPSSQWKAVEARDPTTVGVVVTFLVLLIFSYNVVFLFVGTASLGLFLSSTFPSMLAYTEDSLQYKGCATTVLVTGAGVGEMVLQMLVGSIFQAQGSYSFLVCGVIFGCLAFTFYILLLFFHRMHPGLPSVPTQDRSIGMENSECYQR

SEQ ID NO: 918123 - protein, 599 aa, Homo sapiens
RGPPQPGRPSRGRHSGTGLAGTRSASPSACAMGCDGRVSGLLRRNLQPTLTYWSVFFSFGLCIAFLGPTLLDLLLSDAQLAAQISWVFFSQQLCLLLGSALGGVFKRTLAQSLWALFTSSLAISLVFAVIPFCRDVKVLASVMALAGLAMGCIDTVANMQLVRMYQKDSAVFLQVLHFFVGFGALLSPLIADPFLSEANCLPANSTANTTSRGHLFHVSRVLGQHHVDAKPWSNQTFPGLTPKDGAGTRVSYAFWIMALINLPVPMAVLMLLSKERLLTCCPQRRPLLLSADELALETQPPEKEDASSLPPKFQSHLGHEDLFSCCQRKNLRGAPYSFFAIHITGALVLFMTDGLTGAYSAFVYSYAVEKPLSVGHKVAGYLPSLFWGFITLGRLLSIPISSRMKPATMVFINVEVLAAVCGAHPSQQLAMSVRKASAGPGPPVFTLVPSCSEPSSQWKAVEARDPTTVGVVVTFLVLLIFSYNVVFLFVGTASLGLFLSSTFPSMLAYTEDSLQYKGCATTVLVTGAGVGEMVLQMLVGSIFQAQGSYSFLVCGVIFGCLAFTFYILLLFFHRMHPGLPSVPTQDRSIGMENSECYQR

SEQ ID NO: 918124 - protein, 546 aa, Homo sapiens
RGPPQPGRPSRGRHSGTGLAGTRSASPSACAMGCDGRVSGLLRRNLQPTLTYWSVFFSFGLCIAFLGPTLLDLLLSDAQLAAQISWVFFSQQLCLLLGSALGGVFKRTLAQSLWALFTSSLAISLVFAVIPFCRDVKVLASVMALAGLAMGCIDTVANMQLVRMYQKDSAVFLQVLHFFVGFGALLSPLIADPFLSEANCLPANSTANTTSRGHLFHVSRVLGQHHVDAKPWSNQTFPGLTPKDGAGTRVSYAFWIMALINLPVPMAVLMLLSKERLLTCCPQRRPLLLSADELALETQPPEKEDASSLPPKFQSHLGHEDLFSCCQRKNLRGAPYSFFAIHITGALVLFMTDGLTGAYSAFVYSYAVEKPLSVGHKVAGYLPSLFWGFITLGRLLSIPISSRMKPATMVFINVEVLAAVCGAHPSQQLAMSVRKASAGPGPPVFTLVPSCSEPSSQWKAVEARDPTTVGVVVTFLVLLIFSYNVVFLFVGTASLGLFLSSTFPSMLAYTEDSLQYKGCATTVLVTGAGVGEMVLQMLVGSVCGDL

SEQ ID NO: 918125 - protein, 266 aa, Homo sapiens
LKTRGLMETEPLQAKKGEYNFHARASQDSGLVSKPGLQELGLTLQPKRHILEAWVWSHFRLRNKTTGPGSLEDEGGPYTDCSFNPMPIPTCEQSFHVFTLPKGKPRDTCICQQDWKQVRHTEGEARSCVGGGVAEGRGMPGMRLVCRLAHGHFPRKGQRRRSLTVWKAETSRADCLGAPNIRTAPLGRSEKRTAICFSTGAQDSSQRAPFRLQNPGQLLQLGMHSLHLQPELPTTDPAFFCKLHFIKGNDPYCLTISHVKSVLTFS

SEQ ID NO: 918126 - protein, 252 aa, Homo sapiens
LKTRGLMETEPLQAKKGEYNFHARASQDSGLVSKPGLQELGLTLQPKRHILEAWVWSHFRLRNKTTGPGSLEDEGGPYTDCSFNPMPIPTCEQSFHVFTLPKGKPRDTCICQQDWKQVRHTEGEARSCVGGGVAEGRGMPGMRLVCRLAHGHFPRKGQRRRSLTVWKAETSRADCLGARGTALHRPKEENAIYFSTKYPDSASREVREENRDLFQHRGSGQFPAGSVSSPEPWTAPPAWNALPPPPTRAPHN

SEQ ID NO: 918127 - protein, 134 aa, Homo sapiens
LKTRGLMETEPLQAKKGEYNFHARASQDSGLVSKPGLQELGLTLQPKRHILEAWVWSHFRLRNKTTGPGSLEDEGGPYTDCSFNPMPIPTCEQSFHVFTLPKGKPRDTCICQQDWKQVRHTEGEARSCVGGGVV

SEQ ID NO: 918128 - protein, 228 aa, Homo sapiens
LKTRGLMETEPLQAKKGEYNFHARASQDSGLVSKPGLQELGLTLQPKRHILEAWVWSHFRLRNKTTGPGSLEDEGGPYTDCSFNPMPIPTCEQSFHVFTLPKGKPRDPASANKTGSRKGQRRRSLTVWKAETSRADCLGAPNIRTAPLGRSEKRTAICFSTGAQDSSQRAPFRLQNPGQLLQLGMHSLHLQPELPTTDPAFFCKLHFIKGNDPYCLTISHVKSVLTFS

SEQ ID NO: 918129 - protein, 134 aa, Homo sapiens; identical to SEQ ID NO: 918127

SEQ ID NO: 918130 - protein, 134 aa, Homo sapiens; identical to SEQ ID NO: 918127

SEQ ID NO: 918131 - protein, 134 aa, Homo sapiens; identical to SEQ ID NO: 918127

SEQ ID NO: 918132 - protein, 134 aa, Homo sapiens; identical to SEQ ID NO: 918127

SEQ ID NO: 918133 - protein, 169 aa, Homo sapiens
MPPHAPRYPFNKRELRQRSGYQLGKPLRELFCLFYSFWLSASCVNRIVCAGPSPLPGFTGKVLEAGERSYQHVPPSESSVRRKHVEHVLSICWELVKAVECRWSSCRDRATGAGDGSGSAVGGRWLGPRTLRVAWLRHSSDNCAGYIYSNPVYVISTTAIWGGCTGKKF

SEQ ID NO: 918134 - protein, 394 aa, Homo sapiens
NLLLRKGCKNVDEFKMHKKGYNRHNQCLTTSHSKIFQCDKYVKVFHKFSNSNRHKIRHTSKKPFKCKECGKLFCILSHLAQHKKIHTGEKSYKCEEYGKAFNESSNCTTHKRITEKKPYKCKECGKAFNWFSHFTTHKRIHTGEKPYQCEKCGKFFNQSTNLTTHKRIHTGEKPYKCEECGKAFNQSSNLTEHKKIHTKEQPYKCEKCGKAFKWSSTLTKHKRIHNGEKPYKCEECGKAFNRSSTLNRHKITHTGGKPYKYKECGKAFNQSSTLTIHKIIHTVEKFYKCEECGKAFSRISHLTTHKRIHTGEKPYKCEECGRAFNQSSTLTTHKRIHTGEKPYECEECGKAFNRSSTLTTHKIIHSGEKIYKCKECGKAFRRFSHLTRHKTIHT

SEQ ID NO: 918135 - protein, 183 aa, Homo sapiens
GSEGAGKEGRLQLRMEPETVVEFRVRKICCLDEELNRAKTIVAPTPGFTHKTTWAFVRDSGFKLLEVQMTSGFSAPPEYWLQCLSVHYSSKLMMQGRMNSNPRDPEMRKGCLTYSKKTKEAQRPEKSAGKGRRSEMQSEQWQAPRVCGKDFRFHPEEEDRSLESFDQGSEMKYLRLTKNYSDI

SEQ ID NO: 918136 - protein, 183 aa, Homo sapiens; identical to SEQ ID NO: 918135

SEQ ID NO: 918137 - protein, 183 aa, Homo sapiens; identical to SEQ ID NO: 918135

SEQ ID NO: 918138 - protein, 394 aa, Homo sapiens
GKANSTGILSVRGGVVVRDIGDTTIQLSWSRGFDNHSPIAKYTLQARTPPAGKWKQVRTNPANIEGNAETAQVLGLTPWMDYEFRVIASNILGTGEPSGPSSKIRTREAGESPVCPKKLSSGQRPWHHFIGNAKPAAIMLSSNPAHRVQTLTKQRRTEHQDSAEEVEPPESSSSTGRCRKDHCTALTQTRITSCPPSTHPLPLTRIHAAGPMSREYQNGDGFGYLLSFRRQGSTHWQTARVPGADAQYFVYSNESVRPYTPFEVKIRSYNRRGDGPESLTALVYSAEEEMNVTWEPVQQDMNGILLGYEIRYWKAGDKEAAADRVRTAGLDTSARVSGLHPNTKYHVTVRAYNRAGTGPASPSANATTMKPPPHPGTVISHSVAMLILIGSLEL

SEQ ID NO: 918139 - protein, 553 aa, Homo sapiens
MHYPMGHRLVHGTDPLTLCVPRMLPITDRLLHLLGLEKTAFRIYAVSTLLLFLLFFLFRLLLRFLRLCRSFYITCRRLRCFPQPPRRNWLLGHLGMYLPNEAGLQDEKKVLDNMHHVLLVWMGPVLPLLVLVHPDYIKPLLGASAAIAPKDDLFYGFLKPWLGDGLLLSKGDKWSRHRRLLTPAFHFDILKPYMKIFNQSADIMHAKWRHLAEGSAVSLDMFEHISLMTLDSLQKCVFSYNSNCQEKMSDYISAIIELSALSVRRQYRLHHYLDFIYYRSADGRRFRQACDMVHHFTTEVIQERRRALRQQGAEAWLKAKQGKTLDFIDVLLLARDEDGKELSDEDIRAEADTFMFEGHDTTSSGISWMLFNLAKYPEYQEKCREEIQEVMKGRELEELEWDDLTQLPFTTMCIKESLRQYPPVTLVSRQCTEDIKLPDGRIIPKGIICLVSIYGTHHNPTVWPDSKVYNPYRFDPDNPQQRSPLAYVPFSAGPRNCIGQSFAMAELRVVVALTLLRFRLSVDRTRKVRRKPELILRTENGLWLKVEPLPPRA

SEQ ID NO: 918140 - protein, 158 aa, Homo sapiens
QLFPRLSQFSSSPEVMADEWFIFQLHVFDLHTGGPQLKGKPELWSAVMNINCPVACGQMPSPQGPLAQTQGALVTWAQQVWSREQNTVVMMAAKAHLGPETRGGGGWPDPPQMRRGQLQDKERSDHACSISAGSSSLAPICMVLLIFFIIITLKSFEC

SEQ ID NO: 918141 - protein, 158 aa, Homo sapiens; identical to SEQ ID NO: 918140

SEQ ID NO: 918142 - protein, 1317 aa, Homo sapiens
MLLLASTEPSSLCYVETVDIDGETNLKFRQALMVTHKELATIKKMASFQGTVTCEAPNSRMHHFVGCLEWNDKKYSLDIGNLLLRGCRIRNTDTCYGLVIYAGFDTKIMKNCGKIHLKRTKLDLLMNKLVVVIFISVVLVCLVLAFGFGFSVKEFKDHHYYLSGVHGSSVAAESFFVFWSFLILLSVTIPMSMFILSEFIYLGNSVFIDWDVQMYYKPQDVPAKARSTSLNDHLGQVEYIFSDKTGTLTQNILTFNKCCISGRVYGAAPTPELPAGSSIFKGLRVPENQSHVVETEVSFRPKIARGVGSRATGLACVAAPVAPGSLKLGVRGYGIPNGGPVGAEAGSCVFPQGRIQRPRPDLSGPPTAGPCPRHPQENPYLWNKFADGKLLFHNAALLHLVRTNGDEAVREFWRLLAICHTVMVRESPHQLLYQAASPDEGALVTAARNFGYVFLSRTQDTVTIMELGEERVYQVLAIMDFNSTRKRMSVLVRKPEGAICLYTKGADTVIFERLHRRGAMEFATEEALAAFAQETLRTLCLAYREVAEDIYEDWQQRHQEASLLLQNRAQALQQVYNEMEQDLRLLGATAIEDRLQDGVPETIKCLKKSNIKIWVLTGDKQGSQCGAGRRGAELVCFAETAVNIGFACELLSENMLILEEKEISRILETYWENSNNLLTRESLSQVKLALVINGDFLDKLLVSLRKEPRALAQNVNMDEAWQELGQSRRDFLYARRLSLLCRRFGLPLAAPPAQDSRARRSSEVLQERAFVDLASKCQAVICCRVTPKQKALIVALVKKYHQVVTLAIGDGANDINMIKSGCLCPAAADVGVGLAGQEGMQAVQNSDFVLGQFCFLQRLLLVHGRWSYVRICKFLRYFFYKSMASMMVQVWFACYNGFTGQPLYEGWFLALFNLLYSTLPVLYIGLFEQDVSAEQSLEKPELYVVGQKDELFNYWVFVQAIAHGVTTSLVNFFMTLWISRDTAGPASFSDHQSFAVVVALSCLLSITMEVGKVLTSPGPWTWPMEASSPGDPCFGGIARCPSWTPGAGVLVQAPLGPGFTPPLPVQVILIIKYWTALCVATILLSLGFYAIMTTTTQSFWLFRVSPTTFPFLCEPPWGSGTGDADLSVMSSPSILLVVLLSVSINTFPVLALRVIFPALKELRAKEEKVEEGPSEEIFTMEPLPHVHRESRARRSSYAFSHRQLTLESQPDSSEEKSAFLKPSTPFRKSWQKEPHTPKEGTVPLPDKTHKSQVETLPPSLEESSTSTSEQPMEVELWPAEKQSSSSMEWLLVPGEEQLSLPPEEQSLPSAEGTRVQQ

SEQ ID NO: 918143 - protein, 478 aa, Homo sapiens [sequence omitted]

SEQ ID NO: 918144 - protein, 277 aa, Homo sapiens
MQAASSKMVSAEISENRKRQWPTKSQTDRGASAGKRRCFWLGMEGLETAEGSNSESSDDDSEEAPSTSGMGFHAPKIGSNGVEMAAKFPSGSQRARVVNTDHGSPEQLQIPVTDSGRHILEDSCAELGESKEHMESRMVTETEETQEKKAESKEPIEEEPTGAGLNKDKETEERTDGERVAEVAPEERENVAVAKLQESQPGNAVIDKETIDLLAFTSVAELELLGLEKLKCELMALGLKCGGTLQERAARLFSVRGLAKEQIDPALFAKPLKGKKK

SEQ ID NO: 918145 - protein, 418 aa, Homo sapiens
MLASSRGAGRVAAPGVSERLEVRVVGDMAEAAALVWIRGPGFGCKAVRCASGRCTVRDFIHRHCQDQNVPVENFFVKCNGALINTSDTVQHGAVYSLEPRLCGGKGGFGSMLRALGAQIEKTTNREACRDLSGRRLRDVNHEKAMAEWVKQQAEREAEKEQKRLERLQRKLVEPKHCFTSPDYQQQCHEMAERLEDSVLKGMQAASSKMVSAEISENRKRQWPTKSQTDRGASAGKRRCFWLGMEGLETAEGSNSESSDDDSEEAPSTSGMGFHAPKIGSNGVEMAAKFPSGSQRARVVNTDHGSPEQLQIPVTDSGRHILEDSCAELGESKEHMESRMVTETEETQEKKAESKEPIEEEPTGAGLNKDKETEERTDGERVAEVAPEERENVAVAKLQESQPGNANWSCWVWRSSNVN

SEQ ID NO: 918146 - protein, 377 aa, Homo sapiens
AVPPALQPQPEQQSFSQMHLGHRGHMRRSESTYSVNSTGRRGRGTLGQPPPGRRMEPSDAGHSASKSPCMLVALRPTNVDREGDKFFQSHYTYNPQFEYQEPMPMAVVKYCEASGQFIHQAVGIIEAVLEKFGTYEHFEAATGRQLLTKCQIWSIVEVVVQLSEDLLSQAVMMVENSRPTLAVNLTRARQYWLEGMLWHEIVSAVWAPTTCGAVTTRASRGTTRRAGCGTGYGRRTPRGGPGHPAQRAAPQAAVPVARCAALLCYTSRHAVRLSFRQLFQDLARYVRDADVRWDKDQVYLNGILCILGHRQTIDFPLLTSLGKVSYEDVDHLRPHGVLDNTRMPHLMQDLARYRQQLKHIMATNRLDVAELGRLLPD

SEQ ID NO: 918147 - protein, 221 aa, Homo sapiens
MTETREPAETGGYASLEEDDEDLSPGWKGVAQSWLKCSLELLGSSDPPASASREAGTTGPEHSSDSEYTLSEPDSEEEEDEEEEEEETTDDPEYDPGYKVKQRLGGGRGGPSRRAPRAAQPPAQPCQLCGRSPLGEAPPGTPPCRLCCPATAPQEAPAPEGRALGEEEEEPPRAGEGRPAGREEEEEEEEEGTYHCTECEDSFDNLGELHGHFMLHARGEV

SEQ ID NO: 918148 - protein, 120 aa, Homo sapiens
MTETREPAETGGYASLEEDDEDLSPGPEHSSDSEYTLSEPDSEEEEDEEEEEEETTDDPEYDPGYKVKQRLGGGRGGPSRRAPRAAQPPAQPCQLCGRSPLGEAPPGTPPARALHAACPG

SEQ ID NO: 918149 - protein, 188 aa, Homo sapiens
MTETREPAETGGYASLEEDDEDLSPGPEHSSDSEYTLSEPDSEEEEDEEEEEEETTDDPEYDPGYKVKQRLGGGRGGPSRRAPRAAQPPAQPCQLCGRSPLGEAPPGTPPCRLCCPATAPQEAPAPEGRALGEEEEEPPRAGEGRPAGREEEEEEEEEGTYHCTECEDSFDNLGELHGHFMLHARGEV

SEQ ID NO: 918150 - protein, 416 aa, Homo sapiens
GRTEGKIERGHDFGFGVGVRGMSHARVGALGTSDQQIPDPHTSSPNPQEGPGEWLTLDSQVIMADSEICGTKDPTFHRILLDTRFELPLDIPEEEARYWAKKLEQLNAMRDQDEYSFQDEQDKPLPVPSNQCCNWNYFGWGEQHNDDPDSAVDDRDSDYRSETSNSIPPPYYTTSQPNASVHQYSVRPPPLGSRESYSDSMHSYEEFSEPQALSPTGSSRYASSGELSQGSSQLSEDFDPDEHSLQGSDMEDERDRDSYHSCHSSVSYHKDSPRWDQDEEELEEDLEDFLEEEELPEDEEELEEEEEEVPDDLGSYAQREDVAVAEPKDFKRISLPPAAPGKEDKAPVAPTEAPDMAKVAPKPATPDKVPAAEQIPEAEPPKDEERAKANWLRAFNKVRMQLQEENSLEEMTLKEK

SEQ ID NO: 918151 - protein, 103 aa, Homo sapiens
GRTEGKIERGHDFGFGVGVRGMSHARVGALGTSDQQIPDPHTSSPNPQEGPGEWLTLDSQVIMADSEICGTKDPTFHRILLDTRFELPLGEYRGPGPSPSPSP

SEQ ID NO: 918152 - protein, 135 aa, Homo sapiens
MNPASRSNYLPSSPDARMGEQFRMRPFLLLTYFIIHAHLNVGYKVKGSTPQVIMQTTPVKTLRMLSSQVRAGSCACGQPTPKEEESGKKGRKTPDVCQRIKPQVKSSNHTSVLQDAYLAPSKSNLLSFHSCSKAF

SEQ ID NO: 918153 - protein, 243 aa, Homo sapiens
MHSRRFLSSQAFRGTTEPRVLCMVLPQNPPDPILAQDLCGDGSVIDVLHKLHQGGLGLLIHQALHVLQPERAQGQEGRLQDGFNIHLLQALQDPGDQQGPVRVHVQAPGTSRKNLVAKFQRLAEPSMEAVVKVKPHDKDAKMKYQECNKIVKQKAFERAIAGDEHKRSVVDSLDIESMTIEGEYSGPKLEDDKVTITFMKGLMQWYKDQKKLHQKCAYQVMHLSGTGHPGTLGWHHSTARRGH

SEQ ID NO: 918154 - protein, 237 aa, Homo sapiens
MHSRRFLSSQAFRGTTEPRVLCMVLPQNPPDPILAQDLCGDGSVIDVLHKLHQGGLGLLIHQALHVLQPERAQGQEGRLQDGFNIHLLQALQDPGDQQGPVRVHVQAPGTSRKNLVAKFQRLAEPSMEAVVKVKPHDKDAKMKYQECNKIVKQKAFERAIAGDEHKRSVVDSLDIESMTIEGEYSGPKLEDDKVTITFMKGLMQWYKDQKKLHQKCAYQDFRQKSGIITSQDCVQTT

SEQ ID NO: 918155 - protein, 400 aa, Homo sapiens
MLQFPLLLLPHFLLPPLSKKSLLPPTMILRPYQPCGTVKEFDTNFTYVQQSEFYLEPNIKYVFQVRCQETGKRYWQPWSSPFFHKTPETVPQVTSKAFQHDTWNSGLTVASISTGHLTSDNRGDIGLLLGMIVFAVMLSILSLIGIFNRSFRTGIKRRILLLIPKWLYEDIPNMKNSNVVKMLQENSELMNNNSSEQVLYVDPMITEIKEIFIPEHKPTDYKKENTGPLETRDYPQNSLFDNTTVVYIPDLNTGYKPQISNFLPEGSHLSNNNEITSLTLKPPVDSLDSGNNPRLQKHPNFAFSVSSVNSLSNTIFLGELSLILNQGECSSPDIQNSVEEETTMLLENDSPSETIPEQTLLPDEFVSCLGIVNEELPSINTYFPQNILESHFNRISLLEK

SEQ ID NO: 918156 - protein, 264 aa, Homo sapiens
MEFWANSCFHLYRAPYFWIKRRILLLIPKWLYEDIPNMKNSNVVKMLQENSELMNNNSSEQVLYVDPMITEIKEIFIPEHKPTDYKKENTGPLETRDYPQNSLFDNTTVVYIPDLNTGYKPQISNFLPEGSHLSNNNEITSLTLKPPVDSLDSGNNPRLQKHPNFAFSVSSVNSLSNTIFLGELSLILNQGECSSPDIQNSVEEETTMLLENDSPSETIPEQTLLPDEFVSCLGIVNEELPSINTYFPQNILESHFNRISLLEK

SEQ ID NO: 918157 - protein, 227 aa, Homo sapiens
MKNSNVVKMLQENSELMNNNSSEQVLYVDPMITEIKEIFIPEHKPTDYKKENTGPLETRDYPQNSLFDNTTVVYIPDLNTGYKPQISNFLPEGSHLSNNNEITSLTLKPPVDSLDSGNNPRLQKHPNFAFSVSSVNSLSNTIFLGELSLILNQGECSSPDIQNSVEEETTMLLENDSPSETIPEQTLLPDEFVSCLGIVNEELPSINTYFPQNILESHFNRISLLEK

SEQ ID NO: 918158 - protein, 243 aa, Homo sapiens
GSEDKRGAGTPRQSREIEMQKLPEAVQLIEKASMMYLENGTPDTAAMALERAGKLIENVDPEKAVQLYQQTANVFENEERLRQAVELLGKASRLLVRGRRFDEAALSIQKEKNIYKEIENYPTCYKKTIAQVLVHLHRNDYVAAERCVRESYSIPGFNGSEDCAALEQLLEGYDQQDQDQVSDVCNSPLFKYMDNDYAKLGLSLVVPGGGIKKKSPATPQAKPDGVTATAADEEEDEYSGGLC

SEQ ID NO: 918159 - protein, 418 aa, Homo sapiens
DSAQCCGARASLLGRSAPEDCGGGCLCIGGSLAASLASTCWVPVASLPHLWQPKMSSGEQHRSVENHRPRRAPCVEGTIGLPQKLLGEPLSSGILLSLWAGTVLRSSFDVFLIDSLEKKVKRTNSLKTGFLKWKPDYDSAASEYGKAAVAFKNAKQFEQAKDACLREAVAHENNRALFHAAKAYEQAGMMLKEMQKLPEAVQLIEKASMMYLENGTPDTAAMALERAGKLIENVDPEKAVQLYQQTANVFENEERLRQAVELLGKASRLLVRGRRFDEAALSIQKEKNIYKEIENYPTCYKKTIAQVLVHLHRNDYVAAERCVRESYSIPGFNGSEDCAALEQLLEGYDQQDQDQVSDVCNSPLFKYMDNDYAKLGLSLVVPGGGIKKKSPATPQAKPDGVTATAADEEEDEYSGGLC

SEQ ID NO: 918160 - protein, 204 aa, Homo sapiens
PGPSLTGAALAPGGGGREGSGLRGLGALVPAGLPGLGVLWVTPPGVGVSSAAPREAPWVHPAGSQKKRTRVGGDSAQCCGARASLLGRSAPEDCGGGCLCIGGSLAASLASTCWVPVASLPHLWQPKMSSGEQHRSVENHRPRRAPCVEGTIGLPQKLLGEPLSSGILLSLWAGTVLRSSFDVYVLPPLVQYVVGTLQMFVGLN

SEQ ID NO: 918161 - protein, 283 aa, Homo sapiens
MYDSAASEYGKAAVAFKNAKQFEQAKDACLREAVAHENNRALFHAAKAYEQAGMMLKEMQKLPEAVQLIEKASMMYLENGTPDTAAMALERAGKLIENVDPEKAVQLYQQTANVFENEERLRQAVELLGKASRLLVRGRRFDEAALSIQKEKNIYKEIENYPTCYKKTIAQVLVHLHRNDYVAAERCVRESYSIPGFNGSEDCAALEQLLEGYDQQDQDQVSDVCNSPLFKYMDNDYAKLGLSLVVPGGGIKKKSPATPQAKPDGVTATAADEEEDEYSGGLC

SEQ ID NO: 918162 - protein, 182 aa, Homo sapiens
LAKARAGSLSLQGGMEGEARVRTGAARGTCGPARVPGGRRLGRPRTRSSRPALPAPGNEGLSTRASGCSGRCTRSPSSASPPALRSISRRALAAFPRGRAQDLQPAMPEPPASVGSCAARASPMSAAPCSRAPSPIDHPRAEECERTARDWQAAPPAAPVRDPLGEASWASESGGDVENLCV

SEQ ID NO: 918163 - protein, 151 aa, Homo sapiens
MGRNAHLLLAAQGSLLDYGSKTEGYPTYISTVEHRIMSFSIGEADLREHSKVLCKYEKLRLIHQKQSSQHPKTPDSSEGTLSTLPVGCMESQIHIPATREQTEGLSSSLWPPQKEMRDSRPQDMKSLTWNGMVNKGRLWQWQCIKRSINGN

SEQ ID NO: 918164 - protein, 1093 aa, Homo sapiens
MGESITTGKVVCPKMGERREIGDSGSRPPAPPGQSLSSDPRPLSPGYGLPQRARAGAVARDAEAPSLADFGLLGARVGPGRAESEAAGGSGGRSGWAGALTSDPGPGAGGRSPATSWWPRSQPGRAVRRAAWQPRAQPPGSGRDMELSLESLGGLHSVAHAQAGELLSPGHARSAAAQHRGLVAPGRPGLVAGMASLLDGGGGGGGGGAGGAGGAGSAGGGADFRGELAGPLHPAMGMACEAPGLGGTYTTLTPLQHLPPLAAVADKFHQHAAAAAVAGAHGGHPHAHPHPAAAPPPPPPPQRLAASVSGSFTLMRDERAALASVGHLYGPYGKELPAMGSPLSPLPNALPPALHGAPQPPPPPPPPPLAAYGPPGHLAGDKLLPPAAFEPHAALLGRAEDALARGLPGGGGGTGSGGAGSGSAAGLLAPLGGLAAAGAHGPHGGGGGPGGSGGGPSAGAAAEEINTKEVAQRITAELKRYSIPQAIFAQRILCRSQGTLSDLLRNPKPWSKLKSGRETFRRMWKWLQEPEFQRMSALRLAAGRRPMPGASAPSPARAPRQPGTPYQEARPRSAPLPVCTVAKREKGIVPPPRPPVAASAPFGSAARFFVVRPRDRYPLPLPSGRWQRSPENGGGGAAPGTLGPRRPEAFTPRPGARPAQFGRGSGARAPARLALGDNSRGGWRLIDRFSEHKGEKGGGSGRRPTSKEAEGLAAVPPGSPSRQGGWAKRGQRGRSGNLDDFSLSCSPPHDTYSGTRALTIDRRSYPHTATALEVQCEASDLGATENISQSVTEGQTAGEKSHGGGVGSPQPGQQHPAPALSGHRLLRLHLTLHPGVRGGTGGVSAAPGTPSLPQGAGALRMINPDHAARLLSAGSAAHAVAPPRGPAAAGFTPSTLRTCRVSGALGAASTPPDSAWGAFSSGRCANEKRLSGGKSRRLGGDGRMRPHLHLTRRRPNAGARKGNSAPAPPPHHFNPAAEDSPPFLLRHPHSPLREHRGPPQASSKENFAPRVSRRACPARGGPRVSAGVVRPALRFPLCPSSSKYDDVVGIFHHPANAVPQHPGSCGVGLGPPRCAHRSLAGVWIPERARPPTA

SEQ ID NO: 918165 - protein, 136 aa, Homo sapiens
MNAFLQWKALPSAVRESVVTWTAYSPSTSACSLVGYGPIRVCCLRYMGYHYPKCLHTYPPLTCLPCSGLTQSGKLRLAFALFSSIFNEHVVICSHIISFNPHGPTHYQMGRISSPGLVTHGSLLTTESYNKDTRNS

SEQ ID NO: 918166 - protein, 245 aa, Homo sapiens
MLERGAESAAGATDPSPTGKEPVTKEAPHQGPPQKPSQSAPGPTASAGSPPRPRRRPPPQRPHRCPDCDKAFSYPSKLATHRLAHGGARPHPCPDCPKAFSYPSKLAAHRLTHSGARPHPCPHCPKSFGHRSKLAAHLWTHAPTRPYPCPDCPKSFCYPSKLAAHRHTHHATDARPYPCPHCPKAFSFPSKLAAHRLCHDPPTAPGSQATAWHRCSSCGQAFGQRRLLLLHQRSHHQVEHKGERD

SEQ ID NO: 918167 - protein, 154 aa, Homo sapiens
MVWVLRDEPGQSELSLNQDLEVAGCEPGASFWCQKVKKCFKKGTGGYRKDTGDSLKELLMAKIEEFEQKYEMKLLDPHTALLKKVAVSAAFLFSQASSFHLAIQTQTGPIPKADSALSQDTTPLVGRKKKLSKRLVLTSRKQFFSIIRITSMTD

SEQ ID NO: 918168 - protein, 101 aa, Homo sapiens
ESERGCRDTEMADEIDWLDLPGRWAYGVDGGGRIFFINDEEKSTSWVHPGTKSPIQSGHTSCPGLPKGWEVDSTQEGAVYFINHNERRNTFLHPKTAQVPE

SEQ ID NO: 918169 - protein, 154 aa, Homo sapiens
ESERGCRDTEMADEIDWLDLPGRWAYGVDGGGRIFFINDEEKSTSWVHPGTKSPIQSGHTSCPGLPKGWEVDSTQEGAVYFIKHTGRGSEAGDAAAGQDVEAVGREGVRGVYEGGHHTGGGKASSGGVTFPIPHRQDLPALRSATIYHLHQLSR

SEQ ID NO: 918170 - protein, 155 aa, Homo sapiens
MAFGVQSPTECKNCRIMLLNQRSSGFGVLQDKVGGNVSHYKVALSLQLFIRETGTEEGVSFLGYSSHLPFPGLSAEHCVVVGPGGPRASPEFSKDLAPEDPDVPLKVKQAYKRLMGGELVSVLELPLPWPCPGRISGSMATDQRPDCATDLHIGY

SEQ ID NO: 918171 - protein, 102 aa, Homo sapiens
MFLLPFAGPPDATSTHLPENKTGTEHLLLACVVAGPRRVTQCCRISASHYRSVIHPLPPTDGFAGKSKSKIKQKSIIFCSFLLNSSAGQMEFYNLELNERWL

SEQ ID NO: 918172 - protein, 416 aa, Homo sapiens
MDASRPKSSESQSSLEAPRPGPNPSPNVVNKPLQRDSPGMVADRLPPKTGAVVIDMGTGTCKVGFAGQASPTYTVATILGCQPKKPATSGQSGLQTFIGEAARVLPELTLVQPLRSGIVVDWDAAELIWRHLLEHDLRVATHDHPLLFSDPPFSPATNREKLVEVAFESLRSPAMYVASQSVLSVYAHGRVSGLVVDTGHGVTYTVPVFQGYNLLHATERLDLAGNNLTAFLAEMLLQAGLPLGQQDLDLVENIKHHYCYVASDFQKEQARPEQEYKRTLKLPDGRTVTLGKELFQCPELLFNPPEVPGLSPVGLSTMAKQSLRKLSLEMRADLAQNVLLCGGSSLFTGFEGRFRAELLRALPAETHVVVAAQPTRNFSVWIGGSILASLRAFQSCWVLREQYEEQGPYIVYRKCY

SEQ ID NO: 918173 - protein, 153 aa, Homo sapiens
RNEAKAGMSQLLPGHPPGWGSLTIMVEGKEEQVTSYMDGSRQRESEEDIKVETPDKTIRSCEMYSLLGEKYGGNCLHDSIISHQVPPTTRGNYGSTIQDEIWVETQSQTISCLLSGTSVITIGIQTHTMKHKQTEANKGEDSCLNNTAYLQKS

SEQ ID NO: 918174 - protein, 266 aa, Homo sapiens
MGTATRRKPHLLLVAAVALVSSSAWSSALGSQTTFGPVFEDQPLSVLFPEESTEEQVLLACRARASPPATYRWKMNGTEMKLEPGSRHQLVGGNLVIMNPTKAQDAGVYQCLASNPVGTVVSREAILRFGFLQEFSKEERDPVKAHEGWGVMLPCNPPAHYPGLSYRWLLNEFPNFIPTDGRHFVSQTTGNLYIARTNASDLGNYSCLATSHMDFSTKSVFSKFAQLNLAAEDTRLFAPSIKARFPAETYALVGQQVTLECFAFGK

SEQ ID NO: 918175 - protein, 153 aa, Homo sapiens
SPWSLPPVLQEFSKEERDPVKAHEGWGVMLPCNPPAHYPGLSYRWLLNEFPNFIPTDGRHFVSQTTGNLYIARTNASDLGNYSCLATSHMDFSTKSVFSKFAQLNLAAEDTRLFAPSIKARFPAETYALVGQQVTLECFAFGNPVPRIKWRKV

SEQ ID NO: 918176 - protein, 377 aa, Homo sapiens
TRATQQRWNPFGGAWGPSSQARRVSGEGCSPWQTDSVAWGFGGAREAGANLIGGDTSAVLFPPLGGLLCQQPGGRPGRQSQWYRGLGRAVSGSSGTMSTIQSETDCYDIIEVLGKGTFGEVAKGWRRSTGEMVAIKILKNDAYRNRIIKNELKLLHCMRGLDPEEAHVIRFLEFFHDALKFYLVFELLEQNLFEFQKENNFAPLPARHIRTVTLQVLTALARLKELAIIHADLKPENIMLVDQTRCPFRVKVIDFGSASIFSEVRYVKEPYIQSRFYRAPEILLGLPFCEKVDVWSLGCVMAELHLGWPLYPGNNEYDQVRYICETQGLPKPHLLHAACKAHHFFKRNPHPDAANPWQLKSSADYLAETKVREKLGV

SEQ ID NO: 918177 - protein, 289 aa, Homo sapiens
RAVGVGENPWAEKGAAMLGTAESRSSDALPQGAGAGATLGVVTELMWGLGAWGTDFEDAKPPGLPPGLGSGVTLQDCGGPHPENALESLEALSLGPGNRALTFPTQCHPLRAAHRGGCYCRCTGIGAEGRGAPGQAALGRAAQVGGWLEAQPTELLLRVWAHEAKRASLWPRPVPPSPLCHGRLGFLGMGFASCHKSHCQGFPTDPELCHRGCCPGTGWQRGPEACAWPEEQGLAACEQGPHQVVFTVAKFRPPGPHLLWPCRLSPAAACLPAILLPGLPGLCLPCLLS

SEQ ID NO: 918178 - protein, 87 aa, Homo sapiens
  misc_feature (27)..(27): Xaa can be any naturally occurring amino acid
VALPLKGKPAVSFPGLEAWPLLSQAWXGHWPGPHLLVSRVHTKSCSQWLSSAPQALTSSGLAACPLLPPVCLPSCCLASLGSASRAY

SEQ ID NO: 918179 - protein, 174 aa, Homo sapiens
MNRSIYDRQLLCVLLASQEFPAHEGRGDEERPIDAKIMTKCLHLMKQLHSYGGGGLCACLVSYESASCKEDSGDVAGLEARQEELGNSVTELQHAELKTICRQFRVTVAKAEGNFSINLTKVLCSLLSSRQPEGSTGPRTLSSDAAYHLLFLMSSWTTSYHQHPLPKVLEPTLE

SEQ ID NO: 918180 - protein, 174 aa, Homo sapiens; identical to SEQ ID NO: 918179

SEQ ID NO: 918181 - protein, 347 aa, Homo sapiens
HSLSRSTVRMSYQRCKSDPVTLLLKILQHLLPPGPKSPPLYYTKLSPDAICNLCTQIKPGPLLSLREAEQSELLFGFSVGTFGFKNALGGEDEGSTFGLRTAGLRVSPFGVTAVFIELTLATLAIVHQAVVTLLLLDGAVQRCLTALQGLVVLITGQRETENLSAQSRALHQESCQYGVKTDEHVSSALWLPRAPRAEKQLPTTLLYPQQADFKPLYSCASAVTTEWASPKLTTSLTLISTSDPLFIPIIPPATSTTVSPEPPPTALLGCMRLKFNLHLPAPCLDSPSSPAAATGHTTVPISKSCHFFQNTSHIPLTVPFYSRGPLTCACLPLPVDTMRHPVTTFLG

SEQ ID NO: 918182 - protein, 111 aa, Homo sapiens
RPLSRRARHPRVAQPTGPDGAAACRARARARPGGGRGALTVAGPSFPSFIYCQIWAASPARHPPSPRRVCTIPRWRFSCFSFLDDINIDRTLLLAPGFLWGPKSAVALGER

SEQ ID NO: 918183 - protein, 266 aa, Homo sapiens
MRASLELHAAASDHSSSGNDRDSVRSGDSSGSGSGGAAPAFPPPSPPAPRPKDGEARRLLQMDSGYASIEGRGAGDDTEPPAAPARPRSPRAWPRRPRRDYSIDEKTDALFHEFLRHDPHFDDTPAAARHRARAHPHARKQWQRGRQHSDPGARAAPALAGTPAPPAGAARPARAPLRRGDSVDGPPDGRTLGGAGDDPAIPVIEEEPGGGGCPGSGLCVLPSGSVLDKLAAGLDERLFPPRLAEPVVATPALVAAAPTSPDHSPA

SEQ ID NO: 918184 - protein, 679 aa, Homo sapiens
MASRLSPGRKAAGDAPGARAGHGGEAAAAILRLRARPPEAAAPPQAAAPAPPPRRSLATRPPSRGLLRTLSTGETSTSRSRDPGARAQPLHPPWRAGSGRSPSTQPWPGGPCQGVAELLGVGVAPHPRDGADRASGVLLEPAAPPWRPHSSECLPCPALSSRAWRYLAGQAAPAVCSCDGYRRTLRGPGLLPRHGDGRWRSRESPRGPLGRAKPGGGCLRLCYLSMSHCPLCGLLLLQGRPSLSAVAPAGEVGLAGADQASSPQGPPPQFRMQPTATMATAATTTTTTTATVALTTSWDNATGRPTAEPDPILDNYVLLVVVMSLFVGGTLVVLSGVLLLCKRCWDVHQRLNRAMEEAEKTTTTYLDNGTHPAQDPDFRGEDPECQDAETERFLSTSSTGRRVSFNEAALFEQSRKTQDKGRRYTLTEGDFHHLKNARLTHLHLPPLKIVTIHECDSGEASSATTPHPATSPKATLAIFQPPGKALTGRSVGPSSALPGDPYNSAAGATDFAEISPSASSDSGEGTSLDAGTRSTKAGGPGAAAGPGEAGPGSGAGTVLQFLTRLRRHASLDGASPYFKVKKWKLEPSQRAASLDTRGSPKRHHFQRQRAASESTEQEEGDAPPSTLRREQNPDGQVQASQALFIAKFGRPRPHGTLRVPAASAPSRDGVSRVFLFWMI

SEQ ID NO: 918185 - protein, 976 aa, Homo sapiens
MASRLSPGRKAAGDAPGARAGHGGEAAAAILRLRARPPEAAAPPQAAAPAPPPRRSLATRPPSRGLLRTLSTGETSTSRSRDPGARAQPLHPPWRAGSGRSPSTQPWPGGPCQGVAELLGVGVAPHPRDGADRASGVLLEPAAPPWRPHSSECLPCPALSSRAWRYLAGQAAPAVCSCDGYRRTLRGPGLLPRHGDGRWRSRESPRGPLGRAKPGGGCLRLCYLSMSHCPLCGLLLLQGRPSLSAVAPAGEVGLAGADQASSPQGPPPQFRMQPTATMATAATTTTTTTATVALTTSWDNATGRPTAEPDPILDNYVLLVVVMSLFVGGTLVVLSGVLLLCKRCWDVHQRLNRAMEEAEKTTTTYLDNGTHPAQDPDFRGEDPECQDAETERFLSTSSTGRRVSFNEAALFEQSRKTQDKGRRYTLTEGDFHHLKNARLTHLHLPPLKIVTIHECDSGEASSATTPHPATSPKATLAIFQPPGKALTGRSVGPSSALPGDPYNSAAGATDFAEISPSASSDSGEGTSLDAGTRSTKAGGPGAAAGPGEAGPGSGAGTVLQFLTRLRRHASLDGASPYFKVKKWKLEPSQRAASLDTRGSPKRHHFQRQRAASESTEQEEGDAPQEDFIQYIARAGDAVAFPHPRPFLASPPPALGRLEAAEAAGGASPDSPPERGAGSAGPEQQQPPLEPDAERDAGPEQAQTSYRDLWSLRASLELHAAASDHSSSGNDRDSVRSGDSSGSGSGGAAPAFPPPSPPAPRPKDGEARRLLQMDSGYASIEGRGAGDDTEPPAAPARPRSPRAWPRRPRRDYSIDEKTDALFHEFLRHDPHFDDTPAAARHRARAHPHARKQWQRGRQHSDPGARAAPALAGTPAPPAGAARPARAPLRRGDSVDGPPDGRTLGGAGDDPAIPVIEEEPGGGGCPGSGLCVLPSGSVLDKLAAGLDERLFPPRLAEPVVATPALVAAAPTSPDHSPA

SEQ ID NO: 918186 - protein, 182 aa, Homo sapiens
WKSEGDLRKMSFSPWLCALGKPLSALLVARLPRRLEERSCPLPFSEHPVSPAVFAAPWLSGCNSNPCLHLHMAVSFLCVSVPKCSSSTEDMGYIVLESTRTTDRIFALLHLQRLYFQIRSHAQVQGLGHQLLSWKNRIQLIQHWRGENKTEREREREREMRGPHMPCSSQNFSRSKSNLQEL

SEQ ID NO: 918187 - protein, 139 aa, Homo sapiens
MCYFKLNSQNGAPDLPSQGRNCLQSQFLTAAQAKALELSLIPVSLISHIQSIGKSSQLFHKYAASDHFSTPTATTLPKPHLLSPELAQQSHYWAYCFHPFCNTRHCGPRLHSWKPVRPGTLRSRKDLPLGEDFSSYFHL

SEQ ID NO: 918188 - protein, 168 aa, Homo sapiens
VCGSNWSQWLRMHFKGEPVDACSDVSGVSSFLWVHGLADFRSEATDLRRVKLQTFTVSVTALKGGASRVVCSSWWVRGLTDFRSEATGLRSVLQLLKVAHLELFVPPGGRVVSLTKGMKPQTSAVSVTAHKGSVGPKKGMEIKNVIHMLSVKCLLRHLFLSASVDITI

SEQ ID NO: 918189 - protein, 259 aa, Homo sapiens
MDRSAEFRKWKAQCLSKADLSRKGSVDEDVVELVQFLNMRDQFFTTSSCAGRILLLDRGINGFEVQKQNCCWLLVTHKLCVKDDVIVALKKANGDATLKFEPFVLHVQCRQLQDAQILHSMAIDSGFRNSGITVGKRGKTMLAVRSTHGLEVPLSHKGKLMVTEEYIDFLLNVANQKMEENKKRIERFYNCLQHALERETMTNLHPKIKEKNNSSYIHKKKRNPEKTRAQCITKESDEELENDDDDDLGINVTIFPEDY

SEQ ID NO: 918190 - protein, 259 aa, Homo sapiens; identical to SEQ ID NO: 918189

SEQ ID NO: 918191 - protein, 259 aa, Homo sapiens; identical to SEQ ID NO: 918189

SEQ ID NO: 918192 - protein, 139 aa, Homo sapiens
MAIDSGFRNSGITVGKRGKTMLAVRSTHGLEVPLSHKGKLMVTEEYIDFLLNVANQKMEENKKRIERFYNCLQHALERETMTNLHPKIKEKNNSSYIHKKKRNPEKTRAQCITKESDEELENDDDDDLGINVTIFPEDY

SEQ ID NO: 918193 - protein, 181 aa, Homo sapiens
FLKMVCPEFVPSDVQMCPEFLPSSGFVVLLTSGVKLQTFAHSMAIDSGFRNSGITVGKRGKTMLAVRSTHGLEVPLSHKGKLMVTEEYIDFLLNVANQKMEENKKRIERFYNCLQHALERETMTNLHPKIKEKNNSSYIHKKKRNPEKTRAQCITKESDEELENDDDDDLGINVTIFPEDY

SEQ ID NO: 918194 - protein, 259 aa, Homo sapiens; identical to SEQ ID NO: 918189

SEQ ID NO: 918195 - protein, 259 aa, Homo sapiens; identical to SEQ ID NO: 918189

SEQ ID NO: 918196 - protein, 259 aa, Homo sapiens; identical to SEQ ID NO: 918189

SEQ ID NO: 918197 - protein, 153 aa, Homo sapiens
PCWNDSLNFHRYHSMAIDSGFRNSGITVGKRGKTMLAVRSTHGLEVPLSHKGKLMVTEEYIDFLLNVANQKMEENKKRIERFYNCLQHALERETMTNLHPKIKEKNNSSYIHKKKRNPEKTRAQCITKESDEELENDDDDDLGINVTIFPEDY

SEQ ID NO: 918198 - protein, 168 aa, Homo sapiens; identical to SEQ ID NO: 918188

SEQ ID NO: 918199 - protein, 112 aa, Homo sapiens
GSLQGCAASCARAFLRTCCARSESGLAVRGTKGVAFGENPRAAGTCSQSPFFPVAPPPGVRLWVLCPDRFTGAFLLRTTLALNVRAGDEGPRRLLRAPRVPSRPSAPLAPAP

SEQ ID NO: 918200 - protein, 412 aa, Homo sapiens
TSRTAELAQHGCSRFTGAFLLRTTLALNVRAGDEGPRRLLRAPRVPSRPSAPLAPAPASTPARRLPPVPMQAPGRGPLGLRLMMPGRRGALREPGGCGSCLGVALALLLLLLPACCPVRAQNDTEPIVLEGKCLVVCDSSPSADGAVTSSLGISVRSGSAKVAFSATRSTNHEPSEMSNRTMTIYFDQVSRSACPPRPQPGERGGDLRARAGVQASWTWSSQALSSPSALLVSFLPFHRTHSYSFPFPHFGFLKTFEMISYLGTWMTESPLRLSKLSKSSNAEDAEFVFPAADEGGSVAGYPRMMKTYTEEGLAIVCCVPSSFSAPRKGIYSFSFHVVKVYNRQTIQVSLMQNGYPVISAFAGDQDVTREAASNGVLLLMEREDKVHLKLERGNLMGGWKYSTFSGFLVFPL

SEQ ID NO: 918201 - protein, 137 aa, Homo sapiens
MARLGSETPGLLLLPNLKKRKREVFVNRSVGTGNPCFRYRKSETTHLQGAKLRSQCGGLQKSRNRTQGSRAGMLVVLSAQEIGETGSSGLAAHYNYPVKEDVQILLYKEVQGLYIENYETLLEEVKDLKKWKDIPCS

SEQ ID NO: 918202 - protein, 385 aa, Homo sapiens
LTTLFTLIRFLSSVSPFMYSNGTGTTKRLTTLFTFIGFLPSVSPFMHSKGTGTTEGFTTLFTFIGFLSSVSPFMHPKGTRKTKGFTTLFTFIGFLSSVNSFMHSKGTGTTEGFTTLFTFIGFLSSVSPFMYSNRTGTTEGFTTLFTFMGFLSSVSSFMHSKGTGTTEGFTTLFTFIGFLSSVSSFMDLKRTRTIKGFPTFLAFIRSISSVHYHMSSIAWKRNECFPTFLTIIGFLSCMNSFMFSKGTRKTEGFPTFFTFIGFFSSVNPFMTSKGCGTTKSFTTLLTLIGFFPSVSPFMYLKSLVISESFSTLFTFIGFLSRVSSFMISKRTGMTERFPAFFTFIGFLSSMSSFMYLKGTGPTESLTTLFTFIGFLSSVSSFMYSK

SEQ ID NO: 918203 - protein, 262 aa, Homo sapiens
MPEAADSADPSPLLGADFNLSPGFYPDPDTDSTPDPDSGPDSDPHPDPDSSPDSVSSRDFPSGPDSCSSPDSHSGPHSRSGPDPPSGSASCSGLDPYSGADSRSRPEPNSGPDSGSDPDSSRIRAALPVLDSYLAPALPLDPPPEPAPELPLLPEEDPEPAPSLKLIPSVSSEAGPAPGPLPTRTPLAANSPGPTLDFTFRADPSAIGLADPPIPSPVPSPILGTIPSAISLQNCTETFPSSSENFALDKRVLIRVTYCTFY

SEQ ID NO: 918204 - protein, 131 aa, Homo sapiens
MTVPLIKEAAFRIAASEGQELFKAETQHPVKRKLPCFFQLSFHHFVLFRHSQAPAAVGPITASPPLLRAPRITGHTQFCPFTNASCGLFEDLRFRSDDAFHVCPAARESFTGEKSRASEQILVHLSFQSTP

SEQ ID NO: 918205 - protein, 155 aa, Homo sapiens
ELLHMNVMVPIQNPVTSALVTQDSPVFLKAHYDFSLSQASACAIFSALQTLSLARQIHTCSHIKDDLLCEAFANASALYHMPCFGVQFEMPKALTENLSQSTKYGSENPSHNGFSYSFIILGLINPSDYIAGRTELTFERILHPWLLRFISKEAE

SEQ ID NO: 918206 - protein, 349 aa, Homo sapiens
MILRLPQPCETPFAPDLDSYASPSGVRLVGGLHRCEGRVEVEQKGQWGTVCDDGWDIKDVAVLCRELGCGAASGTPSGILYEPPAEKEQKVLIQSVSCTGTEDTLAQCEQEEVYDCSHDEDAGASCENPESSFSPVPEGVRLADGPGHCKGRVEVKHQNQWYTVCQTGWSLRAAKVVCRQLGCGRAVLTQKRCNKHAYGRKPIWLSQMSCSGREATLQDCPSGPWGKNTCNHDEDTWVECEDPFDLRLVGGDNLCSGRLEVLHKGVWGSVCDDNWGEKEDQVVCKQLGCGKSLSPSFRDRKCYGPGVGRIWLDNVRCSGEEQSLEQCQHRFWGFHDCTHQEDVAVICSG

SEQ ID NO: 918207 - protein, 378 aa, Homo sapiens
GITPPNSVDTMGCQMAGRGGGSSTLSLEPNLLLPEQNRGTLRLTTRLFAASPSGVRLVGGLHRCEGRVEVEQKGQWGTVCDDGWDIKDVAVLCRELGCGAASGTPSGILYEPPAEKEQKVLIQSVSCTGTEDTLAQCEQEEVYDCSHDEDAGASCENPESSFSPVPEGVRLADGPGHCKGRVEVKHQNQWYTVCQTGWSLRAAKVVCRQLGCGRAVLTQKRCNKHAYGRKPIWLSQMSCSGREATLQDCPSGPWGKNTCNHDEDTWVECEDPFDLRLVGGDNLCSGRLEVLHKGVWGSVCDDNWGEKEDQVVCKQLGCGKSLSPSFRDRKCYGPGVGRIWLDNVRCSGEEQSLEQCQHRFWGFHDCTHQEDVAVICSG

SEQ ID NO: 918208 - protein, 221 aa, Homo sapiens
MPLALTLLLLSGLGAPGGWGCLQCDPLVLEALGHLRSALIPSRFQLEQLQARAGAVLMGMEGPFFRDYALNVFVGKVETNQLDLVASFVKNQTQHLMGNSLKDEPLLEELVTLRANVIKEFKKVLISYELKACNPKLCRLLKEEVLDCLHCQRITPKCIHKKYCFVDRQPRVALQYQMDSKYPRNQALLGILISVSLAVFVFVVIVVSACTYRQNRKLLLQ

SEQ ID NO: 918209 - protein, 90 aa, Homo sapiens
QGTSRKRRRESAPPPPLPQAAEWTGGVGMGLRRGGDVEVGAVSPPAPVDRQPRVALQYQMDSKYPRNQALLGILISVSLAVFVFVVIVVS

SEQ ID NO: 918210 - protein, 212 aa, Homo sapiens
MVHFLHPGHTPRNIVPPDAQKDALGCCVVQEEASPYTLVNICLNVLIANLEKLCSERPDGTLCLPEHWSFPQEVAERFLRVMTWQGCWRSQYESDFRSTEPIQEQIMFCEGSPPQAVHRDIFNGGNHACYFKACGYRNEESPIGFASAVHSQCLRSQPNTPGPGQGDACSPVVRGHLSTFQGSEKFPPLPAGRGPCGLPQCLCPWVLEIREW

SEQ ID NO: 918211 - protein, 136 aa, Homo sapiens
ATPKMDPVSGAKLPQGTGTRTEATETGPLKHTHSKELALLDKWQFPKLSCSDVIQRHAGDKSTAGSAYSLCGNLGFAAQACQPGPKNQARLPLHKHCNAATIDLTMLPSPGHLKQTPHSEAPGSKQDELPTQLALT

SEQ ID NO: 918212 - protein, 136 aa, Homo sapiens; identical to SEQ ID NO: 918211

SEQ ID NO: 918213 - protein, 141 aa, Homo sapiens
MPLPLLVATCTAWLVVLSSVFQAYYSDFCFRRHITFPLTKTLVKNQACLGTQDHLPTSSSFTQSHLQSPFCHLRNGVWHLANQPGKVQKALHLIKDAFSTGFYFRANGISCFVESKKAQLPCFNNMVDSTALILGDSGFTF

SEQ ID NO: 918214 - protein, 320 aa, Homo sapiens
FFCRYISYMEAGNQTGFLEFILLGLSEDPELQPFIFGLFLSMYLVTVLGNLLIILAISSDSHLHTPMYFFLSNLSWVDICFSTCIVPKMLVNIQTENKAISYMDCLTQVYFSMFFPILDTLLLTVMAYDRFVAVCHPLHYMIIMNPHLCGLLVFVTWLIGVMTSLLHISLMMHLIFCKDFEIPHFFCELTYILQLACSDTFLNSTLIYFMTGVLGVFPLLGIIFSYSRIASSIRKMSSSGGKQKALSTCGSHLSVVSLFYGTGIGVHFTSAVTHSSQKISVASVMYTVVTPMLNPFIYSLRNKDVKGALGSLLSRAASCL

SEQ ID NO: 918215 - protein, 632 aa, Homo sapiens
MAAAALRDPAQGCVTFEDVTIYFSQEEWVLLDEAQRLLYCDVMLENFALIASLGLISFRSHIVSQLEMGKEPWVPDSVDMTSAMARGAYGRPGSDFCHGTEGKDLPSEHNVSVEGVAQDRSPEATLCPQKTCPCDICGLRLKDILHLAEHQTTHPRQKPFVCEAYVKGSEFSANLPRKQVQQNVHNPIRTEEGQASPVKTCRDHTSDQLSTCREGGKDFVATAGFLQCEVTPSDGEPHEATEGVVDFHIALRHNKCCESGDAFNNKSTLVQHQRIHSRERPYECSKCGIFFTYAADLTQHQKVHNRGKPYECCECGKFFSQHSSLVKHRRVHTGESPHVCGDCGKFFSRSSNLIQHKRVHTGEKPYECSDCGKFFSQRSNLIHHKRVHTGRSAHECSECGKSFNCNSSLIKHWRVHTGERPYKCNECGKFFSHIASLIQHQIVHTGERPHGCGECGKAFSRSSDLMKHQRVHTGERPYECNECGKLFSQSSSLNSHRRLHTGERPYQCSECGKFFNQSSSLNNHRRLHTGERPYECSECGKTFRQRSNLRQHLKVHKPDRPYECSECGKAFNQRPTLIRHQKIHIRERSMENVLLPCSQHTPEISSENRPYQGAVNYKLKLVHPSTHPGEVP

SEQ ID NO: 918216 - protein, 436 aa, Homo sapiens
MEAFSRRRCEALKLMVQAWPFRRLPLRPLIKMPCLEAFQAVLDGLDALLTQGVRPRRWKLQVLDLQDVCENFWMVWSEAMAHGCFLNAKRNKTPVQDCPRMRERQPLTVFVELWLKNRTLDEYLTCLLLWVKQRRDLLHLCCKKLKILGMPFRNIRSILKMVNLDCIQEVEVNCKWILPILTQFTPYLGHLRNLQKLVLSHMDVSRYVSPEQKKEIVTQFTTQFLKLRCLQKLYMNSVSFLEGHLDQLLSCLKTSLKVLTITNCVLLESDLKHLSQCPSISQLKTLDLSGIRLTNYSLVPLQILLEKVAATLEYLDLDDCGIIDSQVNAILPALSRCFELNTFSFCGNPICMATLENLLSHTIILKNLCLELYPAPQESYGADGTLCWSRFAQIRAELMKKVRHLRHPKRILFCTDNCPDHGDRSFYDLEADQYCC

SEQ ID NO: 918217 - protein, 305 aa, Homo sapiens
GKEKGREEGWQMAQPLCRDAERDDVGILHVGPLEGDHLEAPALAVRAAGLHLDAPGPRQPAQRQRQQQPPVGAPGPESPHCRLLSAGLGRACRGGSRLGWADARGWDPARTRRAPVPVPATVRSPPAGVAFNPAAPSRPGAEPARPRRALASADTAAAPGTPAPPAHAHPALPGAHPPPEPAAWRSGRSRQERARDCAAAFLGRGEHSAGQRDRRFRAAPGMPGQLWVRSPQPSFINAGPGAAQTPQGGPRVHRGPRCVFTQPLAIVFSRNLHSTAGPATYQNSGAPRPCVVRWKAKFPPDQCVP

SEQ ID NO: 918218 - protein, 350 aa, Homo sapiens
GHMDTPKELWRMITGNMALIQVQATVVGFLASIAAVVFGWIPDGHFSIPHAFLLCASSVATAFIASLVLGMIMIGVIIGSRKIGINPDNVATPIAASLGDLITLALLSGISWGLYLELNHWRYIYPLVCAFFVALLPVWVVLARRSPATREVLYSGWEPVIIAMAISSVGGLILDKTVSDPNFAGMAVFTPVINGVGGNLVAVQASRISTFLHMNGMPGENSEQAPRRCPSPCTTFFSPDVNSRSARVLFLLVVPGHLVFLYTISCMQGGHTTLTLIFIIFYMTAALLQVLILLYIADWMVHWMWGRGLDPDNFSIPYLTALGDLLGTGLLALSFHVLWLIGDRDTDVGD

SEQ ID NO: 918219 - protein, 350 aa, Homo sapiens; identical to SEQ ID NO: 918218

SEQ ID NO: 918220 - protein, 350 aa, Homo sapiens; identical to SEQ ID NO: 918218

SEQ ID NO: 918221 - protein, 282 aa, Homo sapiens
MGVRGSDEGFVGSSQVANILLNGVKYESELTGSSERAEQPLSVGRLCSTICNMPKALRTLCVNHFLGWLSFEGMLLFYTDFMGEVVFQGDPKAPHTSEAYQKYNSGVTMGCWGMCIYAFSAAFYSAILEKLEEFLSVRTLYFIAYLAFGLGTGLATLSRNLYVVLSLCITYGILFSTLCTLPYSLLCDYYQSKKFAGSSADGTRRGMGVDISLLSCQYFLAQILVSLVLGPLTSAVGSANGVMYFSSLVSFLGCLYSSLFVIYEIPPSDAADEEHRPLLLNV

SEQ ID NO: 918222 - protein, 386 aa, Homo sapiens
  misc_feature (13)..(14): Xaa can be any naturally occurring amino acid
  misc_feature (24)..(24): Xaa can be any naturally occurring amino acid
  misc_feature (54)..(55): Xaa can be any naturally occurring amino acid
  misc_feature (63)..(63): Xaa can be any naturally occurring amino acid
KNGPTAFGVLLPXXGTQTLSLSPXFGGGFGYVLGGIHWDKTGFGRALGGQFRVXXLFTAVTLXVTTVLTLVSIPERPLRPPSEKRAAMKSPSLPLPPSPPVLPEEGPGDSLPSHTATNFSSPISPPSPLTPKYGSFISRDSSLTGISEFASSFGTANIDSVLIDCFTGGHDSYLAIPGSVPRPPISVSFPRAPDGFYRQDRGLLEGREGALTSGCDGDILRVGSLDTSKPRSSGILKRPQTLAIPDAAGGGGPETSRRRNVTFSQQVANILLNGVKYESELTGSSERAEQPLSVGRLCSTICNMPKALRTLCVNHFLGWLSFEGMLLFYTDFMGEVVFQGDPKAPHTSEAYQKYNSGVTMGCWGMCIYAFSAAFYSAVLNEIETAP

SEQ ID NO: 918223 - protein, 533 aa, Homo sapiens
  misc_feature (13)..(14): Xaa can be any naturally occurring amino acid
  misc_feature (24)..(24): Xaa can be any naturally occurring amino acid
  misc_feature (54)..(55): Xaa can be any naturally occurring amino acid
  misc_feature (63)..(63): Xaa can be any naturally occurring amino acid
KNGPTAFGVLLPXXGTQTLSLSPXFGGGFGYVLGGIHWDKTGFGRALGGQFRVXXLFTAVTLXVTTVLTLVSIPERPLRPPSEKRAAMKSPSLPLPPSPPVLPEEGPGDSLPSHTATNFSSPISPPSPLTPKYGSFISRDSSLTGISEFASSFGTANIDSVLIDCFTGGHDSYLAIPGSVPRPPISVSFPRAPDGFYRQDRGLLEGREGALTSGCDGDILRVGSLDTSKPRSSGILKRPQTLAIPDAAGGGGPETSRRRNVTFSQQVANILLNGVKYESELTGSSERAEQPLSVGRLCSTICNMPKALRTLCVNHFLGWLSFEGMLLFYTDFMGEVVFQGDPKAPHTSEAYQKYNSGVTMGCWGMCIYAFSAAFYSAILEKLEEFLSVRTLYFIAYLAFGLGTGLATLSRNLYVVLSLCITYGILFSTLCTLPYSLLCDYYQSKKFAGSSADGTRRGMGVDISLLSCQYFLAQILVSLVLGPLTSAVGSANGVMYFSSLVSFLGCLYSSLFVIYEIPPSDAADEEHRPLLLNV

SEQ ID NO: 918224 - protein, 110 aa, Homo sapiens
AAGAPGLVLTTLCLLLLGAQPLWPCDLPPGSLEMGLLTFRDVAIEFSLEEWQCLDTAQKNLYRNVMLENYRNLAFLGIAVSKPDLIICLEKEKEPWNMKRDEMVDEPPGR

SEQ ID NO: 918225 - protein, 110 aa, Homo sapiens; identical to SEQ ID NO: 918224

SEQ ID NO: 918226 - protein, 571 aa, Homo sapiens
MELLQGPQERPRSEACHHGYKWRSSSRPLEGQDPRCPLAPKTVAVKSLGWLQIILRRFEKCGHENLQLRKGCKSVDECKVHKEGYNGLNQCFTTTQGKASQCGKYLKVFYKFINLNRYKIRHTRKKPFKCKNCVKSFCMFSHKTQHKSIYTTEKSYKCKECGKTFNWSSTLTNHKKTHTEEKPYKCEEYGKAFNQSSNYTTHKVTHTGEKPYKCEECGKAFSQSSTLTIHKRIHTGEKPCKCEECGKAFSQPSALTIHKRMHIGEKPYKCEECGKAFVWSSTLTRHKRLHSGEKPYKCEECAKAFSQFGHLTTHRIIHTGEKPYKCEECGKAFIWPSTLTKHKRIHTGEKPYKCEECGKAFHRSSNLTKHKIIHTGEKPYKCEECGKAFIWSSNLTEHKKIHTREKPYKCEECSKAFSRSSALTTHKRMHTGEKPYKCEECGKAFSQSSTLTAHKIIHTGEKPYKCEECGKAFILSSTLSKHKRIHTGEKPYKCEECGKTFNQSSNLSTHKIIHTGEKPYKCEECGKAFNRSSNLSTHKIIHTGEKPYKCDECGKSFIWSSTLFKHKRIHT

SEQ ID NO: 918227 - protein, 122 aa, Homo sapiens
AAGAPGLVLTTLCLLLLGAQPLWPCDLPPGSLEMGLLTFRDVAIEFSLEEWQCLDTAQKNLYRNVMLENYRNLAFLGIAVSKPDLIICLEKEKEPWNMKRDEMVDEPPDGVSLCHPGWSAVA

SEQ ID NO: 918228 - protein, 1155 aa, Homo sapiens
FFSLSLSIQYFGYHLQRSMGGSKRNWIPFTHIYTVFLLTLITSVWASAAELKPPGVRADAECPGMLESAEQLLVEDLYNRVREKMDDTSLYNTPCVLDLQRALVQDRQEAPWNEVDEVWPNVFIAEKYRSIHLTVTKNPGIARSVAVNKGRLKRLGITHILNAAHGTGVYTGPEFYTGLEIQYLGVEVDDFPEVDISQHFRKASEFLDEALLTYRGKVLVSSEMGISRSAVLVVAYLMIFHNMAILEALMTVRKKRAIYPNEGFLKQLRELNEKLMEEREEDYGREGGSAEAEEGEGTGSMLGARVHALTVEEEDDSASHLSGSSLGKATQASKPLTLIDEEEEEKLYEQWKKGQGLLSDKVPQDGGGWRSASSGQGGEELEDEDVERIIQEWQSRNERYQAEGYRRWGREEEKEEESDAGSSVGRRRRTLSESSAWESVSSHDIWVLKQQLELNRPDHGRRRRADSMSSESTWDAWNERLLEIEKEASRRYHAKSKREEAADRSSEAGSRVREDDEDSVGSEASSFYNFCSRNKDKLTALERWKIKRIQFGFHKKDLGAGDSSGEPGAEEAVGEKNPSDVSLTAYQAWKLKHQKKVGSENKEEVVELSKGEDSALAKKRQRRLELLERSRQTLEESQSMASWEADSSTASGSIPLSAFWSADPSVSADGDTTSVLSTQSHRSHLSQAASNIAGCSTSNPTTPLPNLPVGPGDTISIASIQNWIANVVSETLAQKQNEMLLLSRSPSVASMKAVPAASCLGDDQVSMLSGHSSSSLGGCLLPQSQARPSSDMQSVLSCNTTLSSPAESCRSKVRGTSKPIFSLFADNVDLKELGRKEKEMQMELREKMSEYKMEKLASDNKRSSLFKKKKVKEDEDDGVGDGDEDTDSAIGSFRYSSRSNSQKPETDTCSSLAVCDHYASGSRVGKEMDSSINKWLSGLRTEEKPPFQSDWSGSSRGKYTRSSLLRETESKSSSYKFSKSQSEEQDTSSYHEANGNSVRSTSRFSSSSTREGREMHKFSRSTYNETSSSREESPEPYFFRRTPESSEREESPEPQRPNWARSRDWEDVEESSKSDFSEFGAKRKFTQSFMRSEEEGEKERTENREEGRFASGRRSQYRRSTDREEEEEMDDEAIIAAWRRRQEETRTKLQKRRED

SEQ ID NO: 918229 - protein, 158 aa, Homo sapiens
ESTVYGPMPGHPFPISQSLIPENIFSLLASAAWCDAIPIFPSLYGYLTAKSQHPIGLALKKQRELVTKRKKDERTLEQRKEDFAKSKPETFLWVQFNRLQVTFPHKHVPRTEDARHCSRRLLDEDMAKATTTMQLCDSSTSVFHWLNSAEHYRVKKPR

SEQ ID NO: 918230 - protein, 361 aa, Homo sapiens
RVPDCAKASGDLSLSVHGLVADSGAQTVAGESFIVWCPSYTEPQNLTGVSEFLLLGLSEDPELQPVLAGLFLSMYLVTVLGNLLIILAVSSDSHLHTPMYFFLSNLSLADIGFTSTTVPKMIVDMQTHSRVISYEGCLTQMSFFVLFACMDDMLLSVMAYDRFVAICHPLHYRIIMNPRLCGFLILLSFFISLLDSQLHNLIMLQLTCFKDVDISNFFCDPSQLLHLRCSDTFINEMVIYFMGAIFGCLPISGILFSYYKIVSPILRVPTSDGKYKAFSTCGSHLAVVCLFYGTGLVGYLSSAVLPSPRKSMVASVMYTVVTPMLNPFIYSLRNKDIQSALCRLHGRIIKSHHLHPFCYMG

SEQ ID NO: 918231 - protein, 476 aa, Homo sapiens
MDAVAFEDVAVNFTQEEWALLGPSQKNLYRYVMQETIRNLDCIRMIWEEQNTEDQYKNPRRNLRCHMVERFSESKDSSQCGETFSLIRDSIVNNSICPGEDPCQSAECEEVIMGHLSLNSHIRVDSGHKPHEYQEYGEKPHTHKQRGKAFSYHHSFQSRGRPHTGKKRYECKECGKTFSSRRNLRRHMVVQGGNRPYKCKLCGKAFFWPSLLRMHERTHTGEKPYECKQCSKAFPFYSSYRRHERMHTGEKPYECKQCSKALPDSSSYIRHERTHTGEKPYTCKQCGKAFSVSSSLRRHETTHSAEKPYECKQCGKTFHHLGSFQIHMKRHTGDRPHKCKICGKGFDRPSLVRYHERIHTGEKPYECKQCGKTLSHSSSFRRHMIMHTGGGPHKCKICGKAFVYPSVCQRHEKSHSGEKPYECKQCGKALSHSSSFRRHMVMHTGDGPNKCKVCGKAFVYPSVCQRHEKTHWRETI

SEQ ID NO: 918232 - protein, 388 aa, Homo sapiens
MQETIRNLDCIRMIWEEQNTEDQYKNPRRNLSHIRVDSGHKPHEYQEYGEKPHTHKQRGKAFSYHHSFQSRGRPHTGKKRYECKECGKTFSSRRNLRRHMVVQGGNRPYKCKLCGKAFFWPSLLRMHERTHTGEKPYECKQCSKAFPFYSSYRRHERMHTGEKPYECKQCSKALPDSSSYIRHERTHTGEKPYTCKQCGKAFSVSSSLRRHETTHSAEKPYECKQCGKTFHHLGSFQIHMKRHTGDRPHKCKICGKGFDRPSLVRYHERIHTGEKPYECKQCGKTLSHSSSFRRHMIMHTGGGPHKCKICGKAFVYPSVCQRHEKSHSGEKPYECKQCGKALSHSSSFRRHMVMHTGDGPNKCKVCGKAFVYPSVCQRHEKTHWRETI

SEQ ID NO: 918233 - protein, 226 aa, Homo sapiens [sequence omitted]

SEQ ID NO: 918234 - protein, 143 aa, Homo sapiens
MGGESCLDIEDGSEREAQSLTDQTPPPLSGDETERESEVIQTRQGTLRGVAGPGVKLAEVVAREEQLVRCWILGVEWELRGEAHRVQPDAGERPLERVAEKACASPGREEVQQRANGEVQRSDPSRTRAHSVAGVRLPAALSR

SEQ ID NO: 918235 - protein, 67 aa, Homo sapiens
AQGRLHSHGDGLLARIMTVVFLAVAIAFGFYIQIGSRGFFLSLFEGSHPLDPQSAWRPLSNPLLVLL

SEQ ID NO: 918236 - protein, 184 aa, Homo sapiens
MRTKKDSEFYVCHFRLVKNHCWGASGLVWRCSGPWGSLKERLQQGDMPQPFWNGPSEGSSPHFHPGPRTSQRSAKASASRRCIEIPGAWPSMAALCWSCPVNKRSQAPCCLKACLCLLPRKILQTIHKSMGDVGSPVARIPEVHDKCESSFIHFFPRNHSGSGASSSIQEMKKFSKYFKKGKRD

SEQ ID NO: 918237 - protein, 385 aa, Homo sapiens
MMPSDLTQVTEVLVIVGNGEGPSSEAAHPGGTPREQDGAMDPARKAGAQAMIWTAGWLLLLLLRGGAQALECYSCVQKADDGCSPNKMKTVKCAPGVDVCTEAVGAVETIHGQFSLAVRGCGSGLPGKNDRGLDLHGLLAFIQLQQCAQDRCNAKLNLTSRALDPAGNESAYPPNGVECYSCVGLSREACQGTSPPVVSCYNASDHVYKGCFDGNVTLTAANVTVSLPVRGCVQDEFCTRDGVTGPGFTLSGSCCQGSRCNSDLRNKTYFSPRIPPLVRLPPPEPTTVASTTSVTTSTSAPVRPTSTTKPMPAPTSQTPRQGVEHEASRDEEPRLTGGAAGHQDRSNSGQYPAKGGPQQPHNKGCVAPTAGLAALLLAVAAGVLL

SEQ ID NO: 918238 - protein, 385 aa, Homo sapiens; identical to SEQ ID NO: 918237

SEQ ID NO: 918239 - protein, 351 aa, Homo sapiens
RGLVRLRRYGPAPPCFGRSFRSERLFGGVHPPIPACRSCGVGLFEAPPLPDPTQLWATPHLRPRPQLIPPLSLSLVHGQFSLAVRGCGSGLPGKNDRGLDLHGLLAFIQLQQCAQDRCNAKLNLTSRALDPAGNESAYPPNGVECYSCVGLSREACQGTSPPVVSCYNASDHVYKGCFDGNVTLTAANVTVSLPVRGCVQDEFCTRDGVTGPGFTLSGSCCQGSRCNSDLRNKTYFSPRIPPLVRLPPPEPTTVASTTSVTTSTSAPVRPTSTTKPMPAPTSQTPRQGVEHEASRDEEPRLTGGAAGHQDRSNSGQYPAKGGPQQPHNKGCVAPTAGLAALLLAVAAGVLL

SEQ ID NO: 918240 - protein, 104 aa, Homo sapiens
SAPRPWGRWRPVSGDPRATHTTAGSSGPAPPPYSPFWIWPRPFNAAPPLPFSLAGTLRHSLAGQAFSINNYKREEQRVENWVGRTGRARVWNEVTSYALFLLHQ

SEQ ID NO: 918241 - protein, 385 aa, Homo sapiens; identical to SEQ ID NO: 918237

SEQ ID NO: 918242 - protein, 229 aa, Homo sapiens
HLFFLSAPLAGNESAYPPNGVECYSCVGLSREACQGTSPPVVSCYNASDHVYKGCFDGNVTLTAANVTVSLPVRGCVQDEFCTRDGVTGPGFTLSGSCCQGSRCNSDLRNKTYFSPRIPPLVRLPPPEPTTVASTTSVTTSTSAPVRPTSTTKPMPAPTSQTPRQGVEHEASRDEEPRLTGGAAGHQDRSNSGQYPAKGGPQQPHNKGCVAPTAGLAALLLAVAAGVLL

SEQ ID NO: 918243 - protein, 520 aa, Homo sapiens
MVSRVRKGPQMAEGVAEARRHSRGRGGAQESGEAEQREEDGAHVGGQPRPEQCLAVGQKAGLLDVEDEQQLDDLHRVEERRERAPPARSESARRVHHQEPIQHGFLPALALQGAHPAALPVVAQCPQDGQLEDEVPADGHVQLQHRGVMQLQGGQAKARVGAPQVEGADHQRQDQQRGLLASSLRILHHELREDVDGHSAAQRSPQTQEPHEPQHGRLPQPPAHAPGALPQLLLGPAAPSPVAVIHDDVGEAACVFEELQARADAGRARRGGREGGLRAHNEGHEQQQQEGVEGQQGLKEEEVGEHVGAELAPDALQDSSASPRLCKASTQTYLSQPQQEQTLPWPRRLLHFPLWVRLFSRRPRFSARLRGIPRSTWSRCATARPWSSFTRRLRFSSSSSQDVGSSFRSYRRRLCREERTKSASRGRPMVRLGMLARTQSVAVLWVPSGPKSVCWPLAVATTPLPLLQLQPLLGLPAALLLDEQVEGVVHFSLINLLNMKEGIYSKTSIKPHTLMCEECF

SEQ ID NO: 918244 - protein, 139 aa, Homo sapiens
RNKVDAQPRKSHTEMETPASLSLKALGFLALSRLIRDSCTNEACSLSNVQTYVVGSEWGYGLASTGVSLWRHMILVCFARRKPDPIFFLPFSLCFQLVCSPEIAHRERKVKVHKNLIFLDAELYVQLMFKTFKALVSET

SEQ ID NO: 918245 - protein, 139 aa, Homo sapiens; identical to SEQ ID NO: 918244

SEQ ID NO: 918246 - protein, 125 aa, Homo sapiens
MMYGQQSLPYTFKSKSLEEPEKLLGKLCEQNKVVREQDRLVQQLRAEKESLESALMGTHQELEMFGSQPAYPEKLRHKKDSLQNQLINIRVELSQATTVTQGAGFVHPTSSALGSRATTSQLVLS

SEQ ID NO: 918247 - protein, 746 aa, Homo sapiens
MKRNPNAPVTKAGWLFKQASSGVKQWNKRWFVLVDRCLFYYKDEKEESILGSIPLLSFRVAAVQPSDNISRKHTFKVTVCWVDEAEASSTRCLSPQAEHAGVRTYFFSAESPEEQEAWIQAMGEAARVQIPPAQKSVPQAVRHSHEKPDSENVPPSKHHQQPPHNSLPKPEPEAKTRGEGDGRGCEKAERRPERPEVKKEPPVKANGLPAGPEPASEPGSPYPEGPRVPGGGEQPAQPNGWQYHSPSRPGSTAFPSQDGETGGHRRSFPPRTNPDKIAQRKSSMNQLQQWVNLRRGVPPPEDLRSPSRFYPVSRRVPEYYGPYSSQYPDDYQYYPPGVRPESICSMPAYDRISPPWALEDKRHAFRNGGGPAYQLREWKEPASYGRQDATVWIPSPSRQPVYYDELDAASSSLRRLSLQPRSHSVPRSPSQGSYSRARIYSPVRSPSARFERLPPRSEDIYADPAAYVMRRSISSPKVPPYPEVFRDSLHTYKLNEQDTDKLLGKLCEQNKVVREQDRLVQQLRAEKESLESALMGTHQELEMFGSQPAYPEKLRHKKDSLQNQLINIRVELSQATTALTNSTIEYEHLESEVSALHDDLWEQLNLDTQNEVLNRQIQKEIWRIQDVMEGLRKNNPSRGTDTAKHRGGLGPSATYSSNSPASPLSSASLTSPLSPFSLVSGSQGSPTKPGSNEPKANYEQSKKDPHQTLPLDTPRDISLVPTRQEVEAEKQAALNKGGYLCKLMQA

SEQ ID NO: 918248 - protein, 820 aa, Homo sapiens
  misc_feature (20)..(20): Xaa can be any naturally occurring amino acid
  misc_feature (50)..(50): Xaa can be any naturally occurring amino acid
  misc_feature (52)..(52): Xaa can be any naturally occurring amino acid
SCAGQFCQGWCVVGNSAGVXQSLHPETGKLCSLAGLGSGTASHWAGQAVXHXLALLGPRGKDCPALRLAPVQLGGHVAFTVVFCLSLWCLVDLFSASPPSDRVRTPPLDRSSLLGSRPQYLLAATNKVTVCWVDEAEASSTRCLSPQAEHAGVRTYFFSAESPEEQEAWIQAMGEAARVQIPPAQKSVPQAVRHSLAPPAPLHAGLESLTASPLASCSHEKPDSENVPPSKHHQQPPHNSLPKPEPEAKTRGEGDGRGCEKAERRPERPEVKKEPPVKANGLPAGPEPASEPGSPYPEGPRVPGGGEQPAQPNGWQYHSPSRPGSTAFPSQDGETGGHRRSFPPRTNPDKIAQRKSSMNQLQQWVNLRRGVPPPEDLRSPSRFYPVSRRVPEYYGPYSSQYPDDYQYYPPGVRPESICSMPAYDRISPPWALEDKRHAFRNGGGPAYQLREWKEPASYGRQDATVWIPSPSRQPVYYDELDAASSSLRRLSLQPRSHSVPRSPSQGSYSRARIYSPVRSPSARFERLPPRSEDIYADPAAYVMRRSISSPKVPPYPEVFRDSLHTYKLNEQDTDKLLGKLCEQNKVVREQDRLVQQLRAEKESLESALMGTHQELEMFGSQPAYPEKLRHKKDSLQNQLINIRVELSQATTALTNSTIEYEHLESEVSALHDDLWEQLNLDTQNEVLNRQIQKEIWRIQDVMEGLRKNNPSRGTDTAKHRGGLGPSATYSSNSPASPLSSASLTSPLSPFSLVSGSQGSPTKPGSNEPKANYEQSKKDPHQTLPLDTPRDISLVPTRQEVEAEKQAALNKGGYLCKLMQA

SEQ ID NO: 918249 - protein, 590 aa, Homo sapiens
MKRNPNAPVTKAGWLFKQASSGVKQWNKRWFVLVDRCLFYYKDEKEESILGSIPLLSFRVAAVQPSDNISRKHTFKVTVCWVDEAEASSTRCLSPQAEHAGVRTYFFSAESPEEQEAWIQAMGEAARVQIPPAQKSVPQAVRHSHEKPDSENVPPSKHHQQPPHNSLPKPEPEAKTRGEGDGRGCEKAERRPERPEVKKEPPVKANGLPAGPEPASEPGSPYPEGPRVPGGGEQPAQPNGWQYHSPSRPGSTAFPSQDGETGGHRRSFPPRTNPDKIAQRKSSMNQLQQWVNLRRGVPPPEDLRSPSRFYPVSRRVPEYYGPYSSQYPDDYQYYPPGVRPESICSMPAYDRISPPWALEDKRHAFRNGGGPAYQLREWKEPASYGRQDATVWIPSPSRQPVYYDELDAASSSLRRLSLQPRSHSVPRSPSQGSYSRARIYSPVRSPSARFERLPPRSEDIYADPAAYVMRRSISSPKVPPYPEVFRDSLHTYKLNEQDTDKLLGKLCEQNKVVREQDRLVQQLRAEKESLESALMGTHQELEMFGSQPAYPEKLRHKKDSLQNQLINIRVELSQATTDWPVVVAHTCSPR

SEQ ID NO: 918250 - protein, 604 aa, Homo sapiens
MKRNPNAPVTKAGWLFKQASSGVKQWNKRWFVLVDRCLFYYKDEKEESILGSIPLLSFRVAAVQPSDNISRKHTFKVTVCWVDEAEASSTRCLSPQAEHAGVRTYFFSAESPEEQEAWIQAMGEAARVQIPPAQKSVPQAVRHSHEKPDSENVPPSKHHQQPPHNSLPKPEPEAKTRGEGDGRGCEKAERRPERPEVKKEPPVKANGLPAGPEPASEPGSPYPEGPRVPGGGEQPAQPNGWQYHSPSRPGSTAFPSQDGETGGHRRSFPPRTNPDKIAQRKSSMNQLQQWVNLRRGVPPPEDLRSPSRFYPVSRRVPEYYGPYSSQYPDDYQYYPPGVRPESICSMPAYDRISPPWALEDKRHAFRNGGGPAYQLREWKEPASYGRQDATVWIPSPSRQPVYYDELDAASSSLRRLSLQPRSHSVPRSPSQGSYSRARIYSPVRSPSARFERLPPRSEDIYADPAAYVMRRSISSPKVPPYPEVFRDSLHTYKLNEQDTDKLLGKLCEQNKVVREQDRLVQQLRAEKESLESALMGTHQELEMFGSQPAYPEKLRHKKDSLQNQLINIRVELSQATTVTQGAGFVHPTSSALGSRATTSQLVLS

SEQ ID NO: 918251 - protein, 125 aa, Homo sapiens
QGMWNELRSLEQKLPEVTDHGLWQEHSGIVMLASYPCIPSSCPCCSNRPHVPAGPSIPRSVPGQPPHLQVKRARHRCKSSAPCSLPPLQPPAAVLCGGLSLHPSLFLCGGCLSISLSPSGGFSYL

SEQ ID NO: 918252 - protein, 140 aa, Homo sapiens
MKRNPNAPVTKAGWLFKQASSGVKQWNKRWFVLVDRCLFYYKDEKEESILGSIPLLSFRVAAVQPSDNISRKHTFKAEHAGVRTYFFSAESPEEQEAWIQAMGEAARVQIPPAQKSVPQAVRHSPEKPDTETVPPTTTLS

SEQ ID NO: 918253 - protein, 769 aa, Homo sapiens
MKRNPNAPVTKAGWLFKQASSGVKQWNKRWFVLVDRCLFYYKDEKEESILGSIPLLSFRVAAVQPSDNISRKHTFKVTVCWVDEAEASSTRCLSPQAEHAGVRTYFFSAESPEEQEAWIQAMGEAARVQIPPAQKSVPQAVRHSLAPPAPLHAGLESLTASPLASCSHEKPDSENVPPSKHHQQPPHNSLPKPEPEAKTRGEGDGRGCEKAERRPERPEVKKEPPVKANGLPAGPEPASEPGSPYPEGPRVPGGGEQPAQPNGWQYHSPSRPGSTAFPSQDGETGGHRRSFPPRTNPDKIAQRKSSMNQLQQWVNLRRGVPPPEDLRSPSRFYPVSRRVPEYYGPYSSQYPDDYQYYPPGVRPESICSMPAYDRISPPWALEDKRHAFRNGGGPAYQLREWKEPASYGRQDATVWIPSPSRQPVYYDELDAASSSLRRLSLQPRSHSVPRSPSQGSYSRARIYSPVRSPSARFERLPPRSEDIYADPAAYVMRRSISSPKVPPYPEVFRDSLHTYKLNEQDTDKLLGKLCEQNKVVREQDRLVQQLRAEKESLESALMGTHQELEMFGSQPAYPEKLRHKKDSLQNQLINIRVELSQATTALTNSTIEYEHLESEVSALHDDLWEQLNLDTQNEVLNRQIQKEIWRIQDVMEGLRKNNPSRGTDTAKHRGGLGPSATYSSNSPASPLSSASLTSPLSPFSLVSGSQGSPTKPGSNEPKANYEQSKKDPHQTLPLDTPRDISLVPTRQEVEAEKQAALNKGGYLCKLMQA

SEQ ID NO: 918254 - protein, 797 aa, Homo sapiens
MSNKTGGKRPATTNSDIPNHNMVSEVPPERPSVRATRTARKAVAFGKRSHSMKRNPNAPVTKAGWLFKQASSGVKQWNKRWFVLVDRCLFYYKDEKEESILGSIPLLSFRVAAVQPSDNISRKHTFKVTVCWVDEAEASSTRCLSPQAEHAGVRTYFFSAESPEEQEAWIQAMGEAARVQIPPAQKSVPQAVRHSHEKPDSENVPPSKHHQQPPHNSLPKPEPEAKTRGEGDGRGCEKAERRPERPEVKKEPPVKANGLPAGPEPASEPGSPYPEGPRVPGGGEQPAQPNGWQYHSPSRPGSTAFPSQDGETGGHRRSFPPRTNPDKIAQRKSSMNQLQQWVNLRRGVPPPEDLRSPSRFYPVSRRVPEYYGPYSSQYPDDYQYYPPGVRPESICSMPAYDRISPPWALEDKRHAFRNGGGPAYQLREWKEPASYGRQDATVWIPSPSRQPVYYDELDAASSSLRRLSLQPRSHSVPRSPSQGSYSRARIYSPVRSPSARFERLPPRSEDIYADPAAYVMRRSISSPKVPPYPEVFRDSLHTYKLNEQDTDKLLGKLCEQNKVVREQDRLVQQLRAEKESLESALMGTHQELEMFGSQPAYPEKLRHKKDSLQNQLINIRVELSQATTALTNSTIEYEHLESEVSALHDDLWEQLNLDTQNEVLNRQIQKEIWRIQDVMEGLRKNNPSRGTDTAKHRGGLGPSATYSSNSPASPLSSASLTSPLSPFSLVSGSQGSPTKPGSNEPKANYEQSKKDPHQTLPLDTPRDISLVPTRQEVEAEKQAALNKGGYLCKLMQA

SEQ ID NO: 918255 - protein, 177 aa, Homo sapiens
MGACYTHHTLTACTHAHAHTHTCSTAIRLCEVSAAPLALLVFCRQLFPPPALLFPGPPGHRRLHSGIHCSTRSRGWPDLEFKQQRSPPWSERRPGLQIRRACLLVAKVLQGSSEGWRAAQPPPEDTGRRHRRILKRGDTPFLQRRIASHDKASRVSPHTPQKGDDPPQAALTLNPCC

SEQ ID NO: 918256 - protein, 521 aa, Homo sapiens
MRVFIVPCEKAKPKITEPTASQLAFSEESSFQELLAQRSSRDSRLGQARDEEKLIKIQEGNLRPGTNPHKEICPEKLSYKHDDLEPDDSLGLRVLQERVTPQDALHECDSQGPGKDPMTDARNNPYTCTECGKGFSKKWALVRHQQIHAGVKPYECNECGKACRYMADVIRHMRLHTGEKPYKCIECGKAFKRRFHLTEHQRIHTGDKPYECKECGKAFTHRSSFIQHNMTHTREKPFLCKECGKAFYYSSSFAQHMRIHTGKKLYECGECGKAFTHRSTFIQHNVTHTGEKPFLCKECGKTFCLNSSFTQHMRIHTGEKPYECGECGKAFTHRSTFIRHKRTHTGEKPFECKECGKAFCDSSSLIQHMRIHTGEKPYECSECGKAFTHHSVFIRHNRTHSGQKPLECKECAKAFYYSSSFTRHMRIHTGEKPYVCRECGKAFTQPANFVRHNRIHTGEKPFECKECEKAFCDNFALTQHMRTHTGEKPFECNECGKTFSHSSSLEPYTVPENNRGERPGG

SEQ ID NO: 918257 - protein, 191 aa, Homo sapiens
EDLMPEYKGRTVLVRDAQEGSVTLQILDVRLEDQGSYRCLIQVGNLSKEDTVILQVAGGAWGESGERTSSINSCPCSSQEAMGEEGHGQDHTLAEALLASGLLLRHHRNCFAPVDSAQGKEVAACSSRADISGDTPMVHSWDLLLLQTLLGKFQGIAIEYLSAHGWDGTVALWEGLYIEALLLICQIVFIL

SEQ ID NO: 918258 - protein, 223 aa, Homo sapiens
GTCQSPVFPWQQERPKSAVFPGEGKVKMSVEEQIDRMRRHQSGSMREKRRSLQLPASPAPDPSPRPAYKVVRRHRSIHEVDISNLEAALRAEEPGGHAYETPREEIARLRKMELEPQHYDVDINKELSTPDKVLIPERYIDLEPDTPLSPEELKEKQKKVERIKTLIAKSSMQNVVPIGEGDSVDVPQDSESQLQEQEKRIEISCALATEASRRGRMLSGGIW

SEQ ID NO: 918259 - protein, 236 aa, Homo sapiens
MCADPKGSKRVLSCWGDSWPRMIVAAILAIAGIVMMTYADGFHSHSVIGIALVVASASMSALYKVLFKLLLGSAKFGEAALFLSILGVFNILFITCIPIILYFTKVEYWSSFDDIPWGNLCGFSVLLLTFNIVLNFGIAVTYPTLMSLGIVLSIPVNAVIDHYTSQIVFNGVRVIAIIIIGLGFLLLLLPEEWDVWLIKLLTRLKVRKKEEPAEGAADLSSGPQSKNRRARPSFAR

SEQ ID NO: 918260 - protein, 153 aa, Homo sapiens
MSSPAQREASSVKTICACAVQSPVCTVSSVSQRLLRTASRGDQMRRDKLPAWLGTDPLGMLLSGRAAVEAPASIHIQTPFPFLHRCFPSDGPQDLPLIQVFSLGRREKEEAFQVWEVQLQTHQVKTHQHTLPCFWATSLQCTCRRPLWMHRVS

SEQ ID NO: 918261 - protein, 153 aa, Homo sapiens; identical to SEQ ID NO: 918260

SEQ ID NO: 918262 - protein, 215 aa, Homo sapiens
MEKNPPDDTGPVHVPLGHIVANEKWRGSQLAQEMQGKIKLIFEDGLTPDFYLSNRCCILYVTEADLVAGNGYRKRLVRVRNSNNLKGIVVVEKTRMSEQYFPALQKFTVLDLGMVLLPVASQMEASCLVIQLVQEQTKEPSKNPLLGKKRALLLSEPSLLRTVQQIPGVGKVKAPLLLQKFPSIQQLSNASIGELEQVVGQAVAQQIHAFFTQPR

SEQ ID NO: 918263 - protein, 258 aa, Homo sapiens
GLVRGWCESAEVGFLPAVFGPWTGLRSYGADPAGVSGARWRPSMEKNPPDDTGPVHVPLGHIVANEKWRGSQLAQEMQGKIKLIFEDGLTPDFYLSNRCCILYVTEADLVAGNGYRKRLVRVRNSNNLKGIVVVEKTRMSEQYFPALQKFTVLDLGMVLLPVASQMEASCLVIQLVQEQTKEPSKNPLLGKKRALLLSEPSLLRTVQQIPGVGKVKAPLLLQKFPSIQQLSNASIGELEQVVGQAVAQQIHAFFTQPR

SEQ ID NO: 918264 - protein, 120 aa, Homo sapiens
MSEQYFPALQKFTVLDLGMVLLPVASQMEASCLVIQLVQEQTKEPSKNPLLGKKRALLLSEPSLLRTVQQIPGVGKVKAPLLLQKFPSIQQLSNASIGELEQVVGQAVAQQIHAFFTQPR

SEQ ID NO: 918265 - protein, 215 aa, Homo sapiens; identical to SEQ ID NO: 918262

SEQ ID NO: 918266 - protein, 120 aa, Homo sapiens; identical to SEQ ID NO: 918264

SEQ ID NO: 918267 - protein, 172 aa, Homo sapiens
MARVTAGAGDARCCILYVTEADLVAGNGYRKRLVRVRNSNNLKGIVVVEKTRMSEQYFPALQKFTVLDLGMVLLPVASQMEASCLVIQLVQEQTKEPSKNPLLGKKRALLLSEPSLLRTVQQIPGVGKVKAPLLLQKFPSIQQLSNASIGELEQVVGQAVAQQIHAFFTQPR

SEQ ID NO: 918268 - protein, 146 aa, Homo sapiens
LPLMQSQSELAVGAAGSSRSAHERTLPTGGRAGWFCPAAAAHKPRGGALRLPGFRRRAQQGPDYALAGVARQPAGTCRRRCNRSHCRAEAPQWPTPAAAPAAHSPHLSLGKSGLGKLTLINSLFLTDLYSPEYPGPSQRIKKPVQV

SEQ ID NO: 918269 - protein, 135 aa, Homo sapiens
LPLMQSQSELAVGAAGSSRSAHERTLPTGGRAGWFCPAAAAHKPRGGALRLPGFRRRAQQGPDYALAGVARQPAGTCRRRCNRSHCRAEAPQWPTPAAAPAAHSPHLSLALFTERAWELQHLNSNKHTCYLELGF

SEQ ID NO: 918270 - protein, 67 aa, Homo sapiens
RAEAPQWPTPAAAPAAHSPHLSLGTCGPQRLPQPGPGDPREVPGYLAPLILGRVGPLRLPGMRELHP

SEQ ID NO: 918271 - protein, 118 aa, Homo sapiens
LPLMQSQSELAVGAAGSSRSAHERTLPTGGRAGWFCPAAAAHKPRGGALRLPGFRRRAQQGPDYALAGVARQPAGTCRRRCNRSHCRAEAPQWPTPAAAPAAHSPHLSLEGKHEQITF

SEQ ID NO: 918272 - protein, 173 aa, Homo sapiens
MKFKPNQTRTYDREGFKKRAACLCFRSEQEDEVLLVSSSRYPDQWIVPGGGMEPEEEPGGAAVREVYEEAGVKGKLGRLLGIFEQNQDRKHRTYVYVLTVTEILEDWEDSVNIGRKREWFKVEDAIKVLQCHKPVHAEYLEKLKLGCSPANGNSTVPSLRIIMPCFDDRITVE

SEQ ID NO: 918273 - protein, 390 aa, Homo sapiens
MPDKAMGGGTLAGTGSGLLQYQTQNSPRNTECKEAFHIGEGYHRCSECGKAFSHRNRLCEHQRVHSRERPYKCSECGKFFSHNSSLTVHQRVHMGLKPYGCSECGKAYRKSSHLVQHKKVHAGERPYGCSECGKAYSRSTHLVRHKNLHTGERAYRCSECGKAYSSKHTLIQHQRVHTGEMEPGLMNAVNVGNPLDKAMALLNTREFTLGQSLISVVNVGNASAAKSHLLGIGESTLEKGLISALNVGRFLAKSLALLHIREFTLVKGCECTECGKSFSQRSSLILHQRVHTGERPYVCSECGKAFSVKSILVQHLRVHTRKRPYECSECRKLFSHKSNLIKYKKKITLEKRLKPTAYVVPESSPWRKALERREDAVCLVHIVGDTGQKL

SEQ ID NO: 918274 - protein, 176 aa, Homo sapiens
MKNPIQRTKRQDTLCPCRDDGASCVGPEETARLRPLEPQAVCAGTRAPLEVLQQRRHLGTRLPWETTISFQPRCASWQTRADEGHVGDERTRSPSPIEERLYKGCTKPAIFFVTQIDSCAMQPFDETLAFTRCKLISRRQLEIVCWMCPFIYMNITISLDASKDTQHEIHFISTSL

SEQ ID NO: 918275 - protein, 198 aa, Homo sapiens
MVKVGVTLVRWHWTPFRASPVLCTLQTVPICAEAVLGLCLRAFSAPLPQTNPKCPHEQPSTKEGQESVNMHLSLLTSPRNFKKIFLMNYSKANTSVTIGGTLRELSGVLGNELQLPTVVTCSLSDTRFTGLLFWISFSHSFQDHLPNKPYTQILISGVYAEDTKQALGHSNPECVWSRKQPMVAGPQGEMAWESQAGA

SEQ ID NO: 918276 - protein, 142 aa, Homo sapiens
MVNVNPHESSSHCWKRKTDFHSMSSQLLGSLLHGKTPHNYGSCCQENNGNKEKRNSYYGVCPEIHPYYVTANDTIDSLKLGPGDFFERRCGWTKQSRALTSHQLAELSWLAFAVPAFVEFEICMLGVRRAGSCTTVSLWALE

SEQ ID NO: 918277 - protein, 333 aa, Homo sapiens
MLVRKLRHRPLHAFTLTCLKIPAAGKAALWALGLGGGICVCSLGTPGVSNAQQQWGALCFMEPIVQMGKQSLRGKVTPKDPQVLWAPVSASSMTWLPSDDWFLRVPPCRQGVLQSSGVGARVPGSPVPPALSGMRPQTLPQGGPILEERSLPQLPGTREIPAQPHQDYLNSFLENVKHPHKCSREQPRSPREYPGGRASSAGISTCCFHTLGPLQTMGLPGSLFCPKTNATRPKSNPRAGLPALLCGKDTDTPGGWRGLDRAAWRHVCLLGLPWPFCRILLHPGLGPTIKSCIGTAAWGQGGAGSSFPLHIRLHFPQRRDHLETYKSLAGLPA

SEQ ID NO: 918278 - protein, 236 aa, Homo sapiens
GPWVRKQDLLILDSTAVLGKETEVGGGHREPGQAAGSLETQRSRHSPPSTPPPLPPRPRSLHSQHIHLSITQAPRNRQVMASLCVAARLGMGVSVLPSPKLRVACSQGAGFLFGWQPGVWSAGAGQAALGALGDLAGGRRCRPSGTRASLQAWLGNSRAPHHSSACASGASASLSWKESLPVTGEAGHQPAQLHLRPLPTPPSKLPWQDPCKAAADHREAAAYSARHFLYPTPTPF

SEQ ID NO: 918279 - protein, 166 aa, Homo sapiens
LWQPWTDIRGHLAMSGDNFGCHNWKVFGIVPALNKSKQLQFSGLNSGHLSCSYTVYLCLSTQFIHQSGSVGQTRQVVPRVRSSAVDHDGTLENEREVTAQGHLRNFQEESNKELSHTLELESAPSTPTPLHSLSALHDPAAGYCSLEELRQRRQTWGGRITIINRP

SEQ ID NO: 918280 - protein, 151 aa, Homo sapiens
MEPKLLCRIRSPSYGSPSWCTQNFSILVGMRAEYKRGIRGVPTREAVHVASLVKPPGAVTVLRGLPSPPESSDAVLTPWHIRGSEPAVHTGWEKQQPGKRTTNRGRQPPTKRTCGTRQHAIWKASLYGSGHYHGKEKEWENLRFKKDPMLF

SEQ ID NO: 918281 - protein, 151 aa, Homo sapiens; identical to SEQ ID NO: 918280

SEQ ID NO: 918282 - protein, 205 aa, Homo sapiens
MFQDALGGRSRGSREESPAPSRAPASASLWRRLVVVEAKMAAQAAAAAQAAAAQAAQAEAADSWYLALLGFAEHFRTSSPPKIRLCVHCLQAVFPFKPPQRIEARTHLQLGSVLYHHTKNSEQARSHLEKAVSAGRAAREESRAPCKIWADGSRPRRVGGRSSATWGRDLRQSRRTPTRLCRTPKPPASQGTRKPRPPRLISRFW

SEQ ID NO: 918283 - protein, 556 aa, Homo sapiens
MPQVTFNDVAIDFTHEEWGWLSSAQRDLYKDVMVQNYENLVSVAGLSVTKPYVITLLEDGKEPWMMEKKLSKGMIPDWESRWENKELSTKKDNYDEDSPQTVIIEKVVKQSYEFSNSKKNLEYIEKLEGKHGSQVDHFRPAILTSRESPTADSVYKYNIFRSTFHSKSTLSEPQKISAEGNSHKYDILKKNLPKKSVIKNEKVNGGKKLLNSNKSGAAFSQGKSLTLPQTCNREKIYTCSECGKAFGKQSILNRHWRIHTGEKPYECRECGKTFSHGSSLTRHLISHSGEKPYKCIECGKAFSHVSSLTNHQSTHTGEKPYECMNCGKSFSRVSHLIEHLRIHTQEKLYECRICGKAFIHRSSLIHHQKIHTGEKPYECRECGKAFCCSSHLTRHQRIHTMEKQYECNKCLKVFSSLSFLVQHQSIHTEEKPFECQKCRKSFNQLESLNMHLRNHIRLKPYECSICGKAFSHRSSLLQHHRIHTGEKPYECIKCGKTFSCSSNLTVHQRIHTGEKPYKCNECGKAFSKGSNLTAHQRVHNGEKPNSVIPEDEKYLI

SEQ ID NO: 918284 - protein, 556 aa, Homo sapiens; identical to SEQ ID NO: 918283

SEQ ID NO: 918285 - protein, 209 aa, Homo sapiens
MAWVCGLIWWTFWHSPSSRLLHLKLFKTAFPFCQIALCAQCSCFSLRSEMGPHWLWLHLALVLLPPPALLLPSCEKGVLRVPLPLPRQAQEVSQQCPRRSPPPVESTVWVAPREPQPCRPRFTGGCGYCKHLNLAPPPMGRVGSSSVCPWDVFRFTLLFCSHAHMLELSCMECRSPCTYEISQQSCLLPYSVFISATLFLENIVFVLFL

SEQ ID NO: 918286 - protein, 140 aa, Homo sapiens
MMLRREPQRKSDRSLWAHIVYASLMNTKHISFSVLDKGSVERNSGSLHHYPPKPGLIYCREEMCRTIEVDPSGKGKNAIFQDGADLASTWSRWKPHGEETRNRNGKTRFCPTMEEPRRKYSASISQTMQPRDNTCDKTGF

SEQ ID NO: 918287 - protein, 171 aa, Homo sapiens
LTEELGLRPVAFLLALMSVCCGCRCFNILEALKITNYAQLTLYSSHNFQNLFSSSQLTHILSAPQLLQLYSLFVEPPTITIVPGPDFNPGSRIIPDTTPDPHDYISLIHLTFTPFPHISFFLVPHSNHTWFIDGSSTRPTCRSSAKAGYAIVSSTSIIEATTLPPPPALSK

SEQ ID NO: 918288 - protein, 268 aa, Homo sapiens
MGILLHNSPRSELLLISLKSYGRSPAGSSLTAVVMDSFIMNSYHNSQSALDNVASQVAAFAPPQRRGAQELAGSHISSHNSHVGPEATIKDVVPLRARCPWMPNEVLSGHPLPLPGNKQAMIPSGRCSFCPGPRLLGCWALTCLTRGKFSGTKAHGCPLFFFFLFLLLLFLLLLLLLLFLLLLLLQLLSPPPPPPAFLLHVPSLTAFTRRTEKPLPRVDITSSEAAAGLQDQVHRRRLGGPLHRPLCFATRSGREAQKTSPGAMTLVA

SEQ ID NO: 918289 - protein, 150 aa, Homo sapiens
HRNEQRQLACEARTKMESAMSDFSDCHNFAKRPPGRTTEQGFGKPERLERSPQKLRGRRPSPSRLRSQGEAERLVGSRDGSSRSLCRLHPVKEPVSTLLSRFWAAAELPLPSSDPVFPTGAPPGQGWCRMGKWRENLKEPQTRGPIAPQE

SEQ ID NO: 918290 - protein, 72 aa, Homo sapiens
HRNEQRQLACEARTKMESAMSDFSDCHNFAKRPPGRTTEQGFGKPERLERRMGKWRENLKEPQTRGPIAPQE

SEQ ID NO: 918291 - protein, 110 aa, Homo sapiens
MKNLFCGRPRVTTAATSSFQEQKQCSELIYSINDVLLLHMHAESFHFFKDGFGLFTLLLVQDTGSWAFLCQLTPNLAVGRAMTVCRNLCQLNTLRTKAKSWTWRVSEASL

SEQ ID NO: 918292 - protein, 155 aa, Homo sapiens
MTGCTHEVSYSKDNGTFKWFRNFLIKNTLIISPKECGAGKCPRCEEAVEKRPEGGVRVGLWLLEKEHFGRGPKVGRLPGVLEEQQGVRAAAAIALAAARRDPLPGPEPLPLCYPGPVSSLLPTASVGRCGEEVDSPRRSLPLGAPWSLLPWEPPR

SEQ ID NO: 918293 - protein, 559 aa, Homo sapiens
LLQVYPMSPERGTCGARLIPAPLALQLPEVVVVLRRLTLPMADKMVRTPKCSRCRNHGFLVPVKGHAGKCRWKQCLCEKCYLISERQKIMAAQKVLKTQAAEEEQEAALCAQGPKQASGAAAAAPAPVPVPAASLRPLSPGTPSGDADPGPEGRAAACFFEQPPRGRNPGPRALQPVLGGRSHVEPSERAAVAMPSLAGPPFGAEAAGSGYPGPLDLRRPMRTVPGPLFTDFGKSWPWSRGRLPELAAQASPDGELAEGFGVERSFSTGNGPSALRNPSSNRDLDWVTFRKKETRNRKEWAVQRAFNISAVVCAIPACKNKMASSRLSSASSSGGGFEEPSPTALAHLFPPFPWAGGSSSRITEFSCRHVSARTPAHSSLPVRGREAPPLSSALAQCACAPLPSVSPRAVRPLNINPDRALGPEYPGGSSMHPYCPFPLGYLDAPPGVPLQQGFRHVSRSQYQGGGLVSEPGGDFQPSYYLPPPPPPLPPLPPLPPQPQFLPPGYLSALHFLPPPPPPPPPSSFSLTVLFDTDKENTDDQDAEVLSGEPSQPSSQEQSD

SEQ ID NO: 918294 - protein, 382 aa, Homo sapiens
LLQVYPMSPERGTCGARLIPAPLALQLPEVVVVLRRLTLPMADKMVRTPKCSRCRNHGFLVPVKGHAGKCRWKQCLCEKCYLISERQKIMAAQKVLKTQAAEEEQEAALCAQGPKQASGAAAAAPAPVPVPAASLRPLSPGTPSGDADPGPEGRAAACFFEQPPRGRNPGPRALQPVLGGRSHVEPSERAAVAMPSLAGPPFGAEAAGSGYPGPLDLRRPMRTVPGPLFTDFVRPLNINPDRALGPEYPGGSSMHPYCPFPLGYLDAPPGVPLQQGFRHVSRSQYQGGGLVSEPGGDFQPSYYLPPPPPPLPPLPPLPPQPQFLPPGYLSALHFLPPPPPPPPPSSFSLTVLFDTDKENTDDQDAEVLSGEPSQPSSQEQSD

SEQ ID NO: 918295 - protein, 254 aa, Homo sapiens
VSLEVDSAPETPWLPPFRALRQRMPKLSHIWIPDPQKLSGIYVPEFGFPRPTAQNPGSRIQAPRDPGFRIRAPSDPSSESGLPEIQVPESGLLEIQAPESELPQIQVPESGLPEIQAPESELPQNQALESGLLQIQVPESGLQARIPGWEPATAVRLRFLKSGAKIHSPGGSGGAGWSSRGKEGPAFESRLRYAPGADSPTAPPKLRAGRGKAPGPTHGKRGAFWDLESSPWGSRGDGSGHPKPLPSAETGGLG

SEQ ID NO: 918296 - protein, 149 aa, Homo sapiens
LSLIPALVCQSSAEHLIFSRPLIMEAKDPAQTSWRPHPGSANPTGHSWGPLVAQPLQPCRDALTPHKDSGLSSRSTGGILKADLKLEEASCIPQVGVDIKQAPACLSSMALDMKEAKEWSTDPDEEPALSANHELDSPLGKCNDKRNKR

SEQ ID NO: 918297 - protein, 150 aa, Homo sapiens
MRIHSLENVDKALQFLKEQRVHLENVGSHDIVDGNHRLTLGLVWTIILRFQIQVIKIETEDNRETRSAKDALLLWCQMKTAGYPEVNIQNFTTSWRDGLAFNALIHRHRPDLVDFSKLTKSNANYNLQRAFRTAEQHLGLARLLDPEVYP

SEQ ID NO: 918298 - protein, 150 aa, Homo sapiens
MSQCIWPPYFLLLAQCNGSISGTANERDAQDKVMELAKVLREEHCRLSQQDKGIRRKLSGVSEALEGGQWSKEMERSQRGGQGVAGLGSVQIVATELEVSSRRVKGNFICISSPSHRLHDHLSSMSCQISSSIRFSQEHKLCCEVCMRGI

SEQ ID NO: 918299 - protein, 150 aa, Homo sapiens; identical to SEQ ID NO: 918298

SEQ ID NO: 918300 - protein, 1575 aa, Homo sapiens
MGDAADPREMRKTFIVPAIKPFDHYDFSRAKIACNLAWLVAKAFGTDKVTGSQINLHKIKHLASDVFCMSDSEAFAYYSIPFCRVTVLSAENVPEELQEPFYTDQYDQEHIKPPVVNLLLSAELYCRAGSLILKSDAAKPLLGHDAVIQALAQKGLYVTDQEKLVTERDLHKKPIQMEDNKPGHKSLKTGSRLEKEMVDSKARLTKQLIRKKERNFTSFKEFRLRYVENESAHLAMIDTLMMAYTVEMVSIEKVIACAQQYSAFFQATDLPYDIEDAVMYWINKVNEHLKDIMEQEQKLKEHHTVEAPGGQKARYRKEQTLLKQLPCIPLVENLLKDGTDGCALAALIHFYCPDVVRLEDICLKETMSLADSLYNLQLIQEFCQEYLNQCCHFTLEDMLYAASSIKSNYLVFMAELFWWFEVVKPSFVQPRVVRPQGAEPVKDMPSIPVLNAAKRNVLDSSSDFPSSGEGATFTQSHHHLPSRYSRPQAHSSASGGIRRSSSMSYVDGFIGTWPKEKRSSVHGVSFDISFDKEDSVQRSTPNRGITRSISNEGLTLNNSHVSKHIRKNLSFKPINGEEEAESIEEELNIDSHSDLKSCVPLNTNELNSNENIHYKLPNGALQNRILLDEFGNQIETPSIEEALQIIHDTEKSPHTPQPDQIANGFFLHSQEMSILNSNIKLNQSSPDNVTDTKGALSPITDNTEVDTGIHVPSEDIPETMDEDSSLRDYTVSLDSDMDDASKFLQDYDIRTGNTREALSPCPSTVSTKSQPGSSASSSSGVKMTSFAEQKFRKLNHTDGKSSGSSSQKTTPEGSELNIPHVVAWAQIPEETGLPQGRDTTQLLASEMVHLRMKLEEKRRAIEAQKKKMEAAFTKQRQKMGRTAFLTVVKKKGDGISPLREEAAGAEDEKVYTDRAKEKESQKTDGQRSKSLADIKESMENPQAKWLKSPTTPIDPEKQWNLASPSEETLNEGEILEYTKSIEKLNSSLHFLQQEMQRLSLQQEMLMQMREQQSWVISPPQPSPQKQIRDFKPSKQAGLSSAIAPFSSDSPRPTHPSPQSSNRKSASFSVKSQRTPRPNELKITPLNRTLTPPRSVDSLPRLRRFSPSQVPIQTRSFVCFGDDGEPQLKESKPKEEVKKEELESKGTLEQRGHNPEEKEIKPFESTVSEVLSLPVTETVCLTPNEDQLNQPTEPPPKPVFPPTAPKNVNLIEVSLSDLKPPEKADVPVEKYDGESDKEQFDDDQKVCCGFFFKDDQKAENDMAMKRAALLEKRLRREKETQLRKQQLEAEMEHKKEETRRKTEEERQKKEDERARREFIRQEYMRRKQLKLMEDMDTVIKPRPQVVKQKKQRPKSIHRDHIESPKTPIKGPPVSSLSLASLNTGDNESVHSGKRTPRSESVEGFLSPSRCGSRNGEKDWENASTTSSVASGTEYTGPKLYKEPSAKSNKHIIQNALAHCCLAGKVNEGQKKKILEEMEKSDANNFLILFRDSGCQFRSLYTYCPETEEINKLTGIGPKSITKKMIEGLYKYNSDRKQFSHIPAKTLSASVDAITIHSHLWQTKRPVTPKKLLPTKA

SEQ ID NO: 918301 - protein, 1209 aa, Homo sapiens
MSLADSLYNLQLIQEFCQEYLNQCCHFTLEDMLYAASSIKSNYLVFMAELFWWFEVVKPSFVQPRVVRPQGAEPVKDMPSIPVLNAAKRNVLDSSSDFPSSGEGATFTQSHHHLPSRYSRPQAHSSASGGIRRSSSMSYVDGFIGTWPKEKRSSVHGVSFDISFDKEDSVQRSTPNRGITRSISNEGLTLNNSHVSKHIRKNLSFKPINGEEEAESIEEELNIDSHSDLKSCVPLNTNELNSNENIHYKLPNGALQNRILLDEFGNQIETPSIEEALQIIHDTEKSPHTPQPDQIANGFFLHSQEMSILNSNIKLNQSSPDNVTDTKGALSPITDNTEVDTGIHVPSEDIPETMDEDSSLRDYTVSLDSDMDDASKFLQDYDIRTGNTREALSPCPSTVSTKSQPGSSASSSSGVKMTSFAEQKFRKLNHTDGKSSGSSSQKTTPEGSELNIPHVVAWAQIPEETGLPQGRDTTQLLASEMVHLRMKLEEKRRAIEAQKKKMEAAFTKQRQKMGRTAFLTVVKKKGDGISPLREEAAGAEDEKVYTDRAKEKESQKTDGQRSKSLADIKESMENPQAKWLKSPTTPIDPEKQWNLASPSEETLNEGEILEYTKSIEKLNSSLHFLQQEMQRLSLQQEMLMQMREQQSWVISPPQPSPQKQIRDFKPSKQAGLSSAIAPFSSDSPRPTHPSPQSSNRKSASFSVKSQRTPRPNELKITPLNRTLTPPRSVDSLPRLRRFSPSQVPIQTRSFVCFGDDGEPQLKESKPKEEVKKEELESKGTLEQRGHNPEEKEIKPFESTVSEVLSLPVTETVCLTPNEDQLNQPTEPPPKPVFPPTAPKNVNLIEVSLSDLKPPEKADVPVEKYDGESDKEQFDDDQKVCCGFFFKDDQKAENDMAMKRAALLEKRLRREKETQLRKQQLEAEMEHKKEETRRKTEEERQKKEDERARREFIRQEYMRRKQLKLMEDMDTVIKPRPQVVKQKKQRPKSIHRDHIESPKTPIKGPPVSSLSLASLNTGDNESVHSGKRTPRSESVEGFLSPSRCGSRNGEKDWENASTTSSVASGTEYTGPKLYKEPSAKSNKHIIQNALAHCCLAGKVNEGQKKKILEEMEKSDANNFLILFRDSGCQFRSLYTYCPETEEINKLTGIGPKSITKKMIEGLYKYNSDRKQFSHIPAKTLSASVDAITIHSHLWQTKRPVTPKKLLPTKA

SEQ ID NO: 918302 - protein, 1557 aa, Homo sapiens
MGDAADPREMRKTFIVPAIKPFDHYDFSRAKIACNLAWLVAKAFGTDKVTGSQINLHKIKHLASDVFCMSDSEAFAYYSIPFCRVTVLSAENVPEELQEPFYTDQYDQEHIKPPVVNLLLSAELYCRAGSLILKSDAAKPLLGHDAVIQALAQKGLYVTDQEKLVTERDLHKKPIQMEDNKPGHKSLKTGSRLEKEMVDSKARLTKQLIRKKERNFTSFKEFRLRYVENESAHLAMIDTLMMAYTVEMVSIEKVIACAQQYSAFFQATDLPYDIEDAVMYWINKVNEHLKDIMEQEQKLKEHHTVEAPGGQKARYRKEQTLLKQLPCIPLVENLLKDGTDGCALAALIHFYCPDVVRLEDICLKETMSLADSLYNLQLIQEFCQEYLNQCCHFTLEDMLYAASSIKSNYLVFMAELFWWFEVVKPSFVQPRVVRPQGAEPVKDMPSIPVLNAAKRNVLDSSSDFPSSGEGATFTQSHHHLPSRYSRPQAHSSASGGIRRSSSMSYVDGFIGTWPKEKRSSVHGVSFDISFDKEDSVQRSTPNRGITRSISNEGLTLNNSHVSKHIRKNLSFKPINGEEEAESIEEELNIDSHSDLKSCVPLNTNELNSNENIHYKLPNGALQNRILLDEFGNQIETPSIEEALQIIHDTEKSPHTPQPDQIANGFFLHSQEMSILNSNIKLNQSSPDNVTDTKGALSPITDNTEVDTGIHVPSEDIPETMDEDSSLRDYTVSLDSDMDDASKFLQDYDIRTGNTREALSPCPSTVSTKSQPGSSASSSSGVKMTSFAEQKFRKLNHTDGKSSGSSSQKTTPEGSELNIPHVVAWAQIPEETGLPQGRDTTQLLASEMVHLRMKLTKQRQKMGRTAFLTVVKKKGDGISPLREEAAGAEDEKVYTDRAKEKESQKTDGQRSKSLADIKESMENPQAKWLKSPTTPIDPEKQWNLASPSEETLNEGEILEYTKSIEKLNSSLHFLQQEMQRLSLQQEMLMQMREQQSWVISPPQPSPQKQIRDFKPSKQAGLSSAIAPFSSDSPRPTHPSPQSSNRKSASFSVKSQRTPRPNELKITPLNRTLTPPRSVDSLPRLRRFSPSQVPIQTRSFVCFGDDGEPQLKESKPKEEVKKEELESKGTLEQRGHNPEEKEIKPFESTVSEVLSLPVTETVCLTPNEDQLNQPTEPPPKPVFPPTAPKNVNLIEVSLSDLKPPEKADVPVEKYDGESDKEQFDDDQKVCCGFFFKDDQKAENDMAMKRAALLEKRLRREKETQLRKQQLEAEMEHKKEETRRKTEEERQKKEDERARREFIRQEYMRRKQLKLMEDMDTVIKPRPQVVKQKKQRPKSIHRDHIESPKTPIKGPPVSSLSLASLNTGDNESVHSGKRTPRSESVEGFLSPSRCGSRNGEKDWENASTTSSVASGTEYTGPKLYKEPSAKSNKHIIQNALAHCCLAGKVNEGQKKKILEEMEKSDANNFLILFRDSGCQFRSLYTYCPETEEINKLTGIGPKSITKKMIEGLYKYNSDRKQFSHIPAKTLSASVDAITIHSHLWQTKRPVTPKKLLPTKA

SEQ ID NO: 918303 - protein, 1461 aa, Homo sapiens
MGDAADPREMRKTFIVPAIKPFDHYDFSRAKIACNLAWLVAKAFGTDKVTGSQINLHKIKHLASDVFCMSDSEAFAYYSIPFCRVTVLSAENVPEELQEPFYTDQYDQEHIKPPVVNLLLSAELYCRAGSLILKSDAAKPLLGHDAVIQALAQKGLYVTDQEKLVTERDLHKKPIQMEDNKPGHKSLKTGSRLEKEMVDSKARLTKQLIRKKERNFTSFKEFRLRYVENESAHLAMIDTLMMAYTVEMVSIEKVIACAQQYSAFFQATDLPYDIEDAVMYWINKVNEHLKDIMEQEQKLKEHHTVEAPGGQKARYRKEQTLLKQLPCIPLVENLLKDGTDGCALAALIHFYCPDVVRLEDICLKETMSLADSLYNLQLIQEFCQEYLNQCCHFTLEDMLYAASSIKSNYLVFMAELFWWFEVVKPSFVQPRVVRPQGAEPVKDMPSIPVLNAAKRNVLDSSSDFPSSGEGATFTQSHHHLPSRYSRPQAHSSASGGIRRSSSMSYVDGFIGTWPKEKRSSVHGVSFDISFDKEDSVQRSTPNRGITRSISNEGLTLNNSHVSKHIRKNLSFKPINGEEEAESIEEELNIDSHSDLKSCVPLNTNELNSNENIHYKLPNGALQNRILLDEFGNQIETPSIEEALQIIHDTEKSPHTPQPDQIANGFFLHSQEMSILNSNIKLNQSSPDNVTDTKGALSPITDNTEVDTGIHVPSEDIPETMDEDSSLRDYTVSLDSDMDDASKFLQDYDIRTGNTREALSPCPSTVSTKSQPGSSASSSSGVKMTSFAEQKFRKLNHTDGKSSGSSSQKTTPEGSELNIPHVVAWAQIPEETGLPQGRDTTQLLASEMVHLRMKLTKQRQKMGRTAFLTVVKKKGDGISPLREEAAGAEDEKVYTDRAKEKESQKTDGQRSKSLADIKESMENPQAKWLKSPTTPIDPEKQWNLASPSEETLNEGEILEYTKSIEKLNSSLHFLQQEMQRLSLQQEMLMQMREQQSWVISPPQPSPQKQIRDFKPSKQAGLSSAIAPFSSDSPRPTHPSPQSSNRKSASFSVKSQRTPRPNELKITPLNRTLTPPRSVDSLPRLRRFSPSQVPIQTRSFVCFGDDGEPQLKESKPKEEVKKEELESKGTLEQRGHNPEEKEIKPFESTVSEVLSLPVTETVCLTPNEDQLNQPTEPPPKPVFPPTAPKNVNLIEVSLSDLKPPEKADVPVEKYDGESDKEQFDDDQKVCCGFFFKDDQKAENDMAMKRAALLEKRLRREKETQLRKQQLEAEMEHKKEETRRKTEEERQKKEDERARREFIRQEYMRRKQLKLMEDMDTVIKPRPQVVKQKKQRPKSIHRDHIESPKTPIKGPPVSSLSLASLNTGDNESVHSGKRTPRSESVEGFLSPSRCGSRNGEKDWENASTTSSVASGTEYTGPKLYKEPSAKSNKHIIQNALAHCCLAGKVNEGQKKKILEVSMFA

SEQ ID NO: 918304 - protein, 1063 aa, Homo sapiens
MGDAADPREMRKTFIVPAIKPFDHYDFSRAKIACNLAWLVAKAFGTDKVTGSQINLHKIKHLASDVFCMSDSEAFAYYSIPFCRVTVLSAENVPEELQEPFYTDQYDQEHIKPPVVNLLLSAELYCRAGSLILKSDAAKPLLGHDAVIQALAQKGLYVTDQEKLVTERDLHKKPIQMEDNKPGHKSLKTGSRLEKEMVDSKARLTKQLIRKKERNFTSFKEFRLRYVENESAHLAMIDTLMMAYTVEMVSIEKVIACAQQYSAFFQATDLPYDIEDAVMYWINKVNEHLKDIMEQEQKLKEHHTVEAPGGQKARYRKEQTLLKQLPCIPLVENLLKDGTDGCALAALIHFYCPDVVRLEDICLKETMSLADSLYNLQLIQEFCQEYLNQCCHFTLEDMLYAASSIKSNYLVFMAELFWWFEVVKPSFVQPRVVRPQGAEPVKDMPSIPVLNAAKRNVLDSSSDFPSSGEGATFTQSHHHLPSRYSRPQAHSSASGGIRRSSSMSYVDGFIGTWPKEKRSSVHGVSFDISFDKEDSVQRSTPNRGITRSISNEGLTLNNSHVSKHIRKNLSFKPINGEEEAESIEEELNIDSHSDLKSCVPLNTNELNSNENIHYKLPNGALQNRILLDEFGNQIETPSIEEALQIIHDTEKSPHTPQPDQIANGFFLHSQEMSILNSNIKLNQSSPDNVTDTKGALSPITDNTEVDTGIHVPSEDIPETMDEDSSLRDYTVSLDSDMDDASKFLQDYDIRTGNTREALSPCPSTVSTKSQPGSSASSSSGVKMTSFAEQKFRKLNHTDGKSSGSSSQKTTPEGSELNIPHVVAWAQIPEETGLPQGRDTTQLLASEMVHLRMKLTKQRQKMGRTAFLTVVKKKGDGISPLREEAAGAEDEKVYTDRAKEKESQKTDGQRSKSLADIKESMENPQAKWLKSPTTPIDPEKQWNLASPSEETLNEGEILEYTKSIEKLNSSLHFLQQEMQRLSLQQEMLMQMREQQSWVISPPQPSPQKQIRDFKPSKQAGLSSAIAPFSSDSPRPTHPSPQSSNRKSASFSVKSQRTPRPNELK

SEQ ID NO: 918305 - protein, 495 aa, Homo sapiens
MGDAADPREMRKTFIVPAIKPFDHYDFSRAKIACNLAWLVAKAFGTDKVTGSQINLHKIKHLASDVFCMSDSEAFAYYSIPFCRVTVLSAENVPEELQEPFYTDQYDQEHIKPPVVNLLLSAELYCRAGSLILKSDAAKPLLGHDAVIQALAQKGLYVTDQEKLVTERDLHKKPIQMEDNKPGHKSLKTGSRLEKEMVDSKARLTKQLIRKKERNFTSFKEFRLRYVENESAHLAMIDTLMMAYTVEMVSIEKVIACAQQYSAFFQATDLPYDIEDAVMYWINKVNEHLKDIMEQEQKLKEHHTVEAPGGQKARYRKEQTLLKQLPCIPLVENLLKDGTDGCALAALIHFYCPDVVRLEDICLKETMSLADSLYNLQLIQEFCQEYLNQCCHFTLEDMLYAASSIKSNYLVFMAELFWWFEVVKPSFVQPRVVRPQGAEPVKDMPSIPVLNAAKRNVLDSSSDFPSSGEGATFTQSHHHLPSRYSRPQAHSSASG

SEQ ID NO: 918306 - protein, 1575 aa, Homo sapiens; identical to SEQ ID NO: 918300

SEQ ID NO: 918307 - protein, 1138 aa, Homo sapiens
RYPSFLLQPRVVRPQGAEPVKDMPSIPVLNAAKRNVLDSSSDFPSRYSRPQAHSSASGGIRRSSSMSYVDGFIGTWPKEKRSSVHGVSFDISFDKEDSVQRSTPNRGITRSISNEGLTLNNSHVSKHIRKNLSFKPINGEEEAESIEEELNIDSHSDLKSCVPLNTNELNSNENIHYKLPNGALQNRILLDEFGNQIETPSIEEALQIIHDTEKSPHTPQPDQIANGFFLHSQEMSILNSNIKLNQSSPDNVTDTKGALSPITDNTEVDTGIHVPSEDIPETMDEDSSLRDYTVSLDSDMDDASKFLQDYDIRTGNTREALSPCPSTVSTKSQPGSSASSSSGVKMTSFAEQKFRKLNHTDGKSSGSSSQKTTPEGSELNIPHVVAWAQIPEETGLPQGRDTTQLLASEMVHLRMKLEEKRRAIEAQKKKMEAAFTKQRQKMGRTAFLTVVKKKGDGISPLREEAAGAEDEKVYTDRAKEKESQKTDGQRSKSLADIKESMENPQAKWLKSPTTPIDPEKQWNLASPSEETLNEGEILEYTKSIEKLNSSLHFLQQEMQRLSLQQEMLMQMREQQSWVISPPQPSPQKQIRDFKPSKQAGLSSAIAPFSSDSPRPTHPSPQSSNRKSASFSVKSQRTPRPNELKITPLNRTLTPPRSVDSLPRLRRFSPSQVPIQTRSFVCFGDDGEPQLKESKPKEEVKKEELESKGTLEQRGHNPEEKEIKPFESTVSEVLSLPVTETVCLTPNEDQLNQPTEPPPKPVFPPTAPKNVNLIEVSLSDLKPPEKADVPVEKYDGESDKEQFDDDQKVCCGFFFKDDQKAENDMAMKRAALLEKRLRREKETQLRKQQLEAEMEHKKEETRRKTEEERQKKEDERARREFIRQEYMRRKQLKLMEDMDTVIKPRPQVVKQKKQRPKSIHRDHIESPKTPIKGPPVSSLSLASLNTGDNESVHSGKRTPRSESVEGFLSPSRCGSRNGEKDWENASTTSSVASGTEYTGPKLYKEPSAKSNKHIIQNALAHCCLAGKVNEGQKKKILEEMEKSDANNFLILFRDSGCQFRSLYTYCPETEEINKLTGIGPKSITKKMIEGLYKYNSDRKQFSHIPAKTLSASVDAITIHSHLWQTKRPVTPKKLLPTKA

SEQ ID NO: 918308 - protein, 1557 aa, Homo sapiens; identical to SEQ ID NO: 918302

SEQ ID NO: 918309 - protein, 1235 aa, Homo sapiens
MGDAADPREMRKTFIVPAIKPFDHYDFSRAKIACNLAWLVAKAFGTDKVTGSQINLHKIKHLASDVFCMSDSEAFAYYSIPFCRVTVLSAENVPEELQEPFYTDQYDQEHIKPPVVNLLLSAELYCRAGSLILKSDAAKPLLGHDAVIQALAQKGLYVTDQEKLVTERDLHKKPIQMEDNKPGHKSLKTGSRLEKEMVDSKARLTKQLIRKKERNFTSFKEFRLRYVENESAHLAMIDTLMMAYTVEMVSIEKVIACAQQYSAFFQATDLPYDIEDAVMYWINKVNEHLKDIMEQEQKLKEHHTVEAPGGQKARYRKEQTLLKQLPCIPLVENLLKDGTDGCALAALIHFYCPDVVRLEDICLKETMSLADSLYNLQLIQEFCQEYLNQCCHFTLEDMLYAASSIKSNYLVFMAELFWWFEVVKPSFVQPRVVRPQGAEPVKDMPSIPVLNAAKRNVLDSSSDFPSSGEGATFTQSHHHLPSRYSRPQAHSSASGGIRRSSSMSYVDGFIGTWPKEKRSSVHGVSFDISFDKEDSVQRSTPNRGITRSISNEGLTLNNSHVSKHIRKNLSFKPINGEEEAESIEEELNIDSHSDLKSCVPLNTNELNSNENIHYKLPNGALQNRILLDEFGNQIETPSIEEALQIIHDTEKSPHTPQPDQIANGFFLHSQEMSILNSNIKLNQSSPDNVTDTKGALSPITDNTEVDTGIHVPSEDIPETMDEDSSLRDYTVSLDSDMDDASKFLQDYDIRTGNTREALSPCPSTVSTKSQPGSSASSSSGVKMTSFAEQKFRKLNHTDGKSSGSSSQKTTPEGSELNIPHVVAWAQIPEETGLPQGRDTTQLLASEMVHLRMKLTKQRQKMGRTAFLTVVKKKGDGISPLREEAAGAEDEKVYTDRAKEKESQKTDGQRSKSLADIKESMENPQAKWLKSPTTPIDPEKQWNLASPSEETLNEGEILEYTKSIEKLNSSLHFLQQEMQRLSLQQEMLMQMREQQSWVISPPQPSPQKQIRDFKPSKQAGLSSAIAPFSSDSPRPTHPSPQSSNRKSASFSVKSQRTPRPNELKITPLNRTLTPPRSVDSLPRLRRFSPSQVPIQTRSFVCFGDDGEPQLKESKPKEEVKKEELESKGTLEQRGHNPEEKEIKPFESTVSEVLSLPVTETVCLTPNEDQLNQPTEPPPKPVFPPTAPKNVNLIEVSLSDLKPPEKADVPVEKYDGESDKEQFDDDQKVCCGFFFKV

SEQ ID NO: 918310 - protein, 510 aa, Homo sapiens
MKNSKIFQCDKYMKIFHKFSNLNGHKVRHTRKKPFKYKEFGKSFCIFSNLTQHKIICTRVNFYKCEDCGKAFNGSSIFTKHKRIHIGEKSYICEECGKACNQFTNLTTHKIIYTRDKLYKREECSKAFNLSSHITTHTIIHTGENPYKREECDKAFNQSLTLTTHKIIHTREKLNEYKECGKAFNQSSHLTRHKIIHTGEKPYKCEECGKAFNQSSHLTRHKIIHTGEKPYRCEECGKAFRQSSHLTTHKIIHTGEKPYKCEECGKAFNKSSHLTRHKSIHTGEKPYQCEKCGKASNQSSNLTEHKNIHTEEKPYKCEECGKAFNQFSNLTTHKRIHTGEKPYKCEECGKAFNQSSILTTHKRIHTGEKSYKCEECGKAFYRSSKLTEHKKIHTGEKPYTCEECGKAFNHSSHLATHKVIHTGEKPYQCEECGKAFNQSSHLTRHKRIHTGEKPYQCEKCGKAFNQSSNLTGHKKIHTGEKLYKPKRCNSDFENTSKFSKHKRNYAGEKS

SEQ ID NO: 918311 - protein, 126 aa, Homo sapiens
HLLHGRYTYREYLEAHLKFLAFFLQEATLYLGWNRAKEIWECLVTGQDVCELDREMCFEWFTKGQHDLESDVQQQLFKEKILKLESYEITMNGFNLFKTFFENVNLCDHRLKRQGAQLVSTLFSNL

SEQ ID NO: 918312 - protein, 571 aa, Homo sapiens
MIVRLPQPRGTILWGWDSDSSLSLLHDTENLSWKTKSGDDLMTVGWTHVKAPPLAFRGWLSNETLKNDENGNCSGEGIEFPTTNLYELESRVLTDHWSIPYKREESLGKCLLASTYLARLGCSPLVPALRCISFLSHPVPPGVDVLFSCKWTLTVTRALQLPVGESGFRAFLPVSQDSCFLFFGELGGFAAIQAKLHSEDIELGRLVSIPELLSAVKLLCMRFQPDLVTIVDDLRLDILLRMLKSPHFSAKMNSLKEVTKLIEDSTLSKSVKNAIDTDRLLDWLVENSVLSIALEGNIDQAQYCDRIKGIIELLGSKLSLDELTKIWKIQSGQSSTVIENIHTIIAAAAVKFNSDQLNHLFVLIQKQALEEHLTILSDAYAVKEAIKRSYIIKCIEDIKRLNNPQFVWVVPALRQLHEITRSFIKQTYQKQDKSIIQDLKKNFEIVKLVTGSLIACHRLAAAVAGPGGLSGSTLVDGRYTYREYLEAHLKFLAFFLQEATLYLGWNRAKEIWECLVTGQDVCELDREMCFEWFTKGQHDLESDVQQQLFKEKILKLESYEITMNDKELSCM

SEQ ID NO: 918313 - protein, 145 aa, Homo sapiens
MSNAVCYVCRVAAEQRDKGKKKLKWVQRKVCMDNGMAEENNGWHLQNAVIGLNESFPISIQNHRNITLKRAFTKCPWECPVGHITEIAELYLTAGLLPCRFPSGSQLLAVQAKNFKMICQKGHKVLSPNITRVGKRSSLILFCGS

SEQ ID NO: 918314 - protein, 145 aa, Homo sapiens; identical to SEQ ID NO: 918313

SEQ ID NO: 918315 - protein, 424 aa, Homo sapiens
MKQVRTPLPGSSGTELGQHSATLTGRRVGEKEGRGGEEEEDEDEEEKEKEKKKKKKEEKEKEEEASRPMKSILQDLESQESMVAFLTSAVASADGEQARLRGQLKEQRLRCRCLAHLLAWAQKQPEAAAPAPGTGMDSVCGGTHRALQGAMEKLQSCFMQLMQEKVDLKERVEELEHRCIQLSGETDTIGGAAQWVKGTQRLSPVLSQESTLPSLSQGAALKEQHREEEEHIHRLAQDKEEMKAGRMAAEHPLLQVKLLELQELVLRLVGDRTEGHGRFLAAAQSPAHEPAPGDPSPPELRAADKQDLCQVTLTSSVEPAQGEAGEGSPLDNPSAQQIMQLFGEMQNPQERPGLGSIPCILFSHQADKNHQAPSHVVTATFPYTTMLSIWVAACHIHSALDTYIKVMHRPGVCVLGTARSLGWS

SEQ ID NO: 918316 - protein, 374 aa, Homo sapiens
LLKPSFTPRTAQAQAEALWSRRDPLAWAVVWADSRGRFTTLCPAPRPLTWPWMIPSRPPSAAGEKRGPRRQQTLGGGCGGGQRGVRLGPVPAAVRPGRDAELRLTHTAIVSLHLVKCRMQVDPGWYKGVLSGFGVTVHSDGLCGLARGCAQTFFGYSLQGFFKFGLYEVFKIRSAELLGPEKAYGWRAGLYLFAWASAEFFPDVSLEPMEAVKHPASHGVQDVGRGGPVGLLQGRGAAVAEADPLHHDEVRLLRAHGRGPLQVCRAQAPEPVHQGQAAGHHLRGVFCAVVSHPADSVVSVLNKEKGIAALGVLRRLGFTGVWKGVVARIGLFAHIPMIGTLTALQWFIYDLVKVYFKLPRPPVAQAPEPLKKKK

SEQ ID NO: 918317 - protein, 478 aa, Homo sapiens
MLENYRNLVFLGIALTKPDLITCLEQGKEPWNIKRHEMVAKPPVICSHFPQDLWAEQDIKDSFQEAILKKYGKYGHDNLQLQKGCKSVDECKVHKEHDNKLNQCLITTQSNIFQCDPSAKVFHTFSNSNRHKIRHTRKKPFKCKKCEKSFCMLLHLTQHKRFHITENSYQCKDCGKAFNWFSTLTTHRRIHTGEKPYKCEECGKAFNRSSHLTTHKIIHTGEKPYRCEECGKAFNRSSHLTTHKRIHTGVKPYKCTECGKAFNRSSHLTTHRIIHTGEKPYKCEECGKAFNQSSTLTTHKITHAGEKPYKCEECGKAFYRFSYLTKHKTSHTGEKFYKCEECGKGFNWSSALTKHKRIHTGEKPYKCEECGKAFNESSNLTTHKMIHTGEKPYKCDECGKAFNRSSQLTAHKMIHTGEKPYKCEECGKAFNRSSTLTKHKITHTGEKSYKWEECGKDFNQSLSLIKQNNSYWRETLQM

SEQ ID NO: 918318 - protein, 390 aa, Homo sapiens
MLENYRNLVFLGIALTKPDLITCLEQGKEPWNIKRHEMVAKPPVICSHFPQDLWAEQDIKDSFQEAILKKYGKYGHDNLQLQKGCKSVDECKVHKEHDNKLNQCLITTQSNIFQCDPSAKVFHTFSNSNRHKIRHTRKKPFKCKKCEKSFCMLLHLTQHKRFHITENSYQCKDCGKAFNWFSTLTTHRRIHTGEKPYKCEECGKAFNRSSHLTTHKIIHTGEKPYRCEECGKAFNRSSHLTTHKRIHTGVKPYKCTECGKAFNRSSHLTTHRIIHTGEKPYKCEECGKAFNQSSTLTTHKITHAGEKPYKCEECGKAFYRFSYLTKHKTSHTGEKFYKCEECGKGFNWSSALTKHKRIHTGEKPYKSERCDSALKTPQTFQNINHSVEKS

SEQ ID NO: 918319 - protein, 141 aa, Homo sapiens
MRLRKNSTGEGLGQGMRHDEKGFVVLEKWPVQLEQGAAGKEVTSENEASARATGAAVEAGRPTGSPCGRPGRHRGLVTVQPWRDTRETEAGAALTAPAVELNMGRGCGEKGNQNDLITFGLEQLAGCDATAEKVKPGEEQV

SEQ ID NO: 918320 - protein, 368 aa, Homo sapiens
KLTEFKWNGSGMHLNGLGMDWNGMEWNGTERNGTDPEWNGTDPEWNGTEWNGMEWNEVDSNGMEWNGIDSNEMGWTRMEWNGMESTRVEWNGMEWNRMELTQFKWNEDWNEMEWNGLKWNGMEWNGLKWNGLKWNGMEWTRIEWNGMDCNGKEWNGTEWTRMEWKGLEWNGMEWNGLEWNGVEYSNGMEWNGMEWNGMEWNGMEWNGMDSNEMEWTRMKWNGLEWNGMEWNGMEWNGMEWNGMEWNRLEWNGMDSKEMECSGMDSNGMQWNGIDSNGMEWNGMEWNGTGMDANEMEWNGMDSDGTERNGTEWNGIYSNGMEWNGIYSNGMEWNGLKWNSMEWNGLECNGMEWTRVEWNGLERSGVEWI

SEQ ID NO: 918321 - protein, 138 aa, Homo sapiens
MLRGLDWEAGWISTKTRESVGRGARAEGAQGKICDYERDLKKTFPTDWQEKMTVSLNVFCNIKNGIQIYGTISVIHNQNYPFKTDGSDCCTFGYYICIPGGRKGDGKRIQGILLEKFTSYSGKKVFLKDFHLQLIGQS

SEQ ID NO: 918322 - protein, 301 aa, Homo sapiens
MERHMVRGQLYKHFDLERKNAKQAEARLDQRLQRLKVICLYHVKLLTWEQRQLQKELQRLQQETMKKKFSSYLGNGFQKRPEDVLVFSPQGRQKHRAPQAKKMRALATRMAQDTCKSKSQVPPSHDAGLKDPMKSKKQPLSQNNRTACFIKEQPQAQEKDSVNPSKDVDPSKGISVPCQNQEVSTNTIEQGPSSSPASDSGMACADETRSKDVALKPDGNTGKQIPPKHMECAGSFEGEFTKPTFLELLSKARNAHYLRHRVPPESERLLSIGEIFGHGESSSSRAGKECENRVPSKFLPL

SEQ ID NO: 918323 - protein, 215 aa, Homo sapiens
MDFEDDYTHSACRNTYQGFNGMDRDYGPGSYGGMDRDYGHGSYGGQRSMDSYLNQSYGMDNHSGGGGGSRFGPYESYDSRSSLGGRDLYRSGYGFNEPEQSRFGGSYGGRFESSYRNSLDSFGGRNQGGSSWEAPYSRSKLRPGFMEDRGRENYSSYSSFSSPHMKPAPVGSRGRGTPAYPESTFGSRNYDAFGGPSTGRGRGRGEVIFCKLLLK

SEQ ID NO: 918324 - protein, 146 aa, Homo sapiens
MDFEDDYTHSACRNTYQGFNGMDRDYGPGSYGGLTFKDIYLKILLLSASKHMGDFGSIHRPGIVVDYQNKSTNVTVAAARGIKRKMMQPFNKPSGTFIKKPKLAKPMEKISLSKSPTKTDPKNEEEEKRRIEARREKQRRRREKKQ

SEQ ID NO: 918325 - protein, 212 aa, Homo sapiens
MDFEDDYTHSACRNTYQGFNGMDRDYGPGSYGGMDRDYGHGSYGGQRSMDSYLNQSYGMDNHSGGGGGSSFSSPHMKPAPVGSRGRGTPAYPESTFGSRNYDAFGGPSTGRGRGRGHMGDFGSIHRPGIVVDYQNKSTNVTVAAARGIKRKMMQPFNKPSGTFIKKPKLAKPMEKISLSKSPTKTDPKNEEEEKRRIEARREKQRRRREKKQ

SEQ ID NO: 918326 - protein, 301 aa, Homo sapiens [sequence omitted]

SEQ ID NO: 918327 - protein, 210 aa, Homo sapiens
  misc_feature (7)..(7): Xaa can be any naturally occurring amino acid
MGRTAVXGIPGSDANASLADLYFYKDSSACGHVQNQATHCHPQAVTTLGHIVRIYLMEDLDSGLSAILCCILLKPQACFLRYSHPDQNQDIRTDTVLFTNVQALFTFPLFSSSVPFLFQDLVLDPVLHEKGQLATFWETKLTGKLRICWGSGVFHEPGRGSGESIQEGFPKEVPIKAAAPWGPTQRALEAHDGLRTSSGLFFPGAPSPML

SEQ ID NO: 918328 - protein, 471 aa, Homo sapiens
SSRRGRQRGVGGRRGSRHRRALGPPTPGAAAATAVAAAACRDWSAPSAADKTLASGRSSPIMPRERRERDAKERDTMKEDGGAEFSARSRKRKANVTVFLQDPDEEMAKIDRTARDQCGSQPWDNNAVCADPCSLIPTPDKEDDDRVYPNSTCKPRIIAPSRGSPLPVLSWANREEVWKIMLNKEKTYLRDQHFLEQHPLLQPKMRAILLDWLMEVCEVYKLHRETFYLAQDFFDRYMATQENVVKTLLQLIGISSLFIAAKLEEIYPPKLHQFAYVTDGACSGDEILTMELMIMKALKWRLSPLTIVSWLNVYMQVAYLNDLHEVLLPQYPQQIFIQIAELLDLCVLDVDCLEFPYGILAASALYHFSSSELMQKVSGYQWCDIENCVKWMVPFAMVIRETGSSKLKHFRGVADEDAHNIQTHRDSLDLLDKARAKKAMLSEQNRASPLPSGLLTPPQSGKKQSSGPEMA

SEQ ID NO: 918329 - protein, 410 aa, Homo sapiens
MPRERRERDAKERDTMKEDGGAEFSARSRKRKANVTVFLQDPDEEMAKIDRTARDQCGSQPWDNNAVCADPCSLIPTPDKEDDDRVYPNSTCKPRIIAPSRGSPLPVLSWANREEVWKIMLNKEKTYLRDQHFLEQHPLLQPKMRAILLDWLMEVCEVYKLHRETFYLAQDFFDRYMATQENVVKTLLQLIGISSLFIAAKLEEIYPPKLHQFAYVTDGACSGDEILTMELMIMKALKWRLSPLTIVSWLNVYMQVAYLNDLHEVLLPQYPQQIFIQIAELLDLCVLDVDCLEFPYGILAASALYHFSSSELMQKVSGYQWCDIENCVKWMVPFAMVIRETGSSKLKHFRGVADEDAHNIQTHRDSLDLLDKARAKKAMLSEQNRASPLPSGLLTPPQSGKKQSSGPEMA

SEQ ID NO: 918330 - protein, 361 aa, Homo sapiens
MPRERRERDAKERDTMKEDGGAEFSARSRKRKANVTVFLQDPDEEMAKIDRTARDQCGSQPWDNNAVCADPCSLIPTPDKEDDDRVYPNSTCKPRIIAPSRGSPLPVLSWANREEVWKIMLNKEKTYLRDQHFLEQHPLLQPKMRAILLDWLMEEIYPPKLHQFAYVTDGACSGDEILTMELMIMKALKWRLSPLTIVSWLNVYMQVAYLNDLHEVLLPQYPQQIFIQIAELLDLCVLDVDCLEFPYGILAASALYHFSSSELMQKVSGYQWCDIENCVKWMVPFAMVIRETGSSKLKHFRGVADEDAHNIQTHRDSLDLLDKARAKKAMLSEQNRASPLPSGLLTPPQSGKKQSSGPEMA

SEQ ID NO: 918331 - protein, 414 aa, Homo sapiens
VLTRPGATRVHRDAKERDTMKEDGGAEFSARSRKRKANVTVFLQDPDEEMAKIDRTARDQCGSQPWDNNAVCADPCSLIPTPDKEDDDRVYPNSTCKPRIIAPSRGSPLPVLSWANREEVWKIMLNKEKTYLRDQHFLEQHPLLQPKMRAILLDWLMEVCEVYKLHRETFYLAQDFFDRYMATQENVVKTLLQLIGISSLFIAAKLEEIYPPKLHQFAYVTDGACSGDEILTMELMIMKALKWRLSPLTIVSWLNVYMQVAYLNDLHEVLLPQYPQQIFIQIAELLDLCVLDVDCLEFPYGILAASALYHFSSSELMQKVSGYQWCDIENCVKWMVPFAMVIRETGSSKLKHFRGVADEDAHNIQTHRDSLDLLDKARAKKAMLSEQNRASPLPSGLLTPPQSGKKQSSGPEMA

SEQ ID NO: 918332 - protein, 291 aa, Homo sapiens [sequence omitted]

SEQ ID NO: 918333 - protein, 426 aa, Homo sapiens
SSRRGRQRGVGGRRGSRHRRALGPPTPGAAAATAVAAAACRDWSAPSAADKTLASGRSSPIMPRERRERDAKERDTMKEDGGAEFSARSRKRKANVTVFLQDPDEEMAKIDRTARDQCGSQPWDNNAVCADPCSLIPTPDKEDDDRVYPNSTCKPRIIAPSRGSPLPVLSWANREEVWKIMLNKEKTYLRDQHFLEQHPLLQPKMRAILLDWLMEVCEVYKLHRETFYLAQDFFDRYMATQENVVKTLLQLIGISSLFIAAKLEEIYPPKLHQFAYVTDGACSGDEILTMELMIMKLLDLCVLDVDCLEFPYGILAASALYHFSSSELMQKVSGYQWCDIENCVKWMVPFAMVIRETGSSKLKHFRGVADEDAHNIQTHRDSLDLLDKARAKKAMLSEQNRASPLPSGLLTPPQSGKKQSSGPEMA

SEQ ID NO: 918334 - protein, 179 aa, Homo sapiens
MEDCGEPWRPRQGFLVEIWALTLTSCVILNASSRRLIAVRDLNLNSTMKKLIASQIHRSTNPKEKLYQAACENIFNRNEWTRNKFYSYSMAVFSLAEARPSFTSQLRGDVHRNCVIWFHTRSSDAGFCLSQPWPWLTRGPGTLEQRDLLVLGVSCKADSGGTSLTGLLQRLHEILLNKY

SEQ ID NO: 918335 - protein, 213 aa, Homo sapiens
TPARPAAAGVEGHQLERAPLLLGIKRGGPDCRQPWGGPLLLLLTHPMMCGWPSLRSSEATQKVAGLPWFYRRRLDQLLQLLANDRPGIDGRRVQGTWTNLSTAAAGWPVSWCPNTKPKSWKQCGRHLPLKTDASDSPIFLTQASEDPLLPSQENEKAGGAAGLPPEAHIGPGLCTLTGPTGSSAFQKGVPPTAPHICPVLQAITRTGLCGRGL

SEQ ID NO: 918336 - protein, 305 aa, Homo sapiens
MPCIITLLSSCTWGGLAAKVLVSGVPLGNEPACLTFVLSSPQDGVRTDIYRQLFHPEQLISGVEDAANNCARGHYTAGKEIIDLTAFMVDEAIYDLCCHNLRPTYTNLNWLISQIVSSITASLCFDGALNVDLTEFQTNLVPYPRIHFPLVTYSPIISAKKAYHEQLSVAEISSVYFEPSNQMAKCDPRHGKYMACCLLYCGEVVPKDENATIATIKTKQIFVGINYQSPTVVPGGAVAKVQRAVCVLNNTTAITEAWARLNQKFDLMYAKRAFMHCYVDRGMEEVPIVPKRQGPQPTVSFVLIR

SEQ ID NO: 918337 - protein, 305 aa, Homo sapiens; identical to SEQ ID NO: 918336

SEQ ID NO: 918338 - protein, 196 aa, Homo sapiens
MATWWLLCGLLVYLVTLQIQISPHPTLPHHASPPPPHHRKLVSLEEPQGSESRGRTWLRVTREDRREIQEQHRANAWATPAPRKPGQHHLTSTRVLMQHLHRARRPVRLDLPSRERKSSLRKEAANIPLRSPKWGKGKNKEGRSSCISPSSLPFLDPTGSGGEATKADWHPERRLTKGWSEAGNGDPDEQNKSLAA

SEQ ID NO: 918339 - protein, 525 aa, Homo sapiens
MCFHFAQDLCPEQSLKDSFQKVIVTRYEKREYGNLELKKGCESVDEGKVHKRGYNGLNQCLTATQSKVFQCDTYVKVSHIFSNSNRHKIRDTGKKPFKCIECGKAFNQSSTLATHKKIHTGEITCKCEECGKAFNRSSHLTSHKRIHTGEKRYKCEDCGKELKYSSTLTAHKRIHTGEKRYKCEDCGKELKYSSTLTAHKRIHTGEKPYKCDKCGRAFISSSILYVHKISHTEEKPYKCEECGKAFKLSSILSTHKRIHTGEKPYKCEECGKAFRRSLVLRTHKRIHTGEKPYKCDKCGKAFISSSLLYKHKISHSEKKPYKCEECGKAFKRSSTLTIHKISHTEEKPYKCQECDKVFKRSSALSTHKIIHSGEKPYKCEECGKAFKRSSNLTTHKISHTEEKLYKCQECDKAFKYSSALSTHKIIHSGENPYKCEECGKAFKRSSVLSKHKIIHTGAKPYKCEECGKAFKRSSQLTSHKISHTGEKPYKCEECGKAFNLSSDLNTHKRIHIGQKAYIVKNMANL

SEQ ID NO: 918340 - protein, 381 aa, Homo sapiens
MQPLQALAPTPAPEPKPVPAPGLETTTEPAADCPGGDDYTLKAYGTLQVHAGKSLGSRSGSRIGKGGASVFEEPCAWLSFTQYATQYATGAGWELESVTHKDTWCGVKTLRAANSVKTKTSAHMGFPQSVTVEPNAWSPNTAGKSRPRQSQWLSEEIPFKSVKAQQASLRVAVHFSTLPRDHLLNSWAQVIPFHFDPWIKGAGARRGKVESFHASARCPLWLCLRSPSACYCTVGALLWAGRGRSQLPLLVGRCRGRGVGRNRSCAGRLRAARVPGGRRLGGPCTRSGQPALLALDSEGLSTRAKSCGGCTGSPSTADLPVPCFNSRQASAQPPPQGAGLGTCSSPCLSSPARHGLPLDPSLPDGHCPLLRGAWSHRPPKG

SEQ ID NO: 918341 - protein, 381 aa, Homo sapiens; identical to SEQ ID NO: 918340

SEQ ID NO: 918342 - protein, 143 aa, Homo sapiens
ERNILGAFHSPIMFYNRFVETEFIYHEIHSFKVSNSVVFSIFTKLCAITTNSRTLSSHPKETLYPLAVTPHSTLPPSPTTPAPDSAHLHTSEINSHVAHTKPVWWSLHMDAHKIWCHDSDWRTSLGRSIPCPPVLCSMKKIHL

SEQ ID NO: 918343 - protein, 138 aa, Homo sapiens
MERFTGQNDQVQIQALPLLINCVTLENFPKFSEPYFLHLENGNSHILYRHIHLTGLLSTKEIAKTVSGSQVQGNDTGTGFSSIIKSPLVGNGRSRFSGGEEKGFAKAYQTKSMALTPVHVGVAAEWEKATEFQSQVHG

SEQ ID NO: 918344 - protein, 138 aa, Homo sapiens; identical to SEQ ID NO: 918343

SEQ ID NO: 918345 - protein, 161 aa, Homo sapiens
LSCLTCKMQGCDPLNSMVPTELKIFGIQGCQRCPRRRRVKNHPVGHKGDQSKQEKSKQGVILGNTWGQFGITAFVPSPRMNNHQEKRGRAVTVGPETAFRMETSYEDAGAERFMLADCLGGPSRSSREPTSRAPLLEKEITLSLSSLWCCYSGFSAMCRQN

SEQ ID NO: 918346 - protein, 202 aa, Homo sapiens
MNWFVIGLTAALIITSETGGPLVLPTRSVSHQRRCGRLCPFLGADPRQALIPYVNHALMTAATTLLQKSSSVQVIAVTTDSPVTVQLMRPVEGGACCRGAPGGVGGACCHGACLVEEVSRGAPGGVGGACCHGACLVEEVSRGAPGGVGGACCRGACLVEEVSRGAPGGVGGACCRGACLVEEVSLRFWICLNSSEKAEGNL

SEQ ID NO: 918347 - protein, 146 aa, Homo sapiens [sequence omitted]

SEQ ID NO: 918348 - protein, 241 aa, Homo sapiens
APFPVHLSRAWYDTQHIAETAMELPPEASKAPFTHSVYLLKGPFSSLTFPEDWMPLTTAIPTMLQATRRHRVIFQLRPPLSEMESEMSKASRYQKGLAVSCISETGASVRAEGRLLHQSHLSTCVQEQLLIEQTLLGAQTDTQPAPAEYTALASAKLMADCLPQPLTHYAAGEADAPQAGTYIVPHTDAAAADPLTHSQLQEEEGDPDDDQQHQSRCSSMNDVAIRVAYHTAAHPDPPSPP

SEQ ID NO: 918349 - protein, 1222 aa, Homo sapiens
LGFSDEQILTVKTSGSGTPSGSSADSSTSSSSSSSGVFSSSYAMEQEKSLPGVVMALVCNVFDMLYQLANLEEPRITLRVRKLLLLIPTDPAIQEALDQLDSLGRKKEVGIPFPLGEVGMDTSSKHEQRMVEGIPEGRSGTEKLGRDLEEVEGMGNREMMAKRIPKYRRRGAASAHPCVGTCLVPAEATGGQCDEDLTKDGIEALSSRPFRNVSRQTSRQMSLCGTPEKSSYRQLSVSDRSSIRVEEIIPAARVAIQTMEVSDFTSTVACFMRLSWAAAAGRLDLVGSSQPIKESNSLCPAGIRNRLSSSGSNCSSGSEGEPVALHAGICVRQQSVSTKDSLIAGEALSLLVTCLQLRSQQLASFYNLPCVADFIIDILLGSPSAEIRRVACDQLYTLSQTDTSAHPDVQKPNQFLLGVILTAQLPLWSPTSIMRGVNQRLLSQCMEYFDLRCQLLDDLTTSEMEQLRISPATMLEDEITWLDNFEPNRTAECETSEADNILLAGHLRLIKTLLSLCGAEKEMLGSSLIKPLLDDFLFRASRIILNSHSPAGSAAISQQDFHPKCSTANSRLAAYEVLVMLADSSPSNLQIIIKELLSMHHQPDPALTKEFDYLPPVDSRSSSGFVGLRNGGATCYMNASLLSVDDDTDNPDDSVFYQVQSLFGHLMESKLQYYVPENFWKIFKMWNKELYVREQQDAYEFFTSLIDQMDEYLKKMGRDQIFKNTFQGIYSDQKICKDCPHRYEREEAFMALNLGVTSCQSLEISLDQFVRGEVLEGSNAYYCEKCKEKFPWMLNMEPYTVSGMARQDSSSEVGENGRSVDQGGGGSPRKKVALTENYELVGVIVHSGQAHAGHYYSFIKDRRGCGKGKWYKFNDTVIEEFDLNDETLEYECFGGEYRPKVYDQNCQDKKNFYLQMCFLMSCYKANPYTDVRRRYWNAYMLFYQRVSDQNSPVLPKKSRVSVVRQEAEDLSLSAPSSPEISPQSSPRPHRPNNDRLSILTKLVKKGEKKGLFVEKMPARIYQTKLKHPYYPCMAKVSLQLAIQFLFQTYLRTKKKLRVDTEEWIATIEALLSKSFDACQWLVEYFISSEGRELIKIFLLECNVREVRVAVATILEKTLDSALFYQDKLKSLHQLLEVLLALLDKDVPENCKNCAQYFFLFNTFVQKQGIRAGDLLLRHSALRHMISFLLGASRQNNQPRSRPPGPAQPATHQGPRGSFDAPQ

SEQ ID NO: 918350 - protein, 138 aa, Homo sapiens
HSGMGTSSVVIEHSPQLHFLSAFHAISLILQALLGDRCSFPYVRDEKTETRKLARDLDLGYPLSTIPVLSNHAPGFLETQVTASICMDHSFKSFGYEEKWNERAHKRSGEEEQMVTNGGCGHCLADLGSLEANCAEHF

SEQ ID NO: 918351 - protein, 118 aa, Homo sapiens; identical to SEQ ID NO: 799972

SEQ ID NO: 918352 - protein, 285 aa, Homo sapiens
MAQSQSESHKNIPRVGTQLLLEACVQATVPIFIYTSTLEVARPNSYKEIIQNGHEEEPLENTWYAPYPHSKKLAEKAVLAANGLTLKNGGTLYTCAVRPMFIYGEGSPILSAGINEALNNHGILSSFSKFSRVNPVYVGNIAWAHILALRALREPKKAPSVRGQFYYISDDTPHQSYDNLSYTLSKEFGLCLDSSWSLPLSLTYWIGFLLEIVSFLPRPVYTCRPPFNHHRVTLSNSVFTFSYKKAQQDLAYKSLYSWEEAKQKTMEWVGSLVDWHKETLKSKTQ

SEQ ID NO: 918353 - protein, 193 aa, Homo sapiens
MPEPAKFAPAPKKGSKKAVTKAQKKDGKKRKRSRKESYSIYVYKVLKRVHPDTGIWCKAMGIMNSFLNDIFERIAGEASRLAHYNKRSTITSRRSRRPCACCCPASWPSTPCPRAPRRSPSTPAPSESLPGPGARSLPPSLPPRVAGCFVSKGSFQGHLTTSVKESFLCCQSQLMFLASRLVNFRRAHNTKHR

SEQ ID NO: 918354 - protein, 1365 aa, Homo sapiens
MFLLLLTSSAVHKWGTEIHEGIYNMLMLLIELVAERIKQDPIPIGLLGVLTMAFNPDNEYHFKNRMKVSQRNWAEVFGEGNMFAVSPVSTFQKEPHGWVVDLVNKFGELGGFAAIQAKLHSEDIELGAVSALIQPLGVCAEYLNSSVVQPMLDPVILTTIQDVRSVEEKDLKDKRLVSIPELLSAVKLLCMRFQPDLVTIVDDLRLDILLRMLKSPHFSAKMNSLKEVTKLIEDSTLSKSVKNAIDTDRLLDWLVENSVLSIALEGNEAALGGAFTLSAGTVKEVLLPPRFPESLAATASICIHSEPKPDVLHPSSCHSSPSASSHWQNSGQSSTVIENIHTIIAAAAVKFNSDQLNHLFVLIQKLHEITRSFIKQTYQKQDKSIIQDLKKNFEIVKLVTGSLIACHRLAAAVAGPGGLSGSTLVDGRYTYREEKSLPGVVMALVCNVFDMLYQLANLEEPRITLRVRKLLLLIPTDPAIQEALDQLDSLGRKKEVGIPFPLGEVGMDTSSKHEQRMVEGIPEGRSGTEKLGRDLEEVEGMGNREMMAKRIPKYRRRGAASAHPCVGTCLVPAEATGGQCDEDLTKDGIEALSSRPFRNVSRQTSRQMSLCGTPEKSSYRQLSVSDRSSIRVEEIIPAARVAIQTMEVSDFTSTVACFMRLSWAAAAGRLDLVGSSQPIKESNSLCPAGIRNRLSSSGSNCSSGSEGEPVALHAGICVRQQSVSTKDSLIAGEALSLLVTCLQLRSQQLASEMEQLRISPATMLEDEITWLDNFEPNRTAECETSEADNILLAGHLRLIKTLLSLCGAEKEMLGSSLIKPLLDDFLFRASRIILNSHSPAGSAAISQQDFHPKYGKCTCSTANSRLAAYEVLVMLADSSPSNLQIIIKELLSMHHQPDPALTKEFDIFKMWNKELYVREQQDAYEFFTSLIDQMDEYLKGIYSDQKICKDCPHRYEREEAFMALNLGVTSCQSLEISLDQFVRGEVLEGSNAYYCEKCKEKFPWMLNMEPYTVSGMARQDSSSEVGENGRSVDQGGGGSPRKKVALTENYELVGVIVHSGQAHAGHYYSFIKDRRGCGKGKWYKFNDTVIEEFDLNDETLEYECFGGEYRPKVYDQNCQDKKNFYLQMCFLMSCYKANPYTDVRRRYWNAYMLFYQRVSDQNSPVLPKKSRVSVVRQEAEDLSLSAPSSPEISPQSSPRPHRPNNDRLSILTKLVKKGEKKGLFVEKMPARIYQTKLKHPYYPCMAKKRKSLPTRRSQSAALMHHSNHVDSSRCYQCVKFLVTLAQKCPAAKEYFKENSHHWSWAVQWLQKKMSEHYWTPQSNVSNETSTGKTFQRTISAQASGPTEGQMKGSLPWRLLLPLNGP

SEQ ID NO: 918355 - protein, 155 aa, Homo sapiens
HNCEVRKALSKQEMASVSSSQRGEVVLETLVVVVEVVSVGMTTLVVEETLVVMVALVAAVMSVDMVAVGMVIMGLAIMVVMEEVALVTLEEAEAMEVVDRVMETRAVAMAGVAAMTAITIEVEVALAVAVEAVLEVVEATVIWAIKTISFQILDP

SEQ ID NO: 918356 - protein, 148 aa, Homo sapiens
GALTIMVEDEGSERDILHGSRQEDETICIFQEACEISTNSFGMQRKVTAEKKSLNLQCNSGSCYIKALKSDYSQIIVVEWKTMLMNPQKTSITIAMAAFLMSSLEKETDQHSQYNAKVHFFTCVLCVFKFSALQFDSKSSLSPLNGFI

SEQ ID NO: 918357 - protein, 133 aa, Homo sapiens
MVVWRMDWRRAGAEGRPPRAYCNTECLGESTESGPGACCQKNRTQIPILLLTFVSYWARNTGGLTKAGAATMGRAGGHKNHFSGCDNEREGYDSELCNLADGLNINGVKGHRRKKELRNMEGGGVVWLWTGQI

SEQ ID NO: 918358 - protein, 138 aa, Homo sapiens
MSKSRSFEQILVKSIKRQDSFPGESYIIVGSPMSSLKGLLVPTPEFLSQEDREAREEQTWPFGDSKKQSVSCLDLEKAAESVWLPNSVPKHLDNWCDQYSTLLLADDREETGVRVSEKKNSIEKRSLFPYFSGKEVED

SEQ ID NO: 918359 - protein, 138 aa, Homo sapiens
MLPWLRINNDFFSLMFLHRKDQNVLSPVNCWNLLLNQVKRESRDHTTLSDIYLNNIIPRFVQVSEDSGRLFKKRKTRLDNLIASPDLRDAYTEGSQIAKSRVFLALQVPYAHFTKEPIGGIQLQSCLGSSFQDLRNST

SEQ ID NO: 918360 - protein, 147 aa, Homo sapiens
PVVWLDGQGLGRGMIRKLVTKKFGEEANLATATAECPIGQQQLPTLSPRYGTIPRDDQLASWWQVDYIGFLPSWKGQRFVLTGIYPYSGYGFAYPACNASAKTAIHGPTQCLIYRHSIPQSIASDQGTHFMAKELKQWAHAHGIHWS

SEQ ID NO: 918361 - protein, 480 aa, Homo sapiens
MCPLHLESAPYSPSVFSACRPLPDMVDAHGPSCASWLCPLPLAPGRSALLACLQDLDLNLCTPQPAPLGTDLQGLQEDALSMKHEPPGLQASSTDDKKFTVKYPQNKDKLGKQPERAGEGAPCPAFSSHNSSSPPPLQNRKSPSPLAFCPCPPVNSISKELPFLLHAFYPGYPLLLPPPHLFTYGALPSDQCPHLLMLPQDPSYPTMAMPSLLMMVNELGHPSARWETLLPYPGAFQASGQALPSQARNPGAGAAPTDSPGLERGGMASPAKRVPLSSQTGTAALPYPLKKKNGKILYECNICGKSFGQLSNLKVHLRVHSGERPFQCALCQKSFTQLAHLQKHHLVHTGERPHKCSVCHKRFSSSSNLKTHLRLHSGARPFQCSVCRSRFTQHIHLKLHHRLHAPQPCGLVHTQLPLASLACLAQWHQGALDLMAVASEKHMGYDIDEVKVSSTSQGKARAVSLSSAGTPLVMGQDQNN

SEQ ID NO: 918362 - protein, 500 aa, Homo sapiens
MCPLHLESAPYSPSVFSACRPLPDMVDAHGPSCASWLCPLPLAPGRSALLACLQDLDLNLCTPQPAPLGTDLQGLQEDALSMKHEPPGLQASSTDDKKFTVKYPQNKDKLGKQPERAGEGAPCPAFSSHNSSSPPPLQNRKSPSPLAFCPCPPVNSISKELPFLLHAFYPGYPLLLPPPHLFTYGALPSDQCPHLLMLPQDPSYPTMAMPSLLMMVNELGHPSARWETLLPYPGAFQASGQALPSQARNPGAGAAPTDSPGLERGGMASPAKRVPLSSQTGTAALPYPLKKKNGKILYECNICGKSFGQLSNLKVHLRVHSGERPFQCALCQKSFTQLAHLQKHHLVHTGERPHKCSIPWVPGRNHWKSFQAWREREVCHKRFSSSSNLKTHLRLHSGARPFQCSVCRSRFTQHIHLKLHHRLHAPQPCGLVHTQLPLASLACLAQWHQGALDLMAVASEKHMGYDIDEVKVSSTSQGKARAVSLSSAGTPLVMGQDQNN

SEQ ID NO: 918363 - protein, 138 aa, Homo sapiens
MHSLREPCTPVVPAGSIAMSDEAPGWSQWNNGRAKKGRGHVQPIRCTNCARCVPKDKAIKTFVIRNIVKAAAVRDISEASVFDAYVLPKLYVKLHYCVSCAIHSKVVRNRSREARKDRTPPSRFRPAGAAPRPPPKPM

SEQ ID NO: 918364 - protein, 164 aa, Homo sapiens
AENVIPKIGLAWWFMPVTLALWEAEEGRSLEIRKAGYPSQLCPVNHMTPEICNSGGIAFQGLSAVLCGGHVQSRLQPSQTAVLSLEDCLTMDPRLLLSLAACLYYTKATSHYLLHMLFPLPSTPVTHLNPFSLFPIFLWLAPPHSLGLSVDSTTIRKESRHCQA

SEQ ID NO: 918365 - protein, 164 aa, Homo sapiens; identical to SEQ ID NO: 918364

SEQ ID NO: 918366 - protein, 482 aa, Homo sapiens
MFFLVTSDESNKTWGRNTVFRQEEFEDVKRNFKKKGCTWGPNSIQMKDRTDCKERIRPLSDGNSPWSTILIKNQKTMPLASLFVDQPGSCEEPKLSPDGLEHRKPKQIKLPSQAYIDLPLGKDAQRENPAEAESWEEAASANAATVSIEMTPTNSLSRSPQRKKTESALYGCTVLLASVALGLDLRELHKAQAAEEPLPKEEKKKREGIFQRASKSRRSASPPTSLPSTCGEASSPPSLPLSSALGILSTPSFSTKCLLQMDSEDPLVDSAPVTCDSEMLTPDFCPTAPGSGREPALMPRLDTDCSVSRNLPSSFLQQTCGNVPYCASSKHRPSHHRRTMSDGNPTPTGATIISATGASALPLCPSPAPHSHLPREVSPKKHSTVHIVPQRRPASLRSRSDLPQAYPQTAVSQLAQTACVVGRPGPHPTQFLAAKERTKSHVPSLLDADVEGQSRDYTVPLCRMRSKTSRPSIYELEKEFLS

SEQ ID NO: 918367 - protein, 576 aa, Homo sapiens
MRREQQLAEREIDVLERELNILIFQLNQEKPKVKKRKGKFKRSRLKLKDGHRISLPSDFQHKITVQASPNLDKRRSLNSSSSSPPSSPTMMPRLRAIQLTSDESNKTWGRNTVFRQEEFEDVKRNFKKKGCTWGPNSIQMKDRTDCKERIRPLSDGNSPWSTILIKNQKTMPLASLFVDQPGSCEEPKLSPDGLEHRKPKQIKLPSQAYIDLPLGKDAQRENPAEAESWEEAASANAATVSIEMTPTNSLSRSPQRKKTESALYGCTVLLASVALGLDLRELHKAQAAEEPLPKEEKKKREGIFQRASKSRRSASPPTSLPSTCGEASSPPSLPLSSALGILSTPSFSTKCLLQMDSEDPLVDSAPVTCDSEMLTPDFCPTAPGSGREPALMPRLDTDCSVSRNLPSSFLQQTCGNVPYCASSKHRPSHHRRTMSDGNPTPTGATIISATGASALPLCPSPAPHSHLPREVSPKKHSTVHIVPQRRPASLRSRSDLPQAYPQTAVSQLAQTACVVGRPGPHPTQFLAAKERTKSHVPSLLDADVEGQSRDYTVPLCRMRSKTSRPSIYELEKEFLS

SEQ ID NO: 918368 - protein, 149 aa, Homo sapiens
PRLSWKTGWSTTDWNEELRSREEELTRAALQQKSQEELLKRREQQLAEREIDVLERELNILIFQLNQEKPKVKKRKGKFKRSRLKLKDGHRISLPSDFQHKITVQASPNLDKRRSLNSSSSSPPSSPTMMPRLRAIQCELSALPRGLLC

SEQ ID NO: 918369 - protein, 799 aa, Homo sapiens
MFSNSTGRLPGQPTEEIQQYKVLVHSQERELTQLKEKLREGRDASRSLNEHLQALLTPDEPDKSQGQDLQEQLAEGCRLAQHLVQKLSPENDEDEDEDVQVEEDEKVLESSAPREVQKAEESKVAEDSLEECAITCSNSHGPCDSNQPHKNIKITFEEDEVNSTLVVDRESSHDECQDALNILPVPGPTSSATNVSMVVSAGPLSSEKAEMNILEINEKLRPQLAEKKQQFRNLKEKCFLTQLAGFLANQQNKYKYEECKDLIKSMLRNERQFKEEKLAEQLKQAEELRQYKVLVHAQERELTQLREKLREGRDASRSLNEHLQALLTPDEPDKSQGQDLQEQLAEGCRLAQHLVQKLSPENDNDDDEDVQVEVAEKVQKSSAPREMQKAEEKEVPEDSLEECAITCSNSHGPYDSNQPHRKTKITFEEDKVDSTLIGSSSHVEWEDAVHIIPENESDDEEEEEKGPVSPRNLQESEEEEVPQESWDEGYSTLSIPPEMLASYKSYSSTFHSLEEQQVCMAVDIGRHRWDQVKKEDHEATGPRLSRELLDEKGPEVLQDSLDRCYSTPSGCLELTDSCQPYRSAFYILEQQRVGLAVDMDEIEKYQEVEEDQDPSCPRLSRELLDEKEPEVLQDSLGRCYSTPSGYLELPDLGQPYSSAVYSLEEQYLGLALDVDRIKKDQEEEEDQGPPCPRLSRELLEVVEPEVLQDSLDRCYSTPSSCLEQPDSCQPYGSSFYALEEKHVGFSLDVGEIEKKGKGKKRRGRRSKKERRRGRKEGEEDQNPPCPSVCCCKKKKTFSA

SEQ ID NO: 918370 - protein, 113 aa, Homo sapiens
EEDQNPPCPRLSRELLDEKGPEVLQDSLDRCYSTPSGCLELTDSCQPYRSAFYILEQQRVGLAVDMDEIEKYQEVEEDQDPSCPRLSGELLDEKEPEVLQESLDRCYSTPSGC

SEQ ID NO: 918371 - protein, 86 aa, Homo sapiens
MVVSAGPWSSEKAEMNILEINEKLRPQLAENKQQFGNLKERCFLTQLAGFLANRQKKYKYEECKDLIKFMLRNERQFKEEKLAEQL

SEQ ID NO: 918372 - protein, 610 aa, Homo sapiens
MFSNSTGRLPGQPTEEIQQYKVLVHSQERELTQLKEKLREGRDASRSLNEHLQALLTPDEPDKSQGQDLQEQLAEGCRLAQHLVQKLSPENDEDEDEDVQVEEDEKVLESSAPREVQKAEESKVAEDSLEECAITCSNSHGPCDSNQPHKNIKITFEEDEVNSTLVVDRESSHDECQDALNILPVPGPTSSATNVSMVVSAGPLSSEKAEMNILEINEKLRPQLAEKKQQFRNLKEKCFLTQLAGFLANQQNKYKYEECKDLIKSMLRNERQFKEEKLAEQLKQAEELRQYKVLVHAQERELTQLREKLREGRDASRSLNEHLQALLTPDEPDKSQGQDLQEQLAEGCRLAQHLVQKLSPENDNDDDEDVQVEVAEKVQKSSAPREMQKAEEKEVPEDSLEECAITCSNSHGPYDSNQPHRKTKITFEEDKVDSTLIGSSSHVEWEDAVHIIPENESDDEEEEEKGPVSPRNLQESEEEEVPQESWDEGYSTLSIPPEMLASYKSYSSTFHSLEEQQVCMAVDIGRHRWDQVKKEDHEATGPRLSRELLDEKGPEVLQDSLDRCYSTPSGCLELTDSCQPYRSAFYVLEQQRVGLAVNMDEIEKYQEINS

SEQ ID NO: 918373 - protein, 136 aa, Homo sapiens
ISGETMSKLSKRDCEQYLGNTKKRDDKEGMTSPCRPGPSATQNKQQDQKKAVCLVKFLCKALNQLIEYHKRNSGLKSYEVISDTSRQFVLIKFSLVEFHSTLEEHFSWKGSSKWTPSRVTSSVKPSMVSYHPSLSE

SEQ ID NO: 918374 - protein, 173 aa, Homo sapiens
MAKLDLNPDSLPRSSRYQDLQAILEHLCNNIFISFRNRFRNRSDNLTGVHTELQNKTKLTVLEGDILDESCLKRACQDMSVIIHTTSIIDIIGVTHRESIMNINVKRTVAWGGDEARWGIKDHKEGQEGKRSLSTEHLLCSGPSVFADHYQLGEFKAAIFSFLHEETSATDGK

SEQ ID NO: 918375 - protein, 173 aa, Homo sapiens; identical to SEQ ID NO: 918374

SEQ ID NO: 918376 - protein, 145 aa, Homo sapiens
MVKDGCQQLLLLHVPKEEEEEQGGEGDTGRRQGVTLFPYIQDDLDHPLSATLQQNSPSLQAKSEVLSTQFKARISQSSLCSLRMPDPFQKLCPDHTVASSETASPCFHVKLSCLIKTQLMLSPPKSFLNPFLPQKKDIIAPSILL

SEQ ID NO: 918377 - protein, 153 aa, Homo sapiens
MARSRHFRILFGVSRTDSSRADFAGFCVMQFFMTGAGHLDLIMTPPSSGDDGPFPVTKGMAVKLKFLRFSDSHQSKTKLADTHHRLVGGKYLHPAIQGRSPWVHVSVAPLSLSPTWVTNMKAITCRSSEHSVTNRECLGLPFHCSNTTTELLQ

SEQ ID NO: 918378 - protein, 153 aa, Homo sapiens; identical to SEQ ID NO: 918377

SEQ ID NO: 918379 - protein, 138 aa, Homo sapiens
MATLLIDGLAKSSKLSSLLLAPPQREDETGVLQMLPACFLPAKAHSKKEQASKVLSSDGAAMTKYYRLSGLNNRHLFLIVLEAVKSKIKVPATLVSGEELCQLWSQEIAQLAFQGPDGLLLQRNFFPVGGFRKWQAHQ

SEQ ID NO: 918380 - protein, 135 aa, Homo sapiens
MNFIKYLYNIYSLPGFIQVVCKHLIHGSCNNPGQPIFPGPVGTPVLLLAHCGNRQKAILGGGSGRFRESLLQSHDQRVSEVWVGHWALRDILSPIPQPDAGPWLGSHMDLDLTLNRSFHLSVYSGNDNIRLTELW

SEQ ID NO: 918381 - protein, 155 aa, Homo sapiens
MLRPRKCSWLVDPSPNHMADTKVMKKHESYCELCVPDDLRWNSYLPKPSPLHPRIVEKLLYTKTIPKCQKGGKGHVFCEKDLDAKQATLSPINFLLRAISSSSAECICDIPTPGGNLVTLSCETKLLLQRPGLQLYFSFYMGSKTLRGRNTSFEY

SEQ ID NO: 918382 - protein, 143 aa, Homo sapiens
MSQSLFLLMFECVRSFFLLVGLWSCWLRSEAADLRGGVSGVVHSSWWVRGLSLASGVKLQTFAASVTAHKGSVDPKSEQQQDLLQGAKEQSFHSVEVDPSRLPLLARVACFFSFIWPHPHPTRLIGRRDLPGLNETVNLRLLG

SEQ ID NO: 918383 - protein, 114 aa, Homo sapiens
TAQTRGRGPRQGSYQKDMFDEINYRIKKYILKNANTTIYKTMLECNGAILAHCNLRLLGSNDSPASASQVAGTTDRNQLLFLPIERNPGCTCSFISCVENIYRLEALSLHFQGF

SEQ ID NO: 918384 - protein, 142 aa, Homo sapiens
MSQVLFLVFSFARYFLIPLLVASLLFIFPNKNLKTNVEKAALHLLLVFTTGENRSSLCVQEIHGAGEFIEGHAYRSVRSDISHFTLCKHSQPNVHRYMNIYVWKRTNKLLPQSSTCQGILLALHVASAVLFRDILCMGSAPV

SEQ ID NO: 918385 - protein, 138 aa, Homo sapiens
MLPQNSAPCHQEAVNTGLHSYAYPYSNSSYMYFFRRGNKTARWEGVSGKLHLACALGWNLRKLMTFVAGSSLAPPLPVWNLKFHRLGRKRSSRDSGFAEHPCFPVFPFSPNKTLLHSPFKPSASLNFCGCGTDKDAFS

SEQ ID NO: 918386 - protein, 138 aa, Homo sapiens; identical to SEQ ID NO: 918385

SEQ ID NO: 918387 - protein, 138 aa, Homo sapiens; identical to SEQ ID NO: 918385

SEQ ID NO: 918388 - protein, 378 aa, Homo sapiens
MVTVLSHGPPGARAGIISTMAGLLTNCLEEGVRNFKELRAKFQNLDAPPLPGPIKFPAGVSPKGDIGGTQSTQILANGKPLSSNHKQRTPYCSSSESQPLQPQKIKLAQKSEIPKCSNSPGPLGKSTVCSATSSQKASLLLEVTQSNVEIITKEKVMVANSFRNKLWNWEKVSSQKSEMSSALLLANYGSKAIHLEGQKGMGLTPEEPRKKLETKGAQTLPSQKHVVAPKILHNVSEDPSFVISQHIRKSWENPPPERSPASSPCQPIYECELASQAPEKQPDVRHHHLPKTKPLPSIDSLGPPPPKPSRPPIVNLQAFQRQPAAVPKTQGEVTVEEGSLSPERGLHSCCCRSHFTAQDTWAQKVCHLLSHDSNPDVP

SEQ ID NO: 918389 - protein, 110 aa, Homo sapiens
MELLSSLNMQRAMSYNNNAFSCVRADPLIFQITSLEGIYFEKWQSNGLTGACRSSSDSSKEQIWEMRQNVGELNFPGSSVKNGLGTKGLEVFAVIQKRQDDPVKTEKECD

SEQ ID NO: 918390 - protein, 110 aa, Homo sapiens; identical to SEQ ID NO: 918389

SEQ ID NO: 918391 - protein, 137 aa, Homo sapiens
MLAFDWPQRGACAVAGEGSGYAERRRCWSPTPGTRASFFHPGQLGPRDDLRNKDSDADSTVNWPYSRVNERPGENQTRMGQALTRGDPKTVICIRKRTSQPVPGSARSRGALFKPWVRSLVSKYEVFAEGLEDVKGD

SEQ ID NO: 918392 - protein, 137 aa, Homo sapiens; identical to SEQ ID NO: 918391

SEQ ID NO: 918393 - protein, 136 aa, Homo sapiens
MINWDLSWTTQGLEFPSLQDVILTSERRKCYIKIEGHVLRYLWKAETWDRMLETGEITFLQGVHSLKYQPWSTMSPGMFTKGQQKHQKGQSSTESGIPHSVWNTRMNPDGSRWLLGNVCLVQSGSHHNGSFANRSW

SEQ ID NO: 918394 - protein, 136 aa, Homo sapiens; identical to SEQ ID NO: 918393

SEQ ID NO: 918395 - protein, 144 aa, Homo sapiens
MCMPFSPINLPFFSSFSMNLQRMKGKAVLAHPCTRGYPHLPETHANSISQMNWISSRKPCAFFLTRPLVFKMVVPVISVPFFCWTLRAAAVLAPCTAICDHCRTISWRDSLDYMEGGDKDKVKNTQEPVPPPGTMQLQAASISC

SEQ ID NO: 918396 - protein, 321 aa, Homo sapiens
FCSAAVEMDGTNGSTQTHFILLGFSDRPHLERILFVVILIAYLLTLVGNTTIILVSRLDPHLHTPMYFFLAHLSFLDLSFTTSSIPQLLYNLNGCDKTISYMGCAIQLFLFLGLGGVECLLLAVMAYDRCVAICKPLHYMVIMNPRLCRGLVSVTWGCGVANSLAMSPVTLRLPRCGHHEVDHFLREMPALIRMACVSTVAIEGTVFVLKKGVVLSPLVFILLSYSYIVRAVLQIRSASGRQKAFGTCGSHLTVVSLFYGNIIYMYMQPGASSSQDQGMFLMLFYNIVTPLLNPLIYTLRNREVKGALGRLLLGKRELGKE

SEQ ID NO: 918397 - protein, 189 aa, Homo sapiens
CALGSPDALSGTLRSQLAQAMGWAAVETAAVLGGVVNAVLLGTRDGRPVAPGAGRGAAHGCRLDGKLRFTAKSTQRFRGEGAAPGRGAELRLSQVLLRATEGEAGWGVGRACVPAPPRLKFHAFDSSLAAAARSPHLLGAGEETRWRVFCGIPGGGGTSSFGGTSSCILWRTLTPHPTLEARNQLPLGT

SEQ ID NO: 918398 - protein, 136 aa, Homo sapiens
MGSYGLQRSPPSVSEVKAPRQAGGRWSGTRGYTAGQLRLSQVLLRATEGEAGWGVGRACVPAPPRLKFHAFDSSLAAAARSPHLLGAGEETRWRVFCGIPGGGGTSSFGGTSSCILWRTLTPHPTLEARNQLPLGT

SEQ ID NO: 918399 - protein, 112 aa, Homo sapiens
MQAKVPGDPGSHLTVPYRPPEGVLELQCCVFLASTLGVPPTPTVQGFQWTLRGTDVETSPFGAPRATSHGVGRMKSCQIPQKVIDNSKATLLKCLKYPSLSSSGGKGSGTAT

SEQ ID NO: 918400 - protein, 136 aa, Homo sapiens; identical to SEQ ID NO: 918398

SEQ ID NO: 918401 - protein, 136 aa, Homo sapiens; identical to SEQ ID NO: 918398

SEQ ID NO: 918402 - protein, 136 aa, Homo sapiens; identical to SEQ ID NO: 918398

SEQ ID NO: 918403 - protein, 136 aa, Homo sapiens; identical to SEQ ID NO: 918398

SEQ ID NO: 918404 - protein, 341 aa, Homo sapiens
MRETTFGVGEREGLCDWVKGLSAGTLFSGFSTTMDTGNKTLPQDFLLLGFPGSQTLQLSLFMLFLVMYILTVSGNVAILMLVSTSHQLHTPMYFFLSNLSFLEIWYTTAAVPKALAILLGRSQTISFTSCLLQMYFVFSLGCTEYFLLAAMAYDRCLAICYPLHYGAIMSSLLSAQLALGSWVCGFVAIAVPTALISGLSFCGPRAINHFFCDIAPWIALACTNTQAVELVAFVIAVVVILSSCLITFVSYVYIISTILRIPSASGRSKAFSTCSSHLTVVLIWYGSTVFLHVRTSIKDALDLIKAVHVLNTVVTPVLNPFIYTLRNKEVRETLLKKWKGK

SEQ ID NO: 918405 - protein, 145 aa, Homo sapiens
GCAFQLLLMTSFSAGEIFILTAMSYDRYVAICCPLNYEVIHVPIESLRSTAWKPLLPSMSTILRIPSASGRSKAFSTCSSHLTVVLIWYGSTVFLHVRTSIKDALDLIKAVHVLNTVVTPVLNPFIYTLRNKEVRETLLKKWKGK

SEQ ID NO: 918406 - protein, 253 aa, Homo sapiens
FPKMENSEEAASHFLKDFCATWLLSTESTKIIKLIPCPQHTHKPQLRSENEGMRRKWNWTESLAFESWLLHVLANDSTHLSLSFFSNAVGTITSTPQSCYEDSKDTLSCGLVPKLVSLGLSLVLVMGVATPYLLLQPFQREGSFSVSTLKHLLTDLKPPQKLHQGPFCCPAHWIPLLKKKGSRITQTHSWGGLLGVPGRCSCPKVGDSGTWALRHPTPSSHLVCSGRVLALSKLVTKTFLIHLTNLYTGPPLT

SEQ ID NO: 918407 - protein, 167 aa, Homo sapiens
MGLREEDRKKKEKKGEEETTGWPSSKITCFHCGAQALKGTQPNHTSSLASSALPWHRACLLILHLTSLSSAQLQACRLQTKALKRLHVSLTLTDSTCFWTQREPQGMPRPPSACFKALPSKITGNELAGPREPAGGMISRNHHPFQEPPFKGLRMALSSPANCSLIL

SEQ ID NO: 918408 - protein, 322 aa, Homo sapiens
CRNMKSDNHSFLGDSPKAFILLGVSDRPWLELPLFVVLLLSYVLAMLGNVAIILASRVDPQLHSPMYIFLSHLSFLDLCYTTTTVPQMLVNMGSSQKTISYGGCTEQYATFHWLGCTEGIVLAAMALDRYVAICKPLHYAVLMHRALCQQLVALAWLSGFGNSFVQVVLTVQLPFCGRQVLNNFFCEVPAVIKLSCADTAVNDTILAVLVAFFVLVPLALILLSYGFIARAVLRIQSSKGRHKAFGTCSSHLMIVSLFYLPAIYMYLQPPSSYSQEQGKFISLFYSIITPTLNPFTYTLRNKDMKGALRRLLARIWRLLYTR

SEQ ID NO: 918409 - protein, 181 aa, Homo sapiens
VPSQHLDMNILGTEANFTSKVSLDSVSTSLSPLLSRSTISEKHIFQLIVNEAYRAAWGREIIHNLSKYLFFLREEYESRDAAVGLIETLNGDTSNNSHNTPGTCLLQPLSQPNEMIHLGVTKMFHVLQSCCHMVPIKVLPKFPYISLPSMLLDVHSALVFNKSPVLKSEDMSWGGLEGAEH

SEQ ID NO: 918410 - protein, 256 aa, Homo sapiens
MEGSHITIWCNVSGSQGPPEQNFQWSIYLPSSPEREVQIVSTMDPSFPYAIYTQRVRGGKIFIERVQGNPTLLHITDLQARDAGEYECHTPSTDKQYFGSYSAKMNLVGKEKLSSRRQHSLQTTAMPQTLHRVEQDPLELTCEVASETVQHSHLSVAWLWQKVGEKPVEVISLSRDFMLHSGSEYAQRQSLGEVRLDKLGRTTFCLTIFHLQPSDQGEFYCEAAEWIQDPDGSWYAMTRKRSEGAVVNVQPTGQSL

SEQ ID NO: 918411 - protein, 78 aa, Homo sapiens
RRPGRVDCYNMDVMLSEINQFRKDKYTHFHLYGVSNVKLRRTKYCGICHKLVEEKMSCSMGIECQPRKMEKLLLQFLL

SEQ ID NO: 918412 - protein, 296 aa, Homo sapiens
MAEIHNGGELCDFMENGEIFSEHSCLNAHMGTENTGDTYDCDEYGENFPMLHNSAPAGETLSVLNQCRKAFSLPPNVHQRTWIGDKSFEYSDCEEAFVDQSHLQANRITHNGETLYEQKQCGRAFTYSTSHAVSVKMHTVEKPYECKECGKFFRYSSYLNSHMRTHTGEKPYECKECGKCFTVSSHLVEHVRIHTGEKPYQCKECGRAFAGRSGLTKHVRIHTGEKPYECNECGKAYNRFYLLTEHFKTHTEEKPFECKVCGKSFRSSSCLKNHFRIHTGIKPYKCKECGKAFKLT

SEQ ID NO: 918413 - protein, 296 aa, Homo sapiens; identical to SEQ ID NO: 918412

SEQ ID NO: 918414 - protein, 419 aa, Homo sapiens
MAGSGCAWGAEPPRFLEAFGRLWQVQSRLGSGSSASVYRVRCCGNPGSPPGALKQFLPPGTTGAAASAAEYGFRKERAALEQLQGHRNIVTLYGVFTIHFSPNVPSRCLLLELLDVSVSELLLYSSHQGCSMWMIQHCARDVLEALAFLHHEGYVHADLKPRNILWSAENECFKLIDFGLSFKEGNQDVKYIQTDGYRAPEAELQNCLAQAGLQSDTECTSAVDLWSLGIILLEMFSGMKLKHTVRSQEWKANSSAIIDHIFASKAVVNAAIPAYHLRDLIKSMLHDDPSRRIPAEMALCSPFFSIPFAPHIEDLVMLPTPVLRLLNVLDDDYLENEEEYEDVVEDVKEECQKYGPVVSLLVPKENPGRGQVFVEYANAGDSKAAQKLLTGRMFDGKFVVATFYPLSAYKRGYLYQTLL

SEQ ID NO: 918415 - protein, 345 aa, Homo sapiens
MFLTRPKVCVDLNRRVTLYGVFTIHFSPNVPSRCLLLELLDVSVSELLLYSSHQGCSMWMIQHCARDVLEALAFLHHEGYVHADLKPRNILWSAENECFKLIDFGLSFKEGNQDVKYIQTDGYRAPEAELQNCLAQAGLQSDTECTSAVDLWSLGIILLEMFSGMKLKHTVRSQEWKANSSAIIDHIFASKAVVNAAIPAYHLRDLIKSMLHDDPSRRIPAEMALCSPFFSIPFAPHIEDLVMLPTPVLRLLNVLDDDYLENEEEYEDVVEDVKEECQKYGPVVSLLVPKENPGRGQVFVEYANAGDSKAAQKLLTGRMFDGKFVVATFYPLSAYKRGYLYQTLL

SEQ ID NO: 918416 - protein, 143 aa, Homo sapiens
PLWACTHSPTSADEMNQVPWCCIISDLSFIPSGSHASKVCQLGVKLERERELQKKLTLKRGFLVLTTCVSAVLGSQHIGLHGSGGLCTLVLSFIAGTKWSQEKMKVRKIITNVWDIFQPLLFGLVGAEVSVSLLESNIVGKNN

SEQ ID NO: 918417 - protein, 110 aa, Homo sapiens
  misc_feature (4)..(6): Xaa can be any naturally occurring amino acid
  misc_feature (18)..(18): Xaa can be any naturally occurring amino acid
KKKXXXTPPQEKGIKKNXNPKKLTLKRGFLVLTTCVSAVLGSQHIGLHGSGGLCTLVLSFIAGTKWSQEKMKVRKIITNVWDIFQPLLFGLVGAEVSVSLLESNIVGKNN

SEQ ID NO: 918418 - protein, 1942 aa, Homo sapiens
FALLVNKVHIYCQKMSTLLENIFAIINLFKQYSKKDKNTDTLSKKELKELLEKEFRQILKNPDDPDMVDVFMDHLDIDHNKKIDFTEFLLMVFKLAQAYYESTRKENLPISGHKHRKHSHHDKHEDNKQEENKENRKRPSSLERRNNRKGNKGRSKSPRETGGKRHESSSEKKERKGYSPTHREEEYGKNHHNSSKKEKNKTENTRLGDNRKRLSERLEEKEDNEEGVYDYENTGRMTQKWIQSGHIATYYTIQDEAYDTTDSLLEENKIYERSRSSDGKSSSQVNRSRHENTSQVPLQESRTRKRRGSRVSQDRDSEGHSEDSERHSGSASRNHHGSAWEQSRDGSRHPRSHDEDRASHGHSADSSRQSGTRHAETSSRGQTASSHEQARSSPGERHGSGHQQSADSSRHSATGRGQASSAVSDRGHRGSSGSQASDSEGHSENSDTQSVSGHGKAGLRQQSHQESTRGRSGERSGRSGSSLYQVSTHEQPDSAHGRTGTSTGGRQGSHHEQARDSSRHSASQEGQDTIRGHPGSSRGGRQGSHHEQSVNRSGHSGSHHSHTTSQGRSDASHGQSGSRSASRQTRNEEQSGDGTRHSGSRHHEASSQADSSRHSQVGQGQSSGPRTSRNQGSSVSQDSDSQGHSEDSERWSGSASRNHHGSAQEQSRDGSRHPRSHHEDRAGHGHSADSSRKSGTRHTQNSSSGQAASSHEQARSSAGERHGSRHQLQSADSSRHSGTGHGQASSAVRDSGHRGSSGSQATDSEGHSEDSDTQSVSGHGQAGHHQQSHQESARDRSGERSRRSGSFLYQDTIRGHPGSSRRGRQGSHHEQSVDRSGHSGSHHSHTTSQGRSDASRGQSGSRSASRTTRNEEQSRDGSRHSGSRHHEASSHADISRHSQAGQGQSEGSRTSRRQGSSVSQDSDSEGHSEDSERWSGSASRNHRGSAQEQSRHGSRHPRSHHEDRAGHGHSADSSRQSGTPHAETSSGGQAASSHEQARSSPGERHGSRHQQSADSSRHSGIPRRQASSAVRDSGHWGSSGSQASDSEGHSEESDTQSVSGHGQDGPHQQSHQESARDWSGGRSGRSGSFIYQVSTHEQSESAHGRTRTSTGRRQGSHHEQARDSSRHSASQEGQDTIRAHPGSRRGGRQGSHHEQSVDRSGHSGSHHSHTTSQGRSDASHGQSGSRSASRQTRKDKQSGDGSRHSGSRHHEAASWADSSRHSQVGQEQSSGSRTSRHQGSSVSQDSDSERHSDDSERLSGSASRNHHGSSREQSRDGSRHPGFHQEDRASHGHSADSSRQSGTHHTESSSHGQAVSSHEQARSSPGERHGSRHQQSADSSRHSGIGHRQASSAVRDSGHRGSSGSQVTNSEGHSEDSDTQSVSAHGQAGPHQQSHKESARGQSGESSGRSRSFLYQVSSHEQSESTHGQTAPSTGGRQGSRHEQARNSSRHSASQDGQDTIRGHPGSSRGGRQGSYHEQSVDRSGHSGYHHSHTTPQGRSDASHGQSGPRSASRQTRNEEQSGDGSRHSGSRHHEPSTRAGSSRHSQVGQGESAGSKTSRRQGSSVSQDRDSEGHSEDSERRSESASRNHYGSAREQSRHGSRNPRSHQEDRASHGHSAESSRQSGTRHAETSSGGQAASSQEQARSSPGERHGSRHQQSADSSTDSGTGRRQDSSVVGDSGNRGSSGSQASDSEGHSEESDTQSVSAHGQAGPHQQSHQESTRGQSGERSGRSGSFLYQVSTHEQSESAHGRTGPSTGGRQRSRHEQARDSSRHSASQEGQDTIRGHPGSSRGGRQGSHYEQSVDSSGHSGSHHSHTTSQERSDVSRGQSGSRSVSRQTRNEKQSGDGSRHSGSRHHEASSRADSSRHSQVGQGQSSGPRTSRNQGSSVSQDSDSQGHSEDSERWSGSASRNHLGSAWEQSRDGSRHPGSHHEDRAGCVIP

SEQ ID NO: 918419 - protein, 1852 aa, Homo sapiens
GRLLLLNSRPRRPRKENLPISGHKHRKHSHHDKHEDNKQEENKENRKRPSSLERRNNRKGNKGRSKSPRETGGKRHESSSEKKERKGYSPTHREEEYGKNHHNSSKKEKNKTENTRLGDNRKRLSERLEEKEDNEEGVYDYENTGRMTQKWIQSGHIATYYTIQDEAYDTTDSLLEENKIYERSRSSDGKSSSQVNRSRHENTSQVPLQESRTRKRRGSRVSQDRDSEGHSEDSERHSGSASRNHHGSAWEQSRDGSRHPRSHDEDRASHGHSADSSRQSGTRHAETSSRGQTASSHEQARSSPGERHGSGHQQSADSSRHSATGRGQASSAVSDRGHRGSSGSQASDSEGHSENSDTQSVSGHGKAGLRQQSHQESTRGRSGERSGRSGSSLYQVSTHEQPDSAHGRTGTSTGGRQGSHHEQARDSSRHSASQEGQDTIRGHPGSSRGGRQGSHHEQSVNRSGHSGSHHSHTTSQGRSDASHGQSGSRSASRQTRNEEQSGDGTRHSGSRHHEASSQADSSRHSQVGQGQSSGPRTSRNQGSSVSQDSDSQGHSEDSERWSGSASRNHHGSAQEQSRDGSRHPRSHHEDRAGHGHSADSSRKSGTRHTQNSSSGQAASSHEQARSSAGERHGSRHQLQSADSSRHSGTGHGQASSAVRDSGHRGSSGSQATDSEGHSEDSDTQSVSGHGQAGHHQQSHQESARDRSGERSRRSGSFLYQDTIRGHPGSSRRGRQGSHHEQSVDRSGHSGSHHSHTTSQGRSDASRGQSGSRSASRTTRNEEQSRDGSRHSGSRHHEASSHADISRHSQAGQGQSEGSRTSRRQGSSVSQDSDSEGHSEDSERWSGSASRNHRGSAQEQSRHGSRHPRSHHEDRAGHGHSADSSRQSGTPHAETSSGGQAASSHEQARSSPGERHGSRHQQSADSSRHSGIPRRQASSAVRDSGHWGSSGSQASDSEGHSEESDTQSVSGHGQDGPHQQSHQESARDWSGGRSGRSGSFIYQVSTHEQSESAHGRTRTSTGRRQGSHHEQARDSSRHSASQEGQDTIRAHPGSRRGGRQGSHHEQSVDRSGHSGSHHSHTTSQGRSDASHGQSGSRSASRQTRKDKQSGDGSRHSGSRHHEAASWADSSRHSQVGQEQSSGSRTSRHQGSSVSQDSDSERHSDDSERLSGSASRNHHGSSREQSRDGSRHPGFHQEDRASHGHSADSSRQSGTHHTESSSHGQAVSSHEQARSSPGERHGSRHQQSADSSRHSGIGHRQASSAVRDSGHRGSSGSQVTNSEGHSEDSDTQSVSAHGQAGPHQQSHKESARGQSGESSGRSRSFLYQVSSHEQSESTHGQTAPSTGGRQGSRHEQARNSSRHSASQDGQDTIRGHPGSSRGGRQGSYHEQSVDRSGHSGYHHSHTTPQGRSDASHGQSGPRSASRQTRNEEQSGDGSRHSGSRHHEPSTRAGSSRHSQVGQGESAGSKTSRRQGSSVSQDRDSEGHSEDSERRSESASRNHYGSAREQSRHGSRNPRSHQEDRASHGHSAESSRQSGTRHAETSSGGQAASSQEQARSSPGERHGSRHQQSADSSTDSGTGRRQDSSVVGDSGNRGSSGSQASDSEGHSEESDTQSVSAHGQAGPHQQSHQESTRGQSGERSGRSGSFLYQVSTHEQSESAHGRTGPSTGGRQRSRHEQARDSSRHSASQEGQDTIRGHPGSSRGGRQGSHYEQSVDSSGHSGSHHSHTTSQERSDVSRGQSGSRSVSRQTRNEKQSGDGSRHSGSRHHEASSRADSSRHSQVGQGQSSGPRTSRNQGSSVSQDSDSQGHSEDSERWSGSASRNHLGSAWEQSRDGSRHPGSHHEDRAGCVIP

SEQ ID NO: 918420 - protein, 117 aa, Homo sapiens
GLEEDCFSGFSSNKVCPAGLGAVPWSFSPIIFSLDTPLVIMATLGASPGLSWSTGHLFSAEDSVESRSVTQAGVQWCHLGSLQPLPPTRHHAWVIFVFLVETEFHHVGEDGLNLLTS

SEQ ID NO: 918421 - protein, 243 aa, Homo sapiens
WFRRRLFFWIQLQQSLSCRSWCCAMVLLANNIQPGYPAGHNGYTRSQPRALLEHRTPVQCRGLSGVSLCHPGWSAVVPSWLTATSASHTPPCLGNFCIFSRDRVSPCWRGWSQSPDFMIYLPRPPKSAAIIGMSHSAQPRLQAFRIASLSLSLSLSLSFSVWASFLLLQIRKMTTWKPKAHHIPAEPPPLKETQLLPQASTHPSRPELHLTLVRHASTPRWTTEAREFSIMMGTSGVMGLPCS

SEQ ID NO: 918422 - protein, 202 aa, Homo sapiens
TSYLAPPITALFLLAIFCKRVTEPGAFWGLVFGLGVGLLRMILEFSYPAPACGEVDRRPAVLKDFHYLYFAILLCGLTAILTRLTWWTRNCPLSELEKEAHESTPEISERPAGECPAGGGAAENSSLGQEQPEAPSRSWGKLLWSWFCGLSGTPEQALSPAEKAALEQKLTSIEEEPLWRHVCNINAVLLLAINIFLWGYFA

SEQ ID NO: 918423 - protein, 202 aa, Homo sapiens; identical to SEQ ID NO: 918422

SEQ ID NO: 918424 - protein, 202 aa, Homo sapiens; identical to SEQ ID NO: 918422

SEQ ID NO: 918425 - protein, 373 aa, Homo sapiens
MYTYVTKLHVVHVSEKFVITDFLKPTSVSSSKSFSILLCSIAGEELRSFGGEGMNLQESEEEEVPQESWDEGYSTLSIPPERLASYQSYSSTFHSLEEQQVCMAVDIGRHRWDQVKKEDQEATGPRLSRELLDEKEPEVLQDSLDRCYSTPSVYLGLTDSCQPYRSAFYVLEQQRIGLAVDMDEIEKYQEVEEDQDPSCPRLSRELLAEKEPEVLQDSLDRCYSTPSGYLELPDLGQPYRSAVYSLEEQYLGLALDVDRIKKDQEEEEDQGPPCPRLSRELLEVVEPEVLQDSLDVIQLLPVVLNSLTPASPTEVPFMHWRKNMLAFLLTWEKLKRRGRGRKEGEEDQRRKEEGEEKKGKKIKTHHAPGSAAC

SEQ ID NO: 918426 - protein, 598 aa, Homo sapiens
MEEERKTAELQKNRIQDSVVFEDVAVDFTQEEWALLDLAQRNLYRDVMLENFQNLASLGYPLHTPHLISQWEQEEDLQTVKRELIQGIFMGEHREGKNPWEKLFWLGEKINLKNHMVENIYECYEENQDGQTFSQVPNLDSLKRNTEVKSCECHECGKAFVDHSSLKSHIRSHTGSKPYQCKECGKAFHFLACFKKHMKTPTEEKPYECKECTKAFSCSSFFRAHMKIHIGKTNYECKECGKGFSCSSSLTEHKRIHSGDKPYECKECGKAFSCSSSLSKHKRIHSGDKPYECKECGKAFSSSSHLIIHIRIHTGEKPYECKECGKAFSESSKLTVHGRTHTGEKPYKCKECGKAYNCPSSLSIHMRKHTGEKPYECLECGKAFYLPTSLNTHVKNQSREKPYECKECGKAFSCPSSFRAHVRDHTGKIQYECKECGKTFSRSSSLTEHLRTHSGEKPYECKECGKAFISSSHLTVHIRTHTGEKPYECKKCGKAFIYPSALRIHMRTHTGEKPYECKECGKAFRHSSYLTVHARMHTGEKPFECLECGKAFSCPSSFRRHVRSHTGEKPYECKECGKAFVCPAYFRRHVKTHTRENI

SEQ ID NO: 918427 - protein, 667 aa, Homo sapiens
KKLDAMTLIKEVTWASVIADMSIFGHCPAHDDFYLVVCNHCSQVVKPQAFQKHCAPASSQKCHVVNGQGPACRAPGSTKTSSREKGQGSRSRGHQPPEKTQKDNLCQPGGLTKDSPGKPPMAPPSKEPPGRENIEIIPSEGSSHWAEGSPPEKEPSGTRLPPKTHRKMARKECDLNRQCGVINPETKKICTRLLTCKIHSVHQRREVQGRAKDFDVLVAELKANSRKGESPKEKSPGRKEQVLERPSQELPSSVQVVAAVAAPSSTFSVRAKQTYPYCALPRSRASSESELDDEGPCGGDGDPGLFPFPMPRGGTQASSEESEEEGTSDDLHPPPDCHYATRPPRPQAFCTFGSRLVSPGCYVFSRRLDRFCSALSSMLERHLSTHMWKKIPPAAEPPAHLVNSPLSAPLSPSSTGTCPRLPGPTLRPACSASMPPTKDNLVPSYPAGSPSVAAACSQAECMGGSQAITSPLPANTPSPSFSKLPPSKASKSSKGKDGVEVEAPSRKRKLSPGPTTLKRTCILEPTGKGKPSGCRGLSAKTKTALSMGLNGTMGPRVKRAGPLDCRGSPHQLPTPVKASQLENRGAAGHPAKALPTNCLSEEEVAKKRKNLATYCRPVKAKHCQAGAPADVACSVRRKKPGPALAFEEKCSTLKVLELPLFPEGKGV

SEQ ID NO: 918428 - protein, 658 aa, Homo sapiens
KKLDAMTLIKEVTWASVIADMSIFGHCPAHDDFYLVVCNHCSQVVKPQAFQKHCAPASSQKCHVVNGQGPACRAPGSTKTSSREKGQGSRSRGHQPPEKTQKDNLCQPGGLTKDSPGKPPMAPPSKEPPGRENIEIIPSEGSSHWAEGSPPEKEPSGTRLPPKTHRKMARKECDLNRQCGVINPETKKICTRLLTCKIHSVHQRREVQGRAKDFDVLVAELKANSRKGESPKEKSPGRKEQVLERPSQELPSSVQVVAAVAAPSSTFSVRAKQTYPYCALPRSRASSESELDDEGPCGGDGDPGLFPFPMPRGGTQASSEESEEEGTSDDLHPPPDCHYATRPPRPQAFCTFGSRLVSPGCYVFSRRLDRFCSALSSMLERHLSTHMWKKIPPAAEPPAHLVNSPLSAPLSPSSTGTCPRLPGPTLRPACSASMPPTKDNLVPSYPAGSPSVAAACSQAECMGGSQAITSPLPANTPSPSFSKLPPSKASKSSKGKDGVEVEAPSRKRKLSPGPTTLKRTCILEPTGKGKPSGCRGLSAKTKTALSMGLNGTMGPRVKRAGPLDCRGSPHQLPTPVKASQLENRGAAGHPAKALPTNCLSEEEVAKKRKNLATYCRPVKAKHCQAGAPADVACSVRRKKPGPALAFEEKCSTLKSKAH

SEQ ID NO: 918429 - protein, 72 aa, Homo sapiens; identical to SEQ ID NO: 753331

SEQ ID NO: 918430 - protein, 144 aa, Homo sapiens
LHLMPQAQGHTPQLRPCSHRGAGTWEHGEQHGQASPPWKPSTSSILCPSSAPPSIWRGWVVSGGVSEHEGPCTPGSASPRGTRPSSPQPGGYYCIQSVPLHLTNTPSYNQYSSIQSIFLHQHLSIQPIVLHLINAPPSNQYSAI

SEQ ID NO: 918431 - protein, 294 aa, Homo sapiens
QGSQGLSGQVAPRYRPSTCSTQDTASMNWAFLQGLLSGVNKYSTVLSRIWLSVVFIFRVLVYVVAAEEVWDDEQKDFVCNTKQPGCPNVCYDEFFPVSHVRLWALQLILVTCPSLLVVMHVAYREERERKHHLKHGPNAPSLYDNLSKKRGGLWWTYLLSLIFKAAVDAGFLYIFHRLYKDYDMPRVVACSVEPCPHTVDCYISRPTEKKVFTYFMVTTAAICILLNLSEVFYLVGKRCMEIFGPRHRRPRCRECLPDTCPPYVLSQGGHPEDGNSVLMKAGSAPVDAAQVPDR

SEQ ID NO: 918432 - protein, 324 aa, Homo sapiens
MSSPLASLSKTRKVPLPSEPMNPGRRGIRIYGDEDEVDMLSDGCGSEEKISVPSCYGGIGAPVSRQVPASHDSELMAFMTRKLWDLEQQVKAQTDEILSKDQKIAALEDLVQTLRPHPAEATLQRQEELETMCVQLQRQVREMERFLSDYGLQWVGEPMDQEDSESKTVSEHGERDWMTAKKFWKPGDSLAPPEVDFDRLLASLQDLSELVVEGDTQVTPVPGGARLRTLEPIPLKLYRNGIMMFDGPFQPFYDPSTQRCLRDILDGFFPSELQRLYPNGVPFKVISCSSNHTFGDFEGSGDTQPPQTPPILRGSRCTPWGTPV

SEQ ID NO: 918433 - protein, 324 aa, Homo sapiens; identical to SEQ ID NO: 918432

SEQ ID NO: 918434 - protein, 286 aa, Homo sapiens [sequence omitted]

SEQ ID NO: 918435 - protein, 249 aa, Homo sapiens
MAFMTRKLWDLEQQVKAQTDEILSKDQKIAALEDLVQTLRPHPAEATLQRQEELETMCVQLQRQVREMERFLSDYGLQWVGEPMDQEDSESKTVSEHGERDWMTAKKFWKPGDSLAPPEVDFDRLLASLQDLSELVVEGDTQVTPVPGGARLRTLEPIPLKLYRNGIMMFDGPFQPFYDPSTQRCLRDILDGFFPSELQRLYPNGVPFKVISCSSNHTFGDFEGSGDTQPPQTPPILRGSRCTPWGTPV

SEQ ID NO: 918436 - protein, 249 aa, Homo sapiens; identical to SEQ ID NO: 918435

SEQ ID NO: 918437 - protein, 437 aa, Homo sapiens
MAFMTRKLWDLEQQVKAQTDEILSKDQKIAALEDLVQTLRPHPAEATLQRQEELETMCVQLQRQVREMERFLSDYGLQWVGEPMDQEDSESKTVSEHGERDWMTAKKFWKPGDSLAPPEVDFDRLLASLQDLSELVVEGDTQVTPVPGGARLRTLEPIPLKLYRNGIMMFDGPFQPFYDPSTQRCLRDILDGFFPSELQRLYPNGVPFKVSDLRNQVYLEDGLDPFPGEGRVVGRQRMHKALDRVEEHPGSRMTAEKFLNRLPKFVIRQGEVIDIRGPIRDTLQNCCPLPARIQEIVVETPTLAAERERSQESPNTPAPPLSMLRIKSENGEQAFLLMMQPDNTIGDVRALLAQARVMDASAFEIFSTFPPTLYQDDTLTLQAAGLVPKAALLLRARRAPKSSLKFSPGPCPGPGPGPSPGPGPGSSPCPGPSPSPQ

SEQ ID NO: 918438 - protein, 324 aa, Homo sapiens; identical to SEQ ID NO: 918432

SEQ ID NO: 918439 - protein, 570 aa, Homo sapiens
MSSPLASLSKTRKVPLPSEPMNPGRRGIRIYGDEDEVDMLSDGCGSEEKISVPSCYGGIGAPVSRQVPASHDSELMAFMTRKLWDLEQQVKAQTDEILSKDQKIAALEDLVQTLRPHPAEATLQRQEELETMCVQLQRQVREMERFLSDYGLQWVGEPMDQEDSESKTVSEHGERDWMTAKKFWKPGDSLAPPEVDFDRLLASLQDLSELVVEGDTQVTPVPGGARLRTLEPIPLKLYRNGIMMFDGPFQPFYDPSTQRCLRDILDGFFPSELQRLYPNGVPFKVSDLRNQVYLEDGLDPFPGEGRVVGRQRMHKALDRVEEHPGSRMTAEKFLNRLPKFVIRQGEVIDIRGPIRDTLQNCCPLPARIQEIVVETPTLAAERERSQESPNTPAPPLSMLRIKSENGEQAFLLMMQPDNTIGDVRALLAQARVMDASAFEIFSTFPPTLYQDDTLTLQAAGLVPKAALLLRARRAPKSSLKFSPGPCPGPGPGPSPGPGPGSSPCPGPSPSPVPVPVPAPSLSWTQSQPPIKHPPPQPAAPPGSWVGHLARHVGKAWDQLGQGGGGADPPL

SEQ ID NO: 918440 - protein, 200 aa, Homo sapiens
MHKALDRVEEHPGSRMTAEKFLNRLPKFVIRQGEVIDIRGPIRDTLQNCCPLPARIQEIVVETPTLAAERERSQESPNTPAPPLSMLRIKSENGEQAFLLMMQPDNTIGDVRALLAQARVMDASAFEIFSTFPPTLYQDDTLTLQAAGLVPKAALLLRARRAPKSSLKFSPGPCPGPGPGPSPGPGPGSSPCPGPSPSPQ

SEQ ID NO: 918441 - protein, 354 aa, Homo sapiens
MDQEDSESKTVSEHGERDWMTAKKFWKPGDSLAPPEVDFDRLLASLQDLSELVVEGDTQVTPVPGGARLRTLEPIPLKLYRNGIMMFDGPFQPFYDPSTQRCLRDILDGFFPSELQRLYPNGVPFKVSDLRNQVYLEDGLDPFPGEGRVVGRQRMHKALDRVEEHPGSRMTAEKFLNRLPKFVIRQGEVIDIRGPIRDTLQNCCPLPARIQEIVVETPTLAAERERSQESPNTPAPPLSMLRIKSENGEQAFLLMMQPDNTIGDVRALLAQARVMDASAFEIFSTFPPTLYQDDTLTLQAAGLVPKAALLLRARRAPKSSLKFSPGPCPGPGPGPSPGPGPGSSPCPGPSPSPQ

SEQ ID NO: 918442 - protein, 187 aa, Homo sapiens
MSSPLASLSKTRKVPLPSEPMNPGRRGIRIYGDVPASHDSELMAFMTRKLWDLEQQVKAQTDEILSKDQKIAALEDLVQTLRPHPAEATLQRQEELETMCVQLQRQVREMERFLSDYGLQWVGEPMDQEDSESKTVSEHGERDWMTAKKFWKPGDSLAPPEVDFDRLQALCPKQHCCCGHAEPRSPA

SEQ ID NO: 918443 - protein, 286 aa, Homo sapiens [sequence omitted]

SEQ ID NO: 918444 - protein, 291 aa, Homo sapiens
MSSPLASLSKTRKVPLPSEPMNPGRRGIRIYGDVPASHDSELMAFMTRKLWDLEQQVKAQTDEILSKDQKIAALEDLVQTLRPHPAEATLQRQEELETMCVQLQRQVREMERFLSDYGLQWVGEPMDQEDSESKTVSEHGERDWMTAKKFWKPGDSLAPPEVDFDRLLASLQDLSELVVEGDTQVTPVPGGARLRTLEPIPLKLYRNGIMMFDGPFQPFYDPSTQRCLRDILDGFFPSELQRLYPNGVPFKVISCSSNHTFGDFEGSGDTQPPQTPPILRGSRCTPWGTPV

SEQ ID NO: 918445 - protein, 512 aa, Homo sapiens
MSSPLASLSKTRKVPLPSEPMNPGRRGIRIYGDEDEVDMLSDGCGSEEKISVPSCYGGIGAPVSRQVPASHDSELMAFMTRKLWDLEQQVKAQTDEILSKDQKIAALEDLVQTLRPHPAEATLQRQEELETMCVQLQRQVREMERFLSDYGLQWVGEPMDQEDSESKTVSEHGERDWMTAKKFWKPGDSLAPPEVDFDRLLASLQDLSELVVEGDTQVTPVPGGARLRTLEPIPLKLYRNGIMMFDGPFQPFYDPSTQRCLRDILDGFFPSELQRLYPNGVPFKVSDLRNQVYLEDGLDPFPGEGRVVGRQRMHKALDRVEEHPGSRMTAEKFLNRLPKFVIRQGEVIDIRGPIRDTLQNCCPLPARIQEIVVETPTLAAERERSQESPNTPAPPLSMLRIKSENGEQAFLLMMQPDNTIGDVRALLAQARVMDASAFEIFSTFPPTLYQDDTLTLQAAGLVPKAALLLRARRAPKSSLKFSPGPCPGPGPGPSPGPGPGSSPCPGPSPSPQ

SEQ ID NO: 918446 - protein, 291 aa, Homo sapiens; identical to SEQ ID NO: 918444

SEQ ID NO: 918447 - protein, 505 aa, Homo sapiens
MSSPLASLSKTRKVPLPSEPMNPGRRGIRIYGDEDEVDMLSDGCGSEEKISVPSCYGGIGAPVSRQVPASHDSELMAFMTRKLWDLEQQVKAQTDEILSKDQKIAALEDLVQTLRPHPAEATLQRQEELETMCVQLQRQVREMERFLSDYGLQWVGEPMDQEDSESKTVSEHGERDWMTAKKFWKPGDSLAPPEVDFDRLLASLQDLSELVVEGDTQVTPVPGGARLRTLEPIPLKLYRNGIMMFDGPFQPFYDPSTQRCLRDILDGFFPSELQRLYPNGVPFKVYLEDGLDPFPGEGRVVGRQRMHKALDRVEEHPGSRMTAEKFLNRLPKFVIRQGEVIDIRGPIRDTLQNCCPLPARIQEIVVETPTLAAERERSQESPNTPAPPLSMLRIKSENGEQAFLLMMQPDNTIGDVRALLAQARVMDASAFEIFSTFPPTLYQDDTLTLQAAGLVPKAALLLRARRAPKSSLKFSPGPCPGPGPGPSPGPGPGSSPCPGPSPSPQ

SEQ ID NO: 918448 - protein, 200 aa, Homo sapiens; identical to SEQ ID NO: 918440

SEQ ID NO: 918449 - protein, 320 aa, Homo sapiens
MMFDGPFQPFYDPSTQRCLRDILDGFFPSELQRLYPNGVPFKVSDLRNQVYLEDGLDPFPGEGRVVGRQRMHKALDRVEEHPGSRMTAEKFLNRLPKFVIRQGEVIDIRGPIRDTLQNCCPLPARIQEIVVETPTLAAERERSQESPNTPAPPLSMLRIKSENGEQAFLLMMQPDNTIGDVRALLAQARVMDASAFEIFSTFPPTLYQDDTLTLQAAGLVPKAALLLRARRAPKSSLKFSPGPCPGPGPGPSPGPGPGSSPCPGPSPSPSLSWTQSQPPIKHPPPQPAAPPGSWVGHLARHVGKAWDQLGQGGGGADPPL

SEQ ID NO: 918450 - protein, 270 aa, Homo sapiens [sequence omitted]

SEQ ID NO: 918451 - protein, 84 aa, Homo sapiens
PCSSSNFISIPGTPILLPPPHNSASALGLGSKDFVCLEVPASHDSELMAFMTRKLWDLEQQVKAQTDEILSKVGLQVGEGQGLV

SEQ ID NO: 918452 - protein, 188 aa, Homo sapiens
YFKKIENMFRWVALFCVTRLTEENPTLTPKAFESSSGKGRVCFSLCPTSPQAACATFRSHLLGVGVKRGAPVSQPLLELNDVHHAVPIAIQHEALHPEQHGWVQRLRGPLGHPASTAALAAASSTPGCARQGVPAVRQLLQLSSGAAAVRSPRGPSHPRLRALGRHGKAAPPCGTSGRGATRQLRRQM

SEQ ID NO: 918453 - protein, 343 aa, Homo sapiens
MFSLPSLPSWLPGLPSLEWGSSLLDSLLQGLIGALGVLVLNSLLKVYFFVGCANDPQRRPEKERLRAQWASLETVHLAGLALFLTVVGSRVAALVVLEFSLRAVSTLLSLGKGSQGAAERLQLYLLCQYSLGCGLTCGLSFLQEGAPHRTLNLLLSLGLATLLGLGARRLHRHVCRLYELHSSQRYCGVCLGLLAHAHGLPQLLGRALAIAFAVGDLAAVALINQDFLTTSEAMRFWTPLTICYTLLVIYMQEEQRQHPGLQSQVQTVLVRMGGLFVLLLTVGRWLDLLGILVSLLGELWCLVGVRTLLDLCQIQDFPSQRPPVSTPSQPLPSAPQSQSSAPS

SEQ ID NO: 918454 - protein, 446 aa, Homo sapiens
MRLLAKIICLMLWAICVAEDCNELPPRRNTEILTGSWSDQTYPEGTQAIYKCRPGYRSLGNIIMVCRKGEWVALNPLRKCQKRPCGHPGDTPFGTFTLTGGNVFEYGVKAVYTCNEGYQLLGEINYRECDTDGWTNDIPICEVVKCLPVTAPENGKIVSSAMEPDREYHFGQAVRFVCNSGYKIEGDEEMHCSDDGFWSKEKPKCVEISCKSPDVINGSPISQKIIYKENERFQYKCDMGYEYSERGDAVCTESGWRPLPSCEEKSCDNPYIPNGDYSPLRIKHRTGDEITYQCRNGFYPATRGNTAKCTSTGWIPAPRCTYIKHGGLYHENMRRPYFPVAVGKYYSYYCDEHFETPSGSYWDHIHCTQDGWSPAVPCLRKCYFPYLENGYNQNHGRKFVQGKSIDVACHPGYALPKAQTTVTCMENGWSPTPRCIRVSKYTTLKS

SEQ ID NO: 918455 - protein, 148 aa, Homo sapiens
MAWKNQPQCPQYFLVAPSLESFTAPETDSSWLQFSSRSKPHNLPATCASIKAALLPVYSEQYVPPSLKPSSASRKYLCSSLLLLNPLLQAYGQGVSGLCSQQVHGPPLCLWHPETLTPVVSMSCGSIEIERTFIASFHPRNLSQFMQK

SEQ ID NO: 918456 - protein, 117 aa, Homo sapiens
MLAITVITARPVNERVLPYPYSILNTICCTSKYLDKAIVVVVTENAGVAKRKIMQRLADSVHSDSPKVSTADISSNKDDEENSVLDMVVLFSSSDKFTLNQVCLVQTLWSNICRSKM

SEQ ID NO: 918457 - protein, 765 aa, Homo sapiens
LPFFSPVPGPTSSATNVSMVVSAGPLSSEKAEMNILEINEKLHPQLAEKKQQFRNLKEKCFLTQLAGFLANQQNKYKYEECKDLIKSMLRNERQFKEEKLAEQLKQAEELRQYKVLVHTQERELTQLREKLREGRDASRSLNEHLQALLTPDEPDKSQGQDLQEQLAEGCRLAQHLVQKLSPENDNDDDEDVQVEVAEKVQKSSAPREMQKAEEKEVPEDSLEECAITYSNSHGPYDSNQPHRKTKITFEEDKVDSALIGSSSHVEWEDAVHIIPENESDDEEEEEKGPVSPSSEKFVITDFLKPTSVSSSKSFSILLCSIAGEELRSFGGEGMNLQESEEEEVPQESWDEGYSTLSIPPEMLASYKSYSSTFHSLEEQQVCMAVDIGSEYSIVKVIKLQFMAQSHAMPVPTWTDCHDIELKAGHRWDQVKKEDQEATGHRLSRELLDEKGPEVLQDSLDRCYSTPSGCLELTDSCQPYRSAFYILEQQRVGLAVDMDEIEKYQEVEEDQDPSCPRLSRELLDEKEPEVLQDSLDRCYSTPSGYLELPDLGQPYSSAVYSLEEQYLGLVLDVDRIKKDQEEEEDQGPPCPRLSRELLEVVEPEVLQDSLDRCYSTPSSCLEQPDSCQPYGSSFYALEEKHVGFSLDVGEIEKKGKGKIRRGRRSKKKRRRGRKEGEEDQNPPCPRLNGVLMEVEEPEVLQDSLDRCYSTPSMYCELRDSFQHYRSVFYSFEEQHISFALDMDNRFFTLTVTSLYLVFQMGVIFPQ

SEQ ID NO: 918458 - protein, 165 aa, Homo sapiens
MIQALAGFFTYFVILAENGFRPVDLLGIRLHWEDKYLNDLEDSYGQQWTYEQRKVVEFTCQTAFFVTIVVVQWADLIISKTRRNSLFQQGMRNKVLIFGILEETLLAAFLSYTPGMDVALRMYPLKITWWLCAIPYSILIFVYDEIRKLLIRQHPDGWVERETYY

SEQ ID NO: 918459 - protein, 502 aa, Homo sapiens
MMEIANVSSPEVFVLLGFSTRPSLETVLFIVVLSFYMVSILGNGIIILVSHTDVHLHTPMYFFLANLPFLDMSFTTSIVPQLLANLWGPQKTISYGGCVVQFYISHWLGATECVLLATMSYDRYAAICRPLHYTVIMHPQLCLGLALASWLGGLTTSMVGSTLTMLLPLCGNNCIDHFFCEMPLIMQLACVDTSLNEMEMYLASFVFVVLPLGLILVSYGHIARAVLKIRSAEGRRKAFNTCSSHVAVVSLFYGSIIFMYLQPAKSTSHEQGKFIALFYTVVTPALNPLIYTLRNTEVKSALRHMDAPWIINFDDAESARGDRSRPVPQSPRSPPSPQACAWGELSPGLRLAGSGTLAVAPPLGPGLEAAANLFLPYLGDLVAAAASPSLDPAGRGSPGPTPPTQTKTAPSRRDSAPSGGGGKRGGNMAPPKCARRPLGCGGRGRRSRGGRQVHVLGDRSVAVGRDLPSPDGSYFQDIFIFYPLFCVHFITSVYRGNNAKLF

SEQ ID NO: 918460 - protein, 354 aa, Homo sapiens
MVPVDSPGPGDSKDGIPLFSLGALSQSALVHSRSRNAIQESSLGIRGLKSPFSALPPSPTVAMPGLGVLQLACDECCQDRVLPFKATDSLLAKGVSRNVIQELIDIGESIAIPDEFTEQEKQSGDWWKRLVSAGIASAVARTCTAPLDRLKYKKLLSFDGVHLGILERFIFGSLAGVTAQTCIYPMEVLKTRLAIGKTGEYSGIIDCGKKLLKQEGVRSFFKGYTPNLLGIVPYAGIDLAVYEILKNFWLENYAGNSVNPGIMILVGCSTLSNTCGQLASFSVNLIRTRMQASAPVEKGKTTSMIQLIQEIYTKEGKLGFYRGFTSNIIKVLPAVGVGCVAYEKVKPLFGLTWK

SEQ ID NO: 918461 - protein, 149 aa, Homo sapiens
MDSDGSMTVDWDEWKYYFLLHPATNITEMIHFWKHSTGASRGLEQSSGDWHPSTDFDADDSPDRVIQLALTRPTCTYSSAHLELKSRASVGTLGSPCCSKAGAEFLSLFQVDRPAGGPTPTGPSVWNRLLSSLMLESRPVSGFGEGCSI

SEQ ID NO: 918462 - protein, 230 aa, Homo sapiens
VFGVRGVAPTLDHKCLKITQLIYKHASYKKLLSFDGVHLGILERFIFGSLAGVTAQTCIYPMEVLKTRLAIGKTGEYSGIIDCGKKLLKQEGVRSFFKGYTPNLLGIVPYAGIDLAVYEILKNFWLENYAGNSVNPGIMILVGCSTLSNTCGQLASFSVNLIRTRMQASAPVEKGKTTSMIQLIQEIYTKEGKLGFYRGFTSNIIKVLPAVGVGCVAYEKVKPLFGLTWK

SEQ ID NO: 918463 - protein, 240 aa, Homo sapiens [sequence omitted]

SEQ ID NO: 918464 - protein, 400 aa, Homo sapiens
KSSRGTQPAKEMRSPHTQVLKSKLEEVVVSSQDQQIVALVLTRLKKAQRIRELQQQAAKAWEELKRSDQKVQMTLERERRLLLRQSQEQWQEKEQRKTLQSPEQRGLRRDSQRKNVPPGESRWKEQPEDQESPRQEKLEKARAQAEHRKQCQVRRLREQEKMLRNLREQHSLQLQRRLVEACRKRHLHAVEGQKKVQDTNLSSLINYQARKVLMDCQAKAEELLRQLSLEQSFQRSQEIHQGLRKERQRELREKAQKEEEQLQQARWRAGESEEQRKMRKRILVELADEKIRQARSHVHKTTRDKVQHLRELNHLREKNHHILKLKAEKEEKCHIEGIKEAIKKKEQRVQHISQGKDPNFQEFQKLPQASRREERAPPNSSLDQMVLEAQLRACQQNRGY

SEQ ID NO: 918465 - protein, 183 aa, Homo sapiens
RGKRDTGGSRRAPAPQLAGCLLGPQFLLVFLMSLPSLQGRAPLRMVLWVPSEQHKVDACRTLPPRTECARGGRRAAVGTRASRDEQELLESDPESIGRHFASNSSSVAAAILVPFIALIIAGFVLYLYKHRRRPKVPFNGYAGHENTNVRATFENPMYDRNIQPTDIMASEAEFTVSTVCTAV

SEQ ID NO: 918466 - protein, 147 aa, Homo sapiens
DGRMTLSESINLSGPHFLSVSVNGKTSAGSLFTQLCFVMQMLMDGVSGEISSANPGSTPVFSIGLLRASPVHDASPVREDSVSFPNAIHFVNLVWWNSCYCFTGVHSHYLRNSNLTDLEVFTIFCSKAWVAISKIFCEKHCSRLQFK

SEQ ID NO: 918467 - protein, 141 aa, Homo sapiens
MKRGHPWERWQEEHCRQRQCKYKGPARQRACHIMEGLTVALYSHGVRPWESIQYQSQSLLNHTGGQSQSLLNHTGGQSQSLLNHTGGSSKWEAMAKDWKVGERVLQVISPAVTVPPPWLQLLLDIPSLRGPSTHWQSQLWC

SEQ ID NO: 918468 - protein, 174 aa, Homo sapiens
MGCSETLPFPHLSAALGIQQQFISSFPVLRLLTPAGGHYKHGLSNTTQLPFPHGPHLVHRKHVCPGKLWECSPFPITQHSGFRFLKHEPVRSPLCPSNFRRHILSSTDGSIKDRILGTQYFPPQKSFSKVFLISNSASLYAISVGNHLRNEVIIQVERKTSLTMLAAIFGDHLP

SEQ ID NO: 918469 - protein, 138 aa, Homo sapiens
CIESLGSTFLGSLVQPSLSTPQAVSLPVFLRRRVPNKRSTTLRSGEVLLGPTKATQVKEWMALPQLWLRSPLQDDILLGDGHQRQGHGRRCQEEAQRKGYGSTKQESGLLQARKRGLPRNQLYQHIDLGLLASRTLRK

SEQ ID NO: 918470 - protein, 149 aa, Homo sapiens
MFVSRLGRKGLGGTKQQGGKEKTSTSEARTFHRLTLDTGPETRSWRLSLKQPVGLLGLCVSTYLALKPARLLSSLLSDPCNTKRPEEDTLKRKAPRSSGFTPVFIYSFPQRSLYGFPMSHRSYRIGGLRAADKSLSGREEEFQTKDLLP

SEQ ID NO: 918471 - protein, 1780 aa, Homo sapiens
PPPPPPPREACHPLGGKMKEICRICARELCGNQRRWIFHTASKLNLQVLLSHVLGKDVPPDGKAEFACSKCAFMLDRIYRFDTVIARIEALSIERLQKLLLEKDRLKFCIASMYRKNNDDSGVEIKAGNGTVDMSVLPDARYSTLLQEDFAYSGFECWVENEDQIQEPHSCHGSEGPGNRPRRCRGCAALRVADSDYEAICKVPRKVARSISCGPSSRWSTSICTEEPALSEVGPPDLASTKVPPDGESMEEETPGSSVESLDASVQASPPQQEDEETERSAKELGKCDCCSDDQAPQHGCNHKLELALSMIKGLDYKPIQSPRGSRLPIPVKSSLPGAKPGPSMTDGVSSGFLNRSLKPLYKTPVSYPLELSDLQELWDDLCEDYLPLRVQPMTEELLKQQKLNSHETTITQQSVSDSHLAELQEKIQQTEATNKILQEKLNEMSYELKCAQELSQKQDGTIQNLKETLKSRERETEELYQVIEGQNDTMAKLREMLHQSQLGQLHSSEGTSPAQQQVALLDLQSALFCSQLEIQKLQRVVRQKERQLADAKQCVQFVEAAAHESEQQKEASWKHNQELRKALQQLQEVLQNKSQQLRAWEAEKYNEIRTQEQNIQHLNHSLSHKEQLLQEFRELLQYRDNSDKTLEANEMLLEKLRQRIRDKAVALERAIDEKFSALEEKEKELRQLRLAGSMQIPSRDDSTSLTAKEDVSIPRSTLGDLDTVAGLEKELSNAKEELELMAKKERESQPCRLGRISSPCIWRKEEIRVSGQKEYNLTCCLEAICEGNHFSFLDLFPGAAAGDDTEDTSTEFTDSIEEEAAHHSHQQENGPLKVDFELLLVMSLEGKFLPDTKFPSYSKHSYAFPNRHIPPCLSSKLVKVALEKSLATVETQNPSFSPPSPMGGDSNRCLQEEMLHLRAEIHQHLEEKRKAEEELKELKAQIEEAGFSSVSHIRNTMLSLCLENAELKEQMGETMSDGWEIEEDKEKGEVMVETVVTKEGLSESSLQAEFRKLQGKLKNAHNIINLLKEQLVLSSKEGNSKLTPELLVHLTSTIERINTELVGSPGKHQHQEEGNVTVRPFPRPQSLDLGATFTVDAHQANELEKYRVMLSESLVKQDSKQIQVDFQDLGYETCGRSENEAEREETTSPECEEHNSLKEMVLMEGLCSEQGRRGSTLASSSERKPLENQLGKQEEFRVYGKSENILVLRKDIEDLKAQLQNANKVIQNLKSRVRSLSVTSDYSSSLERPRKLRAVGTLEGSSPHSVPDEDEGWLSDGTGAFYSPGLQAKKDLESLIQRVSQLEAQLPENGLEEKLAEELRSASWPGKYDSLIQDQARELSYLRQKIREGRGICYLITQHAKDTVKSFEDLLRSNDIDYYLGQSFREQLAQGSQLTERLTSKLSTKDHKSEKDQAGLEPLALRLSRELQEKEKVIEVLQAKLDARSLTPSSSRALSDSHRSPSSTSFLSDELEACSDMDIVSEYTHYEEKKASPSHSDSIHHSSHSAVLSSKPSSTSASQGAKAESNSNPISLPTPQNTPKEANQAHSGTSTVPPASTATLLSNDLEADSSYYLNSAQPHSPPRGTIELGRILEPGYLGSSGKWDVMRPQKGSVSGDLSSGSSVYQLNSKPTGADLLEEHLGEIWNLRQRLEESICINDCLREQLEHRLTSTARGRGSTSNFYSQGLESIPQLCNENRVLREENRRLQAQLSHVSREHSQETESLREALLSSRSHLQELEKELEHQKVERQQLLEDLREKQQEVLHFREERLSLQENDSR

SEQ ID NO: 918472 - protein, 645 aa, Homo sapiens
EDPQRSLYRGETPSPECEEHNSLKEMVLMEGLCSEQGRRGSTLASSSERKPLENQLGKQEEFRVYGKSENILVLRKDIEDLKAQLQNANKVIQNLKSRVRSLSVTSDYSSSLERPRKLRAVGTLEGSSPHSVPDEDEGWLSDGTGAFYSPGLQAKKDLESLIQRVSQLEAQLPENGLEEKLAEELRSASWPGKYDSLIQDQARELSYLRQKIREGRGICYLITQHAKDTVKSFEDLLRSNDIDYYLGQSFREQLAQGSQLTERLTSKLSTKDHKSEKDQAGLEPLALRLSRELQEKEKVIEVLQAKLDARSLTPSSSRALSDSHRSPSSTSFLSDELEACSDMDIVSEYTHYEEKKASPSHSDSIHHSSHSAVLSSKPSSTSASQGAKAESNSNPISLPTPQNTPKEANQAHSGTSTVPPASTATLLSNDLEADSSYYLNSAQPHSPPRGTIELGRILEPGYLGSSGKWDVMRPQKGSVSGDLSSGSSVYQLNSKPTGADLLEEHLGEIWNLRQRLEESICINDCLREQLEHRLTSTARGRGSTSNFYSQGLESIPQLCNENRVLREENRRLQAQLSHVSREHSQETESLREALLSSRSHLQELEKELEHQKVERQQLLEDLREKQQEVLHFREERLSLQENDSR

SEQ ID NO: 918473 - protein, 140 aa, Homo sapiens [sequence omitted]

SEQ ID NO: 918474 - protein, 164 aa, Homo sapiens
GTRKKFARFEGISSSGKTKFPPRLRIPFLMAQSLVFHRPQGVLDPGPRTCSKTLLHYVRQAGPASALLPTQKVEQRVWWKDPITKGCETGQNQQPIWVPSRYLKPYYEPDNEEEVLGGSQTPTGGSIVQVDAEDDPQLSRATLIESSHLPGDRSRSCHRWWKKT

SEQ ID NO: 918475 - protein, 290 aa, Homo sapiens
MVTHQIQPVFLRLEHLQLLKVKLITFFSGHLEQLISYVLLFRISLEPLGALLEKIAATLKTLIFEGCQIHYCQLSAILPGLSRCSQLTTFYFGRNCMSTDTLKDLLRHTSGLSKLSLETYPAPEESLNSLHGGVCSHCVVPPGTCCNFGVELGSSMYAVAAQMSVCMLSAGLWMLLDASDLGAMGGGGRQTDSWMGRRGYLVRLYLVTKGGLKPVGWSTSAMDQSGNMWCLFCACQWLPMTQAAHTSFPMMPQQPQTQGKHQDEQWQSETTHSWDDFPADKQSTLGPFLY

SEQ ID NO: 918476 - protein, 798 aa, Homo sapiens
FYPAPVQDGVAVVHTSLTKIQGYSESPDLEFEYADTDKWAAELSELYSYTEGPEFLMNRKCFEEDFRIHVTDKKWTELDTNQHRTHAMRLLDGLEVTAREKRLKVARAILYVAQGTFGECSSEAEVQSWMRYNIFLLLEVGTFNALVELLNMEIDNSAACSSAVRKPAISLADSTDLRVLLNIMYLIVETVHQECEGDKAEWRTMRQTFRAELGSPLYNNEPFAIMLFGMVTKFCSGHAPHFPMKKVLLLLWKTVLCTLGGFEELQSMKAEKRSILGLPPLPEDSIKVIRNMRAASPPASASDLIEQQQKRGRREHKALIKQDNLDAFNERDPYKADDSREEEEENDDDNSLEGETFPLERDEVMPPPLQHPQTDRLTCPKGLPWAPKVREKDIEMFLESSRSKFIGYTLGSDTNTVVGLPRPIHESIKTLKQHKYTSIAEVQAQMEEEYLRSPLSGGEEEVEQVPAETLYQGLLPSLPQYMIALLKILLAAAPTSKAKTDSINILADVLPEEMPTTVLQSMKLGVDVNRHKEVIVKAISAVLLLLLKHFKLNHVYQFEYMAQHLVFANCIPLILKFFNQNIMSYITAKNSISVLDYPHCVVHELPELTAESLEAGDSNQFCWRNLFSCINLLRILNKLTKWKHSRTMMLVVFKSAPILKRALKVKQAMMQLYVLKLLKVQTKYLGRQWRKSNMKTMSAIYQKVRHRLNDDWAYGNDLDARPWDFQAEECALRANIERFNARRYDRAHSNPDFLPVDNCLQSVLGQRVDLPEDFQMNYDLWLEREVFSKPISWEELLQ

SEQ ID NO: 918477 - protein, 216 aa, Homo sapiens [sequence omitted]

SEQ ID NO: 918478 - protein, 544 aa, Homo sapiens
MQCTLGGFEELQSMKAEKRSILGLPPLPEDSIKVIRNMRAASPPASASDLIEQQQKRGRREHKALIKQDNLDAFNERDPYKADDSREEEEENDDDNSLEGETFPLERDEVMPPPLQHPQTDRLTCPKGLPWAPKVREKDIEMFLESSRSKFIGYTLGSDTNTVVGLPRPIHESIKTLKQHKYTSIAEVQAQMEEEYLRSPLSGGEEEVEQVPAETLYQGLLPSLPQYMIALLKILLAAAPTSKAKTDSINILADVLPEEMPTTVLQSMKLGVDVNRHKEVIVKAISAVLLLLLKHFKLNHVYQFEYMAQHLVFANCIPLILKFFNQNIMSYITAKNSISVLDYPHCVVHELPELTAESLEAGDSNQFCWRNLFSCINLLRILNKLTKWKHSRTMMLVVFKSAPILKRALKVKQAMMQLYVLKLLKVQTKYLGRQWRKSNMKTMSAIYQKVRHRLNDDWAYGNDLDARPWDFQAEECALRANIERFNARRYDRAHSNPDFLPVDNCLQSVLGQRVDLPEDFQMNYDLWLEREVFSKPISWEELLQ

SEQ ID NO: 918479 - protein, 151 aa, Homo sapiens
MMLVVFKSAPILKRALKVKQAMMQLYVLKLLKVQTKYLGRQWRKSNMKTMSAIYQKVRHRLNDDWAYGNDLDARPWDFQAEECALRANIERFNARRYDRAHSNPDFLPVDNCLQSVLGQRVDLPEDFQMNYDLWLEREVFSKPISWEELLQ

SEQ ID NO: 918480 - protein, 540 aa, Homo sapiens
RDLITVRENIKDRISRGIGQPRWLLTLAATLNMAAREISWRKSRESCITAAVRELSWGCGAAKMEPAVGGPGPLIVNNKQPQPPPPPPPAAAQPPPGAPRAAAGLLPGGKAREFNRNQRKDSEGYSESPDLEFEYADTDKWAAELSELYSYTEGPEFLMNRKCFEEDFRIHVTDKKWTELDTNQHRTHAMRLLDGLEVTAREKRLKVARAILYVAQGTFGECSSEAEVQSWMRYNIFLLLEVGTFNALVELLNMEIDNSAACSSAVRKPAISLADSTDLRVLLNIMYLIVETVHQECEGDKAEWRTMRQTFRAELGSPLYNNEPFAIMLFGMVTKFCSGHAPHFPMKKVLLLLWKTVLCTLGGFEELQSMKAEKRSILGLPPLPEDSIKVIRNMRAASPPASASDLIEQQQKRGRREHKALIKQDNLDAFNERDPYKADDSREEEEENDDDNSLEGETFPLERDEVMPPPLQHPQTDRLTCPKGLPWAPKVREKDIEMFLESSRSKFIGYTLGSDTNTVVGLPRPIHESIKTLKQVSGFG

SEQ ID NO: 918481 - protein, 164 aa, Homo sapiens
RDLITVRENIKDRISRGIGQPRWLLTLAATLNMAAREISWRKSRESCITAAVRELSWGCGAAKMEPAVGGPGPLIVNNKQPQPPPPPPPAAAQPPPGAPRAAAGLLPGGKAREFNRNQRKDSEGYSESPDLEFEYADTDKWAAELSGNAQTFVLFGGGFFLIGL

SEQ ID NO: 918482 - protein, 900 aa, Homo sapiens
RDLITVRENIKDRISRGIGQPRWLLTLAATLNMAAREISWRKSRESCITAAVRELSWGCGAAKMEPAVGGPGPLIVNNKQPQPPPPPPPAAAQPPPGAPRAAAGLLPGGKAREFNRNQRKDSEGYSESPDLEFEYADTDKWAAELSELYSYTEGPEFLMNRKCFEEDFRIHVTDKKWTELDTNQHRTHAMRLLDGLEVTAREKRLKVARAILYVAQGTFGECSSEAEVQSWMRYNIFLLLEVGTFNALVELLNMEIDNSAACSSAVRKPAISLADSTDLRVLLNIMYLIVETVHQECEGDKAEWRTMRQTFRAELGSPLYNNEPFAIMLFGMVTKFCSGHAPHFPMKKVLLLLWKTVLCTLGGFEELQSMKAEKRSILGLPPLPEDSIKVIRNMRAASPPASASDLIEQQQKRGRREHKALIKQDNLDAFNERDPYKADDSREEEEENDDDNSLEGETFPLERDEVMPPPLQHPQTDRLTCPKGLPWAPKVREKDIEMFLESSRSKFIGYTLGSDTNTVVGLPRPIHESIKTLKQHKYTSIAEVQAQMEEEYLRSPLSGGEEEVEQVPAETLYQGLLPSLPQYMIALLKILLAAAPTSKAKTDSINILADVLPEEMPTTVLQSMKLGVDVNRHKEVIVKAISAVLLLLLKHFKLNHVYQFEYMAQHLVFANCIPLILKFFNQNIMSYITAKNSISVLDYPHCVVHELPELTAESLEAGDSNQFCWRNLFSCINLLRILNKLTKWKHSRTMMLVVFKSAPILKRALKVKQAMMQLYVLKLLKVQTKYLGRQWRKSNMKTMSAIYQKVRHRLNDDWAYGNDLDARPWDFQAEECALRANIERFNARRYDRAHSNPDFLPVDNCLQSVLGQRVDLPEDFQMNYDLWLEREVFSKPISWEELLQ

SEQ ID NO: 918483 - protein, 711 aa, Homo sapiens
MRLLDGLEVTAREKRLKVARAILYVAQGTFGECSSEAEVQSWMRYNIFLLLEVGTFNALVELLNMEIDNSAACSSAVRKPAISLADSTDLRVLLNIMYLIVETVHQECEGDKAEWRTMRQTFRAELGSPLYNNEPFAIMLFGMVTKFCSGHAPHFPMKKVLLLLWKTVLCTLGGFEELQSMKAEKRSILGLPPLPEDSIKVIRNMRAASPPASASDLIEQQQKRGRREHKALIKQDNLDAFNERDPYKADDSREEEEENDDDNSLEGETFPLERDEVMPPPLQHPQTDRLTCPKGLPWAPKVREKDIEMFLESSRSKFIGYTLGSDTNTVVGLPRPIHESIKTLKQHKYTSIAEVQAQMEEEYLRSPLSGGEEEVEQVPAETLYQGLLPSLPQYMIALLKILLAAAPTSKAKTDSINILADVLPEEMPTTVLQSMKLGVDVNRHKEVIVKAISAVLLLLLKHFKLNHVYQFEYMAQHLVFANCIPLILKFFNQNIMSYITAKNSISVLDYPHCVVHELPELTAESLEAGDSNQFCWRNLFSCINLLRILNKLTKWKHSRTMMLVVFKSAPILKRALKVKQAMMQLYVLKLLKVQTKYLGRQWRKSNMKTMSAIYQKVRHRLNDDWAYGNDLDARPWDFQAEECALRANIERFNARRYDRAHSNPDFLPVDNCLQSVLGQRVDLPEDFQMNYDLWLEREVFSKPISWEELLQ

SEQ ID NO: 918484 - protein, 344 aa, Homo sapiens
MLKGEEEVEQVPAETLYQGLLPSLPQYMIALLKILLAAAPTSKAKTDSINILADVLPEEMPTTVLQSMKLGVDVNRHKEVIVKAISAVLLLLLKHFKLNHVYQFEYMAQHLVFANCIPLILKFFNQNIMSYITAKNSISVLDYPHCVVHELPELTAESLEAGDSNQFCWRNLFSCINLLRILNKLTKWKHSRTMMLVVFKSAPILKRALKVKQAMMQLYVLKLLKVQTKYLGRQWRKSNMKTMSAIYQKVRHRLNDDWAYGNDLDARPWDFQAEECALRANIERFNARRYDRAHSNPDFLPVDNCLQSVLGQRVDLPEDFQMNYDLWLEREVFSKPISWEELLQ

SEQ ID NO: 918485 - protein, 721 aa, Homo sapiens
RDLITVRENIKDRISRGIGQPRWLLTLAATLNMAAREISWRKSRESCITAAVRELSWGCGAAKMEPAVGGPGPLIVNNKQPQPPPPPPPAAAQPPPGAPRAAAGLLPGGKAREFNRNQRKDSEGYSESPDLEFEYADTDKWAAELSELYSYTEGPEFLMNRKCFEEDFRIHVTDKKWTELDTNQHRTHAMRLLDGLEVTAREKRLKVARAILYVAQGTFGECSSEAEVQSWMRYNIFLLLEVGTFNALVELLNMEIDNSAACSSAVRKPAISLADSTDLRVLLNIMYLIVETVHQECEGDKAEWRTMRQTFRAELGSPLYNNEPFAIMLFGMVTKFCSGHAPHFPMKKVLLLLWKTVLCTLGGFEELQSMKAEKRSILGLPPLPEDSIKVIRNMRAASPPASASDLIEQQQKRGRREHKALIKQDNLDAFNERDPYKADDSREEEEENDDDNSLEGETFPLERDEVMPPPLQHPQTDRLTCPKGLPWAPKVREKDIEMFLESSRSKFIGYTLGSDTNTVVGLPRPIHESIKTLKQHKYTSIAEVQAQMEEEYLRSPLSGGEEEVEQVPAETLYQGLLPSLPQYMIALLKILLAAAPTSKAKTDSINILADVLPEEMPTTVLQSMKLGVDVNRHKEVIVKAISAVLLLLLKHFKLNHVYQFEYMAQHLVFANCIPLILKFFNQNIMSYITAKNSISVLDYPHCVVHELPELTAESLVSGWAL

SEQ ID NO: 918486 - protein, 88 aa, Homo sapiens
EELQSMKAEKRSILGLPPLPEDSIKVIRNMRAASPPASASDLIEQQQKRGRREHKVRTTEVPVTPEGPQGACLQQHSPWRSRAAGNDL

SEQ ID NO: 918487 - protein, 422 aa, Homo sapiens
ETPTWKAPKQLNWKMWKGDWGRGLFLRSGSSTNSKGNLGKLQTLCALVLSSAKQNHPINYLDPFQGALGRAQITDGIGQCVEMVQQDEGSPTTLTMSLILPDRYLVHWLLPPSLLSESELQAVPSALSSGIPVPVFAVKDSKVLCRVHQLFLNLPGSTSSATNVSMVVSADPLSSERAEMNILEINQELRSQLAESNQQFRDLKEKFLITQATAYSLANQLKKYKCEEYKDIIDSVLRDELQSMEKLAEKLRQAEELRQYKALVHSQAKELTQLREKLREGRDASRWLNKHLKTLLTPDDPDKSQGQDLREQLAEGHRLAEHLVHKLSPENDEDEDEDEDDKDEEVEKVQESPAPREVQKTEEKEVPQDSLEECAVTCSNSHNPSNSNQPHRSTKITFKEHEVDSALVVESEHPHDEEEEAL

SEQ ID NO: 918488 - protein, 788 aa, Homo sapiens
MGLWGKKGTVAPHDQSPRRRPKKGLIKKKMVKREKQKRNMEELKKEVVMDDHKLTLEELSTKYSVDLTKGHSHQRAKEILTRGGPNTVTPPPTTPEWVKFCKQLFGGFSLLLWTGAILCFVAYSIQIYFNEEPTKDNLYLSIVLSVVVIVTGCFSYYQEAKSSKIMESFKNMVPQQALVIRGGEKMQINVQEVVLGDLVEIKGGDRVPADLRLISAQGCKVDNSSLTGESEPQSRSPDFTHENPLETRNICFFSTNCVEGTARGIVIATGDSTVMGRIASLTSGLAVGQTPIAAEIEHFIHLITVVAVFLGVTFFALSLLLGYGWLEAIIFLIGIIVANVPEGLLATVTVCLTLTAKRMARKNCLVKNLEAVETLGSTSTICSDKTGTLTQNRMTVAHMWFDMTVYEADTTEEQTGKTFTKSSDTWFMLARIAGLCNRADFKANQEILPIAKRATTGDASESALLKFIEQSYSSVAEMREKNPKVAEIPFNSTNKYQMSIHLREDSSQTHVLMMKGAPERILEFCSTFLLNGQEYSMNDEMKEAFQNAYLELGGLGERVLGFCFLNLPSSFSKGFPFNTDEINFPMDNLCFVGLISMIDPPRAAVPDAVSKCRSAGIKVIMVTGDHPITAKAIAKGVGIISEGTETAEEVAARLKIPISKVDASAAKAIVVHGAELKDIQSKQLDQILQNHPEIVFARTSPQQKLIIVEGCQRLGAVVAVTGDGVNDSPALKKADIGIAMGISGSDVSKQAADMILLDDNFASIVTGVEEGEEAGCPWWRLQPWTQGD

SEQ ID NO: 918489 - protein, 150 aa, Homo sapiens
MEPCLLLAQQSEINLIVGYIYIYICGMLHHKNKNVKRTSFFCNPKRSSLRIKSHCSKKGAQGPAGRRKLAPQYRLRTSFFGREQMREAGEKKGRGRRHFPLPAPAADEPAQGLLLRHMLLRHEGVPVPWERVQDRWFCLLQKRILGVSVS

SEQ ID NO: 918490 - protein, 500 aa, Homo sapiens
MFPSPCHDSTGLDQALCWGRLSTLPSYSLYHGGQAGFYVTLVVNRWWSQYTSIPLPDQLMCVISASVHGVDQRGRLLRRTLIRYANLASVLVLRSVSTRVLKRFPTMEHVVDAGAPPAGSLWGSGPQPDAGTRNRESWDSRWTRGRGARRRNSSLPWRQRVQLHPTCFTPSGFMSQEERKKFESLKSDFNKYWVPCVWFTNLAAQARRDGRIRDDIALCLLLEELNKYRAKCSMLFHYDWISIPLVVTIAVYSFFALSLVGRQFVEPEAGAAKPQKLLKPGQEPAPALGDPDMYVPLTTLLQFFFYAGWLKVAEQIINPFGEDDDDFETNQLIDRNLQVSLLSVDEMYQNLPPAEKDQYWDEDQPQPPYTVATAAESLRPSFLGSTFNLRRSRVPAPALCPGSARPPARSMSDDPEQSLQVEASPGSGRPAPAAQTPLLGRFLGVGAPSPAISLRNFGRVRGTPRPPHLLRFRAEEGGDPEAAARIEEESAESGDEALEP

SEQ ID NO: 918491 - protein, 180 aa, Homo sapiens
MVAAMGGGGGPAFAQTAVGRWGGGAVGRPRRLQGVGVSRGTFMKPARWRLGAERFARLARFRGAVGRRRARALRLDRSPRRAGHRRGKSQKHSPTLPLTLLDTLASSPPPQTQTQKNCGKLGACRPGFLALTLCDPEQESMTCGRYDTNLCWDHFFPEPSPHTFYLANSSSLIIMEEDGS

SEQ ID NO: 918492 - protein, 131 aa, Homo sapiens
MWSSSHLLSKCPVRYRIDCRDIAMLVFKSPLFDLIMAPKCKSSHASNLDMAKRSHKVLSLNEKWTSIYCAFTAAITIASSKTVSSAPSSGWMGNCNCRPLISSHGGEQGARATLISLMRENPIHEASTHVT

SEQ ID NO: 918493 - protein, 131 aa, Homo sapiens; identical to SEQ ID NO: 918492

SEQ ID NO: 918494 - protein, 135 aa, Homo sapiens
MGNYLLRKLSCLGENQKKPKKGNPDEERKRQEMTTFERKLQDQDKKSQEVSSTSNQENENGSGSEEVCYTVINHIPHQRSSLSSNDDGYENIDSLTRKVRQFRERSETEYALLRTSVSRPCSCTHEHDYEVVFPH

SEQ ID NO: 918495 - protein, 197 aa, Homo sapiens
VCLEMANMGNFMLYELVTHTFVGNLGVFLVLLALPGKNALPTRSGSSPPPLQACKAPSSTLDFVPVTGRSVVYQPEHLPAEVSAPLGPAGRFSGSQLYKPQALGGEGEVYTHKVLGKSLGERFCRPQPEAYSADCAQFLKVGTEEKARGGRGGGTQALHSTQGASGSRKEATHQSWGLVPWGCLASGGLLRARALSG

SEQ ID NO: 918496 - protein, 358 aa, Homo sapiens
MLLPPSSLSRPRTFSSQPLQTKLMTHNGLFRPIPYLTAVSADEPTASQQPPQAQLHRYNGLFRPSSCLPAFSPGPELSQVDLTRPSSCFFAASPGPAPASWWHLQAQPLPPVGLYNPNICLTADSSGPASASLPSVCCFASSPGPGLPPVGLSRPSSSSRRPLQAQTVVKSACPGPAPASRRPLQAQVVLKLASPGPATASRRPFRVQNRFGRPSSRLPVASSGPWGSFLTTAFPGPVFPFRRPLRAQNLLKSASPDPLAASGRPLWAQLFLPAALQARLLPLNNLFGLSAYPSPGGLGRPTASSSQAPQAQVRPHGGLSRMSSCPPMASAGPKWSPVGGLLHAKLGPPGDLCRPKLS

SEQ ID NO: 918497 - protein, 358 aa, Homo sapiens; identical to SEQ ID NO: 918496

SEQ ID NO: 918498 - protein, 365 aa, Homo sapiens
MCLNLLAQLLPPSSLSRPRTFSSQPLQTKLMTHNGLFRPIPYLTAVSADEPTASQQPPQAQLHRYNGLFRPSSCLPAFSPGPELSQVDLTRPSSCFFAASPGPAPASWWHLQAQPLPPVGLYNPNICLTADSSGPASASLPSVCCFASSPGPGLPPVGLSRPSSSSRRPLQAQTVVKSACPGPAPASRRPLQAQVVLKLASPGPATASRRPFRVQNRFGRPSSRLPVASSGPWGSFLTTAFPGPVFPFRRPLRAQNLLKSASPDPLAASGRPLWAQLFLPAALQARLLPLNNLFGLSAYPSPGGLGRPTASSSQAPQAQVRPHGGLSRMSSCPPMASAGPKWSPVGGLLHAKLGPPGDLCRPKLS

SEQ ID NO: 918499 - protein, 137 aa, Homo sapiens
MDLGDVSVEKVMESTDGMSSPQMCGDILHIHQLSGLEVTVEERDPVSSNTKNRDILNVAIEVSKAEGSEGRGCAWQNPSGFLAEAVLWAAMFVGHLICSRRSDLLVRPAKGRDRKPSGGAGSAVVADASAFGIRIIN

SEQ ID NO: 918500 - protein, 186 aa, Homo sapiens
PRTAPLLPELGRRRSSRMAPSEDPRDWRANLKGTIRETGLETSSGGKLAGHQKTVPTAHLTFVIDCTHGKQLSLAATASPPQAPSPNRGLVTPPMKTYIVFCGENWPHLTRVTPMGGGCLAQARATLPLCRGSVASASFPVSPLCPQEVPEAKGKPVKAAPVRSSTWGTVKDSLKALSSCVCGQAD

SEQ ID NO: 918501 - protein, 1764 aa, Homo sapiens
RLALSVSMPQLWLQSYFAACEDEIPAIRNHDKVLQRLCEHLDHALLYGLQDLSSGYWVLVVHFTRREAIKQIEVLQHVATNLGRSRAWLYLALNENSLESYLRLFQENLGLLHKYYVKNALVCSHDHLTLFLTLVSGLEFIRFELDLDAPYLDLAPYMPDYYKPQYLLDFEDRLPSSVHGSDSLSLNSFNSVTSTNLEWDDSAIAPSSEDYDFGDVFPAVPSVPSTDWEDGDLTDTVSGPRSTASDLTSSKASTRSPTQRQNPFNEEPAETVSSSDTTPVHTTSQEKEEAQALDPPDACTELEVIRVTKKKKIGKKKKSRSDEEASPLHPACSQKKCAKQGDGDSRNGSPSLGRDSPDTMLASPQEEGEGPSSTTESSERSEPGLLIPEMKDTSMERLGQPLSKVIDQLNGQLDPSTWCSRAEPPDQSFRTGSPGDAPERPPLCDFSEGLSAPMDFYRFTVESPSTVTSGGGHHDPAGLGQPLHVPSSPEAAGQEEEGGGGEGQTPRPLEDTTREAQELEAQLSLVREGPVSEPEPGTQEVLCQLKRDQPSPCLSSAEDSGVDEGQGSPSEMVHSSEFRVDNNHLLLLMIHVFRENEEQLFKMIRMSTGHMEGNLQLLYVLLTDCYVYLLRKGATEKPYLVEEAVSYNELDYVSVGLDQQTVKLVCTNRRKQFLLDTADVALAEFFLASLKSAMIKGCREPPYPSILTDATMEKLALAKFVAQESKCEASAVTVRFYGLVHWEDPTDESLGPTPCHCSPPEGTITKEGMLHYKAGTSYLGKEHWKTCFVVLSNGILYQYPDRTDVIPLLSVNMGGEQCGGCRRANTTDRPHAFQVILSDRPCLELSAESEAEMAEWMQHLCQAVSKGVIPQGVAPSPCIPCCLVLTDDRLFTCHEDCQTSFFRSLGTAKLGDISAVSTEPGKEYCVLEFSQDSQQLLPPWVIYLSCTSELDRLLSALNSGWKTIYQVDLPHTAIQEASNKKKFEDALSLIHSAWQRSDSLCRGRASREPLVLRQSWLASLVGRKGRHASRQAHCHGCCHAVGSLQSTPALGGRTTECGLRQGPSTPGIQIRCPAPLGILPDRKRMEVAGGRGSEPCGLCGCTPSSRASASVCRISAEWHREHHPSKDEQKNQEGGTPLFLSWVGGWGPECPAILVQCLNTLLATWGSGNTGCLRMFPPPSSITAHTAACLARCRGAGSPPWLPGGSACPQSCPACPLNPAVPVAPRSKGGGWGAWRRAEPTSLASMLTSSDCPLLGWSQALPQSFVKSLLGKGSGGLGFVFENKIDMLYCQGLSLALFEQGRGRELSKSLGPFSANLPPSSALCLTQGTHGTCRTRSATAAGRTHRLQTLRPWEFLGPTFALRPVPVCCSSQGRSSHQLKPQGTSAPPPTICSPPRGRTLLPPQPRGPVRPGPLPSRHGLGPLQTPAPVALRGYRQPKRHHHRACAVPLTRAQKATGPEAMETVPPAVDLVLGASACCLACVFTNPLEVVKTRLQLQGELQARGTYPRPYHGFIASVAAVARADGLWGLQKGLAAGLLYQGLMNGVRFYCYSLACQAGLTQQPGGTVVAGAVAGALGAFVGSPAYLIKTQLQAQTVAAVAVGHQHNHQTVLGALETIWRQQGLLGLWQGVGGAVPRVMVGSAAQLATFASAKAWVQKQQWLPEDSWLVALAGGMISSIAVVVVMTPFDVVSTRLYNQPVDTAGRGQLYGGLTDCMVKIWRQEGPLALYKGLGPAYLRLGPHTILSMLFWDELRKLAGRAQHKGT

SEQ ID NO: 918502 - protein, 1159 aa, Homo sapiens
MLESVDIQQNCEVVQSVPLYILYPVFPIDTFILVWCIITINEPILIYWYYTKVHTLFRFPWILPSVCTSMPHRIPRYFWSLCCFRLLLVQFFILSLFLMILDSLEEYYVVRYFVERTLRGKKEYLSEFFFMIRVELRILGRKTTEIKCRFHYILPGICSIDLTFDFDLDHLAEVAFVSLRHCRAPPFPFHTVLVTGTSLGTTQTYRRGEPRSTSLKEEYLICKLFGIPLNRRFVFYLYQYVFVHNLFYISSYNPILLYVLAQNILTFGLQGTFSVDFCVRLTYPHHCRVVFVFSLAPPHFLALQDASGLFFMFPAHILEAAISSMCPVFFYWRIVLEIGEFRNWRIVLENKIGHYFMFIANEFSLLLGPMKVLTFKFFKLLRAAILSNYFCKCWWPKVLNKKFKICFSLGKECCIVVTVENCQKENLKRTILRRTFLKTFLRIDIIVSVNLLLLFFKIIFNDFIQSSDSLGNDCEDFAFCASLLQWIFHLFNYGLELEMQIRQQLNLPLGILLFAGHLLSELHKGKKTRSSVCTQELLSSSLITSTVQALISQNRKFRNNQETISDVFWANITPAQAYKNCQKSLKYWLINNDEVEKKFKHDISVIFLQKGGFFLNKEVTVKLIFTSFKDSIILCIVRYYSEKHPFILSGERQPIITGSQPLQQLVIDKGSDPFWLKMKQKSECSYGLPNLRLSYMEEPFTHYNNPGMRCCITVTCRVMTYERHSLSTQGKLTQKVKFRRKVNGYNILSVRVCVCVCARARTFVCIYLYIPSATCHMVYESLGDFWFWRIGCECTSETDRMMYYLVGHWSRVQMCLSIYEKLPIVTEAPYHMSPGDFKGNLTKIELYFRYSIFCGLIMTLYLLKEFFALIIKTISLFSDFTVTSFLYFLGKQNLSSINLVLSLPRGSHFIWANKFPGNYKYYVIMCKNVMSFLIQTFARHSREVQDVVSVCKRLELSEAKYSVETGSGENLAAGTREHTYMDCSYSFSVSELIFIVRGTQCNSSDVFVENLREGDFRSLLCRRISLIMEMFSLCCAIWQSVAVFMYQTLEDALNVTEELNFKFNFNDVLNLNSYMWLVTTFWIAQLKMARFGMSTREIMSVKNCGMQPGAVADACNPSTFGGLSRRNTRSGVRDQPGRYSETLSLLKIQKLAGHDGTCP

SEQ ID NO: 918503 - protein, 231 aa, Homo sapiens
EDPGKKIKPTMRQLSRELLDEKGPEVLQDSLDRCYSTPSGCLELTDSCQPYRSAFYVLEQQRVGLAVDMDEIEKYQEVEEDQDPSCPRLSRELLDEKEPEVLQDSLDRCYSTPSGYLELPDLGQPYSSAVYSLEEQYLGLALDVDKIEKKGKGKKRRGRRSKKERRRGRKEGEEDQNPPCPRLNGVLMEVEEREVLQDSLDRCYSTPSMYFELPDSFQHYRSVFYSFEEQH

SEQ ID NO: 918504 - protein, 1159 aa, Homo sapiens
LIFCHLCPTWLIREMQKAEEKEVPEDSLEECAITYSNSHGSYDSNQPHRKTKITFEEDKVDSTLIGSSSHVEWEDAVHIIPENESDDEEEEEKGPVSPRNLQESEEEEVPQESWDEGYSTLSIPPEMLASYQSYSSTFHSLEEQQVCMAVDIGRHRWDQVKKEDQEATGPRLSRELLDEKGPEVLQDSLDRCYSTPSGCLELTDSCQPYRSAFYVLEQQRVGLAVDMDEIEKYQEVEEDQDPSCPRLSRELLDEKEPEVLQDSLDRCYSTPSGYLELPDLGQPYSSAVYSLEEQYLGLALDVDRIKKDQEEEEDQGPPCPRLSRELLDEKGPEVLQDSLDRCYSTPSGCLELTDSCQPYRSAFYVLEQQHVGLAVDMDEIEKYQEVEEDQDPSCPRLSRELLDEKEPEVLQDSLDRCYSTPSGYLELPDLGQPYSSAVYSLEEQYLGLALDVDRIKKDQEEEEDQGPPCPRLSRELLEVVEPEVLQDSLDRCYSTPSSCLEQPDSCQPYGSSFYALEEKHVGFSLDVGVAITELRDVIATGRTYRHMLSRELLDEKGPEVLQDSLDRCYSTPSGCLELTDSCQPYRSAFYVLEQQHVGLAVDMDEIEKYQEVEEDQDPSCPRLSRELLDEKEPEVLQDSLDRCYSTPSGYLELPDLGQPYSSAVYSLEEQYLGLALDVDRIKKDQEEEEDQGPPCPRLSRELLEVVEPEVLQDSLDRCYSTPSSCLEQPDSCQPYGSSFYALEEKHVGFSLDVGVAITELRDVIATGRTYRHMLSRELLDEKGPEVLQDSLDRCYSTPSGCLELTDSCQPYRSAFYVLEQQRVGFAVDMDEIEKYQEVEEDQDPSCPRLSRELLDEKEPEVLQDSLDRCYSTPSGYLELPDLGQPYSSAVYSLEEQYLGLALDVDRIKKDQEEEEDQGPPCPRLSRELLEVVEPEVLQDSLDRCYSTPSSCLEQPDSCQPYGSSFYALEENHVGFSLDVGVAITELRDVIATGRTYRHMLSRELLDEKGPEVLQDSLDRCSSTPSGCLELTDSCQPYRSAFYVLEQQHVGLAVDMDEIEKYQEVEEDQDPSCPRLSRELLDEKEPEVLQDSLDRCYSTPSGYLELPDLGQPYSSAVYSLEEQYLGLALDVDRAAGRRQHVTQDSAGAEYEQCHVLAENA

SEQ ID NO: 918505 - protein, 304 aa, Homo sapiens
MVLLIYIEKQLHTPMYFLLSQLSLMDLMLICTTLPKMIFSYLSGKKSISLAGCGTQIFFYVSLLGAECFLLAVMAYDRYVAICHPLQYTILMNPKLCVFMTVASWTLGSLDGIIVLAAVLSFSYCSSLEIHHFFCDVAALLPLSCTETSAFERLLVICCVVMLIFPVSVIILSYSHVLRAVIHMGSGESRRKAFTTCSSHLSVVGLYYGAAMFMYMRPASKHTPDQDKMVSAFYTILTPMLNPLIYSLRNKEVFRALQKKAPLIVHMQGQQFNNNPYTNNTFMRAKNQRGITDPSGQNLCSHKP

SEQ ID NO: 918506 - protein, 248 aa, Homo sapiens
SPLSVFPGPSRPPLLPPIGYIKGPGAPQGHLVFLHQSHLGPCPATTEATSVSTTATSEHSTGTTMIHEATSSSPHATRATSAMITTRGWEGWREEAFRLWSLTLVALCSPGEVLVSTTRIGTLPVSSLVLDVSSSRGVPSGTLGSSWREASSISSTASHVTHGSPRTSWASWTSAEWWWHPSALTGWHTTLHTVHWRPLPSKRDFKFAPLKIFPIKPFHGSFGSRLIRTFMLVGSCVLISGTRCPAKD

SEQ ID NO: 918507 - protein, 156 aa, Homo sapiens [sequence omitted]

SEQ ID NO: 918508 - protein, 408 aa, Homo sapiens
MWDLALIFLAAACVFSLGVTLWVICSHFFTVHIPAAVGHPVKLRVLHCIFQLLLTWGMIFEKLRICSMPQFFCFMQDLPPLKYDPDVVVTDFRFGTIPVKLYQPKASTCTLKPGIVYYHGGGGVMGSLKTHHGICSRLCKESDSVVLAVGYRKLPKHKFPVPVRDCLVATIHFLKSLDAYGVDPARVVVCGDSFGGAIAAVVCQQLVDRPDLPRIRAQILIYAILQALDLQTPSFQQRKNIPLLTWSFICYCFFQNLDFSSSWQEVIMKGAHLPAEVWEKYRKWLGPENIPERFKERGYQLKPHEPINEAAYLEVSVVLDVMCSPLIAEDDIVSQLPETCIVSCEYDALRDNSLLYKKRLEDLGVPVTWHHMEDGFHGVLRTIDMSFLHFPCSMRILSALVQFVKGLR

SEQ ID NO: 918509 - protein, 106 aa, Homo sapiens
MRPGAPRVAAGEAPCPGSITAFWTCPSNDPTPGLAGSPRPAQLSLPQTTAPEVLGVRSGLPFPACPVSRAPEEPLSATRSPLCGIKPVWARWGRAGQGLGWASLRG

SEQ ID NO: 918510 - protein, 187 aa, Homo sapiens
MEPRREAGAGPGPAGRASSMLGRQPRGRTGEGFRPESLAFSSSWRPGGRGLLAMDLLAGGTTLRVAFTRHLSTHPSLLLSDVKALRSLVNNPRYSDVCFVVGQERQEVFAHRCLLACRCNFFQRLLGTEPGPGVPSPVVLSTVPTEAFLAVLEFLYTNSVKLYRHSVLEVLTAAVEYGLEELRESRH

SEQ ID NO: 918511 - protein, 187 aa, Homo sapiens; identical to SEQ ID NO: 918510

SEQ ID NO: 918512 - protein, 187 aa, Homo sapiens; identical to SEQ ID NO: 918510

SEQ ID NO: 918513 - protein, 187 aa, Homo sapiens; identical to SEQ ID NO: 918510

SEQ ID NO: 918514 - protein, 187 aa, Homo sapiens; identical to SEQ ID NO: 918510

SEQ ID NO: 918515 - protein, 321 aa, Homo sapiens
AVHGIEDLMIQHNCSRQGPTAPPPPRGPALPGAGSGLPAPDPCDYEGRFSRLHGRPPGFLHCASFGDPHVRSFHHHFHTCRVQGAWPLLDNDFLFVQATSSPMALGANATATRKLTIIFKNMQECIDQKVYQAEVDNLPVAFEDGSINGGDRPGGSSLSIQTANPGNHVEIQAAYIGTTIIIRQTAGQLSFSIKVAEDVAMAFSAEQDLQLCVGGCPPSQRLSRSERNRRGAITIDTARRLCKEGLPVEDAYFHSCVFDVLISGDPNFTVAAQAALEDARAFLPDLEKLHLFPSDAGVPLSSATLLAPLLSGLFVLWLCIQ

SEQ ID NO: 918516 - protein, 200 aa, Homo sapiens
MQECIDQKVYQAEVDNLPVAFEDGSINGGDRPGGSSLSIQTANPGNHVEIQAAYIGTTIIIRQTAGQLSFSIKVAEDVAMAFSAEQDLQLCVGGCPPSQRLSRSERNRRGAITIDTARRLCKEGLPVEDAYFHSCVFDVLISGDPNFTVAAQAALEDARAFLPDLEKLHLFPSDAGVPLSSATLLAPLLSGLFVLWLCIQ

SEQ ID NO: 918517 - protein, 1048 aa, Homo sapiens
GSEAIPYDTTMADTRQYTFAQTHRMYTKSELKLKLWALDDKDAGREYSPAATTAENGGGKKKQKEKELDELKKEVAMDDHKLSLDELGRKYQVDLSKGLTNQRAQDVLARDGPNALTPPPTTPEWVKFCRQLFGGFSILLWIGAILCFLAYGIQAAMEDEPSNDNLYLGVVLAAVVIVTGCFSYYQEAKSSKIMDSFKNMVPQQALVIREGEKMQINAEEVVVGDLVEVKGGDRVPADLRIISSHGCKVDNSSLTGESEPQTRSPEFTHENPLETRNICFFSTNCVEGDRTVMGRIATLASGLEVGRTPIAMEIEHFIQLITGVAVFLGVSFFVLSLILGYSWLEAVIFLIGIIVANVPEGLLATVTVCLTLTAKRMARKNCLVKNLEAVETLGSTSTICSDKTGTLTQNRMTVAHMWFDNQIHEADTTEDQSGATFDKRSPTWTALSRIAGLCNRAVFKAGQENISVSKRDTAGDASESALLKCIELSCGSVRKMRDRNPKVAEIPFNSTNKYQLSIHEREDSPQSHVLVMKGAPERILDRCSTILVQGKEIPLDKEMQDAFQNAYMELGGLGERVLGFCQLNLPSGKFPRGFKFDTDELNFPTEKLCFVGLMSMIDPPRAAVPDAVGKCRSAGIKVIMVTGDHPITAKAIAKGVGIISEGNETVEDIAARLNIPMSQVNPREAKACVVHGSDLKDMTSEQLDEILKNHTEIVFARTSPQQKLIIVEGCQRQGAIVAVTGDGVNDSPALKKADIGIAMGISGSDVSKQAADMILLDDNFASIVTGVEEGRLIFDNLKKSIAYTLTSNIPEITPFLLFIIANIPLPLGTVTILCIDLGTDMVPAISLAYEAAESDIMKRQPRNSQTDKLVNERLISMAYGQIGMIQALGGFFTYFVILAENGFLPSRLLGIRLDWDDRTMNDLEDSYGQEWTYEQRKVVEFTCHTAFFASIVVVQWADLIICKTRRNSVFQQGMKNKILIFGLLEETALAAFLSYCPGMGVALRMYPLKVTWWFCAFPYSLLIFIYDEVRKLILRRYPGGWVEKETYY

SEQ ID NO: 918518 - protein, 1048 aa, Homo sapiens; identical to SEQ ID NO: 918517

SEQ ID NO: 918519 - protein, 1031 aa, Homo sapiens
GSEAIPYDTTMADTRQYTFAQTHRMYTKSELKLKLWALDDKDAGREYSPAATTAENGGGKKKQKEKELDELKKEVAMDDHKLSLDELGRKYQVDLSKGLTNQRAQDVLARDGPNALTPPPTTPEWVKFCRQLFGGFSILLWIGAILCFLAYGIQAAMEDEPSNDNLYLGVVLAAVVIVTGCFSYYQEAKSSKIMDSFKNMVPQQALVIREGEKMQINAEEVVVGDLVEVKGGDRVPADLRIISSHGCKVDNSSLTGESEPQTRSPEFTHENPLETRNICFFSTNCVEGDRTVMGRIATLASGLEVGRTPIAMEIEHFIQLITGVAVFLGVSFFVLSLILGYSWLEAVIFLIGIIVANVPEGLLATVTVCLTLTAKRMARKNCLVKNLEAVETLGSTSTICSDKTGTLTQNRMTVAHMWFDNQIHEADTTEDQSGATFDKRSPTWTALSRIAGLCNRAVFKAGQENISVSKRDTAGDASESALLKCIELSCGSVRKMRDRNPKVAEIPFNSTNKYQLSIHEREDSPQSHVLVMKGAPERILDRCSTILVQGKEIPLDKEMQDAFQNAYMELGGLGERVLGFCQLNLPSGKFPRGFKFDTDELNFPTEKLCFVGLMSMIDPPRAAVPDAVGKCRSAGIKVIMVTGDHPITAKAIAKGVGIISEGNETVEDIAARLNIPMSQVNPREAKACVVHGSDLKDMTSEQLDEILKNHTEIVFARTSPQQKLIIVEGCQRQGAIVAVTGDGVNDSPALKKADIGIAMGISGSDVSKQAADMILLDDNFASIVTGVEEGRLIFDNLKKSIAYTLTSNIPEITPFLLFIIANIPLPLGTVTILCIDLGTDMVPAISLAYEAAESDIMKRQPRNSQTDKLVNERLISMAYGQIENGFLPSRLLGIRLDWDDRTMNDLEDSYGQEWTYEQRKVVEFTCHTAFFASIVVVQWADLIICKTRRNSVFQQGMKNKILIFGLLEETALAAFLSYCPGMGVALRMYPLKVTWWFCAFPYSLLIFIYDEVRKLILRRYPGGWVEKETYY

SEQ ID NO: 918520 - protein, 1031 aa, Homo sapiens; identical to SEQ ID NO: 918519

SEQ ID NO: 918521 - protein, 1031 aa, Homo sapiens; identical to SEQ ID NO: 918519

SEQ ID NO: 918522 - protein, 169 aa, Homo sapiens
MTTPPEKGRKPEGPAWTSLNTLRMLHSKRYGEHCACGKPTLAPATSVPQYHLLLSIHAGWLPWPHLQVVWVGTVLGPHILPKNPVEWRCDRARGHLKIVHRLLTGWGNSGSNCSGRESRCVNGRKRCIRGYRMKVSGKDENSGFSLIVRGKCGRDIIKDSDKDITTECT

SEQ ID NO: 918523 - protein, 311 aa, Homo sapiens
MAALYACTKCHQRFPFEALSQGQQLCKECRIAHPVVKCTYCRTEYQQESKTNTICKKCAQNVQLYGTPKPCQYCNIIAAFIGNKCQRCTNSEKKYGPPYSCEQCKQQCAFDRKDDRKKVDGKLLCWLCTLSYKRVLQKTKEQRKHLSSSSRAGHQEKEQYSRLSGGGHYNSQKTLSTSSIQNEIPKKKSKFESITTNGDSFSPDLALDSPGTDHFVIIAQLKEEVATLKKMLHQKDQMILEKEKKITELKADFQYQESQMRAKMNQMEKTHKEVTEQLQRWALAILPGLVLNSWLQAILPPQPHKVLGLQA

SEQ ID NO: 918524 - protein, 311 aa, Homo sapiens
MAALYACTKCHQRFPFEALSQGQQLCKECRIAHPVVKCTYCRTEYQQERLECNGTISAHCNLHLPGSSDSPASSSRVAGITAKTNTICKKCAQNVQLYGTPKPCQYCNIIAAFIGNKCQRCTNSEKKYGPPYSCEQCKQQCAFDRKDDRKKVDGKLLCWLCTLSYKRVLQKTKEQRKHLSSSSRAGHQEKEQYSRLSGGGHYNSFSPDLALDSPGTDHFVIIAQLKEEVATLKKMLHQKDQMILEKEKKITELKADFQYQESQMRAKMNQMEKTHKEVTEQLQAKNRELLKQAAALSKSKKSEKSGAITSP

SEQ ID NO: 918525 - protein, 204 aa, Homo sapiens
MAALYACTKCHQRFPFEALSQGQQLCKECRIAHPVVKCTYCRTEYQQERLECNGTISAHCNLHLPGSSDSPASSSRVAGITAKTNTICKKCAQNVQLYGTPKPCQYCNIIAAFIGNKCQRCTNSEKKYGPPYSCEQCKQQCAFDRKDDRKKVDGKLLCWLCTLSYKRVLQKTKEQRKHLSSSSRAGHQEKEQYSRLSGGGHYNR

SEQ ID NO: 918526 - protein, 340 aa, Homo sapiens
MAALYACTKCHQRFPFEALSQGQQLCKECRIAHPVVKCTYCRTEYQQERLECNGTISAHCNLHLPGSSDSPASSSRVAGITAKTNTICKKCAQNVQLYGTPKPCQYCNIIAAFIGNKCQRCTNSEKKYGPPYSCEQCKQQCAFDRKDDRKKVDGKLLCWLCTLSYKRVLQKTKEQRKHLSSSSRAGHQEKEQYSRLSGGGHYNSQKTLSTSSIQNEIPKKKSKFESITTNGDSFSPDLALDSPGTDHFVIIAQLKEEVATLKKMLHQKDQMILEKEKKITELKADFQYQESQMRAKMNQMEKTHKEVTEQLQAKNRELLKQAAALSKSKKSEKSGAITSP

SEQ ID NO: 918527 - protein, 311 aa, Homo sapiens; identical to SEQ ID NO: 918523

SEQ ID NO: 918528 - protein, 138 aa, Homo sapiens [sequence omitted]

SEQ ID NO: 918529 - protein, 176 aa, Homo sapiens
MAEICPQTQRAWIATPLRSSSLGLAKYPLRASCSALANKHPERCLASHGLQPGWPRGAKFSIAIVHRISPETHSLHVAQLNSHVGFLDLVVSVLTVMIQSVTCQGSGSTHYELLGIPGCNIHLYIPMALHSQDNRCSVPQKVFLALSCDCGPPLPWAIQRALPPSNSCNHTGSKKV

SEQ ID NO: 918530 - protein, 148 aa, Homo sapiens
ANFCKMYSGISLKYPKGLPLKRCMCVSDRPAFQAPGPSKLHGWGFLECSTAQDLCTVFVLTRKKRKRIETHCLMSWRGNENTLAGQLSWVDPCSVTKPLSHMLTCYSPAWDPAHKYLRYTTLGITQLMERTRKGVRICTLANFEEHPI

SEQ ID NO: 918531 - protein, 214 aa, Homo sapiens
MTANPGISALSEAQQAPLPRRLSFTWSCHLASLCFQSPLQIQIQVEAKPGHSHNPARFVQAQGSADMPAPCHIGPLQTLGTGKNRREAEVWLRVAQQQEEEKREGEKSCVPSGNTDLGAPPTRAVTPSLGLGRSCISKPLGATAFPDTHSGSCLQSAWSSCRLTGSWHLCLELPTPLQLACLAVCSGQIPCSIAHTPLTALYSARPWQVWDPDH

SEQ ID NO: 918532 - protein, 153 aa, Homo sapiens
MGCRESCPQANGPLPWGASPAVSEDQNLSVLHSSHWRQLRADFQSHKKQPQLEELQPQLWIFSFCPGGRVGTKPPGPVKTEGEARTLRERSQTQKATSGPHESIPTISWINAKPGQQSDPWLPGARGQGKGQTARGNFSLMLYFDNGGGYMTV

SEQ ID NO: 918533 - protein, 346 aa, Homo sapiens
YPWSLMMATYRWGFGVDVFFVDVDAIPFCVLVFLLTIRSLSFRNLQESEEEEVPQESWDEGYSTLSIPPEMLASYQSYSGTFHSLEEQQVCMAVDIGGEYSIVKVIKLQFMAQAMPVPTWTDCHDIELKAGHRWDQVKKEDQEATGPRLSRELLDEKGPEVLQDSLDRCYSTPSGYLELTDSCQPYRSAFYILEQQRVGWALDMDEIEKYQEVEEDQDPSCPRLSGMLMEVEEPEVLQDSLDRCYSTPSMYFELPDSFQHYRSVFYSFEEQHISFALDVDNRFLTLMGTSLHLVFQMGVIFPQTLPVQNMNNAMFLQKTLSLSFIGESHLAECPGTLVLSHSDTCK

SEQ ID NO: 918534 - protein, 134 aa, Homo sapiens
RFWMIPEYHTKISVNNAKYFSVHWSLSASHEAMGGQFISDKLMQIRNVFWEGLTGAGERTSKIACSNDWQVLLIVDLELIQGYPLDTLDPLHMDLFIGMLGLPENMAASFQEQGFQKAWMKVVETKAANPRTTL

SEQ ID NO: 918535 - protein, 432 aa, Homo sapiens
LQEGPLCTMSNQVLCCVVLCLLGANTVDGGITQSPKYLFRKEGQNVTLSCEQNLNHDAMYWSCSTLEEISRTADDVILASVSHVDFCFAGECIRPEVGEAPQPRTAAPGDAFTYQEQCRCMQKYRHPLTVTFVDNQKYLSAFPAEPKLSSYHPGGKTGKGNCSVRLCSFHACQGFWFHGDLRLGATLSRETELQRIPTKLQAEGQPRPSGSTREQNHYGKFTEKSGKLESQPESIKSSIIKLSFPYCEMAICNDFEKWDPWWCRCLSQVRVRSLAPWAGPQDALENAFCSQLCDSFLSVLVKQPDPVRLEMPGMVPPHVPPQMLNIPQTSLQAKPVAPQVPSPGGAPGQGPYPYSLSEPAPLTLDTSGKNLTEQNSYSNIPHEGKHTPLYERSLPINPAQSSSPNHVDSAYFPGSSTSSSSDNDEGSGGATK

SEQ ID NO: 918536 - protein, 145 aa, Homo sapiens
MPGMVPPHVPPQMLNIPQTSLQAKPVAPQVPSPGGAPGQGPYPYSLSEPAPLTLDTSGKNLTEQNSYSNIPHEGKHTPLYERSLPINPAQSSSPNHVDSAYFPGSSTSSSSDNDEGSGGATNIQSIGDSVPLNTMYNEGFPGNGD

SEQ ID NO: 918537 - protein, 205 aa, Homo sapiens
RPVGDILMLTGGTRWQGYPHVENLGWGGGLLVLTTSDSIVVPSSCSLPKSLPTDGPGQKVVKESEARGRKARVPMAPTGWLAWLGPTLAGPAPGGSLHIHPLFPIYTLPESPSSPDPAIQTLCVSGNHFSDATWGLLQLLCIFLESLMEPCMMTVSTSLHGKELRDRGHPVPSPSQPLVQGKRAVDVNYSPSDALSWGRNWEGQR

SEQ ID NO: 918538 - protein, 968 aa, Homo sapiens
MSLQAPSRLLELAGQSLLRNQFLTIFTLDELPREVFPLMFMEAFSMRRFEALKLMVQAWPFLSLPLGSLMKTLHLETLQAVLRGLDTLVAQKVRPRRWKLQVLDLRDVDENFWTIWSGARVLSCSPEAMSKRQTVEDCPRMGEHQPLKVFIDLCLKESTLDECLSYLFGWIHYRRGLVHLCCSKVQNYSMPTSSFRNLLERIYPDSIQELEVWKKCSLNKTGKFAPYLSQMSNLRELFLAFGYERELYVSVQWPCIPDLDSPFLCLYYPQMLYIKKISNIKEHLEHLLRYLKNPLGAFIFSDAYLTDRDMECLSQYPSLSQLKELRLIHILMWTTHLEPLGVLLEKVAATLKTLVLKDCRIQDPQLRVLLPALSHCSQLTTFNFHGNETSMNALKDLLRHTGGLSKLGLELYPAPLESLDYKGHVNWEILTPIRAELMRTLREVRQPKRIFFGPDPQERPKVFKPGVPAWFFLRSEHLLDYIQICFPCRFMKMSIWTPPRLLELAGRSLLRDQALAMSTLEELPTELFPPLFMEAFSRRRCEALKLMVQSWPFRRLPLRPLIKMPCLEAFQAVLDGLDALLNLGVRPRRWKLQVLDLQDVCENFWMVWSEAMAHGCFLNAKRNKKPVEDCPRMRGRQPLTVFVELWLKNRTLDEYLTCLLLWVKQRKDLLHLCCKKLKILGMPFRNIRSILKMVNLDCIQEVEVNCKWVLPILTQFTPYLGHMRNLQKLILSHMDVSRYVSPEQKKEIVTQFTTQFLKLRCLQKLYMNSVSFLEGHLDQLLSCLKTSLKFLTITNCVLLESDLKHLSQCPSISQLKTLDLSGIRLTNYSLVPLQILLEKVAATLEYLDLDDCGIIDSQVNAILPALSRCFELNTFSFCGNPICMATLENLLSHTIILKNLCVELYPAPRESYGADGTLCWSRFAQIRAELMNRVRDLRHPKRILFCTDYCPDCGNRSFYDLEADQYCC

SEQ ID NO: 918539 - protein, 215 aa, Homo sapiens
MAEVRVQLLLSRRPESVSFARSVCGLLGAGPGLGTWPIHCSLKRGRLVLSSRPFPGASARLPLQVGRRGPQSGGSEGPKMGTEIGWELAARTPPPTRGVAPFLEVTPTQCRPSEALTQLASFCQRPPFCPFAALEERPRVPGAELPTDRGVDLGVAVILQSSDKTVLLTRRARTLSVSPNLWVPPGITAAVAGRAGSEGRKQGSGEPKQPGSDCD

SEQ ID NO: 918540 - protein, 434 aa, Homo sapiens
MAEVRVQLLLSRRPESVSFARSVCGLLGAGPGLGTWPIHCSLKRGRLVLSSRPFPGASARLPLQVGRRGPQSGGSEGPKMGTEIGWELAARTPPPTRGVAPFLEVTPTQCRPSEALTQLASFCQRPPFCPFAALEERPRVPGAELPTDRGVDLGVAVILQSSDKTVLLTRRARTLSVSPNLWVPPGGHVELEEEVTSQLIQPEPRDPCLGPSWVWAEGEASKRTWKSQALAPLMVFSDSQLLDGGLRELWEESGLHLPQGQFSWVPLGLWESAYPPRLSWGLPKYHHIVLYLLVISQESQQQLQARIQPNPNEVSALMWLTPDVAAAVAAAEDGTETPGLLPQDLPPSVLAVELEEDGRARPLVLHMSTLLRMIPTMAEDKERVSTGTKFALKLWLQHLGRTPPPCKSAAYLDPGPAKEEWNMDPLPPNQGSGK

SEQ ID NO: 918541 - protein, 219 aa, Homo sapiens
MAEVRVQLLLSRRPESVSFARSVCGLLGAGPGLGTWPIHCSLKRGRLVLSSRPFPGASARLPLQVGRRGPQSGGSEGPKMGTEIGWELAARTPPPTRGVAPFLEVTPTQCRPSEALTQLASFCQRPPFCPFAALEERPRVPGAELPTDRGVDLGVAVILQSSDKTVLLTRRARTLSVSPNLWVPPGRRASRTLGGEWTTPAPGPVLLGPSGFMGVCLPS

SEQ ID NO: 918542 - protein, 117 aa, Homo sapiens
MWLTPDVAAAVAAAEDGTETPGLLPQDLPPSVLAVELEEDGRARPLVLHMSTLLRMIPTMAEDKERVSTGTKFALKLWLQHLGRTPPPCKSAAYLDPGPAKEEWNMDPLPPNQGSGK

SEQ ID NO: 918543 - protein, 215 aa, Homo sapiens; identical to SEQ ID NO: 918539

SEQ ID NO: 918544 - protein, 374 aa, Homo sapiens
MAEVRVQLLLSRRPESVSFARSVCGLLGAGPGLGTWPIHCSLKRGRLVLSSRPFPGASARLPLQRPPFCPFAALEERPRVPGAELPTDRGVDLGVAVILQSSDKTVLLTRRARTLSVSPNLWVPPGGHVELEEEVTSQLIQPEPRDPCLGPSWVWAEGEASKRTWKSQALAPLMVFSDSQLLDGGLRELWEESGLHLPQGQFSWVPLGLWESAYPPRLSWGLPKYHHIVLYLLVISQESQQQLQARIQPNPNEVSALMWLTPDVAAAVAAAEDGTETPGLLPQDLPPSVLAVELEEDGRARPLVLHMSTLLRMIPTMAEDKERVSTGTKFALKLWLQHLGRTPPPCKSAAYLDPGPAKEEWNMDPLPPNQGSGK

SEQ ID NO: 918545 - protein, 326 aa, Homo sapiens
MAEVRVQLLLSRRPESVSFARSVCGLLGAGPGLGTWPIHCSLKRGRLVLSSRPFPGASARLPLQRPPFCPFAALEERPRVPGAELPTDRGVDLGVAVILQSSDKTVLLTRRARTLSVSPNLWVPPGGHVELEEEDGGLRELWEESGLHLPQGQFSWVPLGLWESAYPPRLSWGLPKYHHIVLYLLVISQESQQQLQARIQPNPNEVSALMWLTPDVAAAVAAAEDGTETPGLLPQDLPPSVLAVELEEDGRARPLVLHMSTLLRMIPTMAEDKERVSTGTKFALKLWLQHLGRTPPPCKSAAYLDPGPAKEEWNMDPLPPNQGSGK

SEQ ID NO: 918546 - protein, 215 aa, Homo sapiens; identical to SEQ ID NO: 918539

SEQ ID NO: 918547 - protein, 162 aa, Homo sapiens
LPLAECCAPMEATMALIMASPSGSPSPALYPTAGRSGLPLHANRNTTKAKEALLKPPFPAASRQHLPQWAPSLLPLLVAGKVMVSQEEKGNRSLVGTLGGALRWRLYPGQIQQDLGFSAYTAQRYLPPGISGPHTDIFMLEADPEKQISISIKIYGKSRRPS

SEQ ID NO: 918548 - protein, 334 aa, Homo sapiens
FKEKVRKMMSFRKIWSLFIVNNSNEEGRNQWKHRHAWRNGTEFNDDLFRKEGINWAENAVEVVGSNTGHVRCPEGFLGEYCQHRDPCEKNRCQNGGTCVAQAMLGKATCRCASGFTGEDCQYSTSHPCFVSRPCLNGGTCHMLSRDTYECTCQVGFTACLLKGRNPKCPGGNLNYQFNGIVVVSSDGSVPPSGTKTSRPAELNVAGTGSKHFASGSLGVMVRSANGPMPACLIPVQMEVPVPLWPTSSPANASQASQGRSVRLMSMSVTFQDTASMVAPASTCLVPTSASAFRASQASTVTACMCPVHPRLVSMEAPVGRLVTSLLSATAFQKQ

SEQ ID NO: 918549 - protein, 237 aa, Homo sapiens
MRTGPVTRSRSPPRGARAGASSCGKPLGAQGGGAEAAATVGRGLRWEEAAEAEGHTRLLRCTPEKVSAKLRAAAEAAAEERRTRGAGSRGICAGLRSVAPGPEPLKQEEGRREWGSSIGTPSPCGSAQAAAAAAAEEATEKIPALRPALLWALLALWLCCATPAHGEYRAEGRCPRRPGLPPGATLLPLGPSLCGKARLGRRRGARPLAGFPRVWTSPGAPPVVPRQPPGFPANRRG

SEQ ID NO: 918550 - protein, 416 aa, Homo sapiens
MRTGPVTRSRSPPRGARAGASSCGKPLGAQGGGAEAAATVGRGLRWEEAAEAEGHTRLLRCTPEKVSAKLRAAAEAAAEERRTRGAGSRGICAGLRSVAPGPEPLKQEEGRREWGSSIGTPSPCGSAQAAAAAAAEEATEKIPALRPALLWALLALWLCCATPAHALQCRDGYEPCVNEGMCVTYHNGTGYCKCPEGFLGEYCQHRDPCEKNRCQNGGTCVAQAMLGKATCRCASGFTGEDCQYSTSHPCFVSRPCLNGGTCHMLSRDTYECTCQVGFTGKECQWTDACLSHPCANGSTCTTVANQFSCKCLTGFTGQKCETDVNECDIPGHCQHGGTCLNLPGSYQCQCLQGFTGQYCDSLYVPCAPSPCVNGGTCRQTGDFTFECNCLPETVRRGTELWERDREVWNGKEHDEN

SEQ ID NO: 918551 - protein, 309 aa, Homo sapiens
  misc_feature (299)..(299): Xaa can be any naturally occurring amino acid
  misc_feature (303)..(303): Xaa can be any naturally occurring amino acid
QPQPRPRPRLAGAASPRTGGGGGSQSPAPAGERTMHCLGAEYLVFIMGYSVVAGAAGRLLFGYDSFGNMCGKKNSPVEGAPLSGQDMTLKKHVFFMNSCNLEVKGTQLNRMALCVSNCPEEQLDSLEEVQFFANTSGSFLCVYSLNSFNYTHSPKADSLCPRLPVPPSKSFPLFNRCVPQTPECYSLFASVLINDVDTLHRILSGIMSGRDTILGLCILALALSLAMMFTFRFITTLLVHIFISLVILGLLFVCGVLWWLYYDYTNDLSIELDTERENMKCVLGFAIVSTGITGMLVRXDFCXPGRGIK

SEQ ID NO: 918552 - protein, 347 aa, Homo sapiens
QPQPRPRPRLAGAASPRTGGGGGSQSPAPAGERTMHCLGAEYLVSAEGAPRQREWRPQIYRKCTDTAWLFLFFLFWTGLVFIMGYSVVAGAAGRLLFGYDSFGNMCGKKNSPVEGAPLSGQDMTLKKHVFFMNSCNLEVKGTQLNRMALCVSNCPEEQLDSLEEVQFFANTSGSFLCVYSLNSFNYTHSPKADSLCPRLPVPPSKSFPLFNRCVPQTPECYSLFASVLINDVDTLHRILSGIMSGRDTILGLCILALALSLAMMFTFRFITTLLVHIFISLVILGLLFVCGVLWWLYYDYTNDLSIELDTERENMKCVLGFAIVSTGITAVAARLDFCSQKENKIDS

SEQ ID NO: 918553 - protein, 347 aa, Homo sapiens; identical to SEQ ID NO: 918552

SEQ ID NO: 918554 - protein, 347 aa, Homo sapiens; identical to SEQ ID NO: 918552

SEQ ID NO: 918555 - protein, 347 aa, Homo sapiens; identical to SEQ ID NO: 918552

SEQ ID NO: 918556 - protein, 345 aa, Homo sapiens
  misc_feature (335)..(335): Xaa can be any naturally occurring amino acid
  misc_feature (339)..(339): Xaa can be any naturally occurring amino acid
QPQPRPRPRLAGAASPRTGGGGGSQSPAPAGERTMHCLGAEYLVSAEGAPRQREWRPQIYRKCTDTAWLFLFFLFWTGLVFIMGYSVVAGAAGRLLFGYDSFGNMCGKKNSPVEGAPLSGQDMTLKKHVFFMNSCNLEVKGTQLNRMALCVSNCPEEQLDSLEEVQFFANTSGSFLCVYSLNSFNYTHSPKADSLCPRLPVPPSKSFPLFNRCVPQTPECYSLFASVLINDVDTLHRILSGIMSGRDTILGLCILALALSLAMMFTFRFITTLLVHIFISLVILGLLFVCGVLWWLYYDYTNDLSIELDTERENMKCVLGFAIVSTGITGMLVRXDFCXPGRGIK

SEQ ID NO: 918557 - protein, 194 aa, Homo sapiens
HSGMLAYLPFQWVLPMLSSCGRLCELLSPLVGMKVMFLRSTLAGVGRIKISNGWLVRDKEIFSLKSSYPKSDLVLEKVAVKTRSGEAAKVIIRRGIPFLNQVSSSCQSHSEGGDEEPPAGLAADPCSLCVRNMANLTNSQEPRFWTKSPRSSPDADRRPFLGPIPSHGPLPLPFAENALHWFMLYVFISSMKTD

SEQ ID NO: 918558 - protein, 206 aa, Homo sapiens
MPSKMQGLESWTPGAQLVHYLTVAALAPKLQDKVPFTLPSPFLKQKESLPMATTVMVEKICSGKKKAFRICSSSTETLSPHLDVFDISFVSKTNGLGSEGGGAAQGPHWSQKPVTCLKGAVATLIFRVKGVIQSYTNMTVELLKVKKLSPPYVLKWSLALSSWLECSGASRLTATSASWVQVILLLQPPDLLGLQSKPVKKWPSHS

SEQ ID NO: 918559 - protein, 206 aa, Homo sapiens; identical to SEQ ID NO: 918558

SEQ ID NO: 918560 - protein, 293 aa, Homo sapiens
MASNVTNKMDPHSMNSRVFIGNLNTLVVKKSDVEAIFSKYGKIAGCSVHKGFAFVQYDKEKNARAAVAGEDGRMIASQVVDINLAAEPKVNRGNAGVKRSAAEMYGSSFDLDYGFQRDYYDGMYSFPARVPPPPPIALAVVPSKRQRLSGNTSRRGKSGFNSKSGKRGSSKSGKLKGDDLQAIKQELTQIKQKVDSLLENLEKIEKEQSKQEVEVKNAKSEEEQSSSSMKKDETHVKMESEGGAEDSAEEGDPLDDDVNEDQGDDQLELIKDDEKEAEEGEDDRDSTNGQDDS

SEQ ID NO: 918561 - protein, 187 aa, Homo sapiens
MVLTLEQAAGSEHYDASPCSPPPLSNIPTLVGSRHVGGLQQPRDWAFVPAPCATSNYTGFANKHGSKPSSLGVSNGAEKKSGSPTHQAKVSLQMATSPSNGNILNSVAIQAHQYLDGTWSLSRTNGVTLYPYQVLAGPGDASDFPASRFTTWQSHEEVGHTDTWTGVQAPTCPLISSVTWHKGFALS

SEQ ID NO: 918562 - protein, 158 aa, Homo sapiens
MLATIIIKGLLKKFENLASKRWSCCKVQAVIHEVINLLRYAVSSEQPAQNPHSPHPRDLLWHPGIGCTLSLTYAHVPALPVGQGVFLASSLGMDSHWLADHQPIFDQLPDLLTGVGIGDFIGFIGVQPDLLLATGEDPRGKPLLKPEHTHGCDHSSER

SEQ ID NO: 918563 - protein, 480 aa, Homo sapiens
MPFQTFKNYCYFYPFQVSRPLPLWRDNRQTPWLLSLRGELVASLEDASLMGLYVDMNATTVTVQSPRQGLLQRWEVLNTSAELLPLWLPESEVLVHIPKQRLGLVKRGSYIEETLSLRFLRVHQSNIFMVTENKDFVVVSIPAAGVLQVQRCQEVGGTPGTQAFYRVDLSLEFAEMAAPVLWTVESFFQCVGPSVTLTEGLGTVRPEQDPAKSPGSPLLLRGLSSGDVAAPEPIMGEPGQASEEFQPLARPWRATLAAEELVSHRSPGEPQETCSGTEVERPRQTGPGLPREGARGHMDLSSSEPSQDIEGPGLSILPARDATFSTPSVRQPDPSAWLSSGPELTGMPRVRLAAPLAVLPMEPLPPEPVRPAALLTPEASSVGGPDQARYLESAPGWPVGQEEWGVAHTSSPPSTQTLSLWAPTGVLLPSLVELEYPFQAGRGASLQQELTEPTLALSAESHRPPELQDSVEGLSERPSR

SEQ ID NO: 918564 - protein, 151 aa, Homo sapiens
EGQFGDSHGHDGLMNHRRIIWTPFGRDVRNSLLLGTSFSNNIYSSRWKRKAPYVKSFLQSFLVREEINSTCHICSWASQVGFYHSLKWFTKLSYVSRVSSFCGFVVLLTSGVKLQTFPVSVTAHKDLRDRLLNHSCFAFENLSHLTKVRQQ

SEQ ID NO: 918565 - protein, 151 aa, Homo sapiens; identical to SEQ ID NO: 918564

SEQ ID NO: 918566 - protein, 295 aa, Homo sapiens
METCAGPHPLRLFLCRMQLCLALLLGPWRPGTAEEVILLDSKASQAELGWTALPSNGWEEISGVDEHDRPIRTYQVCNVLEPNQDNWLQTGWISRGRGQRIFVELQFTLRDCSSIPGAAGTCKETFNVYYLETEADLGRGRPRLGGSRPRKIDTIAADESFTQGDLGERKMKLNTEVREIGPLSRRGFHLAFQDVGACVALVSVRVYYKQCRATVRGLATFPATAAESAFSTLVEVAGTCVAHSEGEPGSPPRMHCGADGEWLVPVGRCSCSAGFQERGDFCEGIQLAGGRGVGV

SEQ ID NO: 918567 - protein, 1036 aa, Homo sapiens
GTCGPALCASPSPVAPTPAMKRIFSCSSTQVAVERWNRHDQKLLEAVHRGDVGRVAALASRKSARPTKLDSNGQSPFHLAASKGLTECLTILLANGADINSKNEDGSTALHLATISCQPQCVKVLLQDVNTKLHAASLCGHLQHGANEDAVDAENRSPLHWAASSGCASSVLLLCDHEAFLDVLDNDGRTPLMIASLGGHAAICSQLLQRGARVNVTDKNDKSALILACEKGSAEVAELLLSHGADAGAVDSTGHDALHYALHTQDKALWRHLQQALSRRRRGGQRLVQHPDLASQASPSEPQAGSPPKSSWRAEPEEEQEEKEDEDPCSEEWRWKYEEERRKVVRLEQELVQKTEECKTQAAAYLDLENQIREQAQELGVLLSWEPRASGKQGSSLRPGGDGMEQGCPKDLLAESTQELKKQQQAAATVNPVLAPKKAEDSAPGKIQYEVHGRSQPEEQGPPQSPASETIRKATGQQLTTNGAQTFGPDHADQLPAGQKESSQVLGVEPGGTVAEPVGPAAMNQLLLQLREELAAVWREKDAARGALSRPVMEGALGTPRAEAAAAAWEKMEARLERVLARLEWAKAGLQVKPEVPSQESREGALKAAPGSIKQDEEKEKRVPGARGEPLGALGGEKALGGLAKGQLEKEMSVLRLSNSNLLEELGELGRERQRLQRELQSLSQRLQREFVPKPEAQVQLQQLRQSVGLLTNELAMEKEATEKLRKLLASQSSGLRGLWDCLPADLVGERSAQSKAAESLEELRACISTLVDRHREAQQVLARLQEENQQLRGSLSPCREPGTSLKAPASPQVAALEQDLGKLEEELRAVQATMSGKSQEIGKLKQLLYQATEEVAELRAREAASLRQHEKTRGSLVAQAQAWGQELKALLEKYNTACREVGRLREAVAEERRRSGDLAAQAAEQERQASEMRGRSEQFEKTAELLKEKMEHLIGACRDKEAKIKELLKKLEQLSEEVLAIRGENARLALQLQDSQKNHEEIISTYRNHLLNAARGYMEHEVYNILLQILSMEEE

SEQ ID NO: 918568 - protein, 168 aa, Homo sapiens
TLVSQLQDKFEHLKMIQQEEIRKLEEEKKKLEGEIIDFYKMKAASEALQTQLSTDTKKDKHRPPEAASQALIKEHNQGTRWEAGLHKPVPSLAFPFGLSRSLSQSGVQWRDLGSLPAPPPRFTPFSCFSLPSSWGYRHLPPNPANFFVFLVETGFHRVSQDRLDLLTL

SEQ ID NO: 918569 - protein, 519 aa, Homo sapiens
MLNPIRWDFEILNISELNISKEVVMEVTIINHMEEGLSESKEYDQCGEAFSQILNLNLNKKIPTIVRPCECSLCGKVFMHHSSLSRHIRSHLGHKPYDYQEYGEKPYKCKQCGKAFSSCQSFRRHERTHTGEKPYACPECGKAFISLPSVRRHMIKHTGDGPYKCQECGKAFDRPSLFQIHERTHTGEKPYECQECAKAFISLPSFQRHMIRHTGDGPYKCQECGKAFDRPSLFRIHERTHTGEKPHECKQCGKAFISFTNFQSHMIRHTGDGPYKCKVCGRAFIFPSYVRKHERTHTGEKPYECNKCGKTFSSSSNVRTHERTHTGEKPYECKECGKAFISLPSVRRHMIKHTGDGPYKCQVCGRAFDCPSSFQIHERTHTGEKPYECQVCGKAFISLKRIRKHMILHTGDGPYKCQVCGKAFDCPSSVRTHERTHTGEKPYECKECGKAFNYASSIRIHERTHTGEKPYECKQCGKTFSYSSSFQRHERAHNGDKPYVKNVGKLSFITQPSNTCENE

SEQ ID NO: 918570 - protein, 602 aa, Homo sapiens
FLFRVRCVWVPVSASPVAPVAPPQRLARWDLHRPERAVGRTPGHPGSQEMDSVASEDVAVNFTLEEWALLDPSQKKLYRDVMRETFRNLACVGKKWEDQSIEDWYKNQGRILRNHMEEGLSESKEYDQCGEAFSQILNLNLNKKIPTIVRPCECSLCGKVFMHHSSLSRHIRSHLGHKPYDYQEYGEKPYKCKQCGKAFSSCQSFRRHERTHTGEKPYACPECGKAFISLPSVRRHMIKHTGDGPYKCQECGKAFDRPSLFQIHERTHTGEKPYECQECAKAFISLPSFQRHMIRHTGDGPYKCQECGKAFDRPSLFRIHERTHTGEKPHECKQCGKAFISFTNFQSHMIRHTGDGPYKCKVCGRAFIFPSYVRKHERTHTGEKPYECNKCGKTFSSSSNVRTHERTHTGEKPYECKECGKAFISLPSVRRHMIKHTGDGPYKCQVCGRAFDCPSSFQIHERTHTGEKPYECQVCGKAFISLKRIRKHMILHTGDGPYKCQVCGKAFDCPSSVRTHERTHTGEKPYECKECGKAFNYASSIRIHERTHTGEKPYECKQCGKTFSYSSSFQRHERAHNGDKPYVKNVGKLSFITQPSNTCENE

SEQ ID NO: 918571 - protein, 574 aa, Homo sapiens
MRRHDRLLFVFLVETGFLHVGQDSVASEDVAVNFTLEEWALLDPSQKKLYRDVMRETFRNLACVGKKWEDQSIEDWYKNQGRILRNHMEEGLSESKEYDQCGEAFSQILNLNLNKKIPTIVRPCECSLCGKVFMHHSSLSRHIRSHLGHKPYDYQEYGEKPYKCKQCGKAFSSCQSFRRHERTHTGEKPYACPECGKAFISLPSVRRHMIKHTGDGPYKCQECGKAFDRPSLFQIHERTHTGEKPYECQECAKAFISLPSFQRHMIRHTGDGPYKCQECGKAFDRPSLFRIHERTHTGEKPHECKQCGKAFISFTNFQSHMIRHTGDGPYKCKVCGRAFIFPSYVRKHERTHTGEKPYECNKCGKTFSSSSNVRTHERTHTGEKPYECKECGKAFISLPSVRRHMIKHTGDGPYKCQVCGRAFDCPSSFQIHERTHTGEKPYECQVCGKAFISLKRIRKHMILHTGDGPYKCQVCGKAFDCPSSVRTHERTHTGEKPYECKECGKAFNYASSIRIHERTHTGEKPYECKQCGKTFSYSSSFQRHERAHNGDKPYVKNVGKLSFITQPSNTCENE

SEQ ID NO: 918572 - protein, 198 aa, Homo sapiens
PVSCPLRLGSGLRFSSGPGGSTAASGALGPAQAGESRRQDPGTPWKPGNGACAGPGAWRLGEGLVGTGRNRLWKHPGLPAATPGSGTRVPWRSSALCPLGRRVGWAVASTPGVLSRPCAATAASASEPCLGSSAPAAPPLSRLFVLGHGRVIRRNPVSGVRFVHGKSCGLWPSQYIVFFSGGLVFLRVFQTYWKKNLK

SEQ ID NO: 918573 - protein, 639 aa, Homo sapiens
FLFRVRCVWVPVSASPVAPVAPPQRLARWDLHRPERAVGRTPGHPGSQEMDSVASEDVAVNFTLEEWALLDPSQKKLYRDVMRETFRNLACVGKKWEDQSIEDWYKNQGRILRNHMEEGLSESKEYDQCGEAFSQILNLNLNKKIPTIVRPCECSLCGKVFMHHSSLSRHIRSHLGHKPYDYQEYGEKPYKCKQCGKAFSSCQSFRRHERTHTGEKPYACPECGKAFISLPSVRRHMIKHTGDGPYKCQECGKAFDRPSLFQIHERTHTGEKPYECQECAKAFISLPSFQRHMIRHTGDGPYKCQECGKAFDRPSLFRIHERTHTGEKPHECKQCGKAFISFTNFQSHMIRHTGDGPYKCKVCGRAFIFPSYVRKHERTHTGEKPYECNKCGKTFSSSSNVRTHERTHTGEKPYECKECGKAFISLPSVRRHMIKHTGDGPYKCQVCGRAFDCPSSFQIHERTHTGEKPYECQVCGKAFISLKRIRKHMILHTGDGPYKCQVCGKAFDCPSSVRTHERTHTGEKPYECKECGKAFNYASSIRIHERTHTGEKPYECKQCGKTFSYSSSFQRHERAHNGDKPYVKNVGKLSFITQPSNTCENLQFAFWVSDLFGSSPLSPVSHFWNRNLYPVPVSYFGNT

SEQ ID NO: 918574 - protein, 213 aa, Homo sapiens
MASHDCSSLGHRCTADLFFLLGWQAQSPISSNVHQWDSRERKKAERAGVPAPQLQPCVHQQGSPPSHQCQMEKLYCHVFEHLAGSTTGVPIIKLISTRPWSAHFLVHVLLRVGCRENSRSCMRCPFDCYIHDMGQNEDSSNDFGSGSPRFFRRAVRAVTDVERVVLPLLHHSACYLTCEDTCPEQSITDDAQKNANPGSTGTSFTFIHWSLSP

SEQ ID NO: 918575 - protein, 145 aa, Homo sapiens
MFSLCYLPTAGRLTLTVIKCRNLKAMDITGYSDPYVKVSLLCDGRRLKKKKTTIKKNTLNPVYNEAIIFDIPPENMDQVSLLISVMDYDRVGHNEIIGVCRVGITAEGLGRDHWNEMLAYPRKPIAHWHSLVEVKKSFKEGNPRL

SEQ ID NO: 918576 - protein, 138 aa, Homo sapiens
MFSLCYLPTAGRLTLTVIKCRNLKAMDITGYSDPYVKVSLLCDGRRLKKKKTTIKKNTLNPVYNEAIIFDIPPENMDQVSLLISVMDYDRVGHNEIIGVCRVGITAEGLGRDHWNEMLAYPRKPIAHWHSLVEGNPRL

SEQ ID NO: 918577 - protein, 128 aa, Homo sapiens
MFSLCYLPTAGRLTLTVIKCRNLKAMDITGYSDPYVKVSLLCDGRRLKKKKTTIKKNTLNPVYNEAIIFDIPPVGHNEIIGVCRVGITAEGLGRDHWNEMLAYPRKPIAHWHSLVEVKKSFKEGNPRL

SEQ ID NO: 918578 - protein, 151 aa, Homo sapiens
MHTVETYNKETDGRTFVEFILGSLRGHREWFLTGFPILLLVAFGEGDRSGQRSEKSQPKQRTELITLELFHPLQSSTVIPDPTDLAGVIIELGPNDSPQTSEFKGATEEAPAKESPHTSEFKGAARVSPISESYYLIELKRVMCGRVINDG

SEQ ID NO: 918579 - protein, 224 aa, Homo sapiens
MLEKLEGPGAFDIKHGSILGDTLLYSEIKKSSSLKQNITILIPETHKTATGSSDNPTKKPEVRTNKKLLKNNDHKGVVVSTINFSTNVTAAKTKEMILKKLIRRTKDTLGAPKNNRILIFIDDMNMPVSDMYGAQPPLELIRQLLDLGGVYDTEKNTWKNIQDLSIVAACVPVVNDISPRLLKHFSMLVLPHPSQDILCTIFQRSSTADLTWQKRESTNLKIDL

SEQ ID NO: 918580 - protein, 368 aa, Homo sapiens
HVAGVWCTNDFITQLVSIVPSRRKMRFYESIITFLPQQVRDCRLTGLLDLALEKDYVRSKIAEYMNHLIDIGVAGFRLDASKHMWPGDIKAILDKLHNLNSNWFPAGSKPFIYQEVIDLGGEPIKSSDYFGNGRVTEFKYGAKLGTVIRKNWGEGWGFVPSDRALVFVDNHDNQRGHGAGGASILTFWDARLYKMAVGFMLAHPYGFTRVMSSYRWPRQFQNGNDVNDWVGPPNNNGVIKEVTINPDTTCGNDCVCEHRWRQIRNMVIFRNVVDGQPFTNWYDNGSNQVAFGRGNRGFIVFNNDDWSFTLTVQTGLPAGTYCDVISGDKINGNCTGIKIYVSDDGKAHFSISNSAEDPFIAIHAESKL

SEQ ID NO: 918581 - protein, 378 aa, Homo sapiens
HVAGVWCTNDFITQLVSIVPSRRKMRFYESIITFLPQQVRDCRLTGLLDLALEKDYVRSKIAEYMNHLIDIGVAGFRLDASKHMWPGDIKAILDKLHNLNSNWFPAGSKPFIYQEVIDLGGEPIKSSDYFGNGRVTEFKYGAKLGTVIRKWNGEKMSYLKNWGEGWGFVPSDRALVFVDNHDNQRGHGAGGASILTFWDARLYKMAVGFMLAHPYGFTRVMSSYRWPRQFQNGNDVNDWVGPPNNNGVIKEVTINPDTTCGNDCVCEHRWRQIRNMVIFRNVVDGQPFTNWYDNGSNQVAFGRGNRGFIVFNNDDWSFTLTVQTGLPAGTYCDVISGDKINGNCTGIKIYVSDDGKAHFSISNSAEDPFIAIHAESKL

SEQ ID NO: 918582 - protein, 234 aa, Homo sapiens
MVSCHMLSELEEVIQYKLVPERREIIRQIWWERLQGCQRIVEDWQKILMVRSLVVSPHEDMRTWLKYASLCGKSGRLALAHKTLVLLLGVDPSRQLDHPLPTVHPQVTYAYMKNMWKSARKIDAFQHMQHFVQTMQQQAQHAIATEDQQHKQELHKLMARCFLKLGEWQLNLQGINESTIPKVLQYYSAATEHDRSWYKVIRSRPPVRPSTLAGSCPPVCSWLQLSFCGARLML

SEQ ID NO: 918583 - protein, 138 aa, Homo sapiens
MVSCHMLSELEEVIQYKLVPERREIIRQIWWERLQGCQRIVEDWQKILMVRSLVVSPHEDMRTWLKYASLCGKSGRLALAHKTLVLLLGVDPSRQLDHPLPTVHPQVTYAYMKNMWKSARKVCIPMHPEQTTFSRMLA

SEQ ID NO: 918584 - protein, 186 aa, Homo sapiens
MGEQHSSRGHVHQDLFSLAQQCIDKARDLLDAELTAMAGESYSRAYGAMVSCHMLSELEEVIQYKLVPERREIIRQIWWERLQGCQRIVEDWQKILMVRSLVVSPHEDMRTWLKYASLCGKSGRLALAHKTLVLLLGVDPSRQLDHPLPTVHPQVTYAYMKNMWKSARKVCIPMHPEQTTFSRMLA

SEQ ID NO: 918585 - protein, 347 aa, Homo sapiens
MLCCRSFWHCRPPEMSILCLSTFVVIVCGVALVAVFLFLFWKLCWMPWRNKEASSPSSANPPLEALQSPSFRGNMADKLKDPSTLGFLEAAVKISHTSPDIPAEVQMSVKEHIMRHTRLQRQTTEPASSTRHTSFKRHLPRQMHVSSVDYGNELPPAAEQPTSIGRIKPELYKQKSVDGEDAKSEATKSCGKINFSLRYDYETETLIVRILKAFDLPAKDFCGSSDPYVKIYLLPDRKCKLQTRVAPQGPWNPTFDENFHFPVPYEELADRKLHLSVFDFDRFSRHDMIGEVILDNLFEASDLSRETSIWKDIQYATSVQEFPKLQSPTHAQTACLTVCLSWMFLLK

SEQ ID NO: 918586 - protein, 199 aa, Homo sapiens
MWIKQVLNQDLTFQHIKIIYPTAPPRSYTPMKGGISNVWFDRFKITNDCPEHLESIDVMCQVLTDLIDEEVKSGIKKNRILIGGFSMGGCMAMHLAYRNHQDVAGVFALSSFLNKASAVYQALQKSNGVLPELFQCHGTADELVLHSWAEETNSMLKSLGVTTKFHSFPNVYHELSKTELDILKLWILTKLPGEMEKQK

SEQ ID NO: 918587 - protein, 113 aa, Homo sapiens
MGGCMAMHLAYRNHQDVAGVFALSSFLNKASAVYQALQKSNGVLPELFQCHGTADELVLHSWAEETNSMLKSLGVTTKFHSFPNVYHELSKTELDILKLWILTKLPGEMEKQK

SEQ ID NO: 918588 - protein, 237 aa, Homo sapiens
MAAASGSVLQRCIVSPAGRHSASLIFLHGSGDSGQGLRMWIKQVLNQDLTFQHIKIIYPTAPPRSYTPMKGGISNVWFDRFKITNDCPEHLESIDVMCQVLTDLIDEEVKSGIKKNRILIGGFSMGGCMAMHLAYRNHQDVAGVFALSSFLNKASAVYQALQKSNGVLPELFQCHGTADELVLHSWAEETNSMLKSLGVTTKFHSFPNVYHELSKTELDILKLWILTKLPGEMEKQK

SEQ ID NO: 918589 - protein, 131 aa, Homo sapiens
MWIKQVLNQDLTFQHIKIIYPTAPPRSYTPMKGGISNVWFDRFKITNDCPEHLESIDVMCQVLTDLIDEEVKSGIKKNRILIDVSTSGVIGGILKEPFRWLLSMVGYCYDKNLLFLAGMLKITDNFYSLFT

SEQ ID NO: 918590 - protein, 237 aa, Homo sapiens; identical to SEQ ID NO: 918588

SEQ ID NO: 918591 - protein, 199 aa, Homo sapiens; identical to SEQ ID NO: 918586

SEQ ID NO: 918592 - protein, 183 aa, Homo sapiens [sequence omitted]

SEQ ID NO: 918593 - protein, 169 aa, Homo sapiens
MAAASGSVLQRCIVSPAGRHSASLIFLHGSGDSGQGLRMWIKQVLNQDLTFQHIKIIYPTAPPRSYTPMKGGISNVWFDRFKITNDCPEHLESIDVMCQVLTDLIDEEVKSGIKKNRILIDVSTSGVIGGILKEPFRWLLSMVGYCYDKNLLFLAGMLKITDNFYSLFT

SEQ ID NO: 918594 - protein, 140 aa, Homo sapiens
GIWKMKSLSDFSKKVVFEPRRVGLNGTVIGRELERSYTPMKGGISNVWFDRFKITNDCPEHLESIDVMCQVLTDLIDEEVKSGIKKNRILIDVSTSGVIGGILKEPFRWLLSMVGYCYDKNLLFLAGMLKITDNFYSLFT

SEQ ID NO: 918595 - protein, 221 aa, Homo sapiens
MAAASGSVLQRCIVSPAGRHSASLIFLHGSGDSGQGLRMWIKQVLNQDLTFQHIKIIYPTAPPRFKITNDCPEHLESIDVMCQVLTDLIDEEVKSGIKKNRILIGGFSMGGCMAMHLAYRNHQDVAGVFALSSFLNKASAVYQALQKSNGVLPELFQCHGTADELVLHSWAEETNSMLKSLGVTTKFHSFPNVYHELSKTELDILKLWILTKLPGEMEKQK

SEQ ID NO: 918596 - protein, 113 aa, Homo sapiens; identical to SEQ ID NO: 918587

SEQ ID NO: 918597 - protein, 199 aa, Homo sapiens; identical to SEQ ID NO: 918586

SEQ ID NO: 918598 - protein, 246 aa, Homo sapiens
MAAASGSVLQRCIVSPAGRHSASLIFLHGSGDSGQGLRMWIKQVLNQDLTFQHIKIIYPTAPPSYTVGPSFARSYTPMKGGISNVWFDRFKITNDCPEHLESIDVMCQVLTDLIDEEVKSGIKKNRILIGGFSMGGCMAMHLAYRNHQDVAGVFALSSFLNKASAVYQALQKSNGVLPELFQCHGTADELVLHSWAEETNSMLKSLGVTTKFHSFPNVYHELSKTELDILKLWILTKLPGEMEKQK

SEQ ID NO: 918599 - protein, 129 aa, Homo sapiens
MPLRSGIRISIHFHSHSISYILQLVFTTETCGAIQHLHNFHSSDWFGVIGTCLCVQVSNDVPRNEAKPILAPPGWVHSDPLSSPPTHSGFPGDFLAQNNTILAPQLETRVWNCPHVQWLLGLLCRGSEE

SEQ ID NO: 918600 - protein, 155 aa, Homo sapiens
QQTLPLPFMMFTWAEGSLPADSHTAPALLFLKSLATGADWPAAGRVILRGRGPGRIVSSRAGWTPQRPDLGNPSLEVPGPELPEGWVRGLGGVRFGFLGHSGAAAQAAGAEPSPAPSATSPGTPSLLLDNTPPPPGPPSPKPPSFVQRQILRTHP

SEQ ID NO: 918601 - protein, 157 aa, Homo sapiens
TKRLAPAECGDSKLVQLGVSRSSIRLQQRRRNQPLDARLRTLLSGQSARRLVPNASLCGDPSDTSLGVSILIRSIQLPDLTSTGCTPLSSLRPRSAAFAPRYTRLVMRRSSRSFRLQCTGFPSSSAQSISAHLSNSMPSSLLTISRCPGMFAVRCPL

SEQ ID NO: 918602 - protein, 155 aa, Homo sapiens; identical to SEQ ID NO: 918600

SEQ ID NO: 918603 - protein, 155 aa, Homo sapiens; identical to SEQ ID NO: 918600

SEQ ID NO: 918604 - protein, 300 aa, Homo sapiens
QWGQSPPSSPAAGLLRKGEMGEGSPLLASLLYTTKVGGAGRGAVMQAQLTDALLCLQIMSVLLFIEHSVEVAHGKASCKLSQMGYLRIGRFLIALRPLPRDAFLSLTLAEVDPSLHLQPSTLSDLISSFLLITMLFIISLSLLIGVVKNREKYLLPFLSLQIMDYLLCLLTLLGSYIELPAYLKLASRSRASSSKFPLMTLQLLDFCLSILTLCSSYMEVPTYLNFKSMNHMEDMPHNQFIKMMIIFSIAFITVLIFKVYMFKCVWRCYRLIKCMNSVEEKRNSKMLQKSHIDSRRRREN

SEQ ID NO: 918605 - protein, 97 aa, Homo sapiens
  misc_feature (90)..(90): Xaa can be any naturally occurring amino acid
QQLPLLCPAPGTRLFPLQCLRGGDGSTMDPRLSTVRQTCCCFNVRIATTALAIYHVIMSVLLFIEHSVEVAHGKASCKLSQMGYLRIDYXFNSEEKG

SEQ ID NO: 918606 - protein, 191 aa, Homo sapiens [sequence omitted]

SEQ ID NO: 918607 - protein, 160 aa, Homo sapiens
MLFIISLSLLIGVVKNREKYLLPFLSLQIMDYLLCLLTLLGSYIDILTLCSSYMEVPTYLNFKSMNHMNYLPSQEDMPHNQFIKMMIIFSIAFITVLIFKVYMFKCVWRCYRLIKCMNSVEEKRNSKMLQKVVLPSYEEALSLPSKTPEGGPAPPPYSEV

SEQ ID NO: 918608 - protein, 289 aa, Homo sapiens
QQLPLLCPAPGTRLFPLQCLRGGDGSTMDPRLSTVRQTCCCFNVRIATTALAIYHVIMSVLLFIEHSVEVAHGKASCKLSQMGYLRIADLISSFLLITMLFIISLSLLIGVVKNREKYLLPFLSLQIMDYLLCLLTLLGSYIELPAYLKLASRSRASSSKFPLMTLQLLDFCLSILTLCSSYMEVPTYLNFKSMNHMNYLPSQEDMPHNQFIKMMIIFSIAFITVLIFKVYMFKCVWRCYRLIKCMNSVEEKRNSKMLQKVVLPSYEEALSLPSKTPEGGPAPPPYSEV

SEQ ID NO: 918609 - protein, 289 aa, Homo sapiens; identical to SEQ ID NO: 918608

SEQ ID NO: 918610 - protein, 88 aa, Homo sapiens
AAASPSLPCSRHQALSPSVSQRRGRQHHGPPLVHCPPDLLLLQCPHRNHRPGHLPCDHERLVVHRALGRGGPWQGVLQALPDGLPQDR

SEQ ID NO: 918611 - protein, 91 aa, Homo sapiens
TRMRGPSRSSWMLASGESGGSCLAYVLGLLEREKDSSAKHSLTWAFFQVYMFKCVWRCYRLIKCMNSVEEKRNSKMLQKVSVAAGGCQPCH

SEQ ID NO: 918612 - protein, 275 aa, Homo sapiens
QQLPLLCPAPGTRLFPLQCLRGGDGSTMDPRLSTVRQTCCCFNVRIATTALAIYHVIMSVLLFIEHSVEVAHGKASCKLSQMGYLRIADLISSFLLITMLFIISLSLLIGVVKNREKYLLPFLSLQIMDYLLCLLTLLGSYIELPAYLKLASRSRASSSKFPLMTLQLLDFCLSILTLCSSYMEVPTYLNFKSMNHMNYLPSQEDMPHNQFIKMMIIFSIAFITVLIFKVYMFKCVWRCYRLIKCMNSVEEKRNSKMLQKVLPSYSESGYRAESK

SEQ ID NO: 918613 - protein, 55 aa, Homo sapiens
MQGTLDGAGPTFQNREKYLLPFLSLQIMDYLLCLLTLLGSYIELPAYLKLASRSR

SEQ ID NO: 918614 - protein, 289 aa, Homo sapiens; identical to SEQ ID NO: 918608

SEQ ID NO: 918615 - protein, 289 aa, Homo sapiens; identical to SEQ ID NO: 918608

SEQ ID NO: 918616 - protein, 283 aa, Homo sapiens
QQLPLLCPAPGTRLFPLQCLRGGDGSTMDPRLSTVRQTCCCFNVRIATTALAIYHVIMSVLLFIEHSVEVAHGKASCKLSQMGYLRIADLISSFLLITMLFIISLSLLIGVVKNREKYLLPFLSLQIMDYLLCLLTLLGSYIELPAYLKLASRSRASSSKFPLMTLQLLDFCLSILTLCSSYMEVPTYLNFKSMNHMEDMPHNQFIKMMIIFSIAFITVLIFKVYMFKCVWRCYRLIKCMNSVEEKRNSKMLQKVVLPSYEEALSLPSKTPEGGPAPPPYSEV

SEQ ID NO: 918617 - protein, 289 aa, Homo sapiens; identical to SEQ ID NO: 918608

SEQ ID NO: 918618 - protein, 70 aa, Homo sapiens
APLQSQQPVQAQVTPQPQTPVQLPSVATPQSSQQQPTPVHAQPPGTPLSSSSSKSNSDLGIETAREKCDQ

SEQ ID NO: 918619 - protein, 146 aa, Homo sapiens [sequence omitted]

SEQ ID NO: 918620 - protein, 150 aa, Homo sapiens
GLRLQVQGSDNLQCLSNSGMTKTSLPFSGVHTTMRNTTSLKWAESLLLTLDLEKPVSLLLSVTNLYSKNSAQFSTILQTLSFPATFTPSPSIPLSSAYFFFFSDRVSLCRPGRSAVAQSWAHCSLNLPGSSDSPASAPQVAGTTSAHHHA

SEQ ID NO: 918621 - protein, 101 aa, Homo sapiens
MITHGSDTGKKRIRRGGNILVAKEHPRTIRAVGAPNNVVGDTDHPHRRDYIRAPLEPRTIMQILRRGYCGRLNRQAASNGDPAGRRLGDSGKRRLSHLFSR

SEQ ID NO: 918622 - protein, 182 aa, Homo sapiens
MTLEQADHGEMIWLKMNMRNKGRGTNHYTNKMLLPLPYKREETLSSLCIHLKSPGDMKSSPSGPDAAPVEGEDIMKCVVKEGNHHSAMTPRSAGTYTGQRAAWQRAEQHTHKWYVLPPKSKDTQDRYSYVIIKTMRIGEWHGLTYTVFKDCSGCNVGPGFPHQGMLVPFTEIRNTGRPVKSG

SEQ ID NO: 918623 - protein, 182 aa, Homo sapiens
SAPVPVVGAVAPSVPTGRRLGFSRVQGSMDVDNGSGPWLAQEPGVITNPGPRGWDQAPRSRLPVAGLLSPSKPKHRQSRRCAFRRPPRASRRRRRPASRRTSVAPPCCCWGAPEASIPCPGFRLSGRPPFRPRSRASPAPELRASTTSAGSGQGFHCKVGCQTCWSSPNPELISAACHHCWG

SEQ ID NO: 918624 - protein, 108 aa, Homo sapiens
MEDSSTDQEATAWAPELTSSPCTDEERSHETSAQSGNRALFVTSCLSGGPVMKALPDWAQGIQKGQLVFAIVCCFSITSSPKQHWMNASRGSHNSFQDLVTIVSVPVQ

SEQ ID NO: 918625 - protein, 165 aa, Homo sapiens
MGLGKVNPAGYLEGVNQGPRKIPGGRMQLEINCPIKELELDLECFGEPWKVLDKGGASQIRVRDDCRRLTGMSEQEQTREGACGGGLEMAREGSCLDEQSPETVSGTHRENLQLKGDARGDITLLPFDCVWMPLLTNTTIPLLDWRGCREGIVSVDCTLSVSLVG

SEQ ID NO: 918626 - protein, 152 aa, Homo sapiens
MGLGKVNPAGYLEGVNQGPRKIPGGRMQLEINCPIKELELDLECFGEPWKVLDKGGASQIRVRDDCRRLTGMSEQEQTREGACGGGLEMAREGSCLDEQSPETVSGTHRENLQLKGDARGDITLLPFDCVWMPLLTNTTIPLLDWRGCREGF

SEQ ID NO: 918627 - protein, 1404 aa, Homo sapiens
MCEVMPTINEGGPPHGADADANFEQLMVNMLDEREKLLESLRESQETLAATQSRLQDAIHERDQLQRHLNSALPQEFATLTRELSMCREQLLEREEEISELKAERNNTRLLLEHLECLVSRHERSLRMTVVKRQAQSPSGVSSEVEVLKALKSLFEHHKALDEKVRERLRAALERVTTLEEQLAGAHQQVSALQQGAGVRDGAAEEEGTVELGPKRLWKEEDTGRVEELQELLEKQNFELSQARERLVTLTTTVTELEEDLGTARRDLIKSEELSSKHQRDLREALAQKEDMEERITTLEKRYLAAQREATSIHDLNDKLENELANKESLHRQCEEKARHLQELLEVAEQKLQQTMRKAETLPEVEAELAQRIAALTKASGPGAWDLPLSPMFLSSQGARQGRERVGGALGQEPENCFPPCDSREHTALCLSVGRVIPVLITLQGCDSLIRRGVKVLEGEEAMLMQSVFLFLFFFFLILYTVVVNTFFHLGLEQKDYDFHLWKGETLEEKMVYISLKGKGDVLRLGLSEEEAGETWQVLKYLGRKAMGMVVLLQDDKWRLSVTGTGGHDPQGHPGTRAEERHGNIEEHLRQLEGQLEEKNQELARVRQREKMNEDHNKRLSDTVDRLLSESNERLQLHLKERMAALEEKNTLIQELESSQRQIEEQHHHKGRLSEEIEKLRQEVDQLKGRGGPFVDGVHSRSHMGSAADVRFSLGTTTHAPPGVHRRYSALREESAKDWETSPLPGMLAPAAGPAFDSDPEISDVDEDEPGGLVGSADVVSPSGHSDAQTLAMMLQEQLDAINEEIRMIQEEKESTELRAEEIETRVTSGSMEALNLKQLRKRGSIPTSLTALSLASASPPLSGRSTPKLTSRSAAQDLDRMGVMTLPSDLRKHRRKLLSPVSREENREDKATIKCETSPPSSPRTLRLEKLGHPALSQEEGKSALEDQGSNPSSSNSSQDSLHKGAKRKGIKSSIGRLFGKKEKGRLIQLSRDGATGHVLLTDSEFSMQEPMVPAKLGTQAEKDRRLKKKHQLLEDARRKGMPFAQWDGPTVVSWLELWVGMPAWYVAACRANVKSGAIMSALSDTEIQREIGISNALHRLKLRLAIQEMVSLTSPSAPPTSRTSSGNVWVTHEEMETLETSTKTDSEEGSWAQTLAYGDMNHEWIGNEWLPSLGLPQYRSYFMECLVDARMLDHLTKKDLRVHLKMVDSFHRTSLQYGIMCLKRLNYDRKELEKRREESQHEIKDVLVWTNDQVVHWVQSIGLRDYAGNLHESGVHGALLALDENFDHNTLALILQIPTQNTQARQVMEREFNNLLALGTDRKLDDGDDKVFRRAPSWRKRFRPREHHGRGGMLSASAETLPAGFRVSTLGTLQPPPAPPKKIMPEAHSHYLYGHMLSAFRD

SEQ ID NO: 918628 - protein, 1200 aa, Homo sapiens
LIADSRGYTEGQATGKEDTGRVEELQELLEKQNFELSQARERLVTLTTTVTELEEDLGTARRDLIKSEELSSKHQRDLREALAQKEDMEERITTLEKRYLAAQREATSIHDLNDKLENELANKESLHRQCEEKARHLQELLEVAEQKLQQTMRKAETLPEVEAELAQRIAALTKASGPGAWDLPLSPMFLSSQGARQGRERVGGALGQEPENCFPPCDSREHTALCLSVGRVIPVLITLQGCDSLIRRGVKVLEGEEAMLMQSVFLFLFFFFLILYTVVVNTFFHLGLEQKDEDFHLWKGETLEEKMVYISLKGKGDVLRLGLSEEEAGETWQVLKYLGRKAMGMVVLLQDDKWRLSVTGTGGHDPQGHPGTRAEERHGNIEEHLRQLEGQLEEKNQELARVRQREKMNEDHNKRLSDTVDRLLSESNERLQLHLKERMAALEEKNTLIQELESSQRQIEEQHHHKGRLSEEIEKLRQEVDQLKGRGGPFVDGVHSRSHMGSAADVRFSLGTTTHAPPGVHRRYSALREESAKDWETSPLPGMLAPAAGPAFDSDPEISDVDEDEPGGLVGSADVVSPSGHSDAQTLAMMLQEQLDAINEEIRMIQEEKESTELRAEEIETRVTSGSMEALNLKQLRKRGSIPTSLTALSLASASPPLSGRSTPKLTSRSAAQDLDRMGVMTLPSDLRKHRRKLLSPVSREENREDKATIKCETSPPSSPRTLRLEKLGHPALSQEEGKSALEDQGSNPSSSNSSQDSLHKGAKRKGIKSSIGRLFGKKEKGRLIQLSRDGATGHVLLTDSEFSMQEPMVPAKLGTQAEKDRRLKKKHQLLEDARRKGMPFAQWDGPTVVSWLELWVGMPAWYVAACRANVKSGAIMSALSDTEIQREIGISNALHRLKLRLAIQEMVSLTSPSAPPTSRTSSGNVWVTHEEMETLETSTKTDSEEGSWAQTLAYGDMNHEWIGNEWLPSLGLPQYRSYFMECLVDARMLDHLTKKDLRVHLKMVDSFHRTSLQYGIMCLKRLNYDRKELEKRREESQHEIKDVLVWTNDQVVHWVQSIGLRDYAGNLHESGVHGALLALDENFDHNTLALILQIPTQNTQARQVMEREFNNLLALGTDRKLDDGDDKVFRRAPSWRKRFRPREHHGRGGMLSASAETLPAGFRVSTLGTLQPPPAPPKKIMPEAHSHYLYGHMLSAFRD

SEQ ID NO: 918629 - protein, 1560 aa, Homo sapiens
MCEVMPTINEGGPPHGADADANFEQLMVNMLDEREKLLESLRESQETLAATQSRLQDAIHERDQLQRHLNSALPQEFATLTRELSMCREQLLEREEEISELKAERNNTRLLLEHLECLVSRHERSLRMTVVKRQAQSPSGVSSEVEVLKALKSLFEHHKALDEKVRERLRAALERVTTLEEQLAGAHQQVSALQQGAGVRDGAAEEEGTVELGPKRLWKEEDTGRVEELQELLEKQNFELSQARERLVTLTTTVTELEEDLGTARRDLIKSEELSSKHQRDLREALAQKEDMEERITTLEKRYLAAQREATSIHDLNDKLENELANKESLHRQCEEKARHLQELLEVAEQKLQQTMRKAETLPEVEAELAQRIAALTKASGPGAWDLPLSPMFLSSQGARQGRERVGGALGQEPENCFPPCDSREHTALCLSVGRVIPVLITLQGCDSLIRRGVKVLEGEEAMLMQSVFLFLFFFFLILYTVVVNTFFHLGLEQKDYDFHLWKGETLEEKMVYISLKGKGDVLRLGLSEEEAGETWQVLKYLGRKAMGMVVLLQDDKWRLSVTGTGGHDPQGHPGTRAEERHGNIEEHLRQLEGQLEEKNQELARVRQREKMNEDHNKRLSDTVDRLLSESNERLQLHLKERMAALEEKNTLIQELESSQRQIEEQHHHKGRLSEEIEKLRQEVDQLKGRGGPFVDGVHSRSHMGSAADVRFSLGTTTHAPPGVHRRYSALREESAKDWETSPLPGMLAPAAGPAFDSDPEISDVDEDEPGGLVGSADVVSPSGHSDAQTLAMMLQEQLDAINEEIRMIQEEKESTELRAEEIETRVTSGSMEALNLKQLRKRGSIPTSLTALSLASASPPLSGRSTPKLTSRSAAQDLDRMGVMTLPSDLRKHRRKLLSPVSREENREDKATIKCETSPPSSPRTLRLEKLGHPALSQEEGKSALEDQGSNPSSSNSSQDSLHKGAKRKGIKSSIGRLFGKKEKGRLIQLSRDGATGHVLLTDSEFSMQEPMVPAKLGTQAEKDRRLKKKHQLLEDARRKGMPFAQWDGPTVVSWLELWVGMPAWYVAACRANVKSGAIMSALSDTEIQREIGISNALHRLKLRLAIQEMVSLTSPSAPPTSRTSSGNVWVTHEEMETLETSTKTTLAYGDMNHEWIGNEWLPSLGLPQYRSYFMECLVDARMLDHLTKKDLRVHLKMVDSFHRTSLQYGIMCLKRLNYDRKELEKRREESQHEIKDVLVWTNDQVVHWVQSIGLRDYAGNLHESGVHGALLALDENFDHNTLALILQIPTQNTQARQVMEREFNNLLALGTDRKLDDGDDKVFRRAPSWRKRFRPREHHGRGGMLSASAETLPAGFRVSTLGTLQPPPAPPKKIMPEGENRRAGHGRGPAERGLLPGTPGPGRVERGEAEAGAPRSCAAAALTLRGERVCALTRRSVCSPAAADFSQLGRRGRRDWRPPRFGPTPADPPSSRPGSDGGVPVARGKWARPGDAGTLLLALGPTHLPLAAGLALPLQSRLPALPGLPLPASSGLGRFALGARCVAAVAHILQPLSSCFAT

SEQ ID NO: 918630 - protein, 156 aa, Homo sapiens [sequence omitted]

SEQ ID NO: 918631 - protein, 172 aa, Homo sapiens
SGCFSLALTLLLDHGPLRSRASSQMLALLLDQGALVFWDVSSFIKVAYPNQFPNGIKKPLPKGGRLSLKEDRKNRQEKTSCERKQGAQRAQRHIQCDSFEGQRVLTLTLHNDMEISVLATSSVSAALLTCTARDTDNIGNTVFLWDLFASSITDEFFSSKHNNSFSTGTSSS

SEQ ID NO: 918632 - protein, 172 aa, Homo sapiens; identical to SEQ ID NO: 918631

SEQ ID NO: 918633 - protein, 150 aa, Homo sapiens
MSKLAQRQNSMSLAPVDFECVSEENLVGNIEETLLTCLKCPSLSFQVARALEQPLQYSHKELVYSEGQQQLQEGEDATMSPRPRPRSLDLGAAVAVDALQLDDLSWASDPGLQPYFSISRYSMPTPQLHVESKQLTQPRYSEDTNDNSSY

SEQ ID NO: 918634 - protein, 150 aa, Homo sapiens; identical to SEQ ID NO: 918633

SEQ ID NO: 918635 - protein, 352 aa, Homo sapiens
MIVQLCAFWALNSASFQCPGKSTSPGRGGPEDFVNDDGGNDGRNNSVVAYYVPSTVVSSLYGTSFNFPNNSVKKVHYSPQNFTDNIGKALDILHAEVPRAFVNLVTVLEIVNLRELYQEKKVYCPRMILRSLCPCVLKFDDNSTELATLIEFNKKFQEKTHQLIESGRYDTREDFTVVVQPFFENVDMPKTSEGLPDNSFFAPDCFHFSSKSHSRAASALWNNMLEPVGQKTTRHKFENKINITCPNQVQPFLRTYKNSMQGHGTWLPCRDRAPSALHPTSVHALRPADIQVVAALGDSLTAGNGIGSKPDDLPDVTTQYRGLSYRESKPGFLSDSWVSKSNRKCTRKAPNP

SEQ ID NO: 918636 - protein, 622 aa, Homo sapiens
QAVRFGPSQGMCSEARLARRLRDALREEEPWAVEELLRCGADPNLVLEDGAAAVHLAAGARHPRGLRCLGALLRQGGDPNARSVEALTPLHVAAAWGCRRGLELLLSQGADPALRDQDGLRPLDLALQQGHLECARVLQDLDTRTRTRTRIGAETQEPEPAPGTPGLSGPTDETLDSIALQKQPCRGDNRDIGLEADPGPPSLPVPLETVDKHGSSASPPGHWDYSSDASFVTAVEVSGAEDPASDTPPWAGSLPPTRQGLLHVVHANQRVPRSQGTEAELNARLQALTLTPPNAAGFQSSPSSMPLLDRSPAHSPPRTPTPGASDCHCLWEHQTSIDSDMATLWLTEDEASSTGGREPVGPCRHLPVSTVSDLELLKGLRALGENPHPITPFTRQLYHQQLEEAQIAPGPEFSGHSLELAAALRTGCIPDVQADEDALAQQFEQPDPARRWREGVVKSSFTYLLLDPRETQDLPARAFSLTPAERLQTFIRAIFYVGKGTRARPYVHLWEALGHHGRSRKQACPKVRQILDIWASGCGVVSLHCFQHVVAVEAYTREACIVEALGIQTLTNQKQGHCYGVVAGWPPARRRRLGVHLLHRALLVFLAEGERQLHPQDIQARG

SEQ ID NO: 918637 - protein, 140 aa, Homo sapiens
AAATELAAAASEEYSGAVAKAAEPAWLAGDLSDEAVEELLRCGADPNLVLEDGAAAVHLAAGARHPRGLRCLGALLRQGGDPNARSVEALTPLHVAAAWGCRRGLELLLSQGADPALRDQVGRHCAGKERLGEPRGREGR

SEQ ID NO: 918638 - protein, 625 aa, Homo sapiens
AAATELAAAASEEYSGAVAKAAEPAWLAGDLSDEAVEELLRCGADPNLVLEDGAAAVHLAAGARHPRGLRCLGALLRQGGDPNARSVEALTPLHVAAAWGCRRGLELLLSQGADPALRDQDGLRPLDLALQQGHLECARVLQDLDTRTRTRTRIGAETQEPEPAPGTPGLSGPTDETLDSIALQKQPCRGDNRDIGLEADPGPPSLPVPLETVDKHGSSASPPGHWDYSSDASFVTAVEVSGAEDPASDTPPWAGSLPPTRQGLLHVVHANQRVPRSQGTEAELNARLQALTLTPPNAAGFQSSPSSMPLLDRSPAHSPPRTPTPGASDCHCLWEHQTSIDSDMATLWLTEDEASSTGGREPVGPCRHLPVSTVSDLELLKGLRALGENPHPITPFTRQLYHQQLEEAQIAPGPEFSGHSLELAAALRTGCIPDVQADEDALAQQFEQPDPARRWREGVVKSSFTYLLLDPRETQDLPARAFSLTPAERLQTFIRAIFYVGKGTRARPYVHLWEALGHHGRSRKQACPKVRQILDIWASGCGVVSLHCFQHVVAVEAYTREACIVEALGIQTLTNQKQGHCYGVVAGWPPARRRRLGVHLLHRALLVFLAEGERQLHPQDIQARG

SEQ ID NO: 918639 - protein, 139 aa, Homo sapiens
MVSIMVKNIQYLRKLKYPTNSTLTETHRAENKYINKLRKNTKIFCPNPPAILNGRHTGTPPGDIPYGKEVSYTCDPHPDRGMTFNLIGESTIRRTSEPHGNGVWSSPAPRCELPVGAGSHDALIVGKFYEVFAEEFCHL

SEQ ID NO: 918640 - protein, 199 aa, Homo sapiens
MKEKGLVSIQRLAACHSEVLTGKLHDVCLVVTGEVTNLRSKVSHLAISTLGDLFQALKKNMDQEAEEIARCLLQKMADTNEFIQRAAGQSLRAMVENVTLARSLVVLTSAGVYSVQQTCIKLLPSTRDVSGTAGHHRNPLIRKYAAEHLSAVLEQIGAEKLLSGTRDSTDMLVHNLVRLAQDSNQDTSDLDEIGDYYSK

SEQ ID NO: 918641 - protein, 148 aa, Homo sapiens
MTICAGCRIVPLVVHRESQELPLHPALRAPWRSLPRQSRLFYVSQGPQEEETVVFPELRDLPRGPAGVHLAVHVGNAAVALGGAVELPDLAYAEALRELLPDGRTQPVPHRQAHAVSPLRLAHRLLQQVAADLPDVLNHLGDGGLCTC

SEQ ID NO: 918642 - protein, 127 aa, Homo sapiens
MVAVGRRRKVRPPLRVQKKKDFRDVSLGRSLKSHLAKKSCEKKVDVLSKKCNDDRCQPAFSSSGRGPQAVVCMPVYRCGHLIASEDSLPFTLITKEVQKAVYGFMPNEWYWKGIRFAQLEDVLGRWV

SEQ ID NO: 918643 - protein, 168 aa, Homo sapiens
MVFLPWELHTKKGKMALLASNGCFIRCNEAGDIEAKSKTAGEEEMIKSFIDGNLGCFQSFALINSAAVHNIEYASICGCAGGPEDKFPESELPGGYELSLTDRKTASDPPYILIVFVSQFMEITVISRCAALELESGHRDPLRDMSHYHCQLPVLWVILIVECRSINL

SEQ ID NO: 918644 - protein, 149 aa, Homo sapiens
QPFSVWVKTEAGSGQTYAVRECLLRLHFCSSPPWCCSGSHTRPEPASASLRRSVPEPWPSNLMRSLPSLCSREPRRRGGSCTSGGSLLSSFRTHSTPLESGGSRGAESRLCGLPGFALAPVRAGLRPDRGSWRLCREGQPPALTTLETG

SEQ ID NO: 918645 - protein, 168 aa, Homo sapiens; identical to SEQ ID NO: 918643

SEQ ID NO: 918646 - protein, 149 aa, Homo sapiens; identical to SEQ ID NO: 918644

SEQ ID NO: 918647 - protein, 168 aa, Homo sapiens; identical to SEQ ID NO: 918643

SEQ ID NO: 918648 - protein, 166 aa, Homo sapiens
PGGCKWVWRGPALLPCCVSRPDSGLPTTSLDSAPAQLPAALVGPQLPKAKLRRPSSGLTVASPGSAPALRWHLQAPNSLRSVGSSRPSLGLLAASVGPSRPQVSLELGLEEQQVGLPGPSSVLSAASPGAKLPRVSLSRPSSSCLPVVSFSPAQLMALGGLPRPRF

SEQ ID NO: 918649 - protein, 783 aa, Homo sapiens
MPSLLLPEGMYRPSLCLTADSSHPALPCLRPLQSKAAPAFWQLVQVQLLPHGDLFRPNSCLLQRAEVSAPASHWPVEAQLMPLVASTGPSPPCWRPLQARPLPHSGLSRPTSSSPWPPGAMLLPLGSLCGPSSCLPVASVGQARASGQTFQAQRLLLCIFSRPWTSSSRPLQAQLFLSAPLQAQTVVKSASPGPAPASRRPLWMQKFLESASPGPAPPASQWPLSAQPSSCLLAAFPGPAFDFWWPLQASTRPGLLPPEGLHRPSLCLTADSPRPASSRLTAASRVQSSCLSAASAGPAPACQWPLQAHGAHSSQRPFQAQFFPSGGLSGPRTSSSRPLQTHLHPPGVLSGPSSSSRLRLQARLLPLNNLFGLSAYPSPGGLGRPTASSSQAPQAQVRPHGGLSRMSSCPPMASAGPKWSPVGGLLHAKLGPPGGLCRPKSSSSWPGIGPGRAASRPPRAQLHPLGGLSRCKTSSSQPLQAQLLLPPSGLFQPSPAHGSRWPSQAPLLTFGGLFRPELDLQWAFAGPASCLSKACMGPASASASQRTLHAQLALTSLRPPESKAPASRPLGQAQLPPASGLFRPMGLIPHNNLSRPSFSLPAASPGPEPPQVGLSRPTCSLLASSPGPALLPCCVSRPDSGLPTTSLDSAPAQLPAALVGPQLPKAKLRRPSSGLTVASPGSAPALRWHLQAPNSLRSVGSSRPSLGLLAASVGPSRPQVSLELGLEEQQVGLPGPSSVLSAASPGAKLPRVSLSRPSSSCLPVVSFSPAQLMALGGLPRPRF

SEQ ID NO: 918650 - protein, 143 aa, Homo sapiens
MLSALNPWAGLELLGPRDPPTSASKGAGITGMSHRGWSPNKLTKAEFTYFGLLYAFQGYFLLVNERLEDATSCLFSGDHTQEEPDSLLEVPVSFPLFLQHPFRRHLCFSAATREAQHAWRLALQGGIRLQGIGLTFFTQKMGF

SEQ ID NO: 918651 - protein, 173 aa, Homo sapiens
VHHFILQMGKLRLRQFKIQAAWLQHPSSLLLSCLFSHPPSDPIILPPSDIPWPPGLCRPLPATGLLPSAEQDSSSLGAHHAQMGPGTQLVLNKSSSSSSEHGCIPLAGGFGASVTECVQGVVAAPRGPLCPKMALLSPILDVVLTVALSLLLLGLILGLLCFFTCRLARPLST

SEQ ID NO: 918652 - protein, 140 aa, Homo sapiens [sequence omitted]

SEQ ID NO: 918653 - protein, 347 aa, Homo sapiens
MEPIYEEYLANHGTIVKPYYWLSFSLDCSNCPYHIRTGEEARVSLTEFCQIFGFPYGTTFPQTKHLTFYELKTSSGSLVQKGHASSCTGNYIHPESMLFEMNGYLDSAIYNNDSIRHIILYSNNSPCNEANHCCISKMYNFLITYPGITLSIYFSQLYHTEMDFPASAWNREALRSLASLWPRVVLSPISGGIWHSVLHSFISGVSGSHVFQPILTGRALADRHNAYEINAITGVKPYFTDVLLQTKRNPNTKAQEALESYPLNNAFPGQFFQMPSGQLQPNLPPDLRAPVVFVLVPLRDLPPMHMGQNPNKPRNIVRHLNMPQMSFQETKDLGRLPTGSLTQNQLM

SEQ ID NO: 918654 - protein, 646 aa, Homo sapiens
PPPPDSPGRLPRPGPGAEEGRDGLSARGAAAQQRDCTMGNQDGKLKRSAGDALHEGGGGAEDALGPRDVEATKKGSGGKKALGKHGKGGGGGGGGGESGKKKSKSDSRASVFSNLRIRKNLSKGKGAGGSREDVLDSQALQTGELDSAHSLLTKTPDLSLSADEAGLSDTECADPFEVTGPGGPGPAEARVGGRPIAEDVETAAGAQDGQRTSSGSDTDIYSFHSATEQEDLLSDIQQAIRLQQQQQQQLQLQLQQQQQQQQLQGAEEPAAPPTAVSPQPGAFLGLDRFLLGPSGGAGEAPGSPDTEQALSALSDLPESLAAEPREPQQPPSPGGLPVSEAPSLPAAQPAAKDSPSSTAFPFPEAGPGEEAAGAPVRGAGDTDEEGEEDAFEDAPRGSPGEEWAPEVGEDAPQRLGEEPEEEAQGPDAPAAASLPGSPAPSQRCFKPYPLITPCYIKTTTRQLSSPNHSPSQSPNQSPRIKRRPEPSLSRGSRTALASVAAPAKKHRADGGLAAGLSRSADWTEELGARTPRVGGSAHLLERGVASDSGGGVSPALAAKASGAPAAADGFQNVFTGERALLLASGSQVACQSGPSPATRPPWALEGGDLVVAHLFSVGNPFPPSELTPHGEMTWTYLLVFCVLTRS

SEQ ID NO: 918655 - protein, 271 aa, Homo sapiens
MWCPNFKFHLTQNFLIEDGAWGYLEDGQSQRKTTKPEGAPTEEKRPVGFRSSFGQREAAGSASPEPAGWRLAVRGGLVLTQWPQETVTHAVSTCVILWTAGGPREQLLWRRTQPRPGPMAAPAGCPLPPVGSASQRQREHWVQPLEGLEGACFGDSALVDPLSLCRRDLNGRSEGLQMSELSMALPGVCLSDLAFVEPPEPTLCSSESLICLGMSNAVVFIILVFSSINSKSQHQQCQHGRAHPNGFIMLNSLEITKISLLHTFMGTYISL

SEQ ID NO: 918656 - protein, 153 aa, Homo sapiens
GKYNACSEAPPGMFVKIANFLSLHTDWEGLNEVAEPYPRVSDSVGLSWVLRICIPNEALGEADAAGPGITFLKPLVQGDSKDYWTSEERDCFQFEGNKSYIRRYCWELSMWIAFGQSHGSFSVSAAEMEPLSSSSRPKGRAGSGSSSILLQSY

SEQ ID NO: 918657 - protein, 120 aa, Homo sapiens
MREGQRWDLNLGFTRFSLLPSLSPCLAGTELRLNNCSLGGRRMAGLAGEVKSDIGISQDYFMVLLHILHLMEITVQVMWNPTLWCQTVNCLSTGYPLNNCEIEFVMNEGLGFNSTTGEKV

SEQ ID NO: 918658 - protein, 703 aa, Homo sapiens
PFFSPVPGPTSSATNVSMVVSAGPLSSEKAEMNILEINEKLRPQLAEKKQQFRNLKEKCFLTQLSGFLANQQNKYKYEECKDLIKFMLRNERQFKEEKLAEQLKQAEELRQYKVLVHAQERELTQLREKLREGRDASRSLNEHLQALLTPDEPDKSQGQDLQEQLAEGCRLAQHLVQKLSPENDNDDNEDVQVEVAEKVQKSSAPREMQKAEEKEVPEDSLEECAITYSNSHGPYDSNQPHRKTKITFEEDKVDSTLIGSSSHVEREDAVHIIPENESDDEEEEEKGPVSPSSEKFVITDFLKPTSVSSSKSFSILLCSIAGEELRSFGGEGMNLQESEEEEVPQESWDEGYSTPSIPPEMLASYKSYSSTFHSLEEQQVCMAVDIGSEYSIVKVIKLQFMAQSQAMPVPTWTDCHDIELKAGHRWDQVKKEDQEATGPRLSRELLDEKGPEVLQDSLYRCYSTPSGCLELTDSCQPYRSAFYVLEQQRVGLAVDMDEIEKYQEVEEDQDPSCPRLSRELLDEKEPEVLQDSLGRWYSTPSGYLELPDLGQPYSSAVYSLEEQYLGLALDLDRIKKDQEEEEDQGPPCPRLSRELLEVVEPEVLQDSLDRCYSTPSSCLEQPDSCQPYGSSFYALEEKHVGFSLDVGVAITELRDVIATGRTYRHMLNGVLMEVEEPEVLQDSLDGCYSTPVCCCKKKKTFSA

SEQ ID NO: 918659 - protein, 149 aa, Homo sapiens
MHLPLDWRLAVSWDSLSRHTEICKDLFYLDESSVQWRIQMHKQTLMMKYKCSKEECGKLCRGEGKASPSLSEGSVKNSVHKRQINRRKRILKETDQTYLIIVYLIIVSHDTGAFRMKIQLPSGVQELVYHLEITERTGAWSMAKTRLWW

SEQ ID NO: 918660 - protein, 262 aa, Homo sapiens
CRRTTSPSLPLTLLLAAPPAQLLLPPGHDQSPCWHPGPALSPGTLGPLSWAMANSGLQLLGYFLALGGWVGIIASTALPQWKQSSYAGDAIITAVGLYEGLWMSCASQSTGQVQCKLYDSLLALDGHIQSARALMVVAVLLGFVAMVLSVVGMKCTRVGDSNPIAKGRVAIAGGALFILAGLCTLTAVSWYATLVTQEFFNPSTPVNARYEFGPALFVGWASAGLAVLGGSFLCCTCPEPERPNSSPQPYRPGPSAAAREYV

SEQ ID NO: 918661 - protein, 160 aa, Homo sapiens
MAPPVRLERPFPSRRFPGLLLAALVLLLSSFSDQCNVPEWLPFARPTNLTDDFEFPIGTYLNYECRPGYSGRPFSIICLKNSVWTSAKDKCKRKSCRNPPDPVNGMAHVIKDIQFRSQIKYSCPKGYRLIGSSSATCIISGNTVIWDNKTPVCDSDDIRE

SEQ ID NO: 918662 - protein, 174 aa, Homo sapiens
MAPPVRLERPFPSRRFPGLLLAALVLLLSSFSDQCNVPEWLPFARPTNLTDDFEFPIGTYLNYECRPGYSGRPFSIICLKNSVWTSAKDKCKRKSCRNPPDPVNGMAHVIKDIQFRSQIKYSCPKGYRLIGSSSATCIISGNTVIWDNKTPVCDSELKYAFLFLLPIHSNFSLE

SEQ ID NO: 918663 - protein, 197 aa, Homo sapiens
SLLTLRKEVTKIQYMSNCELPSSTAFVWKEAQGLTRGIHRKPKHCQALLLHLGQQDQCNVPEWLPFARPTNLTDDFEFPIGTYLNYECRPGYSGRPFSIICLKNSVWTSAKDKCKRKSCRNPPDPVNGMAHVIKDIQFRSQIKYSCPKGYRLIGSSSATCIISGNTVIWDNKTPVCDSELKYAFLFLLPIHSNFSLE

SEQ ID NO: 918664 - protein, 149 aa, Homo sapiens
AEHLGMAGCRSRAVPFREAAEAQREFKNCAGRPVVLGDLAHPLQLLAWVLSPSLPGASGMGWPLRVRGLPSLHPPTRNLLWPASAVRSPGSCQCLSLHTSPQAEGASSSLGQPREGLPQCSGGLKGSSSAARVDTEAKEAQRGKCVSSH

SEQ ID NO: 918665 - protein, 131 aa, Homo sapiens
LTLLQLMLGSLHPLSCTHCPTSPSEMNPVPQLEMQKSHVFCVTHTESCRLELFLFGHLGTCQVFFLKKWYLWVVCPLSSCHQMGWLLCGKMERREDYSDGTRKQDICGQKLPLRTKPVKDGKIHDGSLLEL

SEQ ID NO: 918666 - protein, 131 aa, Homo sapiens; identical to SEQ ID NO: 918665

SEQ ID NO: 918667 - protein, 143 aa, Homo sapiens
PGKSIAQMCLSYHFLVAVLNQWVPGIGEQRPSPPASRETILSDMDDDNQSMPTVIISSAMYPLLAFLLPYVTIPAPSLLLPGITFPEKLHSAALEPDSVPGSCSRGASQASTAPTSVGTVDPVVDIPGDLFTINLAGANSLGP

SEQ ID NO: 918668 - protein, 143 aa, Homo sapiens; identical to SEQ ID NO: 918667

SEQ ID NO: 918669 - protein, 247 aa, Homo sapiens
MNTSIASSSMSVLEKSFHSTQPAIGFFQTLLTATNPSTRRGSNEKLVQRMLTHPSVSTANPKRRGRGRAGAEGTLAAVFTEHTQKDLPERVPKRHNSTRSTKWRGMAVKRQTPTERLMGTAFQRQGWVAGTRAPRGPDQQKRPVTLSPSDKIQPQREGACETHEGLALDLHLTLFQREFSGRQHCQFPFISLEVNILEFSTHIHRATLLGHLHTHTPGPPLPLGMSKPDAVSHPGNTFFPAHTSATG

SEQ ID NO: 918670 - protein, 152 aa, Homo sapiens
LGSIRVTMGQMWAVVRSTLELFHTDNEEEGEYNKVTVEVTDQVYLPPKAKAEKEGEVHPYPSAPPHYYFEENDPPDLSFLEDTGGKAHLVDYNKACDDIRDNLHKATLLAQATAGLRVDKGNTLFPGACFNCGKHGHTKKNLKKKSASQATR

SEQ ID NO: 918671 - protein, 209 aa, Homo sapiens
MLGKLNTEEESNCQMRTLDSGIGTFPLPDSGNRSTGRYLCQPDSPEDAEPLLPLQSALSAVSSMRAQTLEREVPSSTDGQRPADSAIVHSTSDPIMTARGMRPLQSRLPKPASSGKVSSQKQNEAEPRPQTCSSFGYAEDPMASQPLPDWGSEVAATGTQDKAPRMCTYSASGGSNSDSDLDYGDNGFGAGRGQLVKALKSAAPEIETT

SEQ ID NO: 918672 - protein, 222 aa, Homo sapiens
MLGKLNTEEESNCQMRTLDSGIGTFPLPDSGNRSTGRYLCQPDSPEDAEPLLPLQSALSAVSSMRAQTLEREVPSSTDGQRPADSAIVHSTSDPIMTARGMRPLQSRLPKPASSGKVSSQKQNEAEPRPQTCSSFGYAEDPMASQPLPDWGSEVAATGTQDKAPRMCTYSASGGSNSDSDLDYGDNGFGAGRGQLVKALKSAAPGNNQRTCWPCRFLSLGSR

SEQ ID NO: 918673 - protein, 134 aa, Homo sapiens [sequence omitted]

SEQ ID NO: 918674 - protein, 134 aa, Homo sapiens [sequence omitted]

SEQ ID NO: 918675 - protein, 134 aa, Homo sapiens [sequence omitted]

SEQ ID NO: 918676 - protein, 52 aa, Homo sapiens
MKNKRRRRGEGGAQRREEAQRGGGEAERGSNGAKSESGERRNKKRSGGGRRE

SEQ ID NO: 918677 - protein, 238 aa, Homo sapiens
WAQVDEAWSLAGRAMLLEVQGTPPGFCTDFHSHLFLACFMLVLTQSSIFSLLSMAINRYLASHSRLRHKSLVTGTQTRGVTAVLWVLAFGTGLTPFLEWNSKDSTSNNCMEPWDGTMNESCCLVKCLFQNAVPMSYMVYFSFGGTTLQWEIYTAKSLAVMVGMFALCSLPVRTMDCVTLFQLAQAKDKPKWARKMTILLSHANLIVNPIVYNHWNRESCYTFHKIIYRKLPEGKKLEG

SEQ ID NO: 918678 - protein, 128 aa, Homo sapiens
MDLQYHCAWKVFVSPIKPIGTAGPRGSLWNGCNADVGGHVKAHLALPHLTEARPSGLLQAPHFDSLGARKFVVIFCGSCRKQKMHCLDGPSDSPPPRLERQRLPGRARKQVTDQLIQAKAAGRPGIWP

SEQ ID NO: 918679 - protein, 138 aa, Homo sapiens
MPEIFHLPINFLQLVSCAHFVVGESFNNCTTAYVGGYPYFHLPSENPGDTKTHLEFLHQRFRYFSHVYFQTRNNSDVASAALEIHISYTGLGFKCSQASIIILMFQCRSIPCQSLSNLPKILCGNSLLLKVLFLDGSK

SEQ ID NO: 918680 - protein, 129 aa, Homo sapiens
MPQNCWVLPAPAPKEALCTRPLLPGVGEGWRQQLRTVSFYLFSAFFSTFYLSTFFSTKKLKPGEHLHLIWTKRNGHNCLDELWHRHSAKKRKLAEEALQAKWTKTPHPCEGDRGLEIMNKSALSITHDA

SEQ ID NO: 918681 - protein, 306 aa, Homo sapiens
MGWGTSPHIRCASLLLVPKMLGKEGRLFVLGYALAAIYVGEYVGARPVANLRHNLNNVIASLGCTVELQINNTRAAWRISTAPLRAMFKDLLSSKELLRAETRNISATFEDLDAQVNSETGYTPEDTMDSGETAQGREARQAPASRLHLSTQKMYELKTKLRCSYVVNQAILSCRRWFDRKHEQCMKHIWVPLLTHLLCLPMKFKFFCGIAKVMEVWCRNRIPVEGNFGQTYDSLNQSIRGLDGEFSANIDFKEEKQAGVLGLNTSWERVSTEVRDYVYRQEARLEWALGLLHVLLSCTFLLVLHA

SEQ ID NO: 918682 - protein, 141 aa, Homo sapiens
MHAFLTCSKTISRLSLSGTVLNYKKGYHSGSHPIPPSLLKPVQHQGTYHGEDWQTDLTQMPPYRELQDLLVFIGTFNRWIEAFPTRTGKVLEVSKFLKKSFQDLDYQKVCKVTTDLTSQLRSHKIGSFPNYCCEEHHYCRT

SEQ ID NO: 918683 - protein, 1259 aa, Homo sapiens
YKDCMNSNEGIYSPGIKSSSLKEYPPCKTADLGSPCKEPHKTFVYDLDSHVDADDDPSTLALLQAVPNQSCRPHGSKLTHSVSDSLFGWETNRKHFLEGTSSVYPKERPEKLTSCASSCPLEMKLCPSVQTPQVQRERGPQGQGHGRMALNLQLSDTDDNETFDELHIESSDEKSPSDVSLAADTDKSVENLDVLVGFGKSLCGSPEEEEKQVPIPSETRPKTFSFIKQQRVVKRTSSEECVTVIFDAEDGEPIEFSSHQTGVVTVTRNEISINSTPAGPKAEHTELLPQGIACLQPRAAARDYTFFKRSEEDTEKNIPKDNVDNVPRVSTESFSSRTVTQNPQQQKLVKPTHNISCQSNSRSSAPMGIYQKQNLTKIPPRGKSSPQKSKLMEPEATTLLPSSGLVTLEKSPALAPGKLSRFMKTESSGPLFELRSDPHIPKHSAQLPHSSRMPSRRDWVQCPKSQTPGSRSRPAIESSDSGEPPTRDEHCGSGPEAGVKSPSPPPPPGRSVSLLARPSYDYSPAPSSTKSETRVPSETARTPFKSPLLKGISAPVISSNPATTEVQRKKPSVAFKKPIFTHPMPSPEAVIQTRCPAHAPSSSFTVMALGPPKVSPKRGVPKTSPRQTLGTPQRDIGLQTPRISPSTHEPLEMTSSKSVSPGRKGQLNDSASTPPKPSFLGVNESPSSQVSSSSSSSSPAKSHNSPHGCQSAHEKGLKTRLPVGLKVLMKSPQLLRKSSTVPGKHEKDSLNEASKSSVAVNKSKPEDSKNPASMEITAGERNVTLPDSQAQGSLADGLPLETALQEPLESSIPGSDGRDGVDNRSMRRSLSSSKPHLKPALGMNGAKARSHSFSTHSGDKPSTPPIEGSGKVRTQIITNTAERGNSLTRQNSSTESSPNKAPSAPMLESLPSVGRPSGHPSSGKGSLGSSGSFSSQHGSPSKLPLRIPPKSEGLLIPPGKEDQQAFTQGECPSANVAVLGEPGSDRRSCPPTPTDCPEALQSPGRTQHPSTFETSSTSKLETSGRHPDASATATDAVSSEAPLSPTIEEKVMLCIQENVEKGQVQTKPTSVEAKQKPGPSFASWFGFRKSRLPALSSRKMDISKTKVEKKDAKVLGFGNRQLKSERKKEKKKPELQCETENELIKDTKSADNPDGGLQSKNNRRTPQDIYNQLKIEPRNRHSPVAWLLSHRQLYQYSRKPQEKHENQSRYGSTKRLPDVPCIIKPQIVSISKAALVVSLKGGRENECVKMCNMLEIQSS

SEQ ID NO: 918684 - protein, 341 aa, Homo sapiens
NWLMTEQAQDLSANPTSLQPPVNLDPFACFPGQGPRLVPLHKGKSLRRALKERRLLEDFLRNHHYAVSRKHSSSGVVASESLTNYLDCQYFGKIYIGTLPQKFTLVFDTGSPDIWVPSVYCNSDACREKPPTLRSVQVLHPQNMGKSLSIQYGTGSMRGLLGYDTVTDLVEVMILLQVSNIVDPHQTVGLSTQEPGDVFTYSEFDGILGLAYPSLASEYALRLGFRNDQGSMLTLRAIDLSYYTGSLHWIPMTARILAVHCGQFDIDCGRLSSIPTAVFEIHGKKYPLPPSAYTSQDQGFCTSGFQGDYSSQQWILGNVFIWEYYSVFDRTNNRVGLAKAV

SEQ ID NO: 918685 - protein, 97 aa, Homo sapiens
GNILNIQQAIGATAGQYNEFDIDCGRLSSIPTAVFEIHGKKYPLPPSAYTSQDQGFCTSGFQGDYSSQQWILGNVFIWEYYSVFDRTNNRVGLAKAV

SEQ ID NO: 918686 - protein, 436 aa, Homo sapiens
MVAHACNPNTLALVAVPALEESAPQAKLSSEVRERRSDFPILSPGTRGIPPPKCRVLPAAPQGLLRPPSLTQRNPSRGGRRGWRSPPGVNRRALNAPSRPARLQQPPRPCGEVPGWRRRPQRSSWSDRGCSAAAGRSMTAVGVQVAGAWRGADPGCCPAVGGWGWEDGGRGVPTASAGVGLGVRAPPVPAPCCKPGSGGGWAGSNLGGPACLIIAAPEARTPAASARGLASTRGSQTSFGKIFLLFGVTSDLLAQRPLGQRQPRRSFFESFIRTLIITCVALAVVLSSVSICDGHWLLAEDRLFGLWHFCTTTNQTICFRDLGQAHVPGLAVGMGLVRSVGALAVVAAIFGLEFLMVSQLCEDKHSQCKWVMGSILLLVSFVLSSGGLLGFVILLRNQVTLIGFTLMFWCEFTASFLLFLNAISGLHINSITHPWE

SEQ ID NO: 918687 - protein, 192 aa, Homo sapiens
NHGRRRERNRKWVLRPYMGAGPLDCGQEGLSQRALGDQLEGHSRNHLKHRQETVDYMIKQREDFEPFVEDDIPFEKHVASLAKPGTFAGNDAIVAFARNHQLNVVIHQLNAPLWQIRGTEKSSVRELHIAYRYGEHYDSVRRINDNSEAPAHLQTDVSEASDFSRIPRPTGNRLRAVYLALKTSNVFVESWH

SEQ ID NO: 918688 - protein, 164 aa, Homo sapiens
MFYSEASSQTAAEPRAASQGQRGKASEVKRQGCTQEERRNSWPRAARGEGVDRLAAAQIQGPLQRHGAQMIACGTLLDSTSSLGLGSFRGGVECLDLSHTQLPSNTQLPPSSSRSTQLFLQVHSVPGSTRAGGSKRDHGGSPWPVHRLECKLDTQKLAGPELDI

SEQ ID NO: 918689 - protein, 358 aa, Homo sapiens [sequence omitted]

SEQ ID NO: 918690 - protein, 114 aa, Homo sapiens
EFAFEAKNSARGVKRAGPLDCRGSPHQLPTPVKASQLENRGAAGHPAKALPTNCLSEEEVAKKRKNLATYCRPVKAKHCQAGAPADVACSVRRKKPGPALAFEEKCSTLKSKAH

SEQ ID NO: 918691 - protein, 315 aa, Homo sapiens
ASAAVMAVRERAAAAMAALERRVPSLDDFAGQSWSSWVERADLPAADGAELEESSKNTKKLDAMTLIKEDMSIFGHCPAHDDFYLVVCNHCSQVVKPQAFQKHCERRHGPLSKLYGRAPPHLQPLPALRNAMYVNGQGPACRAPGSTKTSSREKGQGSRSRGHQPPEKTQKDNLCLFVPVVNLEKMSSLPKPDGHGIRVAPPSAFLSQPGGLTKDSPGKPPMAPPSKEPPGRENIEIIPSEGSSHWAEGSPPEKEPSGTRLPPKTHRKMARKECDLNRQCGVINPETKKICTRLLTCKVTPFPARPWPLRRSALH

SEQ ID NO: 918692 - protein, 283 aa, Homo sapiens
ASAAVMAVRERAAAAMAALERRVPSLDDFAGQSWSSWVERADLPAADGAELEESSKNTKKLDAMTLIKEDMSIFGHCPAHDDFYLVVCNHCSQVVKPQAFQKHCERRHGPLSKLYGRAPPHLQPLPALRNAMYVNGQGPACRAPGSTKTSSREKGQGSRSRGHQPPEKTQKDNLCQPGGLTKDSPGKPPMAPPSKEPPGRENIEIIPSEGSSHWAEGSPPEKEPSGTRLPPKTHRKMARKECDLNRQCGVINPETKKICTRLLTCKVTPFPARPWPLRRSALH

SEQ ID NO: 918693 - protein, 349 aa, Homo sapiens
MPRGGTQASSEESEEEGTSDDLHPPPDCHYATRPPRPQAFCTFGSRLVSPGCYVFSRRLDRFCSALSSMLERHLSTHMWKKIPPAAEPPAHLVNSPLSAPLSPSSTGTCPRLPGPTLRPACPASMPPTKDNLVPSYPAGSPSVAAACSQAECMGGSQAITSPLPANTPSPSFSKLPPSKASKSSKGKDGVEVEAPSRKRKLSPGPTTLKRTCILEPTGKGKPSGCRGLSAKTKTALSMGLNGTMGPRVKRAGPLDCRGSPHQLPTPVKASQLENRGAAGHPAKALPTNCLSEEEVAKKRKNLATYCRPVKAKHCQAGAPADVACSVRRKKPGPALAFEEKCSTLKSKAH

SEQ ID NO: 918694 - protein, 349 aa, Homo sapiens; identical to SEQ ID NO: 918693

SEQ ID NO: 918695 - protein, 209 aa, Homo sapiens
MPRGGTQASSEESEEEGTSDDLHPPPDCHYATRPPRPQAFCTFGSRLVSPGCYVFSRRLDRFCSALSSMLERHLSTHMWKKIPPAAEPPAHLVNSPLSAPLSPSSTGTCPRLPGPTLRPACPASMPPTKDNLVPSYPAGSPSVAAACSQAECMGGSQAITSPLPANTPSPSFSKLPPSKASKSSKGKDGVEVEAPSRKRKLSPGCCRFL

SEQ ID NO: 918696 - protein, 119 aa, Homo sapiens
ICMFVSVWMWVLFPTGCFSGELWFLPSVLLFVALSHGVLQVPESLLAKDPGRDTARDESLEPKVCPAHTYVQGQCPQSSSSARTSSVAASHKCSARDVHRFLSNLRLHKGRTAQPPTSQ

SEQ ID NO: 918697 - protein, 132 aa, Homo sapiens
MPLALRFGDLVIFRMLSTLVRGGDIKAASCSLQLPSSFFSHRWWQPPPTAVSGSFRGGSNTSRGEVPSSHITDMAATVGLGIKGSPWMTLTGQLPPPCKKAWASLLEDESPPGSVVSADFRHVRESSARLSL

SEQ ID NO: 918698 - protein, 143 aa, Homo sapiens
MMLAVALRKCMLLWVEERKMQTVGSLTEFLGRTDMTSRRVKTVEGEKRPHTFQKMMSDAVGSLKHEDWKTENFSYMSPNHRVSVGERLKLDFLDLLLHSFIRSLADQKNTFIMQTVVYHKDSIFPPSQVTSHAPGQTDHPTFK

SEQ ID NO: 918699 - protein, 270 aa, Homo sapiens
QQLRHAVAGSQCPGMTTTMSPHACYGQVHPQLSPSTISGALNQPDGGGYSSFGLVQPRPPLEPSPTGRHRGVRAVSRAGLRRHRPCHGCHAVQSGNSRGCAKGAMGNMGSVPPQPPPQDAGGAPDHSMLYYYGQIHMYEQDGGLENLGSCQVMRSQPPQPQACQDSIQPQPLPSPGVNQVSSTVDSQLLEAPQIDFDAIMDDGDHSSLFSGALSPSLLHSLSQNSSRLTTPRNSLTLPSIPAGISNMAVGDMSSMLTSLAEESKFLNMMT

SEQ ID NO: 918700 - protein, 153 aa, Homo sapiens
MRTKGINVAAVRAQYALGQGPPTTGLWSGTSPWPVGNWAAQQETANSIVNCSCEGSRMCAPYENLMPDDLRWNSVIPKPSPHLICGKIVFHKTKHRIKLWFYDYVYTKNTHKVFFNALKNFLQHFNLRKGRDEKDALSVMLYSCQRTGTQASH

SEQ ID NO: 918701 - protein, 125 aa, Homo sapiens
MLENVLASHSKMQGALEKVQIELGRRDSEIAGLKKERDLNQQRVQKLEAEVDQWQARMLVMEDQHNSEIESLQKALGVAREDNRKLAMSLEQALQTNNHLQTKLDHIQEQLESKELERQNLETFK

SEQ ID NO: 918702 - protein, 125 aa, Homo sapiens; identical to SEQ ID NO: 918701

SEQ ID NO: 918703 - protein, 176 aa, Homo sapiens [sequence omitted]

SEQ ID NO: 918704 - protein, 125 aa, Homo sapiens; identical to SEQ ID NO: 918701

SEQ ID NO: 918705 - protein, 125 aa, Homo sapiens; identical to SEQ ID NO: 918701

SEQ ID NO: 918706 - protein, 130 aa, Homo sapiens
MLLWGSHRAYFCQRGVTSQFQQAFPSSSHACLLAHIVSGAVASDRLSEKSHFSSCPQRVSREKSCLKSKAENNSLFLVCPKSNDKGSCKRNAEGELKQTEEEKTQKRRQGEDGGRDGSDVATRQEIPRMP

SEQ ID NO: 918707 - protein, 316 aa, Homo sapiens
MVRCNNEAKDVSSIIVAFGYPFRLHRIQYEMPLCDEESSSKTMHLMGDFSAPAEFFVTLGIFSFFYTMAALVIYLRFHNLYTENKRFPLVDFCVTVSFTFFWLVAAAAWGKGLTDVKGATRPSSLTAAMSVCHGEEAVCSAGATPSMGLANISVLFGFINFFLWAGNCWFVFKETPWHGQGQGQDQDQDQDQGQGPSQESAAEQGAVEKQHQLLETWAALSVASYPPSCWSHEWQELSASCAVPGPRYLTWGLTCTLTVSENQPLLQSLSPLKSRAGRCYWCFFTLRPSSIFVFSVYPLPDTSFSPSLGPKAENQC

SEQ ID NO: 918708 - protein, 450 aa, Homo sapiens
RPQPLRARTAAPPRPSQPASQTGLRPTDGRSRSGPARLLCPGPAAPRSPAVSAASRPESQAPTPRPALAAPACPRPRAPGRTADKSPRQQVDRLLVGLRWRRLEEPLGFIKVLQWLFAIFAFGSCGSYSGETGAMVRCNNEAKDVSSIIVAFGYPFRLHRIQYEMPLCDEESSSKTMHLMGDFSAPAEFFVTLGIFSFFYTMAALVIYLRFHNLYTENKRFPLVDFCVTVSFTFFWLVAAAAWGKGLTDVKGATRPSSLTAAMSVCHGEEAVCSAGATPSMGLANISVLFGFINFFLWAGNCWFVFKETPWHGQGQGQDQDQDQDQGQGPSQESAAEQGAVEKQHQLLETWAALSVASYPPSCWSHEWQELSASCAVPGPRYLTWGLTCTLTVSENQPLLQSLSPLKSRAGRCYWCFFTLRPSSIFVFSVYPLPDTSFSPSLGPKAENQC

SEQ ID NO: 918709 - protein, 138 aa, Homo sapiens
MRIPFSLHILTNICVFNVLDLGHSDRIPVKKPILPLHIPVSGQRGEGSYGPVNVRSQILKPPIQVGIGHTSLTLISFVPLTFSQGAGIPSKQVQVQPLDLYFASLQRIPAFSPQAFSAEAPSIMEQNQIISTESFSIS

SEQ ID NO: 918710 - protein, 144 aa, Homo sapiens
MGHGTGCLCGNLNNAQGSQCLATLDLRVSVLEAGSPRSKCQQQALGGPASWFIDGHRLPMSSHGGRGKEGFPTHLPFTLRSPASYCSKLSHGQEVSQSSPRASIGAAYKKPLEAASLWNPLPLLATAYRTSSPPFLSCHCLAAP

SEQ ID NO: 918711 - protein, 271 aa, Homo sapiens
GHQLPVDMCFPRPPPRVLRKYQNKQDSTGGSWSLDGVSVFLASSQRPCCLREVTDRAPPAPAPMLGHGSYQQGGFTVRETRAGHAAAAPASRARASARECACLYPCSRVERSPMADSPCLCGAWHVDDFQVNMQQRQPRAWCRVEASQAGLCQHLWQPLQRVPAAAEDDLAKDMGFTVDIIVQCGKPGPTQTLLTLLPTQLPSSSDSSRPSTPSTQAGLNLQERRAHPGWDLTFPRSHNCGAADLGPGSPNSDEMQAASCPHSSVSCCPAV

SEQ ID NO: 918712 - protein, 805 aa, Homo sapiens
VSPRTILGTQQDLTMKCNEEEKSLSSEAFSKVSLTNLRRSAVPDLSSDLGMNIFKKFKSRKEDRERKGSIPFHHTGKRRPRRMGVPFLLHEDHLDVSPTRSTFSFGSFSGLGEDRRGIEKGGWQTTILGKLTRRGSSDAATEMESLSARHSHSHHTLVSDLPDPSNSHGENTVKEVRSQISTITVATFNTTLASFNVGYADFFNEHMRKLCNQVPIPEMPHEPLACANLPRSLTDSCINYSYLEDTEHIDGTNNFVHKNGMLDLSVVLKAVYLVLNHDISSRICDVALNIVECLLQLGVVPCVEKNRKKSENKENETLEKRPSEGAFQFKGVSGSSTCGFGGPAVSGAGDGGGEEGGGGDGGGGGGDGGGGGGGGGGPYEKNDKNQEKDESTPVSNHRLALTMLIKIVKSLGCAYGCGEGHRGLSGDRLRHQAQNCLTKLYKLDKMQFRQTMRDYVNKDSLNNVVDFLHALLGFCMEPVTDNKAGFGNNFTTVDNKSTAQNVEGIIVSAMFKSLITRCASTTHELHSPENLLVQFIKEAHGNVFRRVALSALLDSAEKLAPGKKVEENEQESKPAGSKSDEQMQGANLGRKDFWRKMFKSQSAASDTSSQSEQDTSECTTAHSGTTSDRRARSRSRRISLRKKLKLPIGLADGVEDLLDISSVDRLSFIRQSSKVKFTSAVKLSEGGPGSGMENGRDEEENFFKRLGCHSFDDHLSPNQDGGKSKNVVNLGAIRQGMKRFQFLLNCCEPGTIPDASILAAALDLLSVVFYYPSSEAYFCQFVHVISVQFCALDGETLRSFGEEAP

SEQ ID NO: 918713 - protein, 192 aa, Homo sapiens
MARGGPYTETESQPQEGRRRTDQLAAWERSQVSGRTPVVAIFIGDSASRTRVNFFFRASGSQGWSRELIIRIRVGPPASRLCSARHQCTRRPRLPSPPVVAVNTAVAAEVSRAVGQAAVRVVLQGAIQLIFRRPDGPRLLLSNDSLELLVPGVTRAIQRDGGCEEVAALLPQLLGLCVEAAGTAAGGRRQPT

SEQ ID NO: 918714 - protein, 172 aa, Homo sapiens
YINNPLYIMKQKVLQQASSAKPNQHFCEEVSSLPSDLTASASGGGSAVKPHYWKVHLVKFPLRAGDVLEDSSDSVAIMTSNSDSDIPSGSQGVLFLASLKNVNIGWARWLTPVIPALWEAEVAGSFEVRSLRPAWPTWFHGMIWLNPQTKAAEPRTAYWTSPYEKQKCIEAN

SEQ ID NO: 918715 - protein, 138 aa, Homo sapiens
MEGVLVPVHIHDLQSQLTLRKASQDVCGSSSPEEEEINASGAAVIGLKEQLTLGAEFSFHCVEYLNASPLEKQGESGQPLQIYKREKPNNSIKKWAKDTNRYFSKEGIDVDNNHMKESSTSLIIGEVQVKTTAKKRRK

SEQ ID NO: 918716 - protein, 156 aa, Homo sapiens
MTPRSIFGVALPWNHPFSLFHGPCQLSQICTHVYTVVNLRTGPEGSWLLKHSRATPGALKNPNSRSKFEFGSACRTQISKEAALAQISQGSGNNESINKDSSHLSSLYYGQAYTCIVTKQVDGCGVIQKNVILTHCERQRASKFGPSHPVWAVWPQ

SEQ ID NO: 918717 - protein, 156 aa, Homo sapiens; identical to SEQ ID NO: 918716

SEQ ID NO: 918718 - protein, 255 aa, Homo sapiens
MPQPRSSWDYSFMMVKNSTTFAQKKVIHILISLCTQGNSSPQGIALGRNYDSCQIRAPGAVSQHCSMLAPGHLYHTTAHNFTRSSGKDEVIRHQLSLYTAILGFYLQRIRKTPRRAFGDAWSPAQLSPGSGCSPDCAGSFLRKHHGVHPCALSHDPAASSPGLTCFAGYFPARPDPEAVGGPPGYFSRGSETQCVVVITFASHAKGPRFETGRKQSGSGSGSGSGLFGRDCDGWEHRWTHVSKNRAPQVSNSYPF

SEQ ID NO: 918719 - protein, 255 aa, Homo sapiens; identical to SEQ ID NO: 918718

SEQ ID NO: 918720 - protein, 158 aa, Homo sapiens
ISHMLQSLIRSLYTESCRLSAQAVLLRNDELLYWQPPQGEKLNQVHKEEALGWQAELVGFTFDVVSSLKLQQCHMHPVTVSGRSCKAFWEPHIISRGQLSCVPGQNHSSRKHQQASQEAEARESLICIRNSVKMNCCVLKGSKLSLIPSQISCITLFY

SEQ ID NO: 918721 - protein, 155 aa, Homo sapiens
MRLSVLRLLLLLAEGGKKGEGGTQAEDARGQARFSHLPAATPTPPILPPPSVLSSYPRRLDNRLLSGSARVGQGPRAPLQLTCGSPWQPPPLVRAAWARESARPGCATGPTGRPGARVKNTVEASSKPANKFPFSTALSGQGLFYEHLRCCTRGV

SEQ ID NO: 918722 - protein, 241 aa, Homo sapiens
MQWSPTPGASACLGWASSLACSTAPTLLGRAGRGPLMAAKWFKEFPLNLKTVSERAKPGGGGGKLRKNSEAGGAGPGPGKGRKNSAAELGSGRAGVGPKDSRLSRDSLQGLIQAAAGKGRKNSRATEEEPHRGATKSSGCSTYINRLIKVDTQEKNGKSNYPSSSSSSSSSSSSASSSPSSLGPELDKGKIIKQQETVIILEDYADPYDAKRTKGQRDAERVGENDGYMEPYDAQQMITGL

SEQ ID NO: 918723 - protein, 185 aa, Homo sapiens
MGSNHSWTLVSVSGQHWPVDPLAESPGPFRAAKGQQERVSLVFLLCILRAAPPLVLARWPVTRGPGGRSTTEPLGAGFSEDLLVPRSPTLKAQASPGCAVLTAMLSWAWTPSSALISHLCLSPPRGEPPHAEAGLGAGYVVLIVVAIFVLVAGTATLLIVRYQRMNGRYNFKIQSNNFSYQVFYE

SEQ ID NO: 918724 - protein, 171 aa, Homo sapiens
MRMNVQMTRTDARAPGRSKSWRCLRKSVHATSLNLQEGHNIVFSKESFKKLLPYENSLAIYILWVLTSVSSRLTLAGRGFHPFLNGHQNSDEFMTFSLRNYPRPKILIGKDGNILFPASCVSLQPYLIISLSPFLAHHISDPGSFRFWEQVKLFPVSGPLHLLISLTQSVT

SEQ ID NO: 918725 - protein, 140 aa, Homo sapiens
MGRVCGGDGLPCLLLTVTIDPGICASFPHSPRAPCEVIAPSIHCSERWSSDKLKSEDWAESTKPAPSTKSLLLSSFPLADMGNSSPSSFGAHTPRLLVPAIALGQDGDGQRLIRRTLQGFAWTALGFTAKRASQSPSSSH

SEQ ID NO: 918726 - protein, 158 aa, Homo sapiens
ISPSLIIGMDSRPRVSPVDLPFPDAIILVFTGFALTYWLPHQLCWILIGFDISIYLLSHQSALEMGIEGRPVSRGGWEQSLRIPACSPLSQSVAFPGHLPRPPGELSCSDTPQLTQRRRAQGWWLQHPRKCASKVYSISNFTSPSQSFLECLVEDRGL

SEQ ID NO: 918727 - protein, 144 aa, Homo sapiens
HTGFFQMNAQKAGKYLESDWFVLENGQTRRVCTDPFRSPRVGRRREWETGKAGLWGGVAGRGKARMFPNNEIIADLSEPPSWDTCLTCTPEGEEWAGNWGVGRTWKATPMGKVDMTPPAIKLDDAAMLILQTRNKSVIENLYRQ

SEQ ID NO: 918728 - protein, 150 aa, Homo sapiens
MNYRHSAKETLCKCDYYKCQIETPTEWSPLRKALKQALLVTGLPRPPPWSPALTLTHFLFPGPVTSGGRASPRPKFLFLGKLSAPRPCTTSECPGSPLNFENQKLQGKWHSFLPCSSVISVPCNCAGVFTGPLVFPCLCFMLQRLFIRQS

SEQ ID NO: 918729 - protein, 256 aa, Homo sapiens
KVSYTQSRHQNLEMKQLLDSPCEPADGGLKSETLAKRRSSKDLLGKPPQLYDTPYEPAEGGPRAEGKARPPDSRLPENDERPAAEYEQPWEWKKEQIVRALSVQFEGAERPSFREETVRQHHRQKSWTQKILKPALSDHSEGEKVDPGLPLEKQPWYHGAISRAEAESRLQPCKEAGYLVRNSESGNSRYSIALKTSQGCVHIIVAQTKDNKYTLNQTSAVFDSIPEVVHYYSNEKLPFKGAEHMTLLYPVHSKLH

SEQ ID NO: 918730 - protein, 398 aa, Homo sapiens
LSQNLYKMILCKLEEDCAGAREQSGHAEEGTQTQHPKIWLPRALRQTYIRKILRLLLKGGGPREGPPTSNSRNVQLQVKPPCGPGVDRTPTAAGRVRKPLGAAQSITLIPQGKPKPQAIWTHDGCALDTRRVSVRNGEQDSILFIREAQRADSGRYQLRVQLGGLEATATIDILVIERPGPPQSIKLVDVWGFSATLEWTPPQDTGNTALLGYTVQKADTKSGLWFTVLEHYHRTSCIVSDLIIGNSYAFRVFAENQCGLSETAPITTDLAHIQKAEATCQPLLVPSATVYKTKGFAQRDFSEAPKFTQPLADCTTVTGYNTQLFCCVRASPRPKIIWLKNKMDIQGNPKYRALTHLGICSLEIRKPGPFDGGIYTCKAVNPLGEASVDCRVDVKVPN

SEQ ID NO: 918731 - protein, 237 aa, Homo sapiens
ASAMLLKIQEMGSTVEVLNDQLTKKCSELSCMLQTVTMEKARIIADHQAILQVEQKMMTQTFQEQNLLLDAAHASITNELQTVQNEKTQLQAHLDHLILEHNQCIQKAQDAEKRTAVQKELLESTIARLRGELEASMQEKKSLLEEKERFQREVNKTEKEIVQERCNLEKELAKNKLAQQKVEKITESKNKLAYENGKLQIKVKQLEEQVQSFTDTSLQNDHLRKMNKYLQTKYAQV

SEQ ID NO: 918732 - protein, 141 aa, Homo sapiens
MVRLIVFNRIWLIGEQGLPGQPGIQGKRGHRGAQGDQGPCGDPGLKGQPGEYGVQGLTGFQGFPGPKGPEGDAGIVGISGPKGPIGHRGNTGPLGREGIIGPTGRTKFGYEIKHKNETMIGQVMLGKFSNIDNSINKQGAQ

SEQ ID NO: 918733 - protein, 168 aa, Homo sapiens
MASSTLNDQECLRRLLLWTCLQSSIFSLPVLRHVGYNTSASASSSTNRANITNDLLHRDVMRAKSYEFMPLKHLLKMLIISRSKELEIGSYAQSHGWWHATAPHWLFAGGLCSSPHGPLHRIASNREAVSPRPWSSCPGFSMVTLSVVTMGTSPKKGGLPGVTENFKK

SEQ ID NO: 918734 - protein, 165 aa, Homo sapiens
PPGCFSSKTTCCSQLMTPWTGMAQTSTLAKWSAYLEQQSTLSTSPLAAELQEVLGPVVLMQDKATGPEAPLDPEPSPSKERCPPIPNGAWYTDGSSRGAAAAWTRPLLQSNLVLPPYVLKLATWMEPSVFPAHIKICTRRVQISKSTASRGPSWDVPSLWGLMKV

SEQ ID NO: 918735 - protein, 237 aa, Homo sapiens
RNHSCLPQASLEAKFQDPPNGGLNPIYVFSYMVVCQYLWGIGSMTSYGCQKSMDAQEFLHMAPGEVTITVRLIRSFEHRNFKPVVYHGVNLDQTVKEFIVFLKQDALKIIHQAHKSKTNELVLSLEDDERLLLKEDSTLKAAGIEEEDENDVHSDLLAEDSRCLLSKYAECKWLFSEGMLRILLRVILSDGLEKFSSSSFGFLSALQIPVEHSTPDVSGVFACGPSTKIRTSKRFDQ

SEQ ID NO: 918736 - protein, 264 aa, Homo sapiens
MVFTQAPAEIMGHLRIRSLLARQCLAEFLGVFVLMLLTQGAVAQAVTSGETKGNFFTMFLAGSLAVTIAIYVGGNVSGAHLNPAFSLAMCIVGRLPWVKLPIYILVQLLSAFCASGATYVLYHDALQNYTGGNLTVTGPKETASIFATYPAPYLSLNNGFLDQVLGTGMLIVGLLAILDRRNKGVPAGLEPVVVGMLILALGLSMGANCGIPLNPARDLGPRLFTYVAGWGPEVFRWETDSPGAGLHSPSSAKGSVPGSTALCL

SEQ ID NO: 918737 - protein, 168 aa, Homo sapiens
QIQSRATAKPGGRGMPPGQQWFRAVLRSTKPEPGRCMLRGPIPAHTVPPLSEAQHLLSRISSEGRLHCPRGTQPPNEPQGRVWKARQYYGQIMDLGIAADAIGERKWNNRGPILPNVIHWSYPYGNRQYTDLEWKQIITGSPDSIVSQNIEPRKYLRSHLIQSPLFYQ

SEQ ID NO: 918738 - protein, 151 aa, Homo sapiens
EPYQLLRPTMGKGPTEGHTGPIILDPEPPQRPQGTAVFPWWNQHSVQRADKKMAEQERSGERGAPESMSAVVLLKQRELVVQFSLSWRCAVCECSEYNDVPVLSVQGHGSHFAGHIDLKVGLGFPLCITVANAAVDITHTIFLNGLMEVAR

SEQ ID NO: 918739 - protein, 1935 aa, Homo sapiens
GEGFTRLLCFFFQWEPPNAAVSSPSMNSFTLPSKNKREAPVVARAALFLECARFVHRCNRGNWPEWMKGHHVNITKKGLSRGRSPIVGNKRNQKLQWNAAKLFYQWGDAIGVRLNELCHGESESPANLLGLIYDEETKRRLRKEDEEEDFLDDSKETPFTTRTPACTVNPSKCGCPFALKMAACQLLLEITTFLRETFSCLPRPRTEPLVDLESCRLRLDPELDRHRYERKISFAGVLDENEDSKDSLHSSSHTLKSDAGVEEKKVPSRKIRIGGSRLLQIKGTRSFQVKKGGSLSSIRRVGSLKSSKLSRQDSESEAEELQLSQSRDTVTDLEGSPWSASEPSIEPEGMSNAGAEENYHRNMSWLHVMILLCNQQSFICTHVDYCHPHCYLHHSRSCARLVRAIKLLYGDSVDSLRESSNISSVALRGKKQKECSDKSCLRTPSLKKRVSDANLEGKKDSGMLKYIRLQVMSLSPAPLSLLIKAAPILTEEMYGDIQPAAWELLLSMDEHMAGAAAAMFLLCAVKVPEAVSDMLMSEFHHPETVQRLNAVLKFHTLWRFRYQVWPRMEEGAQQIFKIPPPSINFTLPSPVLGMPSVPMFDPPWVPQCSGSVQDPINEDQSVSNRHFQFHGKSFSARAVSRSHQRAEHILKNLQQEEEKKRLGREASLITAIPITQEACYEPTCTPNSEPEEEEEVTNLASRRLSVSPSCTSSTSHRNYSFRRGSVWSVRSAVSAEDEEHTTEHTPNHHVPQPPQAVFPACICAAVLPIVHLMEDGEVREDGVAVSAVAQQVLWNCLIEDPSTVLRHFLEKLTISNRQDELMYMLRKLLLNIGDFPAQTSHILFNYLVGLIMYFVRTPCEWGMDAISATLTFLWEVVGYVEGLFFKDLKQTMKKEQCEVKLLVTASMPGTKTLVVHGQNECDIPTQLPVHEDTQFEALLKECLEFFNIPESQSTHYFLMDKRWNLIHYNKTYVRDIYPFRRSVSPQLNLVHMHPEKGQELIQKQVFTRKLEEVGRVLFLISLTQKIPTAHKQSHVSMLQEDLLRLPSFPRSAIDAEFSLFSDPQAGKELFGLDTLQKSLWIQLLEEMFLGMPSEFPWGDEIMLFLNVFNGALILHPEDSALLRQYAATVINTAVHFNHLFSLSGYQWILPTMLQVYSDYESNPQLRQAIEFACHQFYILHRKPFVLQLFASVAPLLEFPDAANNGPSKGVSAQCLFDLLQSLEGETTDILDILELVKAEKPLKSLDFCYGNEDLTFSISEAIKLCVTVVAYAPESFRSLQMLMVLEALVPCYLQKLKRQTSQVETVPAAREEIAATAALATSLQALLYSVEVLTRPMTAPQMSRCDQGHKGTTTANHTMSSGVNTRYQEQGAKLHFIRENLHLLEEGQGIPREELDERIAREEFRRPRESLLNICTEFYKHCGPRLKILQNLAGEPRVIALELLDVKSHMRLAEIAHSLLKLAPYDTQTMESRGLRRYIMEMLPITDWTAEAVRPALILILKRLDRMFNKIHKMPTLRRQVEWEPASNLIEGVCLTLQRQPIISFLPHLRSLINVCVNLVMGVVGPSSVADGLPLLHLSPYLSPPLPFSTAVVRLVALQIQALKEDFPLSHVISPFTNQERREGMLLNLLIPFVLTVGSGSKDSPWLEQPEVQLLLQTVINVLLPPRIISTSRSKNFMLESSPAHCSTPGDAGKDLRREGLAESTSQAAYLALKVILVCFERQLGSQWYWLSLQVKEMALRKVGGLALWDFLDFIVRTRIPIFVLLRPFIQCKLLAQPAENHEELSARQHIADQLERRFIPRPLCKSSLIAEFNSELKILKEAVHSGSAYQGKTSISTVGTSTSAYRLSLATMSRSNTGTGTVWEQDSEPSQQASQDTLSRTDEEDEENDSISMPSVVSEQEAYLLSAIGRRRFSSHVSSMSVPQAEVGMLPSQR

SEQ ID NO: 918740 - protein, 1508 aa, Homo sapiens
GEGFTRLLCFFFQWEPPNAAVSSPSMNSFTLPSKNKREAPVVARAALFLECARFVHRCNRGNWPEWMKGHHVNITKKGLSRGRSPIVGNKRNQKLQWNAAKLFYQWGDAIGVRLNELCHGESESPANLLGLIYDEETKRRLRKEDEEEDFLDDSKETPFTTRTPACTVNPSKCGCPFALKMAACQLLLEITTFLRETFSCLPRPRTEPLVDLESCRLRLDPELDRHRYERKISFAGVLDENEDSKDSLHSSSHTLKSDAGVEEKKVPSRKIRIGGSRLLQIKGTRSFQVKKGGSLSSIRRVGSLKSSKLSRQDSESEAEELQLSQSRDTVTDLEGSPWSASEPSIEPEGMSNAGAEENYHRNMSWLHVMILLCNQQSFICTHVDYCHPHCYLHHSRSCARLVRAIKLLYGDSVDSLRESSNISSVALRGKKQKECSDKSCLRTPSLKKRVSDANLEGKKDSGMLKYIRLQVMSLSPAPLSLLIKAAPILTEEMYGDIQPAAWELLLSMDEHMAGAAAAMFLLCAVKVPEAVSDMLMSEFHHPETVQRLNAVLKFHTLWRFRYQVWPRMEEGAQQIFKIPPPSINFTLPSPVLGMPSVPMFDPPWVPQCSGSVQDPINEDQSKSFSARAVSRSHQRAEHILKNLQQEEEKKRLGREASLITAIPITQEACYEPTCTPNSEPEEEEEVTNLASRRLSVSPSCTSSTSHRNYSFRRGSVWSVRSAVSAEDEEHTTEHTPNHHVPQPPQAVFPACICAAVLPIVHLMEDGEVREDGVAVSAVAQQVLWNCLIEDPSTVLRHFLEKLTISNRQDELMYMLRKLLLNIGDFPAQTSHILFNYLVGLIMYFVRTPCEWGMDAISATLTFLWEVVGYVEGLFFKDLKQTMKKEQCEVKLLVTASMPGTKTLVVHGQNECDIPTQLPVHEDTQFEALLKECLEFFNIPESQSTHYFLMDKRWNLIHYNKTYVRDIYPFRRSVSPQLNLVHMHPEKGQELIQKQVFTRKLEEVGRVLFLISLTQKIPTAHKQSHVSMLQEDLLRLPSFPRSAIDAEFSLFSDPQAGKELFGLDTLQKSLWIQLLEEMFLGMPSEFPWGDEIMLFLNVFNGALILHPEDSALLRQYAATVINTAVHFNHLFSLSGYQWILPTMLQVYSDYESNPQLRQAIEFACHQFYILHRKPFVLQLFASVAPLLEFPDAANNGPSKGVSAQCLFDLLQSLEGETTDILDILELVKAEKPLKSLDFCYGNEDLTFSISEAIKLCVTVVAYAPESFRSLQMLMVLEALVPCYLQKLKRQTSQVETVPAAREEIAATAALATSLQALLYSVEVLTRPMTAPQMSRCDQGHKGTTTANHTMSSGVNTRYQEQGAKLHFIRENLHLLEEGQGIPREELDERIAREEFRRPRESLLNICTEFYKHCGPRLKILQNLAGEPRVIALELLDVKSHMRLAEIAHSLLKLAPYDTQTMESRGLRRYIMEMLPITDWTAEAVRPALILILKRLDRMFNKIHKMPTLR

SEQ ID NO: 918741 - protein, 132 aa, Homo sapiens
MEWRCTVPGAVGRRDLGLKHQIKGFGLDPKAQCLCESLEPGLTACHSQQGAGLAGAETQGQQEMKWEGSGPAACTAAPMPAAEDWAHLEALGESGGPSIFLQRRGEILGGYENINGGEILTLPLTSHVNLGK

SEQ ID NO: 918742 - protein, 132 aa, Homo sapiens; identical to SEQ ID NO: 918741

SEQ ID NO: 918743 - protein, 145 aa, Homo sapiens
MSRFHLSAKNRLTLSPGIAAKVGLWCSCKSDGIHLPDVRPTHWNTAPLTGASLNGNYMSYCKEDTLDPGVSCTGRNVTVRSQGIIINCQYGRIKGSPPQEYHCNTEPTLIPFYCTPPENITPNPVSFTRDNLIPIDWDISIFNSP

SEQ ID NO: 918744 - protein, 144 aa, Homo sapiens
MLPRLLNSLKGKTINTLPICVIIPYYRGRQPLGPQTGTTPWLVRNQATQQQTQTFVCEAIFRVAVNLCTSSCALSSSSFTALSCWRKFITSRCNSFRSLECSSCIAFSRSFRKATRPHRRGIKQQKEGSQVERTCLESQMRLWN

SEQ ID NO: 918745 - protein, 280 aa, Homo sapiens
MNGECSCLPGWAGLHCNESCPQDTHGPGCQEHCLCLHGGVCQATSGLCQCAPGYTGPHCASLCPPDTYGVNCSARCSCENAIACSPIDGECVCKEGWQRGNCSVPCPPGTWGFSCNASCQCAHEAVCSPQTGACTCTPGWHGAHCQLPCPKGQFGEGCASRCDCDHSDGCDPVHGRCQCQAGWMGARCHLSCPEGLWGVNCSNTCTCKNGGTCLPENGNCVCAPGFRGPSCQRCEAPYCPFHLPPAGGSVVSAARAPLPPRPPPTSPTLPPVSSSDPSSD

SEQ ID NO: 918746 - protein, 106 aa, Homo sapiens
MYPFPPACQPGRYGKRCVPCKCANHSFCHPSNGTCYCLAGWTGPDCSQRCPLGTFGANCSQPCQCGPGEKCHPETGACVCPPGHSGAPCRIGIQEPFTVMPTTPVA

SEQ ID NO: 918747 - protein, 698 aa, Homo sapiens
MNGECSCLPGWAGLHCNESCPQDTHGPGCQEHCLCLHGGVCQATSGLCQCAPGYTGPHCASLCPPDTYGVNCSARCSCENAIACSPIDGECVCKEGWQRGNCSVPCPPGTWGFSCNASCQCAHEAVCSPQTGACTCTPGWHGAHCQLPCPKGQFGEGCASRCDCDHSDGCDPVHGRCQCQAGWMGARCHLSCPEGLWGVNCSNTCTCKNGGTCLPENGNCVCAPGFRGPSCQRCEAPYCPFHLPPAGGSVVSAARAPLPPRPPPTSPTLPPVSSSDPSSDYLLQWEGGRETVGKGLIEDWPLPPITMYPFPPACQPGRYGKRCVPCKCANHSFCHPSNGTCYCLAGWTGPDCSQRCPLGTFGANCSQPCQCGPGEKCHPETGACVCPPGHSGAPCRIGIQEPFTVMPTTPVAYNSLGAVIGIAVLGSLVVALVALFIGYRHWQKGKEHHHLAVAYSSGRLDGSEYVMPDVPPSYSHYYSNPSYHTLSQCSPNPPPPNKVPGPLFASLQNPERPGGAQGHDNHTTLPADWKHRREPPPGPLDRGSSRLDRSYSYSYSNGPGPFYNKGLISEEELGASVASLSSENPYATIRDLPSLPGGPRESSYMEMKGPPSGSPPRQPPQFWDSQRRRQPQPQRDSGTYEQPSPLIHDRDSVGSQPPLPPGLPPGHYDSPKNSHIPGHYDLPPVRHPPSPPLRRQDR

SEQ ID NO: 918748 - protein, 215 aa, Homo sapiens
MNGECSCLPGWAGLHCNESCPQDTHGPGCQEHCLCLHGGVCQATSGLCQCAPGYTGPHCASLCPPDTYGVNCSARCSCENAIACSPIDGECVCKEGNRVEFPREKTWGMAKGRRESPRVWVGQGQGSGCRVRVEGQQLDTGKVSRLLSSWNIHFAFLQPQRSYLSLKAEAKSHLTGERPSPSVIRKHNYHAGKGLTSARVTHWRTFRLDSDTVDT

SEQ ID NO: 918749 - protein, 780 aa, Homo sapiens
MAFRALLVFYQPTFIDLLPKLLNAPPPTWEQLENGLVAVRTVVHGLVDYIQNHSKKGADQQQPPQHSKYKTYMCRDMKQRGGCPRGASCTFAHSQEELEKFRKMNKRLVPRRPLSASLGQLNEVGLPSAAILPDEGAVDLPSRKPPALPNGIVSTGNTVTQLIPRGTDPSYDSSLKPGKIDHLSSSAPGSPPDLLESVPKSISALPVNPHSIPPRGPADLPPMPVTKPLQMVPRGSQLYPAQQTDVYYQDPRGAAPPFEPAPYQQGMYYTPPPQCVSRFVRPPPSAPEPAPPYLDHYPPYLQERVVNSQYGTQPQQYPPIYPSHYDGRRVYPAPSYTREEIFRESPIPIEIPPAAVPSYVPESRERYQQIESYYPVAPHPTQIRPSYLREPPYSRLPPPPQPHPSLDELHRRRKEIMAQLEERKVISPPPFAPSPTLPPTFHPEEFLDEDLKVAGKYKGNDYSQYSPWSCDTIGSYIGTKDAKPKDVVAAGSVEMMNVESKGMRDQRLDLQRRAAETSDDDLIPFGDRPTVSRFGAISRTSKTIYQGAGPMQAMAPQGAPTKSINISDYSPYGTHGGWGASPYSPHQNIPSQGHFSERERISMSEVASHGKPLPSAEREQLRLELQQLNHQISQQTQLRGLEREANTLAGQSQPPPPPPPKWPGMISSEQLSLELHQVEREIGKRTRELSMENQCSLDMKSKLNTSKQAENGQPEPQNKVPAEDLTLTFSSDVPNGSALTQENISLLSNKTSSLNLSEDPEGGGDNNDSQRSGVTPSSAP

SEQ ID NO: 918750 - protein, 459 aa, Homo sapiens
MAFRALLVFYQPTFIDLLPKLLNAPPPTWEQLENGLVAVRTVVHGLVDYIQNHSKKGADQQQPPQHSKYKTYMCRDMKQRGGCPRGASCTFAHSQEELEKFRKMNKRLVPRRPLSASLGQLNEVGLPSAAILPDEGAVDLPSRKPPALPNGIVSTGNTVTQLIPRGTDPSYDSSLKPGKIDHLSSSAPGSPPDLLESVPKSISALPVNPHSIPPRGPADLPPMPVTKPLQMVPRGSQLYPAQQTDVYYQDPRGAAPPFEPAPYQQGMYYTPPPQCVSRFVRPPPSAPEPAPPYLDHYPPYLQERVVNSQYGTQPQQYPPIYPSHYDGRRVYPAPSYTREEIFRESPIPIEIPPAAVPSYVPESRERYQQIESYYPVAPHPTQIRPSYLREPPYSRLPPPPQPHPSLDELHRRRKEIMAQLEERKVISPPPFAPSPTLPPTFHPEEVSKSFLVSFIRVFL

SEQ ID NO: 918751 - protein, 81 aa, Homo sapiens
THLYTHLTMMAVECTLLRLTQEKRYSEKALYPLRFHLQQYHRMYQNPEKDTNRSRVTIQWLLIQLRSDLRTSEYAVFFFIT

SEQ ID NO: 918752 - protein, 327 aa, Homo sapiens
MPPVKKSQQQQSLMESMQPGKPSDWELEGRKHERPESLLAPTQFCAAEQDVKALAGPLQAIPEMDFEPSPAEPLGNVERSLRAPAELLPDARGFVPAAYEEFEYGGEIFALPAPYDEEPFQAPALFENCSPASSESSLDICFLRPVSFAMEAERPEHPLQPLPKSATSPAGSSSAYKLEAAAQAHGKAKPLSRSLKEFPRAPPADGVAPRLYSTRSSSGGRAPIKAERAAQAHGPAAAAVAARGASRTFFPQQRSQSEKQTYLEEMHLEDTTRFCPKEERESEQTSFSDQNPRQDQKGGFRSSFRKLFKKKNGNATGEDFCGPWGWW

SEQ ID NO: 918753 - protein, 170 aa, Homo sapiens
MPSRSSLHLAEQLLLVSGLSKACGFQVLRPAEMPVHFPQEAPPSYVTLMKVFLHHMICYRKNKEGIWKQLRSKLAVGCHLESPTGKCRITPDQGQEGGLGLTLSPQAGVQWQDGSSLQPRPPWLKLSSHLSLRETLGTENQIPHILSYKWELNDENTWTQRGEQQTPRPT

SEQ ID NO: 918754 - protein, 141 aa, Homo sapiens
FSAWMHTEYSCSQNNSLSLQSTLYLIDSLYKNRKATLRVSQRKAKDAGSFLFVCLFVCFLRRGLALSPRLECSSAISAQCRDFCVSASAEVVGAILSIRFFLQPLLAAGKREWRERGIRTDVDTAEEEEPAVTDFLEMTNK

SEQ ID NO: 918755 - protein, 173 aa, Homo sapiens
VASLYFRIKDEVEESAMMGVSGYVEYLREQEVSERWFRYNPRLTCIYCAKSFNQKGSLDRHMRLHMGITPFVCRMCGKKYTRKDQLEYHIRKHTGNKPFHCHVCGKSFPFQAILNQHFRKNHPGCIPLEGPHSISPETTVTSRGQAEEESPSQEETVAPGEAVQGSVSTTGPD

SEQ ID NO: 918756 - protein, 263 aa, Homo sapiens
MMGTCRMICDPYTAAPGGEPPGAKAQPPGPSTAALEVMQDLSANPPPPFIQGPKGDPGRPGKPGPRGPPGEPGPPGPRGPPGEKGDSGRPGLPGLQLTAGTASGVGVVGGGAGVGGDSEGEVTSALSATFSGPKIAFYVGLKSPHEGYEVLKFDDVVTNLGNHYDPTTGKFSCQVRGIYFFTYHILMRGGDGTSMWADLCKNGQVRASAIAQDADQNYDYASNSVVLHLDSGDEVYVKLDGGKAHGGNNNKYSTFSGFLLYPD

SEQ ID NO: 918757 - protein, 287 aa, Homo sapiens
MALGLLIAVPLLLQAAPRGAAHYEMMGTCRMICDPYTAAPGGEPPGAKAQPPGPSTAALEVMQDLSANPPPPFIQGPKGDPGRPGKPGPRGPPGEPGPPGPRGPPGEKGDSGRPGLPGLQLTAGTASGVGVVGGGAGVGGDSEGEVTSALSATFSGPKIAFYVGLKSPHEGYEVLKFDDVVTNLGNHYDPTTGKFSCQVRGIYFFTYHILMRGGDGTSMWADLCKNGQVRASAIAQDADQNYDYASNSVVLHLDSGDEVYVKLDGGKAHGGNNNKYSTFSGFLLYPD

SEQ ID NO: 918758 - protein, 1133 aa, Homo sapiens
NLVPQLEMQKSPVFCIVHAGCYRLELVPLTSNDDEDEDKEKMQCDNNIKSKTLPDIPSSGSTTQPLSTQDNSEVLFLKENNQNVYGLDDSEHISSIVDVPPRESHSHSDQSSKTSLMSEMRNAQSIGRRWEKPSPSNVTERKKRGSSWESNNLSADTPCATVLDKQHISSPELNCNNEINGHTNETNTEMQRNKQDLPGLSSESAREPNAECMNQIEDNDDFQLQKTVYDADMDLTASEVSKIVTVSTGIKKKSNKKTNEHGMKTFRKVKDSSSEKKRERSKRQFKNSSDVDIGEKIENRTERSDVLDGKRGAEDPGFIFNNEQLAQMNEQLAQVNELKKMTLQTGFEQGDRENVLCNKKEKRITNEQEETYSLSQSSGKFHQESKFDKGQNSLTCNKSKASRQTFVIHKLEKDNLLPNQKDKVTIYENLDVTNEFHTANLSTKDNGNLCDYGTHNILDLKKYVTDIQPSEQNESNINKLRKKVNRKTEIISGMNHMYEDNDKDVVHGLKKGNFFFKTQEDKEPISENIEVSKELQIPALSTRDNENQCDYRTQNVLGLQKQITNMYPVQQNESKVNKKLRQKVNRKTEIISEVNHLDNDKSIEYTVKSHSLFLTQKDKEIIPGNLEDPSEFETPALSTKDSGNLYDSEIQNVLGVKHGHDMQPACQNDSKIGKKPRLNVCQKSEIIPETNQIYENDNKGVHDLEKDNFFSLTPKDKETISENLQVTNEFQTVDLLIKDNGNLCDYDTQNILELKKYVTDRKSAEQNESKINKLRNKVNWKTEIISEMNQIYEDNDKDAHVQESYTKDLDFKVNKSKQKLECQDIINKHYMEVNSNEKESCDQILDSYKVVKKRKKESSCKAKNILTKAKNKLASQLTESSQTSISLESDLKHITSEADSDPGNPVELCKTQKQSTTTLNKKDLPFVEEIKEGECQVKKVNKMTSKSKKRKTSIDPSPESHEVMERILDSVQGKSTVSEQADKENNLENEKMVKNKPDFYTKAFRSLSEIHSPNIQDSSFDSVREGLVPLSVSSGKNVIIKENFALECSPAFQVSDDEHEKMNKMKFKVNRRTQKSGIGDRPLQDLSNTSFVSNNTAESENKSEDLSSERTSRRRRCTPFYFKEPSLRDKMRR

SEQ ID NO: 918759 - protein, 1133 aa, Homo sapiens; identical to SEQ ID NO: 918758

SEQ ID NO: 918760 - protein, 1133 aa, Homo sapiens; identical to SEQ ID NO: 918758

SEQ ID NO: 918761 - protein, 122 aa, Homo sapiens
SILLEQLVVEATEVVNPLLEPVEHRDGKVFMPGNKVLLHLNLIRNRITEVGLEGFLATVQYQMQFSKAKSASKGPVGLLWLSLAKNCFAPQCPAYAIIQELMLPRDPIKAKLREDEAMAFFP

SEQ ID NO: 918762 - protein, 101 aa, Homo sapiens
SGVSGANEACGAKRPPVCNSPPGNRITEVGLEGFLATVQYQMQFSKAKSASKGPVGLLWLSLAKNCFAPQCPAYAIIQELMLPRDPIKAKLREDEAMAFFP

SEQ ID NO: 918763 - protein, 465 aa, Homo sapiens
TPPRTGRIRSLDAEQRSPDSATPRLSPVECVLTFLPRRRSQRRCGQHQHVERAERAGGLTQGPASGDPEVFWRGDQKGRARGQREASDRSASRGGGGAQKPCAGGWGEGIIGAGENNIFWKGRQDSIQSPTEEYQCSGVLETDFAELCTRWGYTDFPKVVNRPRPHPPFVPSASLSEKATLDDPRLSGSCSLNSLESKYVFFRPTIQVELEQEDSKSVKEIYIRGWKVEERILGVFSKCLPPLTQLQAINLWKVGLTDKTLTTFIELLPLCSSTLRKVSLEGNPLPEQSYHKLMALDSTPRPSLSPYHLGKGPRFLPLHPQTRPPPQALKSPIFRRTPCTFSSDPHSPSGCPRIAHLSLRNNNIDDRGAQLLGQALSTLHSCNRTLVSLNLGFNHIGDEGAGYIADGLRLNRSLLWLSLAHNRIQDKGALKLAEVLRAFELTHTEVVERRRLLLEKGTQERSRSR

SEQ ID NO: 918764 - protein, 248 aa, Homo sapiens
GHFPRMSKKSEDSLLYSLRGTLTLLMLGRVASIQSEPGQQNLLVQQPLGRKRGLRQLRRPLLSRQKTQTEPRNRQGARLSTTRRSIQPKTKPSADQKRSVTFIEAQPEPAAAPTDALPATGQLQGCSPAPSRKPEAMDEPVLTSSPAIVVADLHSVSPKQSENFPTEEGEKEEDTEAQGATAHSPLSAQLSDPDDFTGLETSSLLQHGDTVLHISEENGMENPLLSSQFTFTPTELGKTDAVLDESHV

SEQ ID NO: 918765 - protein, 870 aa, Homo sapiens
MTSPKELNKTLVTNPGEAGICGKYIEQPHFNSPGDSFERGTPSRSLGFSLQGLPISILAYLERHLGRNASRSDTSVTQTLCIQRNSSDYEMMKKNAVIDLMGAEGMEGGASGNLHSRKLVSFTLSDLRAVGLKKGMFFNPDPYLKMSIQPGKKSSFPTCAHHGQERRSTIISNTTNPIWHREKYSFFALLTDVLEIEIKDKFAKSRPIIKRFLGKLTIPVQRLLERQAIGYNLGRRLPADHVSGYLQFKVEVTSSVHEDASPEAVGTILGVNSVNGDLGSPSDDEDMPGSHHDSQVCSNGPVSEDSAADGTPKHSFRTSSTLEIDTEELTSTSSRTSPPRGRQDSLNDYLDAIEHNGHSRPGTATCSERSMGASPKLRSSFPTDTRLNAMLHIDSDEEDHEFQQDLGYPSSLEEEGGLIMFSRASRADDGSLTSQTKLEDNPVENEEASTHEAASFEDKPENLPELAESSLPAGPAPEEGEGGPEPQPSADQGSAELCGSQEVDQPTSGADTGTSDASGGSRRAVSETESLDQGSEPSQVSSETEPSDPARTESVSEASTRPEGESDLECADSSCNESVTTQLSSVDTRCSSLESARFPETPAFSSQEEEDGACAAEPTSSGPAEGSQESVCTAGSLPVVQVPSGEDEGPGAESATVPDQEELGEVWQRRGSLEGAAAAAESPPQEEGSAGEAQGTCEGATAQEEGATGGSQANGHQPLRSLPSVRQDVSRYQRVDEALPPNWEARIDSHGRIFYVDHVNRTTTWQRPTAPPAPQVLQRSNSIQQMEQLNRRYQSIRRTMTNERPEENTNAIDGAGEEADFHQASADLLSTQLRKFVDDYVLGTELRPRDTEMTATVGPGIPDLRAIIMS

SEQ ID NO: 918766 - protein, 127 aa, Homo sapiens
PIEMSCPLLHCELGQRPHLEPRSPQTQASCISYCFSLFLWFPQPYSPLSESVLASYAAPWSKALAARALITSSFRTSGNYRHNVWKKNDFKLMQQRQTMVWPKMEQNLQGKREVPGVIWSDEDGTGE

SEQ ID NO: 918767 - protein, 350 aa, Homo sapiens
MVERLGTPGTQGWQAGEVGKYPRQSGSGARLLDQAAGSEPAGFRFHRGPYPGRIPSRCGLRGSPVPSLEVTRPAHPPGVAAGKSWRPEGSAAPSKLGLCAAPMAATAPLPRTPPAQQGGADARSKEWPKKGPGAGMLLGSEPSEQGETQVQAGLGQMRVMGSQEQQLQEAAATFRAERESTMKELRLPPPRVEPQTFQEGMQLLLEHQKLLLVGRFASPAPLAQPKGSPEAAPKHELVRTALRSSCCQLPRAEDSLWMPPVLQEPSLAGTWADAADPPVGLGFQRLPSVPARGHISSRGSPGLGTRASDSKRAPPFLAASGELLGVLRGLFSSSVWMNKILENQRQEACN

SEQ ID NO: 918768 - protein, 159 aa, Homo sapiens
LCVPHPGHTDTGCKLPMDLPFWDLEDNGPLLLTAPLGSVPVETKYGGSNPTFPLSTVLVEVLCEGSTPATSFCLNIQAFPYILHTYIGRGSQASTLAFCTPTGLTPHESHQSYGLHILKQLPELYLGPFEPRLDLEQLGHREQCPKAVQNVVYTNLHSR

SEQ ID NO: 918769 - protein, 150 aa, Homo sapiens
SGFPLSLPQLMINFLSGFPQTSIVSCLSNKLWAKEQRPLWEVFTPPIPNANIGIYLLLGTSIQSPTVYRPGGLAPLPHTQTTTYKLILGICGLRHREVMQCVKGHTASISRALSHTPTTSPLAASIQLEPCEQGVLCSLSVEGKSWQPGC

SEQ ID NO: 918770 - protein, 201 aa, Homo sapiens
MHEHQQGDPSVYAVLRPRLKGYVALGWRTGRQRCFDEKKDIDYLVNPCLMAGKLGIYVQDLDLPTRLRDSNQAVRLALAMQLGFEGPRFSGEKSRQEGCWEVCQAQLSKERFFEETTNGNAMMPCFRGWLLLGREAGSYLEGQGIGDYKSTFLQIDAFQPYWKHTTFEPQGLGEAVNVRGEAESTFQLLLFRPLNHFLQHF

SEQ ID NO: 918771 - protein, 145 aa, Homo sapiens
MEILNKWDRDPEAFLLRIAIDEIWLCQYGPEDKRQSNQWLPRGGKGPVKAKVDLSRAKNLETIPENLRNRYLKFIGVSYDHKLPSKPRLAMGNLKHANIQNIGYCKKKTVSVGKGLEKRTPLYIVGENENWYSRCGKPYGDSSKN

SEQ ID NO: 918772 - protein, 467 aa, Homo sapiens
AGSFKRPVKQIKNQMGLPPGMPDRACAVGSVARALSRSRRYVCARDADASRRRRRPFNYGLSIEEKNENDENSLSSSSDSSEDKDEKISEECDIEEKTEVKEEPELQTKREMEERTVTLEIPEVLKRQLEDDCYYINRRKRLVQLPCHTNIITILESYVKHFAISAAFSANERPRHHHAMPHASMNVPYIPAEKNIDLCKEMVDGLRITFDYTLPLVLLYPYEQAQYKKVTASKVFLAIKESATNTNRSQEKLSPSLRLLNPSRPQSTESQSTSGEPATPKRRKAEPQAVQSLRRSSPHTANCDRLSKSSTSPQPKRWQQDMSTSVPKLFLHLEKKTPVHSRSSSPTLTPSQEGSPVFAGFEGRRTNEINEVLSWKLVPDNYPPGDQPPPPSYIYGAQHLLRLFVKLPEILGKMSFTEKNLKALLKHFDLFVRFLAEYHDDFFPESAYVAASEVHYSTRNPQAVNKC

SEQ ID NO: 918773 - protein, 175 aa, Homo sapiens
MLHQKCNNGGFHLAEKYRKFFLAEGIAWVKTDVKLYGLLGNDKQFDATGVGHIVGKGVAGDEEKGVHWGQNLKDLIPQPMEPSEVYSSVGSGTDRRDTAAATEAQHLSSESKEKTSAQKSGHPFGILKADFTISTLMDPEEMKDQFLRQIQEVLKLTLGHEQFRLKWVSFEVNKK

SEQ ID NO: 918774 - protein, 193 aa, Homo sapiens
GDICAYSEMPSDAAVVRLHTPGKRTTSIHKWAQLCSSNTLFTNQRVGQIGPAGIIFCKKLFLNLSVKEKAPHVLCDLSDLEYLDEEFHQSLQWMKDNDIHDILDLTFTVNEEVFGQITERELKPGGANIPVTEKNKKEYIERMVKWRIERGVVQQTESLVRGFYEMRNFAQYQIASLHQTLGMAHVSSCSIQF

SEQ ID NO: 918775 - protein, 193 aa, Homo sapiens; identical to SEQ ID NO: 918774

SEQ ID NO: 918776 - protein, 163 aa, Homo sapiens
MPVLNFRMILPGGRASPRRGCRRRPRQRARRFPRSGPGSGAFSGRRGRAHHHRGGRAVIRIIALLPAWGSSGPRLHRAGPGRAGAGGGGARAIQPLAQSVPLDSGGFKSLGLCICCSRTSGYPFPGPPGKLLSPFKVLHKPLAQCLVLREQEWKEHIFPLKEH

SEQ ID NO: 918777 - protein, 1086 aa, Homo sapiens
MAGLAEWPSLAMVHCSFPAPKPSGLHTEGSQIIENIPADSLLEGGQVIKNIPEYSLSEGGQIIKNIPADSFLESGPGQSPEVEEHVSKKHFEADERDFPIKKNSSTKKKHLISEVPNSKSGSSGTVHDYIMRQIFTAPIFSELEIEVKEPSETPMNLENQLPTPWKRSLSSHILFHEENADEIELPQPRSATSQIIQAFPIDTLLESGIIKVIELDKEHHKSSLLGTGITSPKGNLKDSQEYYSEIRSETEPLSEQSIPIIPKDTTSVSRAEFIQEDQNMFPQDSSYYSIANKELYLPRNGQRLCKDKNDLSSTLESLTNSLMDKLSESDEIMLKSFLKNIFNVFFKYNHSERRGQPEKELERLIQPSFTSDTEHLEELQEDFDKADKLDRKPILSPKLRVFLEELSESEVKHLKSELSKQIQHYLVERLSESGHITKEDLPKIYQNLYLMNEKAEQKGPNSFQGKYSETVKEIMSFVNNFNHHFIDKHLEIKLRSFLKEILQNYFLKNISESSLFNETASETIYPNISSLRTKSVSISFHELEQDISKGSFGRRFEINMKYPLSKSLQNYLIALSENELLHLKADLSKHLQSLFIEKLSKSGLMTKKQLEGINQHINLLNSSSIPLKYIKTHLPFRDDCHFVEKHSEKQNKYSRIVQQTTLQTVSEDKLREAELIREKEKKYFPLQNLKGNSSLIKEQKSYYTKEEAKTPSLIKVQPSSNENIQASPLSKSSEILTDILLKKLRKEHVFTQLPQAENSVHKTEIQDPYSWGGKSKITQSKAWCEKTLKMKSLDRKEHVNIYKWTVQEKPEAVLTSYPRIPNARMPREDEYLNRITFPSWQSSTLTHFNTETGEKSKLEDQYCQTLKGNNNNNKKHLVTFAQYKKEIQTLYIKPDEICSEKCAKFPEIQSFQYKVVEDEKNLKPHLFPELFKIEDLKPKVRKERDRVAQPKKSFNKIVRILPTTLPTTRIHLKKSVPRTLLHWTARRTIHDCSDKFEDLHDMTSFTHLKKVKSRSRLLGKSSDDIHNHARHSARPYTAPEVNKQRESYSGKFTSRRMVSSGLVHINDKTSDYEMHKMRPKKIKRGY

SEQ ID NO: 918778 - protein, 137 aa, Homo sapiens
MTVVTKIYTNAYTFFFLFLFFETESHCVSAGVECSGTILAHCSLRLLGSRDSPASASQVAGIIDEHQYAQLSFVFLVEMGSHHVGQAGLELLTSNDPPASAAQSAGITEFSIHKSSEKQEILEKHAYDNKQGIYRVV

SEQ ID NO: 918779 - protein, 77 aa, Homo sapiens
MKPKLSTWRDIWPAPRCSSHPQFRHQTCGEEAILDAQPQLPSDATTLLTPSKNCLQEPSIILSHRTMAGNNKLLFEA

SEQ ID NO: 918780 - protein, 742 aa, Homo sapiens
MESNQMEAPRSDPTHSERKVRRKKPKSGSWIWISVFFEVRQHSGPRQVMLRCSQPENREKPGDTGQTPPFRLPGRREGLIQRRAAAAGTPPRGLLPLNQHQCPRSSTFSWLFCPAFRSGVRIEAEHQRVPGQRVWRGALGQEPIRSARCACTVQTDLALDEDDYRIRTFKIKKLSFKETGGKNQSSPQLPQTRRIWERAENIAGRRQEKSSWHLCLEHPPFPTPAPLSRPYPDRTAAAAASLPVSVAGGLLRGPPLLLRAAEKYPRTPKCARCRNHGVVSALKGHKRYCRWKDCLCAKCTLIAERQRVMAAQVALRRQQAQEENEARELQLLYGTAEGLALAAANGIIPPRPAYEVFGSVCAADGGGPGAGAPAGTGGGAAGAGGSEAKLQKFDLFPKTLLQAGRPGSPLPPPVKPLSPDGADSGPGTSSPEVRPGSGSENGDGESFSGSPLARASKEAGGSCPGSAGPGGGGEEDSPGSASPLGSESGSEADKEEGEAAPAPGLGGGSGPRQRTPLDILTRVFPGHRRGVLELVLQGCGGDVVQAIEQVLNHHRGGLAAGLGPAAPPDKAAVGAAAAADDAWPSRVDAAAAAAAAAGGPGLPAPLQAGPAAPPHHRPLLAGAMAPGALGSLSSRSAFSPLQPNASHFGADAGAYPLGAPLGLSPLRLAYSAAAAHSRGLAFMAPYSTAGLVPTLGFRPPMDYAFSDLMRDRSAAAAAAVHKEPTYGGGLYGPMVNGAPEKQ

SEQ ID NO: 918781 - protein, 636 aa, Homo sapiens
MESNQMEAPRSDPTHSERKVRRKKPKSGSWIWISVFFEVRQHSGPRQVMLRCSQPENREKPGDTGQTPPFRLPGRREGLIQRRAAAAGTPPRGLLPLNQHQCPRSSTFSWLFCPAFRSGVRIEAEHQRVPGQRVWRGALGQEPIRSARCACTVQTDLALDEDDYRIRTFKIKKLSFKETGGKNQSSPQLPQTRRIWERAENIAGRRQEKSSWHLCLEHPPFPTPAPLSRPYPDRTAAAAASLPVSVAGGLLRGPPLLLRAAEKYPRTPKCARCRNHGVVSALKGHKRYCRWKDCLCAKCTLIAERQRVMAAQVALRRQQAQEENEARELQLLYGTAEGLALAAANGIIPPRPAYEVFGSVCAADGGGPGAGAPAGTGGGAAGAGGSEAKLQKFDLFPKTLLQAGRPGSPLPPPVKPLSPDGADSGPGTSSPEVRPGSGSENGDGESFSGSPLARASKEAGGSCPGSAGPGGGGEEDSPGSASPLGSESGSEADKEEGEAAPAPGLGGGSGPRQRTPLDILTRVFPGHRRGVLELVQPNASHFGADAGAYPLGAPLGLSPLRLAYSAAAAHSRGLAFMAPYSTAGLVPTLGFRPPMDYAFSDLMRDRSAAAAAAVHKEPTYGGGLYGPMVNGAPEKQ

SEQ ID NO: 918782 - protein, 250 aa, Homo sapiens
MSCQDFQQKFIAMFICSEIPITLDHGNTLHEGWSQIMFRKQVILGNTAVTALSDAGGPRNDAQFNFSVQEPMEGTNVVVCVTVAVTPSNLKAEDAKFPLDFQVILRFREKFPPVFFSSFRNTVQSSNNKFRRNFTMTYHLSPGNYVVVAQTRRKSAEFLLRIFLKMPDSDRHLSSHFNLRMKGSPSEHGSQQSIFNRYAQQRLDIDATQLQGLLNQELLTGPPGDMFSLDECRSLVALMEVSFAVIPPML

SEQ ID NO: 918783 - protein, 250 aa, Homo sapiens; identical to SEQ ID NO: 918782

SEQ ID NO: 918784 - protein, 250 aa, Homo sapiens; identical to SEQ ID NO: 918782

SEQ ID NO: 918785 - protein, 269 aa, Homo sapiens
MSCQDFQQKFIAMFICSEIPITLDHGNTLHEGWSQIMFRKQVILGNTAVTALSDAGGPRNDAQFNFSVQEPMEGTNVVVCVTVAVTPSNLKAEDAKFPLDFQVILRFREKFPPVFFSSFRNTVQSSNNKFRRNFTMTYHLSPGNYVVVAQTRRKSAEFLLRIFLKMPDSDRHLSSHFNLRMKGSPSEHGSQQSIFNRYAQQRLDIDATQLQGLLNQELLTGPPGDMFSLDECRSLVALMELKVNGRLDQEEFARLWKRLVHYQVRAHSL

SEQ ID NO: 918786 - protein, 288 aa, Homo sapiens
AQCPPFQFMSGPVLYQEKLLKPAALLLEKGADQEEDEALRVLSLRALGNMALGAPKKVKQYRKVLLEKCLGPLREPVSNSVTAEGMEALTKILAELREGDVGSSFDAMSEQCRIFFDNESELLRLKAFILFGKLARVVGMSKKHFFKGEVKKAWIPLMLHSQDPCSNAAQACMATMFQCVHFWGWKSLEHPSGPSDTATDDKMTVFQTTMCSILVRKPKGEPARPRWPHAGLELGGRDCHSSFLGPYVYLPHMPCRDRHCAAEIEGKSCAYFSCLMFLLVGTSRKVQR

SEQ ID NO: 918787 - protein, 171 aa, Homo sapiens
KRRPAVSWQGWKYIKGLQIACLKERNTDWFYSLYPVVSKSGMRERETDRQTLGKKKSELFDTKGRFCIYVPYLNTVRIRWLQVGLPRMALYSQVLVIVTKTQSSPCPALTQVSLLSSDHPSYLELWRQVALLAGPAVSPEFLNGVIEFKQVNILISNIKKGVQKSQEFETS

SEQ ID NO: 918788 - protein, 171 aa, Homo sapiens; identical to SEQ ID NO: 918787

SEQ ID NO: 918789 - protein, 150 aa, Homo sapiens
MIWELILWYEVSIGWEGGVYVQTCGHTLHIDCHKSYMESLRNDQVLQGFSVDKGEFTCPLCRQFANSVLPCYPGSNVENNPWQRPSNKSIQDLIKEVEELQGRPGAFPVSISILMMPQPLRKEVTVGTGFQQKTKFMLKEDAIHEINQTY

SEQ ID NO: 918790 - protein, 155 aa, Homo sapiens
MVITITLKERKQLSSELGAGAAIDRFMAGCDTCQLIDVIEHQETIKKHIKMQKDKLGPFLSGANRSPSLDPVHYCCTEEERRKVLNNCIMGSFWIPLLVGYFCWINVLPTYSILLTLLLKILYFLLSSQELQSHTLAWRILLYSYSSLMTCSTEK

SEQ ID NO: 918791 - protein, 155 aa, Homo sapiens; identical to SEQ ID NO: 918790

SEQ ID NO: 918792 - protein, 125 aa, Homo sapiens [sequence omitted]

SEQ ID NO: 918793 - protein, 102 aa, Homo sapiens; identical to SEQ ID NO: 779985

SEQ ID NO: 918794 - protein, 102 aa, Homo sapiens; identical to SEQ ID NO: 779985

SEQ ID NO: 918795 - protein, 144 aa, Homo sapiens
MVWFRAPRVCDTRLSVTLMLLHNCLGIHLCPRVCNDANLPQSGQLDEEVGFQDDAQFGSLQHLATEFPMMGQLMGKEKDLLFMARNFLGASVFNSSNLLYTDSELAHIPEGMVLMGLGKPWLTGLPWDDFSAQMFCLPGSSPET

SEQ ID NO: 918796 - protein, 213 aa, Homo sapiens
PICTQTFDETIRKPISLGCGHTVCKMCLNKLHRKACPFDQTTINTDIELLPVNSALLQLVGAQEKNFFNPKDMDEKPTANILNGERLDAFSVPEQQPITLCSGVEDTKHYEEAKKCVEELALYLKPLSSARGVGLNSTTQSVLSRPMQRKLVTLVHCQLVEEEGRIRAMRAARSLGERTVTELILQHQNPQQLSSNLWAAVRARGCQFLGPGT

SEQ ID NO: 918797 - protein, 213 aa, Homo sapiens; identical to SEQ ID NO: 918796

SEQ ID NO: 918798 - protein, 311 aa, Homo sapiens
QKSKWLLIDPHFYCKQKLRTQDYNAAEDADRCVLLPVPLCGVDGGLCVARQGILRQNEQRWRWIFRSVIYEPYLAMFGQVPSDVDGKPDLAQMETAWRRHLLPEPTPRAAPETALQKHARETESNITEYQYDFAHCTFTGNESKPLCVELDEHNLPRFPEWITIPLVCIYMLSTNILLVNLLVAMFGYTVGTVQENNDQVWKFQRYFLVQEYCSRLNIPFPFIVFAYFYMVVKKCFKCCCKEKNMESSVCCFKNEDNETLAWEGVMKENYLVKINTKANDTSEEMRHRFRQLDTKLNDLKGLLKEIANKIK

SEQ ID NO: 918799 - protein, 311 aa, Homo sapiens; identical to SEQ ID NO: 918798

SEQ ID NO: 918800 - protein, 212 aa, Homo sapiens
MIGCVCCLFSGSSHLVTLLSSGLALGVVCTEYCDVNRLLVSQPWIPVPVPVEVVGSAMDSSLRRECDSDDTLILDFWPQKPLRRHIPLILSHQVCGNFYGKSRKWIQPCLSLRSTETWNQTQNFTSLCQKDSSELFPQALQSSPESHSVTQGEVQWHNLGSPQPPPPGFKRFSCLSLPSSWDYRHMPPGPEFCVFTTTFAALVQCDRYSTEY

SEQ ID NO: 918801 - protein, 89 aa, Homo sapiens
RLYRSLKVTLFYIYPESRLGSATPKIVSKAKNIEVENKNNLSAVPLNNLEPITNIQIWLANGKRIVQKFNITHSKAKENERRRYRRVHF

SEQ ID NO: 918802 - protein, 259 aa, Homo sapiens
MKDVDNLKSIKEEWVCETGSDNQPLGNNQQSNCEYFVDSLFEEAQKVSSKCVSPAEQKKQVDVNIKLWKNGFTVNDDFRSYSDGASQQFLNSIKKGELPSELQGIFDKEEVDVKVEDKKNEICLSTKPVFQPFSGQGHRLGSATPKIVSKAKNIEVENKNNLSAVPLNNLEPITNIQIWLANGKRIVQKFNITHRVSHIKDFIEKYQGSQRSPPFSLATALPVLRLLDETLTLEEADLQNAVIIQRLQKTASFRELSEH

SEQ ID NO: 918803 - protein, 130 aa, Homo sapiens
CVALTQDRPQTGSATPKIVSKAKNIEVENKNNLSAVPLNNLEPITNIQIWLANGKRIVQKFNITHRVSHIKDFIEKYQGSQRSPPFSLATALPVLRLLDETLTLEEADLQNAVIIQRLQKTASFRELSEH

SEQ ID NO: 918804 - protein, 337 aa, Homo sapiens
MQKIILPNLGLEAVILSPYWALICAEGQLLAPPSWDIGNNASSVASALGTGDRVSLCRQAGVQWHDLGSLQPPPPRFKRFFCLSLLSSWDYRVCETGSDNQPLGNNQQSNCEYFVDSLFEEAQKVSSKCVSPAEQKKQVDVNIKLWKNGFTVNDDFRSYSDGASQQFLNSIKKGELPSELQGIFDKEEVDVKVEDKKNEICLSTKPVFQPFSGQGHRLGSATPKIVSKAKNIEVENKNNLSAVPLNNLEPITNIQIWLANGKRIVQKFNITHRVSHIKDFIEKYQGSQRSPPFSLATALPVLRLLDETLTLEEADLQNAVIIQRLQKTASFRELSEH

SEQ ID NO: 918805 - protein, 102 aa, Homo sapiens
MKDVDNLKSIKEEWVCETGSDNQPLGNNQQSNCEYFVDSLFEEAQKVSSKCVSPAEQKKQVDVNIKLWKNGFTVNDDFRSYSDGASQQFLNSIKKGLSSQVW

SEQ ID NO: 918806 - protein, 337 aa, Homo sapiens; identical to SEQ ID NO: 918804

SEQ ID NO: 918807 - protein, 337 aa, Homo sapiens; identical to SEQ ID NO: 918804

SEQ ID NO: 918808 - protein, 337 aa, Homo sapiens; identical to SEQ ID NO: 918804

SEQ ID NO: 918809 - protein, 337 aa, Homo sapiens; identical to SEQ ID NO: 918804

SEQ ID NO: 918810 - protein, 168 aa, Homo sapiens
MCQAVTIVQKKATCPASRRGRCTGQQLQCQVVTPSFLDSGPDPGPRSDKRQGLGQVTPAGHTICDTCDMRSKALCLPGAARHLQQHSHQAQPQSQHPCAGQGFWTETLLTCGAGSFFGVALAGAPLSGIPGLCPLDARTHPQTFPNVTIWQREWQNHPQKWTTATEQF

SEQ ID NO: 918811 - protein, 1460 aa, Homo sapiens
ELISTFKLLLEKKRSEVMKMKKRYEVGLEKLDSASSQVATMQMELEALHPQLKVASKEVDEMMIMIEKESVEVAKTEKIVKADETIANEQAMASKAIKDECDADLAGALPILESALAALDTLTAQDITVVKSMKSPPAGVKLVMEAICILKGIKADKIPDPTGSGKKIEDFWGPAKRLLGDMRFLQSLHEYDKDNIPPAYMNIIRKNYIPNPDFVPEKIRNASTAAEGLCKWVIAMDSYDKVAKIVAPKKIKLAAAEGELKIAMDGLRKKQAALKEVQDKLARLQDTLELNKQKKADLENQVDLCSKKLERAEQLIGGLGGEKTRWSHTALELGQLYINLTGDILISSGVVAYLGAFTSTYRQNQTKEWTTLCKGRDIPCSDDCSLMGTLGEAVTIRTWNIAGLPSDSFSIDNGIIIMNARRWPLMIDPQSQANKWIKNMEKANSLYVIKLSEPDYVRTLENCIQFGTPVLLENVGEELDPILEPLLLKQTFKQGGSTCIRLGDSTIEYAPDFRFYITTKLRNPHYLPETSVKVTLLNFMITPEGMQDQLLGIVVAQERPDLEEEKQALILQGAENKRQLKEIEDKILEVLSSSEGNILEDETAIKILSSSKALANEISQKQEVAEETEKKIDTTRMGYRPIAIHSSILFFSLADLANIEPMYQYSLTWFINLFILSIENSEKSEILAKRLQILKDHFTYSLYVNVCRSLFEKDKLLFSFCLTINLLLHERAINKAEWRFLLTGGIGLDNPYANLCTWLPQKSWDEICRLDDLPAFKTIRREFMRLKDGWKKVYDSLEPHHEVFPEEWEDKANEFQRMLIIRCLRPDKVIPMLQEFIINRLGRAFIEPPPFDLAKAFGDSNCCAPLIFVLSPGADPMAALLKFADDQGYGGSKLSSLSLGQGQGPIAMKMLEKAVKEGTWVVLQNCHLATSWMPTLEKVCEELSPESTHPDFRMWLTSYPSPNFPVSVLQNGVKMTNEAPKGLRANIIRSYLMDPISDPEFFGSCKKPEEFKKLLYGLCFFHALVQERRKFGPLGWNIPYEFNETDLRISVQQLHMFLNQYEELPYEALRYMTGECNYGGRVTDDWDRRTLRSILNKFFNPELVENSDYKFDSSGIYFVPPSGDHKSYIEYTKTLPLTPAPEIFGMNANADITKDQSETQLLFDNILLTQSRSAGAGAKSSDEVVNEVASDILGKLPNNFDIEAAMRRYPTTYTQSMNTVLVQEMGRFNKLLKTIRDSCVNIQKAIKGLAVMSTDLEEVVSSILNVKIPEMWMGKSYPSLKPLGSYVNDFLARLKFLQQWYEVGPPPVFWLSGFFFTQAFLTGAQQNYARKYTIPIDLLGFDYEVMEDKEYKHPPEDGVFIHGLFLDGASWNRKIKKLAESHPKILYDTVPVMWLKPCKRADIPKRPSYVAPLYKTSERRGVLSTTGHSTNFVIAMTLPSDQPKEHWIGRGVALLCQLNS

SEQ ID NO: 918812 - protein, 507 aa, Homo sapiens
MWLTSYPSPNFPVSVLQNGVKMTNEAPKGLRANIIRSYLMDPISDPEFFGSCKKPEEFKKLLYGLCFFHALVQERRKFGPLGWNIPYEFNETDLRISVQQLHMFLNQYEELPYEALRYMTGECNYGGRVTDDWDRRTLRSILNKFFNPELVENSDYKFDSSGIYFVPPSGDHKSYIEYTKTLPLTPAPEIFGMNANADITKDQSETQLLFDNILLTQSRSAGAGAKSSDEVVNEVASDILGKLPNNFDIEAAMRRYPTTYTQSMNTVLVQEMGRFNKLLKTIRDSCVNIQKAIKGLAVMSTDLEEVVSSILNVKIPEMWMGKSYPSLKPLGSYVNDFLARLKFLQQWYEVGPPPVFWLSGFFFTQAFLTGAQQNYARKYTIPIDLLGFDYEVMEDKEYKHPPEDGVFIHGLFLDGASWNRKIKKLAESHPKILYDTVPVMWLKPCKRADIPKRPSYVAPLYKTSERRGVLSTTGHSTNFVIAMTLPSDQPKEHWIGRGVALLCQLNS

SEQ ID NO: 918813 - protein, 507 aa, Homo sapiens; identical to SEQ ID NO: 918812

SEQ ID NO: 918814 - protein, 203 aa, Homo sapiens
MITPEGMQDQLLGIVVAQERPDLEEEKQALILQGAENKRQLKEIEDKILEVLSSSEGNILEDETAIKILSSSKALANEISQKQEVAEETEKKIDTTRMGYRPIAIHSSILFFSLADLANIEPMYQYSLTWFINLFILSIENSEKSEILAKRLGRAFIEPPPFDLAKAFGDSNCCAPLIFVLSPGADPMAALLKFADDQVPYNR

SEQ ID NO: 918815 - protein, 921 aa, Homo sapiens
MITPEGMQDQLLGIVVAQERPDLEEEKQALILQGAENKRQLKEIEDKILEVLSSSEGNILEDETAIKILSSSKALANEISQKQEVAEETEKKIDTTRMGYRPIAIHSSILFFSLADLANIEPMYQYSLTWFINLFILSIENSEKSEILAKRLQILKDHFTYSLYVNVCRSLFEKDKLLFSFCLTINLLLHERAINKAEWRFLLTGGIGLDNPYANLCTWLPQKSWDEICRLDDLPAFKTIRREFMRLKDGWKKVYDSLEPHHEVFPEEWEDKANEFQRMLIIRCLRPDKVIPMLQEFIINRLGRAFIEPPPFDLAKAFGDSNCCAPLIFVLSPGADPMAALLKFADDQGYGGSKLSSLSLGQGQGPIAMKMLEKAVKEGTWVVLQNCHLATSWMPTLEKVCEELSPESTHPDFRMWLTSYPSPNFPVSVLQNGVKMTNEAPKGLRANIIRSYLMDPISDPEFFGSCKKPEEFKKLLYGLCFFHALVQERRKFGPLGWNIPYEFNETDLRISVQQLHMFLNQYEELPYEALRYMTGECNYGGRVTDDWDRRTLRSILNKFFNPELVENSDYKFDSSGIYFVPPSGDHKSYIEYTKTLPLTPAPEIFGMNANADITKDQSETQLLFDNILLTQSRSAGAGAKSSDEVVNEVASDILGKLPNNFDIEAAMRRYPTTYTQSMNTVLVQEMGRFNKLLKTIRDSCVNIQKAIKGLAVMSTDLEEVVSSILNVKIPEMWMGKSYPSLKPLGSYVNDFLARLKFLQQWYEVGPPPVFWLSGFFFTQAFLTGAQQNYARKYTIPIDLLGFDYEVMEDKEYKHPPEDGVFIHGLFLDGASWNRKIKKLAESHPKILYDTVPVMWLKPCKRADIPKRPSYVAPLYKTSERRGVLSTTGHSTNFVIAMTLPSDQPKEHWIGRGVALLCQLNS

SEQ ID NO: 918816 - protein, 250 aa, Homo sapiens
MKHSFSTTVWVGKRVRESLLGAAQPTQTSPLLEPRALNVRDSLDYKEDVDHRKDVHHRLDVDHKEDVDHGEHVNHGVNVGHREDVDHGEDVDHGEDVDHREDVDHGVDVDHREDMDHGENVDHRIDVDHGMDMGNRVDVDHGVDLDHREDVDHREDVDHGEDVNHWVDVDHEVDMDHGENVDHGEDVDLGVDMDHGVDVDHGLDMGHREEVEHGEDVDHGIDVDHWTLIEQVKDPSPHHHHPKRILGLRS

SEQ ID NO: 918817 - protein, 155 aa, Homo sapiens
MACFLSLGCLESSDSHQCDLIDSITCKKCKRDDGALMSDLKALALFTTLAGHIGITYVQATTQSFAVHKHRVEIDFPLYEKKTMMTHEKSRHFSVWLETWPPAIYPIASVTEKFCDCQVKKNCKQVTHEEQSFLLQTKQQNEENEESEENAESLK

SEQ ID NO: 918818 - protein, 155 aa, Homo sapiens
MMSGHPPLLCSFQICHLSHKTAYIDYKTNWNIWAVKDLQLHSKEDGNAMFNFFPKWLWMYNRAQRPNHSLGFTKDLSRENRSSKGSMRLKTMAQKGSGAYNCEGISCFQVNIMKRISNRKNSLGIPNFRAHRQNVVYVQQVLVEATKYGVEGCGS

SEQ ID NO: 918819 - protein, 160 aa, Homo sapiens
MSSCAMMSGHPPLLCSFQICHLSHKTAYIDYKTNWNIWAVKDLQLHSKEDGNAMFNFFPKWLWMYNRAQRPNHSLGFTKDLSRENRSSKGSMRLKTMAQKGSGAYNCEGISCFQVNIMKRISNRKNSLGIPNFRAHRQNVVYVQQVLVEATKYGVEGCGS

SEQ ID NO: 918820 - protein, 160 aa, Homo sapiens; identical to SEQ ID NO: 918819

SEQ ID NO: 918821 - protein, 128 aa, Homo sapiens
CAETVGSTPGRTRMESQASLPRPSQAFHGVALTVAPLWLFRQAELPVSKGVGPSSLPKPLLTLCVFSSEASTQPLSSAGEASTTGRRAPLRAAYCAPAAHKRFGGVQLLWQCLQPSEFLLHLLGEKSS

SEQ ID NO: 918822 - protein, 147 aa, Homo sapiens
MKLLAHIYQATTEIKTQNLVWAEHPWDLPEPSGPSDNGEARRTYLMPKSSSVGGSICSGEQRGGHQHCGISSSLRRGWRAVAKQQCDLLRMCGLQMVAQVFWGESRVGYGCNPGNCKLEVKSELVKTSEFAGVAATGGAGRAPWSGL

SEQ ID NO: 918823 - protein, 147 aa, Homo sapiens; identical to SEQ ID NO: 918822

SEQ ID NO: 918824 - protein, 169 aa, Homo sapiens
MGWSQDLFRALWRSLSREVKEHVGTDQFGNKYYYILQNKNWRGQTIQEKRIVEAANKKEVDYETGDIPTEWEAWIRRTRKTPPTMEEILKNEKHREEIKIKSQDFYEKEKLLSKETSEELLPPPVQTQIKGRASAPYFGKEKPSVAPSSTGKTFQPGSWMPRDGKSHNE

SEQ ID NO: 918825 - protein, 186 aa, Homo sapiens
MNKILDIDYHNSQPQGRVGPVVTKTIRQAGRPKPIYLSHSTDGHKPTGIGKRPLLIQQPCMAFKILSCTSYHKPGRRRRWLPRFCRKVATSSALPPTHPSSWGFWVVSQQYLPTVKIHCFLHINTESDLRQLVRRIYHVRAQRENAIQWTLARHQICRHLDLGLISLQKHATQNIQFDVRKNMQHF

SEQ ID NO: 918826 - protein, 216 aa, Homo sapiens
FLRITFSSPLPVLSSCSSFFYFNLSFISPHQGKQTLGCGRVCCSPVCIRVRPCLEEEEKKKKKKKKKKKKKKKKKKKKKKKKKKRKKKKKKEEEEEEEEEEEEKENKMRGRRKKNKRKKKKEEKEEEEEEENKEKEEFHVAGEASQPWRKVNGTPYTAAGKRVNENQEKGKPLMKPSDLVTLIYYHENKLTPNKLKRMSKDTYTKVRSNFICYSQI

SEQ ID NO: 918827 - protein, 279 aa, Homo sapiens
MACRKWEAEDRLVTGQWVVVTEKDGKQESTIFDAVMICSGHHVYPNLPTDSFPGLDQFRGNYLHSRDYKNPEAFKGKRVLVIGLGNSGSDIAVELSRLATQPRHRGWYFYVTPQEIHLFYVALQIKEDLRHPPCEASSLRKEPVFNDELPSRILCGTLSIKPSVKEFTETSAVFEDGTMFEAIDSVIFATGYDYSYPFLDETIMKSRNNEVTLFKGIFPPLMEKPTLAVIGLVQSLGAAIPTADLQAWWAAKVFANSCTLPTTNEMMDDTDEKMGKKLK

SEQ ID NO: 918828 - protein, 380 aa, Homo sapiens
MASVIPASNRSMRSDRNTYVGKRFVHVKNPYLDLMDEDILYHLDLGTKTHNLPAMFGDVKFVCVGGSPNRMKAFALFMHKELGFEEAEEDIKDICAGTDRYCMYKTGPVLAISHGMGIPSISIMLHELIKLLHHARCCDVTIIRIGTSGGIGIAPGTVVITDIAVDSFFKPRFEQVILDNIVTRSTELDKELSEELFNCSKEIPNFPTLVGHTMCTYDFYEGQGRLDGALCSFSREKKLDYLKRAFKAGVRNIEMESTVFAAMCGLCGLKGQKQGEEREGERSSLVRVDGQSDSSAGCCRNLSEVILRAFLSLLQIFVTLLSLLPAGFPPGCFLLYISVVTALHCIFFLMLLLDLLVADFRLQIALPQATAAAFHGVDPF

SEQ ID NO: 918829 - protein, 390 aa, Homo sapiens
AGRAARVSAQDFTSAAMLAPGCELDPDQEVVRTRPEDVPASPSTSTMIVSVLRPPSHASCTACGTVTFHIVERMASVIPASNRSMRSDRNTYVGKRFVHVKNPYLDLMDEDILYHLDLGTKTHNLPAMFGDVKFVCVGGSPNRMKAFALFMHKELGFEEAEEDIKDICAGTDRYCMYKTGPVLAISHGMGIPSISIMLHELIKLLHHARCCDVTIIRIGTSGGIGIAPGTVVITDIAVDSFFKPRFEQVILDNIVTRSTELDKELSEELFNCSKEIPNFPTLVGHTMCTYDFYEGQGRLDGALCSFSREKKLDYLKRAFKAGVRNIEMESTVFAAMCGLCGLKAAVVCVTLLDRLDCDQINLPHDVLVEYQQRPQLLISNFIRRRLGLCD

SEQ ID NO: 918830 - protein, 453 aa, Homo sapiens
AGRAARVSAQDFTSAAMLAPGCELDPDQEVVRTRPEDVPASPSTSTMIVSVLRPPSHASCTACGTVTFHIVERMASVIPASNRSMRSDRNTYVGKRFVHVKNPYLDLMDEDILYHLDLGTKTHNLPAMFGDVKFVCVGGSPNRMKAFALFMHKELGFEEAEEDIKDICAGTDRYCMYKTGPVLAISHGMGIPSISIMLHELIKLLHHARCCDVTIIRIGTSGGIGIAPGTVVITDIAVDSFFKPRFEQVILDNIVTRSTELDKELSEELFNCSKEIPNFPTLVGHTMCTYDFYEGQGRLDGALCSFSREKKLDYLKRAFKAGVRNIEMESTVFAAMCGLCGLKGQKQGEEREGERSSLVRVDGQSDSSAGCCRNLSEVILRAFLSLLQIFVTLLSLLPAGFPPGCFLLYISVVTALHCIFFLMLLLDLLVADFRLQIALPQATAAAFHGVDPF

SEQ ID NO: 918831 - protein, 138 aa, Homo sapiens
MVYWGIVMLFPKLSCHPNQPANTTGSSLIFNVCDPKCQCGLSARLWLDQAHYKQFPQLAPGNMWCLEAWRCQEPQGPKEGVTALAWGAPRSGLPEGPQLSLLFTCNVVSKTHLSPVCVTAVLALPFDGSWFLSCDQKE

SEQ ID NO: 918832 - protein, 879 aa, Homo sapiens
MPFGFQREDNSRRKELPMQRPGGTGERSGTRELGDSRNHRTSKRVSQSWLRELLGLGSLKDCSSSLSFLSPAMWAGTGSRERPDSGSRHFQACEGRELPGPLRAEGCWGLQLQLTGCSCAQECGLLPHQLGRGRAPSGLVDCAAPAVPPLLQLASSQWLLHTGLSVFMLKVQVNDIISRQYLSQAVVEVFVNYTKTNSTVTKSNGAVLIKVPYKLGLSLTIIAYKDGYVLTPLPWKTRRMPNAKSQPSVQFSKALIKLPDNHHISNVTGYLTVLQQFLKVDNFLHTTGITLNKPGFENIELTPLAAICVKIYSGGKELKVNGSIQVSLPLLRLNDISAGDRIPAWTFDMNTGAWVNHGRGMVKEHNNHLIWTYDAPHLGYWIAAPLPGTRGSGINEDSKDITAYHTVFLTAILGGTIVIVIGFFAVLLCYCRDKCGTPQKRERNITKLEVLKRDQTTSTTHINHISTVKVALKAEDKSQLFNAKNSSYSPQKKEPSKAETEERVSMVKTRDDFKIYNEDVSFLSVNQNNYSRNPTQSLEPNVGSKQPKHINNNLSSSLGDAQDEKRYLTGNEEAYGRSHIPEQLMHIYSQPIAILQTSDLFSTPEQLHTAKSATLPRKGQLVYGQLMEPVNRENFTQTLPKMPIHSHAQPPDAREEDIILEGQQSLPSQASDWSRYSSSLLESVSVPGTLNEAVVMTPFSSELQGISEQTLLELSKGKPSPHPRAWFVSLDGKPVAQVRHSFIDLKKGKRTQSNDTSLDSGVDMNELHSSRKLEREKTFIKSMHQPKILYLEDLDLSSSESGTTVCSPEDPALRHILDGGSGVIMEHPGEESPGRKSTVEDFEANTSPTKRRGRPPLAKRDSKTNIWKKREERPLIPIN

SEQ ID NO: 918833 - protein, 234 aa, Homo sapiens
VGGMSPAGLSKTEAEALPATEVSSQKNDPDKDPIIRAVQGEIVVIGATNRLDSIDPALRRPGRFDREFLFNLPDQKARKHILQIHTRDWNPKLSDAFLGELAEKCVGYCGADIKALCTEAALIALRRRYPQIYASSHKLQLDVSSIVLSAQDFYHAMQNIVPASQRAVMSSGHALSPIIRPLLERSFNNILAVLQKVFPHAEISQSDKKEDDVWKCPLCSPDLRLGSIALLKLC

SEQ ID NO: 918834 - protein, 757 aa, Homo sapiens
VVSRGSRGDKKRDIETLILEDSEDENALSIFETNCHSGSPKKQSSSAAIHKPYLHFTMSPYHQPTSYRPRLLLSGERGSGQTSHLAPALLHTLERFSVHRLDLPALYSVSAKTPEESCAQIFREARRTVPSIVYMPHIGDWWEAVSETVRATFLTLLQDIPSFSPIFLLSTSETMYSELPEEVKCIFRIQYEEVLYIQRPIEEDRRKFFQELILNQASMAPPRRKHAALCAMEVLPLALPSPPRQLSESEKSRMEDQEENTLRELRLFLRDVTKRLATDKRFNIFSKPVDVSDYLEVIKEPMDLSTVITKIDKHNYLTAKDFLKDIDLICSNALEYNPDKDPGDKIIRHRACTLKDTAHAIIAAELDPEFNKLCEEIKEARIKRGLSVTSEQINPHSTGARKTETRVEEAFRHKQRNPMDVWHNSANKCAFRVRRKSRRRSQWGKGIIKKRKVNNLKKDEEDTKFADYENHTEDRKLLENGEFEVSTDCHEENGEETGDLSMTNDESSCDIMDLDQGQRLNNGAGTKENFASTEEESSNESLLVNSSSSLNPEQTSRKETFLKGNCLNGEASTDSFEGIPVLECQNGKLEVVSFCDSGDKCSSEQKILLEDQSKEKPETSTENHGDDLEKLEALECSNNEKLEPGSDVEVKDAELDKEGASKVKKYRKLILEQAKTTSLELVPEEPSEPVPPLIVDRERLKKLLDLLVDKSNNLAVDQLERLYSLLSQCIYRHRKDYDKSQLVEEMERTVHMFETFL

SEQ ID NO: 918835 - protein, 757 aa, Homo sapiens; identical to SEQ ID NO: 918834

SEQ ID NO: 918836 - protein, 757 aa, Homo sapiens; identical to SEQ ID NO: 918834

SEQ ID NO: 918837 - protein, 238 aa, Homo sapiens [sequence omitted]

SEQ ID NO: 918838 - protein, 471 aa, Homo sapiens
MDLVYGPLGLLCKGQGACGDLSGGGLSVAVPGEIRGYELAHQRHGRLPWARLFQPSIQLARQGFPVGKGLAAVLENKRTVIEQQPVLCEVFCRDRKVLREGERLTLPRLADTYEMLAIEGAQAFYNGSLMAQIVKDIQAAVVQPHPSAHSSCCPIAGGIVTAEDLNNYCAELIEHPLNISLGDAVLYMPSARLSGPVLALILNILKGYNFSRESVETPEQKGLTYHRIVEAFRFAYAKRTLLGDPKFVDVTEAHGIQQPLNVNTSMFISQPALAPLGSQQVVRNMTSEFFAAQLRSQISDHTTHPISYYKPEFYTPDDGGTAHLSVVAEDGSAVSATSTINLYITNEFGAPPSPANFIQPGKQPLLSMCPTIMVGQDGQVRMVVGAAGGTQITTDTALAIIYNLWFGYDVKRAVEEPRLHNKLLPNVTTVERNIDQVGRGLEKLSHGVGSQGILGWRPGSSQSGQWLVSSL

SEQ ID NO: 918839 - protein, 471 aa, Homo sapiens; identical to SEQ ID NO: 918838

SEQ ID NO: 918840 - protein, 351 aa, Homo sapiens
MNKSFSYSDLARWKTSFGDMLCYLPQVEDLLTSFWKSLQQDTVMLMSLPDVCQLFKCYDVQLYKVGGRTMRMVLKSKRRVSVLKSDLQAIINQGTLATSKKALASDRSGADELENNPEMKCLRNLISLLGTSTDLRVFLSCLSSHLQAFVFQTSRSKEEFTKLAASFQLRWNLLLTAVSKAMTLCHRDSFGSWHLFHLLLLEYMIHILQSCLEEEEEEEDMGTVKEMLPDDPTLGQPDQALFHSLNSSLSQACASPSMEPLGVMPTHMGQGRYPVGVSNMVLRILGFLVDTAMGNKVLLEDETTESAVKLSLPMGQEALITLKDGQQFVIQISDVPQSSEDIYFRENNANV

SEQ ID NO: 918841 - protein, 193 aa, Homo sapiens
LSSSESSKLFQPLPVTQFQSCFHMFRYLFSSAPLYWYQFTVLVHFHAANKDIPETGKFTKERGLLDSQFDVAGEASQSWQKVKGTSHMAADKRRESMCRQTPIFETIRTPTPRTHREERTTLDASSLRAITLTAKVCGFTPEVNACTWLTLNQIPQQVNSNPPAVTISPSPTMSSGTLPEGIPHPAKDIPDST

SEQ ID NO: 918842 - protein, 137 aa, Homo sapiens
RTPEVSDLLSHRMWARPLPDLTLGMTEIQTQEGYVALGQAVAEKTSEHLYIPLSAVSYLEGPPDLQTLRHSCSGSSWNSHCFTAFLRGSPALLPGSYSSPVVPPIAIKPPNLYWEDLYLLFQGKKMIKLSHMVVIWA

SEQ ID NO: 918843 - protein, 234 aa, Homo sapiens
MTAYSRMSLNILSILICILYLKIPLPGSPMTDSRTTIPLTVSEAPAWTGSGLSLISLDSHGSRRLPLPHPSLCVMESCVFVFIPTESEPLEVRAMTVSYTSLAPSVSPTHQHGPVSPRPHVGMGLCPPTHVSAWACVPQPTLQHGACPPGHASAWAMSPNPRVSMGPVSPNPCFSMGHVPQATRQHGPCPHIGESLMQVGSPGKLTQRQKSVYWWRGSALGFRVCEGREGKPVG

SEQ ID NO: 918844 - protein, 136 aa, Homo sapiens [sequence omitted]

SEQ ID NO: 918845 - protein, 279 aa, Homo sapiens
MSGSFEFSCSLLTWALPPTACLADHIPQMVPNCQPFEPTDTLMIWKAFISPSERDLADASSFSTQYMEHADTSPAAENNVCQKHAFPERTTIISGMFLPNLPFERNPELFLNRIWRLPNTTNIQTACGFLHYKSLLCGGENRGYGANGSGDIGGLGGLLRGPELPSLAFSSPLPGHQPKDPQCLDPVVFNSGRTLESSEELTEIWMLTSNSLSSENSSCFWGVFGIGCDYLGERAFSRRPEPSSDRKGGSDSYHLCTSGDSHVNYSCCQCQLGIVQSRT

SEQ ID NO: 918846 - protein, 83 aa, Homo sapiens
ARSGGGSNRRRSRERRGQNPASLAQGEVAPVGAQRDTQTFQQRPQRQNKIVQGAAHPHSAETLPRTSLAAVFPLAPPPTWNKA

SEQ ID NO: 918847 - protein, 118 aa, Homo sapiens
MGLIALCNLALAIQTVNAWILMVLMKWFSLCKQSKVAFSILPATSQSTSTYGTPDLAWSSLGESNRSQSLPSRNCVSGGEDHTQENQVVTRGAMRQYIVHFPTARVKGLGSEALVPEF

SEQ ID NO: 918848 - protein, 144 aa, Homo sapiens
MKRRKASPQTCGPFPDLICYLSSEAKKMASAQDSRRVGLHTAHNLLCKEGLLVVFVSSGASEVTVKLATSQENMHLKGLLGHPNCGTKITCVPFFSQLGARSDVIDKLGPFSPGVTSVLVADLGALTKTGPVQASIFWCLCGVK

SEQ ID NO: 918849 - protein, 155 aa, Homo sapiens
MAGVAGIQGNKSLGCTDLRALGLAHETSFSSLASRAGMGGPAAMMMHVYMLNFVKDSGIAGIRGKRDLHENEEPRSQEPTWKHHSALEKPPNYSGCGGSRHGLTVLGNWLGSLDFTKPLILSSHFKYEIQLDNHVFSHVFWSNILWVKFISTKLL

SEQ ID NO: 918850 - protein, 155 aa, Homo sapiens; identical to SEQ ID NO: 918849

SEQ ID NO: 918851 - protein, 1066 aa, Homo sapiens
AILDAVNGNIEDAMTAFESIKSVVSYWNLALIFHRKAEDIANDALSPEEQEECKNYLRKTRGYLIKILDDSDSNLSVVKKLPVPLESVKEMLKSVMQELENYSEGDPLYKNGSLRNADSEIKHSTPSPTKYSLSPSKSYKYSPKTPPRWAEDQNSLLKMIRQEVKAIKEEMQELKLNSSKSASHHRWPTENYGPDSVPDGYQGSQTFHGAPLTEFKSTKEGFSIPVSADGFKFGISEPGNQEKESEKPLENDTGFQAQDISGQKNGRGVIFGQTSSTFTFADVAKSTSGEGFQFGKKDPNFKGFSGAGEKLFSSQCGKMANKANTSGDFEKDDDAYKTEDSDDIHFEPVVQMPEKVELVIGEEGEKVLYSQGVKLFRFDAEVRQWKERGLGNLKILKNEVNGKPRMLMRREQVLKVCANHWITTTMNLKPLSGSDRAWMWSASDFSDGDAKLERLAAKFKTPELAEEFKQKFEECQQLLLDIPLQTPHKLVDTGRAAKLIQRAEEMKSGLKDFKTFLTNDQTKVTEEENKGSGTGAAGASDTTIKPNPENTGPTLEWDNCDLREDALDDSVSSSSVHASPLASSPVRKNLFHFGESTTGSNFSFKSALSPSKSPAKLNQSGTSVGTDEESDVTQEEERDGQYFEPVVPLPDLVEVSSGEENEKVVFSHRAELYRYDKDVGQWKERGIGDIKILQNYDNKQVRIVMRRDQVLKLCANHTITPDMTLQNMKGTERVWVWTACDFADGERKVEHLAVRFKLQDVADSFKKIFDEAKTAQEKDSLITPHVSRSSTPRESPCGKIAVAVLEETTRERTDVIQGDDVADAASEVEVSSTSETTTKAVVSPPKFVFGSESVKRIFSSEKSKPFAFGNSSATGSLFGFSFNASLKSNNSETSSVAQSGSESKVEPKKCELSKNSDIEQSSDSKVKNLSASFPMEESSINYTFKTPEKEPPLWHAEFTKEELVQKLSSTTKSADHLNGLLREAEATSAVLMEQIKLLKSEIRRLERNQEQEESAANVEHLKNVLLQFIFLKPGSERERLLPVINTMLQLSPEEKGKLAAVAQGEE

SEQ ID NO: 918852 - protein, 377 aa, Homo sapiens
GFTPLGTLVLQDTRLGIIGEELNTTDLYSYRKVTDNISSCMENFNLGKSLEDFRFSHMAKYVWIAEYFYQGFKRWIKEPTLEMFLSRILASWTNSAIQVLESSSPSLTDSLNGNSSIVGRLLEYVYTHWEHPLDALRHQTKIMFKNLLQMHRLTVEGADFVPDPFFVELTESLLRLEWHIKGKYTCLGCLVECIGVEHILAIDKTIPSQILEVMGDQSLVPYASDLLETMFRNHKSHLKSQTAESSWIDQWHETWVSPLLFILCEGNLDQKSYVIDYYLPKLLSYSPESLQYMVKILQTSIDAKTGQEQSFPSLGSCNSRGALGALMACLRIARAHGHLQSATDTWENLVSDARIKQGLIHQHCQVSKENYLDLYMQ

SEQ ID NO: 918853 - protein, 142 aa, Homo sapiens
TYTSFFWNMFPSKAFSFSEEGIGDQKPIPQNMALQLAELKKPLKVSVTLPSSTLSLPKHRIKSFSKEEKLKLVNAAGQTFVTNYSVGPPDFVPGHCMFFKSIDNPKDNLLTPQNHPYFPISLSPRKRVYKDLYLIGYVTMAR

SEQ ID NO: 918854 - protein, 574 aa, Homo sapiens
SVDAAADAARSNRVTVFPVGIGDRYDAAQLRILAGPAGDSNMVKLQQIEDLPTMVTLGNSFLHKLCSRFVRIRMDEDGNEKRPGDVWTLPDQCHTVTCQPDGQTLLKSHRVNCDRGPRPSCPNSQSPVKVEDTCGCRWTCPYFVNLSKIKNATAACERSIEDKKCYCERLKRIPAVFHEDENLFLVKDFKISIFNYRFILQQQEEERIKAEELYEKDTEELKIMEEQYRTQTEVKKQSKLTLKSLEVELKTVRSNSNQTSHTHEKERDLWQENHLMRDEIARLRLEIDTIKHQNRETENKYFKDIEIIKENNEDLEKTLKLNEETLTKTITWYSKELNVLMDENTMLNFELEKEKQSTPRLETEMESYRCRLAAALCDHDQCQSLKRDLQLAFQSTVNEWCHLQENTNSHIQILSQQLSKAESTSSGLETELRYEREALKEKTLGIEHMQGVLSRTQCPLKDIEHMYQNDQPILEKYVRKQQSIEDGLFQLQSQNLLYQQQCNDAHKKADNQEKTIINIQVKCEDTVEKLQAECRKLEENNKGLMKECTLLKERQCQYEKEKEKGEMKNLVVIL

SEQ ID NO: 918855 - protein, 269 aa, Homo sapiens
ELTMDLNVRMWRSRRTTLEIGHHTSHVQEAQSALQICLTHPELQNEICCQLIKQTRRRQPQNQPGPLQGWQLLALCVGLFLPHHPFLWLLRLHLKRNADSRTEFGKYAIYCQRCVERTQQNGDREARPSRMEILSTLLRNPYHHSLPFSIPVHFMNGIYQVVGFDASTTVEEFLNTLNQDTGMRKPAQSGFALFTDDPSGRDLEHCLQGNIKVKPSPFQEPSPTNSKEATLYKKSKLCKKFNSGVFQNFNQSNLHDKKKKMQDFNHKGP

SEQ ID NO: 918856 - protein, 98 aa, Homo sapiens
ARLRFAPAAGAMGLSRVRAVFFDLDNTLIDTAGASRRGMLEMGSRYVAHAGPELLNSSDPATLAFQSAGITGMSHHARPKKHKFYFHIFMTRMKDVGL

SEQ ID NO: 918857 - protein, 259 aa, Homo sapiens
ARLRFAPAAGAMGLSRVRAVFFDLDNTLIDTAGASRRGMLEVIKLLQSKYHYKEEAEIICDKVQVKLSKECFHPYNTCITDLRTSHWEEAIQETKGGAANRKLAEECYFLWKSTRLQHMTLAEDVKAMLTELRKEVRLLLLTNGDRQTQREKIEACACQSYFDAVVVGGEQREEKPAPSIFYYCCNLLGVQPGDCVMVGDTLETDIQGGLNAGLKATVWINKNGIVPLKSSPVPHYMVSSVLELPALLQSIDCKVSMST

SEQ ID NO: 918858 - protein, 246 aa, Homo sapiens
MYTNNEIDFNSEQKVFKEISGKNIGKLKHILLVCTLTKEDNRCVGKIPEDEQLHVLPLYKMANTDEFGSEENQNAKVGSGAIQVLTAFPREVRRLPEPAKSCRQRQLEARKAAAEKKKIQKEKLSTPEKIKQEALELAGITSDPGLSLKGGLSQQGLKPSLKVEPQNHFSSFKYSGNAVVESYSVLGNCRPSDPYSMNSVYSYHSYYAQPSLTSVNGFHSKYALPSFSYYGFPSSNPVFPSHFRVP

SEQ ID NO: 918859 - protein, 117 aa, Homo sapiens
LTEKPWALGAGDFNSALKGSPGFQDKLWNPMKGEEGRIPAAGASQLDRAWQSFGLPLGSSEKLFGALKSEEKLWDPFSLEEGPAEEPPSKGAVKEEKGGGGAEEEEEELWSDSEHNF

SEQ ID NO: 918860 - protein, 622 aa, Homo sapiens
MYTNNEIDFNSEQKVFKEISGKNIGKLKHILLVCTLTKEDNRCVGKIPEDEQLHVLPLYKMANTDEFGSEENQNAKVGSGAIQVLTAFPREVRRLPEPAKSCRQRQLEARKAAAEKKKIQKEKLSTPEKIKQEALELAGITSDPGLSLKGGLSQQGLKPSLKVEPQNHFSSFKYSGNAVVESYSVLGNCRPSDPYSMNSVYSYHSYYAQPSLTSVNGFHSKYALPSFSYYGFPSSNPVFPSQFLGPGAWGHSGSSGSFEKKPDLHALHNSLSPAYGGAEFAELPSQAVPTDAHHPTPHHQQPAYPGPKEYLLPKAPLLHSVSRDPSPFAQSSNCYNRSIKQEPVDPLTQAEPVPRDAGKMGKTPLSEVSQNGGPSHLWGQYSGGPSMSPKRTNGVGGSWGVFSSGESPAIVPDKLSSFGASCLAPSHFTDGQWGLFPGEGQQAASHSGGRLRGKPWSPCKFGNSTSALAGPSLTEKPWALGAGDFNSALKGSPGFQDKLWNPMKGEEGRIPAAGASQLVFYQHKNLNQPNHGLALWEAKMKQLAERARARQEEAARLGLGQQEAKLYGKKRKWGGTVVAEPQQKEKKGVVPTRQALAVPTDSAVTVSSYAYTKVTGPYSRWI

SEQ ID NO: 918861 - protein, 333 aa, Homo sapiens
MASNDDARKLPAGSFGTTDCPHKEPVGWTPAPAPCLKHPCRPSACTGAPLKAPTYGSAHTPGSLQLTTTQGPSSSPPPGSFKLSPSRVPPAFPALGSLQFSSPRVPPASPLNLPGVPAARASAPGVPPAGFSLAPWGLVLHPSLSTSCLQAVSELCAPDTHEQNYSPKDVRAPVAGTCEHQQIKTQFSRGMIFAFRKMKSRKLRDGAHSLVFQHLSRGSTKHDSRQCASVWTFVMLYFLLRGAPDSGQNALGDPVMTTQPPLLLLVEQTTGSSRGENTVGTLDVGRGSKSPKQGAGLGRGEGAVSVVALDASEVIFRALESSPRARAPFVVLE

SEQ ID NO: 918862 - protein, 151 aa, Homo sapiens
MEYDEELIPHLQMCGGAATLEACAGLYGPHCTLRAMNLVADPQVTARQEGTEAMEDLRVWPAKPALGSMLEMEMGCMGQQRAPGALLRYPGLPQGPHMDLVWKCPPRLRVPGSGQSQRQWLGGSGSVFQHQQLNCGAHHTRHVPGEAEGLC

SEQ ID NO: 918863 - protein, 181 aa, Homo sapiens
VRLHGHPVSAVGGETGQRSTMWVFLMGQARVHWHHFHSQASNSTLSHGTPRRTEDAPRATLQQAGWAPFPAALGDLHGSLQSPAPLQGCTPPSTSNDSKHKPRLGKCSWCQTQMTFPFLDFTNYSKPSLFLLFHTGALSLLCGCFSRISNCLFLVEKEEILMLFTIVPIIHLSFLCISWIA

SEQ ID NO: 918864 - protein, 166 aa, Homo sapiens
CIIRGVPAMIKHQGKAAFPVHDRRRSFGSTDKTCLLCLYQKMKGIEIKRREKLKCGTKIERRKRLRDRPEVVGGSFSWSKEQEDRGLISQGRSPDPSHGTKSHARPYEETTKQALWRRCRRHRRRQARERGLEQILPCSLRRNQSWSHLDLRLLASRMVAAAKMAK

SEQ ID NO: 918865 - protein, 328 aa, Homo sapiens
SSHMPERSHIVLPLSEEKSTRGFYFAKLYYEAKEYDLAKKYICTYINVREMDPRAHRFLGLLYELEENTEKAVECYREQLLDCEGEDGWNKLFDLIQSELYVRPDDVHVNIRLVELYRSTKRLKDAVARCHEAERNIALRSSLEWNSCVVQTLKVPRPKIKLIKGEAGQNLLEMMACDRLSQSGHMLLNLSRGKQDFLKVVVETFANKSGQSALYDALFSSQSPKDTSFLGSDDIGNIDVQEPELEDLARYDVGAIRAHNGSLQHLTWLGLQWNSLPALPGIRKWLKQLFHHLPQETSRLETNAPESICILDLEVSKDFNKLNILNFV

SEQ ID NO: 918866 - protein, 143 aa, Homo sapiens
MAGILSMEFRLLSSGPSRNCLILWEQERIPGPWQLLNAAQHSRFESYRPGTGLEEDTSEAAGLTRPELGGASAEGETYAELSKRPNLRTRAGHGSNQGGFKPQNPHRCDAFICFIQKQARKEMGLDCILSAKPYPTFSLCHPQ

SEQ ID NO: 918867 - protein, 148 aa, Homo sapiens
HNHFLAPLGSMSHDVSCSFLRSYKENRREEGPSVLEAGVLSGYPCWEPHPHSQWNCMSNLIFYHQNVLYVLLVISSFILRKILCKTFYPNVQTGNRCSQAVTCTGSHPPAMWLQPSLAIAATAALHPAALGPIRCWLHPKMHILGDFS

SEQ ID NO: 918868 - protein, 159 aa, Homo sapiens
MPHFHQMDSSQSLCCVPKGTSQDSRSGKKHPGSQGWELHPRITNALVNACSTCSVAPLASTAGSLHLYKVNNKNIIKQRQSQIATLVLRYNQFMILGEQEARSQQVWTHSRGHEGFYVLSPGFHPSHEGFYALGLGCSAAGQPSTLKHRTWCSIGHKKF

SEQ ID NO: 918869 - protein, 159 aa, Homo sapiens; identical to SEQ ID NO: 918868

SEQ ID NO: 918870 - protein, 152 aa, Homo sapiens
EAPEELRAQEERTVMKKPTNETNSTLKVTRKNSAPLVLALSLLAKSSREVEKPSANVWKPFSIIKEILPNHTKHSDTSPIPPIMGLAAAALRPECHDSDDNSNDDNSNDEVSHLKFSSHSSHPKSLPSLPFIYTGVILCASVRPFCMYNDRQ

SEQ ID NO: 918871 - protein, 156 aa, Homo sapiens
EAPEELRAQEERTVMKKPTNETNSTLKVTRKNSAPLVLALSLLAKSSREVEKPSANVWKPFSIIKEILPNHTKHSDTSPIPPIMGLAAAALRPECHDSDDNSNDDNSNDEVSHLKFSSHSSHPKSLPSLPFIYTGVILCASVRPFCMYNDHLRHCL

SEQ ID NO: 918872 - protein, 703 aa, Homo sapiens
MEDKLKAANIQTSESETRLYNKCQDLESLIQEKDDVIQNLELQLEEQLELENQNLRLINQNQTEEIRTMQSKLQEVQGKKSSTVSTLKLSEGQRLSSLTFGCFLSRARSPPQVVKSEEMSKISSKEPEFTEGKDMEEMEIPEKSVDNQVLENNRGQRTLHQTPCGSEQNRKTRTSFATDGGISQNSGAPVSDWSSDEEDGSKGRSKSRCTSTLSSHTSEEGVQCSRMGSEMYLTASDDSSSIFEEETFGIKRPEHKKLYSWQQEAQWKALNSPLGKGNSELSKKEQDSSSDELNKKFQSQRLDYSSSSSEANTPSPILTPALMPKHPNSLSGKGTQLVPSSHLPPPKLRIPNVFSISVALAKRHLSQPQLSSDRMFGTNRNAISMIRPLRPQETDLDLVDGDSTEVLENMDTSCDDGLFSYDSLDSPNSDDQEHCDSAKKVAYSKPPTPPLHRFPSWESRIYAVAKSGIRMSEAFNMESVNKNSAATLSYTTSGLYTSLIYKNMTTPVYTTLKGKATQISSSPFLDDSSGSEEEDSSRSSSRTSESDSRSRSGPGSPRAMKRGVSLSSVASESDYAIPPDAYSTDTEYSQPEQKLPKTCSSSSDNGKNEPLEKSGYLLKMSGKVKSWKRRWFVLKGGELLYYKSPSDVIRKPQGHIELSASCSILRGDNKQTVQVLNFFFFFFFFVSCQTQFSIIQPNGKEIG

SEQ ID NO: 918873 - protein, 560 aa, Homo sapiens
MEDKLKAANIQTSESETRLYNKCQDLESLIQEKDDVIQNLELQLEEQLELENQNLRLINQNQTEEIRTMQSKLQEVQGKKSSTVSTLKLSEGQRLSSLTFGCFLSRARSPPQVVKSEEMSKISSKEPEFTEGKDMEEMEIPEKSVDNQVLENNRGQRTLHQTPCGSEQNRKTRTSFATDGGISQNSGAPVSDWSSDEEDGSKGRSKSRCTSTLSSHTSEEGVQCSRMGSEMYLTASDDSSSIFEEETFGIKRPEHKKLYSWQQEAQWKALNSPLGKGNSELSKKEQDSSSDELNKKFQSQRLDYSSSSSEANTPSPILTPALMPKHPNSLSGKGTQLVPSSHLPPPKLRIPNVFSISVALAKRHLSQPQLSSDRMFGTNRNAISMIRPLRPQETDLDLVDGDSTEVLENMDTSCDDGLFSYDSLDSPNSDDQEHCDSAKKVAYSKPPTPPLHRFPSWESRIYAVAKSGIRMSDAGSKAGESAQWDSYFFSSAEATPVQWGQHFWMHRVCLALGGRLRKPAALGVGWGYGDGDGFLEPGAGTGLWRLGGIWGRWLNSVFSG

SEQ ID NO: 918874 - protein, 263 aa, Homo sapiens
MGSWLHSSHSRCGLCFRLNDEVPKYRDQILNPGLMVFPKPVTALEYAFSRSDLTSYAGYTEDLKKFLKPYTLEEQKNLTVCPDGALFEQKGPVYVACQSPISLLQACRGMNDLDFGYSQRNPCILVKMNRIIGLKSEGVPRIDCVSKNEDIPNVAVYPHNGIIDLKYFPYYGEKLHVGYLQPLVAVQVSFAPNDTGKEVTVECKIDGSANLKSQDDRDKFLGRVMFKITACAYKPGPGEFYYHGRYTQTMLSLSDYMRYCRVY

SEQ ID NO: 918875 - protein, 263 aa, Homo sapiens; identical to SEQ ID NO: 918874

SEQ ID NO: 918876 - protein, 201 aa, Homo sapiens
MSVHRHLGPRVRPGPGCCWPLVPAGHPRSGRAGSPALRGAEGRRRRSPGLSQGGLETLPRLDTEREDRDARPPYGLQRLPVQMAPSARRQGGRLGAGGSFVLLSADAVRDGLGTILRGGAEEGSYDNWPHTRPWEAQGARSPRKGRYICRGPGSRLRPPGMGPACSQAKGRGGKAPTRPVSVTLCPSPNVGPPRTFLQWHQ

SEQ ID NO: 918877 - protein, 198 aa, Homo sapiens
HKKNHSEGEEWMLRNKTRNCKREISDRKENVGNATGKEFQENKDKGQGGLKGGPEGGKAGGRFLVFNSLVRLLASAPSTPQPSKLRRKPPPRACSRGGGFSRHSLSHGNQPPASPPGRGCARSERGSRTPGTGNRAAGGEQASEPGSTPNGLDCESAREKTVWLGLDPCRPPPPPHTPSPGVPFITLCLQLQKKLPTS

SEQ ID NO: 918878 - protein, 337 aa, Homo sapiens
SQSSLQSLTYTEGLGSCPSQHRGHGAATAPWLGLARVSPSPEISPFMGPPHTPSPALWAFSTDVGTLTIAAPTRGTNTGMFTIPAPTWGRSLFQHRHGDAHYSSTDVGTLAISAPTRGTDTGTLTIPAPTRGTDTGTLTIPAPTRGRSLFQHRHGDDHYSSTDTGTFTISAPTRGRSLFQHRHGDAHYSSTDKGHRHGDAHYSSTDKGHRYGDAHSTSTDTGTLTIAAPTRGTDMGTLTIPAPTRGTDMGTLTIPAPTRGRSLFQHRHGDTHYSSTDTGHRHGDAHYSSTDTGTLTIPAPTRGTDTGTLTVPAPIRGTNMRTLTIAAPIQGCSLFQR

SEQ ID NO: 918879 - protein, 170 aa, Homo sapiens
TYTLSPNRTKWEMLEAFPLRTGRGQGCQLSLFIFNIVLEVLARAIRPEKQIKGIQIGKEVKLSLFIDEIILYLENPKDSTKRFLELINNFSKDSGHKTNVQKSVAFPYTITFKLGAKSRIQCHLQHTNTHTHTHTHTHTPLGIHITRGVKGLYEGNYKTLLKEIIDDTNK

SEQ ID NO: 918880 - protein, 108 aa, Homo sapiens
PSVNDSLNFHRYRIGSFWWVLGLADFKNEAAEPHGLPDYQQPALVTLCKEFTLIEEKCTNNVNEKPEILGNRGLSPSAQLMNDINWCIIHYFSRRMILRCMVCFTSQI

SEQ ID NO: 918881 - protein, 108 aa, Homo sapiens; identical to SEQ ID NO: 918880

SEQ ID NO: 918882 - protein, 108 aa, Homo sapiens; identical to SEQ ID NO: 918880

SEQ ID NO: 918883 - protein, 349 aa, Homo sapiens
MSNVYTVKRTENYEIHEKVLNEVVGAMMYHTFSLTREDLENFKALRVIVQVGSGYDNVAIKAAGELEIAVCSIPSAAVEETADSTTGHILNLYWGNRSLYQALREGTRVQSVEQIGEVASVKARIRGEILGLIGFGRTQQEDGIERSLGVHRVYTQQDLLYQNDCVFLHCNLNEQNYHLIHDFTIKQMRQGAFLVNAARGGLEGRIRGAALDVNESEPFSFARGLLKDAWNLICTPLTACYSQQVSLEMSEAVATEIRQAIISRIPGSLRNCVNKEFFVTSALWRTSAAREDIIPGDIPVTDNLPTVVHPSQGPSPNSPQNTGTVESIPTSNSRECRKKTDNVVCLRKL

SEQ ID NO: 918884 - protein, 349 aa, Homo sapiens; identical to SEQ ID NO: 918883

SEQ ID NO: 918885 - protein, 349 aa, Homo sapiens; identical to SEQ ID NO: 918883

SEQ ID NO: 918886 - protein, 137 aa, Homo sapiens
MPTMLESSELEVITSEAQGPPESLTVRCWMILSDPSPQVKEDMLHKEGLQVYGGGFIGMDVCSNSELCGTKISSKHLKKTFLDRENPFKESTDGPPLIVALVFMSASASAISRPQQEHSQVREGRPKAPGPFILLSC

SEQ ID NO: 918887 - protein, 137 aa, Homo sapiens; identical to SEQ ID NO: 918886

SEQ ID NO: 918888 - protein, 137 aa, Homo sapiens; identical to SEQ ID NO: 918886

SEQ ID NO: 918889 - protein, 434 aa, Homo sapiens
MLAGIATARFYTASPLPPSGPPFLSFEEDPRQQALELVVQEVSSVLRSAEEKVVVCHVVGQAIQFLVSETPALGAGCRLYDMRLSPFHLQDQVAETSAMSDVLKDILKHLAGSASPSVVLITKPTTVKEAQNLQCAASTAQESCPPKPPRAHELKLLVRNIHVLLLSEPGASGHINAVCVVQLNDPVQRFSSTLTKNTPDLMWEEEFTFELNAKSKELHLQISEAGRSSEGLLATATVPLDLFKKQPSGPQSFTLTSGSACGSSVLGSVTAEFSYMEPGELKSWPIPPPVPAAKIEKDRTVMPCGTVVTTVTAVKTKPRVDVGRASPLSSDSPVKTPIKVKVIEKDISVQAIACRSAPVSKTLSSSDTELLVLNGSDPVAEVAIRQLSESSKLKLKSPRKKSTIIISGISKVPSWWLGRCSSGHLSVTCCSSAL

SEQ ID NO: 918890 - protein, 497 aa, Homo sapiens
MLAGIATARFYTASPLPPSGPPFLSFEEDPRQQALELVVQEVSSVLRSAEEKVVVCHVVGQAIQFLVSETPALGAGCRLYDMRLSPFHLQDQVAETSAMSDVLKDILKHLAGSASPSVVLITKPTTVKEAQNLQCAASTAQESCPPKPPRAHELKLLVRNIHVLLLSEPGASGHINAVCVVQLNDPVQRFSSTLTKNTPDLMWEEEFTFELNAKSKELHLQISEAGRSSEGLLATATVPLDLFKKQPSGPQSFTLTSGSACGSSVLGSVTAEFSYMEPGELKSWPIPPPVPAAKIEKDRTCIFKAETQVATEEKHYYHIRDLQVSQDHDAALMQGYTASVDSTHQEDAPSHPERAAASAPPEEAESAQASLAPKPQEDELDSWDLEKEPQAAAWSSQVLLDPDGDELSESSMSVLEPGTAKKHKGGILRKGAKLFFRRRHQQKDPGMSQSHNDLVFLEQPEGSRRKGITLTRILNKKLLSRHRNKNTMNGAPVEPCT

SEQ ID NO: 918891 - protein, 497 aa, Homo sapiens; identical to SEQ ID NO: 918890

SEQ ID NO: 918892 - protein, 497 aa, Homo sapiens; identical to SEQ ID NO: 918890

SEQ ID NO: 918893 - protein, 497 aa, Homo sapiens; identical to SEQ ID NO: 918890

SEQ ID NO: 918894 - protein, 497 aa, Homo sapiens; identical to SEQ ID NO: 918890

SEQ ID NO: 918895 - protein, 751 aa, Homo sapiens; identical to SEQ ID NO: 846008

SEQ ID NO: 918896 - protein, 114 aa, Homo sapiens
MGGLALPGFILLQVGLSRRSGSTGKMQACMVPGLALCLLLGPLAGAKPVQEEGDPYAELPAMPYWPFSTSDFWNYVQHFQALGAYPQIEDMARTFFAHFPLGSTLGFHVPYQED

SEQ ID NO: 918897 - protein, 145 aa, Homo sapiens
MGAAPRLPAPRRANPGFSEHLVKGGDRPRREACALARGTRRRSLRVECLLGAPTAPGNTPVVRGVAFAALRWLQHPMGARGVIESRRRTDGWTLRALRGLSKGTAEESTLWPNAGGHIGVCQIVKPSGTMLKRVALCTPLPKHFH

SEQ ID NO: 918898 - protein, 157 aa, Homo sapiens
VSCVMNSPVMIMEDEGLMFSHTGTLRPLAEERMALAYEFLVLFLNGCPEAHGSPKSLQQCLQTGNGMTLRQMEDGLSVCNCKDISYCSCTVLVIRDSWIVKDLHWELTTGEHIFSQPPLISHGSFQTSQHALVTSPAEGTRFNPHAAVGGPQQQMTF

SEQ ID NO: 918899 - protein, 175 aa, Homo sapiens
EEHTPKLLVLVMNPDPTQKPLSVQCASVSCCIRRDDDSTDFMDLLGEFKEMKPARHLGQHLTLRFTPVIWAHLTTMAFAIPGACIRSHTPAPTPTVMENYNTDVHTGSSFYCPVPREALEQNQKKVKNKQPYTVVIILSPVMEPYLGLKYFDTDEASLCNFQRKGFCDTLSCLKE

SEQ ID NO: 918900 - protein, 175 aa, Homo sapiens; identical to SEQ ID NO: 918899

SEQ ID NO: 918901 - protein, 172 aa, Homo sapiens
MIFMHTMFSPRLYHVPGIPETKLQGFVQFFKFFPEFNHSYVIHSHLFKFLCDKLLGGLSCGRAVQKLLCTYTIKSGMGITSKRQEKRQCGWDLLLESSTFQKPLTITEKKLGTYLTPTENITIPTVDSRGHKVGWGEQQEGVTGGEGARRYESCVYEGRMWMGVERDQKPEH

SEQ ID NO: 918902 - protein, 1010 aa, Homo sapiens
LRQACMTERLSVCTAVIAPKQGNENRKQQFVQGRDNVHKENPFLDVTFYKETKSPFHEIKNRCKANSVVPSNKRENNISSSVLKISKSQNQPSLEIAKPSYFRDSGTISVPQFPMDLNSKMSSVYLKEIAKKKNDKKEAYVRDFTNIYWSQNRPDVKKQKLQNDKKTVEAENIFSKCYENDYPSLSSQNTCKRKDLISSNYCNCSSIQCNVRDSRKNFAILENANWEEAECLDSYVLTRLEKSQNWDCNVRHILRRNRGNCWIINNCKTKCENMKKTEEKWNWLLLLEIDLLSKEDYHCAKVINAYEEQSKLLVREILGSQTALITTVWLNGKGENDNTLQLRYNTTQKVFHVNNPFESFIIEIFYFHKSISGNKKDNSILTCCNILKCKKQIGIIGIQNLITRNMNTNIKNGILSIYLQDSVSEPLDILLKTNIAFLLNNFDSLTRIENDFELEEECIFKCMLYLKYPKNIVENHTAYLVKILTSSRLLEDNMKPMLKKRKLFRTEQVFEKSKKKLINSFSMTTQNTGFPIFETYEKIPLLMDFDDMDEISLIREITCQNMSCPQQVVNVENWAHYNSSTVKAHGNSCPQFIQNNRGYINENFYEVNMHSQDLNMERKQGHNKISNFDCEHIFEDLCNVRQQAIPASHNIIHNEETHTTSITQVLNFWNLLSEIEEKKYDLILKEEVKVTAESLTNSCQVHKDTKIEKEEKDSFFPMDDMFSVQSVSLISKEVNVEENKYVNQNYVTNTNEYESILPEREIANSKDFHRKNDSALYINHQFETGLSEGNDECFQDLAAKYLSTEALTIVKDFEMKRKFDLVLEELRMFHEISRENELLSTVETNNGQENYFGENDAEKVKMEIEKDLKMVVVNKIRASSSFHDTIADPNMGKSHQSLFKWKTVPNNGEQEVPNESCYPSRSEEELLYSTSEKDCETPLPKRPAFLPDECKEEFNYLLRGGSHFPHGISRVRPLKTCSRPIRIGLSRKARIKQLHPYLKQMCYGNLKENF

SEQ ID NO: 918903 - protein, 168 aa, Homo sapiens
MAAAWSAAESLIGRPLSRHRLVMQFLLDPQENWTASDTLIEQDWSQSFATSCLDIKTLAKAVLSMNGCQIIVCVGRGHWCVISIPSGYERSRLKVTLPEEGRGALPFLVSVAISSGSCSDNNAAVPTVLEGATTVISAAAVLRDPHDGAREIILEAMTISAVAIAAEM

SEQ ID NO: 918904 - protein, 197 aa, Homo sapiens
MGVNDLWQILEPVKQHIPLRNLGGKTIAVDLSLWVCEAQTVKKMMGSVMKPHLRNLFFRISYLTQMDVKLVFVMEGEPPKLKADVISKRNQSRYGSSGKSWSQKTGRSHFKSVLRECLHMLECLGIPWVQAAGEAEAMCAYLNAGGHVDGCLTNDGDTFLYGAQTVYRNFTMNTKVFIFFLFFSICLRTTFFKGLIK

SEQ ID NO: 918905 - protein, 156 aa, Homo sapiens
IAEQTLLIFHRYTNLFFRISYLTQMDVKLVFVMEGEPPKLKADVISKRNQSRYGSSGKSWSQKTGRSHFKSVLRECLHMLECLGIPWVQAAGEAEAMCAYLNAGGHVDGCLTNDGDTFLYGAQTVYRNFTMNTKVFIFFLFFSICLRTTFFKGLIK

SEQ ID NO: 918906 - protein, 127 aa, Homo sapiens
PAFCFQCLHMLECLGIPWVQAAGEAEAMCAYLNAGGHVDGCLTNDGDTFLYGAQTVYRNFTMNTKDPHVDCYTMSSIKSKLGLDRDALVGLAILLGCDYLPKGVPGVGKEQALKLIQILKGQSLLQR

SEQ ID NO: 918907 - protein, 890 aa, Homo sapiens
MWGEEEAEIKVTFQPLTAVIYEVQATCWYGAGSRQRSSIQLQAVAKCAQLLVSIKHKCPEDQDAEGFQKLLYFGSVAVGCTSERQIRLHNPSAVNAPFRIEISPDELAEDQAFSCPTAHGIVLPGEKKCVSVFFHPKTLDTRTVDYCSIMPSGCASKTLLKVVGFCRGPAVSLQHYCVNFSWVNLGERSEQPLWIENQSDCTAHFQFAIDCLESVFTIRPAFGTLVGKARMTLHCAFQPTHPIICFRRVACLIHHQDPLFLDLMGTCHSDSTKPAILKPQHLTWYRTHLARGLTLYPPDILDAMLKEKKLAQDQNGALMIPIQDLEDMPAPQYPYIPPMTEFFFDGTSDITIFPPPISVEPVEVDFGACPGPEAPNPVPLCLMNHTKGKIMVVWTRRSDCPFWVTPESCDVPPLKSMAMRLHFQPPHPNCLYTVELEAFAIYKVCARNEREECGVLQSYSNIEEDCTMCPSWCLTVRARGHSYFAGFEHHIPQYSLDVPKRGSDVILRPTSALWTRGHQIILICTYPEGSSWKQHTFYLQCNASPQYLKALPVPLMGSEAKKEGAENPEEGSGGGKRHLQEVSMYSREEPLQLKLDTHKSLYFKPTWVGCSSTSPFTFRNPSRLPLQFEWRVSEQHRKLLAVQPSRGLIQPNERLTLTWTFSPLEETKYLFQVGMWVWEAGLSPNANPAATTHYMLRLVGVGLTSSLSAKEKELAFGNVLVNSKQSRFLVLLNDGNCTLYYRLYLEQGSPEAVDNHPLDNKAGEKQELCCVSLVAVYPLLSILDVSSMGSAEGITRKHLWRLFSLDLLNSYLERDPTPCELTYKVPTRHSMSQIPPVLTPLRLDFNFGAAPFKAPPSVVFLALKNSGVVSLDWYGLKGATGGPGRQVPRG

SEQ ID NO: 918908 - protein, 133 aa, Homo sapiens
MQTSTEDHARQRQRPKKAPGLDFSYDPSNQMCFYMSIACKPPVQHPTRPPLCIILFYAIRHLRNLKFKDGSHSDKVRELVAADPGSSPDSRAPALAFDHPANPIIPLDLKFMCKYRNYFTLRTWRIIIKGPCG

SEQ ID NO: 918909 - protein, 112 aa, Homo sapiens
MLPVQPAELCHGSETARKERQALQRQRPAPDRTWEEGAQTRCWWEKETVLARWKTCGSYPATLTYVLYDSAQSWGAQPTERPAHSLKDAHRDVTALLFLTTEKGNGRNTRLW

SEQ ID NO: 918910 - protein, 160 aa, Homo sapiens
MDSRCPNSLSPAGRGQMDGRCLSSRAGRGRMDGCYPLGELSAALGVPSGSQGAISPLVWMSLPPKGGAEGSTGGAVSSPGVAKGGGQAEVQDITYLEVLPVDDVEPPPTALQGSVTVRDARYESEHGSPTPRIPVGGQLGTGPCSGSSTFCRINSSIRFS

SEQ ID NO: 918911 - protein, 215 aa, Homo sapiens
FERLGTETGIWVDLWVRGAVELGEMVPAAPQLCLIWSCLPIGPQLLGSKSTIICTNAMVYLSEWLQLFQFLPRQCLGIEEGYGMGGPGRDGSPKPGSDHRRMNCSESFILLTSLHRSFVCWFWFNIPGDSCLGRFPHPWCQLPLKYAEHRPHRSQAKFIHTQTEALIIWALRTLFLVAIIHPGRHPAAPRLLASSASPSLLSRLETNQKTHPSEI

SEQ ID NO: 918912 - protein, 215 aa, Homo sapiens; identical to SEQ ID NO: 918911

SEQ ID NO: 918913 - protein, 136 aa, Homo sapiens
MQNNLSKHAHTGDWQWGVAGSINISMSTLKNNKEEGKLLHLGTAPETLPDPAPLTDSLLAAPYIFLSAGAVQKGDFGPKGIGMKGDQSERRWQWTRKLGCRCYCSPLGSGESLSLSSKRGEDHIFILETKKCSQGR

SEQ ID NO: 918914 - protein, 161 aa, Homo sapiens
MQNNLSKHAHTGDWQWGVAGSINISMSTLKNNKEEGKLLHLGTAPETLPDPAPLTDSLLAAPYIFLSAGAVQKGDFGPKGIGMKGDQSERRWQWTRKLGCRCYCSPLGSGESLSLSSKRGLSSVAGGQFVNLYLKRLNSNFIYLSGYVIVYINIYVFIYCI

SEQ ID NO: 918915 - protein, 136 aa, Homo sapiens; identical to SEQ ID NO: 918913

SEQ ID NO: 918916 - protein, 161 aa, Homo sapiens
RPLRSPHSGSGWTPARPPSPPAGAPEALRPPASTTRAPAPLTLSFSARGLAWAGESPASRKRARRPPSLRGPARRPTGARGCGPGLGPPLLTFQLLFFFSFPPVPSAGLTDQSERRWQWTRKLGCRCYCSPLGSGESLSLSSKRGEDHIFILETKKCSQGR

SEQ ID NO: 918917 - protein, 864 aa, Homo sapiens
MKHTLALLAPLLGLGLGLALSQLAAGATDCKFLGPAEHLTFTPAARARWLAPRVRAPGLLDSLYGTVRRFLSVVQLNPFPSELVKALLNELASVKVNEEKPGLGSGGRVTPHALLPAQVVRYEAGYVVCAVIAGLYLLLVPTAGLCFCCCRCHRRCGGRVKTEHKALACERAALMVFLLLTTLLLLIGVVCAFVTNQRTHEQMGPSIEAMPETLLSLWGLVSDGPPSVGVSIGSAIHTQLRSSVYPLLAAVGSLGQVLQVSVHHLQTLNATVVELQAGQQDLEPAIREHRDRLLELLQEAQVPSVDHVLHQLKGVPEANFSSMVQEENSTFNALPALAAMQTSSVVQELKKAVAQQPEGVRTLAEGFPGLEAASRWAQALQEVEESSRPYLQEVQRYETYRWIVGCVLCSVVLFVVLCNLLGLNLGIWGLSARDDPSHPEAKGEAGARFLMAFQAAPTTNRQQHQRWNLFANPRLDVLPLAYPRGVGLSFLFAAPLILLVFATFLVGGNVQTLVCQSWENGELFEFADTPGNLPPSMNLSQLLGLRKNISIHQAYQQCKEGAALWTVLQLNDSYDLEEHLDINQGSISGVLAQQLGMTPTLRLLSQYTNKLRQELQSLKVDTQSLDLLSSAARRDLEALQSSGLQRIHYPDFLVQIQRPVVKTSMEQLAQELQGLAQAQDNSVLGQRLQEEAQGLRNLHQEKVVPQQSLVAKLNLSVRALESSAPNLQLETSDVLANVTYLKGELPAWAARILRNVSECFLAREMGYFSQYVAWVREEVTQRIATCQPLSGALDNSRVILCDMMADPWNAFWFCLAWCTFFLIPSIIFAVKTSKYFRPIRKRLSSTSSEETQLFHIPRVTSLKL

SEQ ID NO: 918918 - protein, 575 aa, Homo sapiens
MNFVITHLPPFQVPSVDHVLHQLKGVPEANFSSMVQEENSTFNALPALAAMQTSSVVQELKKAVAQQPEGVRTLAEGFPGLEAASRWAQALQEVEESSRPYLQEVQRYETYRWIVGCVLCSVVLFVVLCNLLGLNLGIWGLSARDDPSHPEAKGEAGARFLMAFQAAPTTNRQQHQRWNLFANPRLDVLPLAYPRGVGLSFLFAAPLILLVFATFLVGGNVQTLVCQSWENGELFEFADTPGNLPPSMNLSQLLGLRKNISIHQAYQQCKEGAALWTVLQLNDSYDLEEHLDINQGSISGVLAQQLGMTPTLRLLSQYTNKLRQELQSLKVDTQSLDLLSSAARRDLEALQSSGLQRIHYPDFLVQIQRPVVKTSMEQLAQELQGLAQAQDNSVLGQRLQEEAQGLRNLHQEKVVPQQSLVAKLNLSVRALESSAPNLQLETSDVLANVTYLKGELPAWAARILRNVSECFLAREMGYFSQYVAWVREEVTQRIATCQPLSGALDNSRVILCDMMADPWNAFWFCLAWCTFFLIPSIIFAVKTSKYFRPIRKRLSSTSSEETQLFHIPRVTSLKL

SEQ ID NO: 918919 - protein, 326 aa, Homo sapiens
MKHTLALLAPLLGLGLGLALSQLAAGATDCKFLGPAEHLTFTPAARARWLAPRVRAPGLLDSLYGTVRRFLSVVQLNPFPSELVKALLNELASVKVNEVVRYEAGYVVCAVIAGLYLLLVPTAGLCFCCCRCHRRCGGRVKTEHKALACERAALMVFLLLTTLLLLIGVVCAFVTNQRTHEQMGPSIEAMPETLLSLWGLVSDVPQELQAVAQQFSLPQEQVSEELDGVGVSIGSAIHTQLRSSVYPLLAAVGSLGQVLQVSVHHLQTLNATVVELQAGQQDLEPAIREHRDRLLELLQEARCQGDCAGALSWARTLELGADFSQV

SEQ ID NO: 918920 - protein, 148 aa, Homo sapiens
QAWWHMPVVPATWEAEAGESLEPKSRLSSCGGGERLKKDGRIVVRGSRGETGTHKPEQGTDPSEWALTLSSLFVHTSAAVLGSITRGSPIASPHPQSLCVMLSTVTLHYPVGAKALDIRTEGKQWWLRGRTDTFVLSEHFAEELLVAL

SEQ ID NO: 918921 - protein, 189 aa, Homo sapiens
MGGASGLQEAGRGGLPDPESLGTEAYYCQTLRSCRGNQGPFGPDQSLSQTILWVTGKLLAFSVTVPLLGIPFHTDGSSPPKLEGYLSDTLGEQSGSGLHFPEDSAGQYHVSRDFGFLLARWQILSLCPISCCRALESGVTWPGWPRAELEKAEGVGHVPGSVYRLLSGGMGGPGHCSEGLIERCNDGEL

SEQ ID NO: 918922 - protein, 165 aa, Homo sapiens
MGGASGLQEAGRGGLPDPESLGTEAYYCQTLRSCRGNQGPFGPDQSLSQTILWVTGKLLAFSVTVPLLGIPFHTDGSSPPKLEGYLSDTLGEQSGSGLHFPEDSAGQYHVSRDFGFLLARWQILSLCPISCCRALESGVTWPGWPRAELEKAEALTMEYWECPFL

SEQ ID NO: 918923 - protein, 215 aa, Homo sapiens
MGGASGLQEAGRGGLPDPESLGTEAYYCQTLRSCRGNQGPFGPDQSLSQTILWVTGKLLAFSVTVPLLGIPFHTDGSSPPKLEGYLSDTLGEQSGSGLHFPEDSAGQYHVSRDFGFLLARWQILSLCPISCCRALESGVTWPGWPRAELEKAEGLSIPKPDVISLLEQGKESCMVSRDVPGGWCPDIYIWKREGPRISKTLKKRKDLSCQISELL

SEQ ID NO: 918924 - protein, 184 aa, Homo sapiens
MGGASGLQEAGRGGLPDPESLGTEAYYCQTLRSCRGNQGPFGPDQSLSQTILWVTGKLLAFSVTVPLLGIPFHTDGSSPPKLEGYLSDTLGEQSGSGLHFPEDSAGQYHVSRDFGFLLARWQILSLCPISCCRALESGVTWPGWPRAELEKAEGVCEMVGAYKSVQLGLTGSGGHFVFWTCFGL

SEQ ID NO: 918925 - protein, 255 aa, Homo sapiens
MGGASGLQEAGRGGLPDPESLGTEAYYCQTLRSCRGNQGPFGPDQSLSQTILWVTGKLLAFSVTVPLLGIPFHTDGSSPPKLEGYLSDTLGEQSGSGLHFPEDSAGQYHVSRDFGFLLARWQILSLCPISCCRALESGVTWPGWPRAELEKAEVSLLLPRLECNGMNSAHCNFCLPGSSDSPASASQVAGIRGSNHGILGMSLSVKEVVSHNRNIHEHEGVGHVPGSVYRLLSGGMGGPGHCSEGLIERCNDGEL

SEQ ID NO: 918926 - protein, 177 aa, Homo sapiens
MKEFPGLFLWKMWSLDKKKENMLKTHDPGISRLEPVTKTKPWREPLWERNWQGQHLDSRGYLAGPGREDGRNPLKLFESLQFHRPDFISHIGERIKRLKLIVQERKLQSMLKSERDALFDIDRERQGHQNRMRPLPKRGTPCPFTFLLPGCPEEQAYQQEGNDSEVQTQSHFLELIP

SEQ ID NO: 918927 - protein, 216 aa, Homo sapiens
MYPKKCSSFNLTMASARMQILGVVLTLLGWVNGLVSCVLPMWKVTTFIGNSIVVASQMQCKVYDSLLALPQDLQAARAVCVITLLVALFGLLVYLAGAKCTTCVEEKDSKARLVLTSGIVFVTSGVLTLIPVCWTAHAIIWDFYNPLVAEAQKWELGASLYLGWAASGLLLLGGRLLCCTCPSGGSRGPSHYMARYWTSAPAISRGTSEYPTKNYV

SEQ ID NO: 918928 - protein, 149 aa, Homo sapiens
WTFNAVLEGTNIVSSMRTETDLPCSLFCPQQLAQSLQNEEIPAEIDGFCKRKVAVIKCKETTFGRKPIPWEQHLLNGEFCKHFQFTHSYNKYLLSMALMISGHFPKITAKNMFSTFSSPSRKIYFKGQDYEFEHCFSHTVTNPGIWSRQ

SEQ ID NO: 918929 - protein, 149 aa, Homo sapiens; identical to SEQ ID NO: 918928

SEQ ID NO: 918930 - protein, 148 aa, Homo sapiens
MINYGLSLLASRACQLRPVQSEPPPPPPGAARGQPPDGGQLGASRPVCGDPCPAPQQACGRQRATPPSLRPLTSLHCWVSAARTLATVLVTATLAGLEQAPRAQRPQPRPPRSRLPMVAAPEGRWPPEGRLAPARRAPAELGKSVREA

SEQ ID NO: 918931 - protein, 128 aa, Homo sapiens
MRKINSTLITPPCDKSCRFPFPGFWPDLVTWMQIFQSWIFYCSCSPTTFLTACFLNKIIKCNNRVVFPREIIFYYTQCNCEHLSAPPWPSAARSCGAAVVRRKAEDGVQGTGTGTALEPDGIPGLVFT

SEQ ID NO: 918932 - protein, 162 aa, Homo sapiens
MQVTERGWASSRQFLQLLLLMSVLWPSPILLGMPHGHKCQPLQALASQCGGDIKILGCQTWKEPGASWMDTAVDGVEAAPWAASRQCPAQHPPGFLAGRICRAAVGFREASPWSPSYFHELSLSTPLQKERGKPDLPSQRLWFLSYIALSESNAKCALWKSP

SEQ ID NO: 918933 - protein, 181 aa, Homo sapiens
KFCSRGETEGAGGGPESGSRRSGSKSPPPTTASPARAAARYLSMTEATSCGNSFISKADPGSCPPPLPGSPAPEPLPPPLRRRSSPSSVVLLRLPPGACHRPSAASQEGAETARRRHGSKTRRAERPLLSPGSSRGEGTDRRRCACSEGSAAGKGGRALTSEPARWELLKQVVATWLPGSG

SEQ ID NO: 918934 - protein, 181 aa, Homo sapiens; identical to SEQ ID NO: 918933

SEQ ID NO: 918935 - protein, 134 aa, Homo sapiens
MHTTSQYTKTLSCSTERDSKKGQLFSLEDITVNSCSSAHVGKKTIQTSFSCALSYTLCSGDNQSINRHLVPAPSLFHVWGEHSPQRSSPFLQWLQCKHYTTHNHGYSKAWYILPGAPQYAHLRATQYGGSDSSH

SEQ ID NO: 918936 - protein, 287 aa, Homo sapiens
MSGALDVLQMKEEDVLKFLAAGTHLGGTNLDFQMEQYIYKRKSDGIYIINLKRTWEKLLLAARAIVAIENPADVSVISSRNTGQRAVLKFAAATGATPIAGRFTPGTFTNQIQAAFREPRLLVVTDPRADHQPLTEASYVNLPTIALCNTDSPLRYVDIAIPCNNKGAHSVGLMWWMLAREVLRMRGTISREHPWEVMPDLYFYRDPEEIEKEEQAAAEKAVTKEEFQGEWTAPAPEFTVTQPEVADWSEGVQVPSVLFSYSLLKTGALSLPRKTGLQLPLLRPLNG

SEQ ID NO: 918937 - protein, 287 aa, Homo sapiens; identical to SEQ ID NO: 918936

SEQ ID NO: 918938 - protein, 193 aa, Homo sapiens
SQSMAAGELEGGKPLSGLLNALAQDTFHGYPGITEELLRSQLYPEVPPEEFRPFLAKMRGILKSIASADMDFNQLEAFLTAQTKKQGGITSDQAAVISKFWKSHKTKIRESLMNQSRWNSGLRGLSWRVDGKSQSRHSAQIHTPVAIIELELGKYGQESEFLCLEFDEVKVNQILKTLSEVEESISTLISQPN

SEQ ID NO: 918939 - protein, 287 aa, Homo sapiens; identical to SEQ ID NO: 918936

SEQ ID NO: 918940 - protein, 175 aa, Homo sapiens
SQSMAAGELEGGKPLSGLLNALAQDTFHGYPGITEELLRSQLYPEVPPEEFRPFLAKMRGILKSIASADMDFNQLEAFLTAQTKKQGGITSDQAAVISKFWKSHKTLSWRVDGKSQSRHSAQIHTPVAIIELELGKYGQESEFLCLEFDEVKVNQILKTLSEVEESISTLISQPN

SEQ ID NO: 918941 - protein, 193 aa, Homo sapiens; identical to SEQ ID NO: 918938

SEQ ID NO: 918942 - protein, 193 aa, Homo sapiens; identical to SEQ ID NO: 918938

SEQ ID NO: 918943 - protein, 193 aa, Homo sapiens; identical to SEQ ID NO: 918938

SEQ ID NO: 918944 - protein, 287 aa, Homo sapiens; identical to SEQ ID NO: 918936

SEQ ID NO: 918945 - protein, 193 aa, Homo sapiens; identical to SEQ ID NO: 918938

SEQ ID NO: 918946 - protein, 217 aa, Homo sapiens
MKELELLKPRNTGQRAVLKFAAATGATPIAGRFTPGTFTNQIQAAFREPRLLVVTDPRADHQPLTEASYVNLPTIALCNTDSPLRYVDIAIPCNNKGAHSVGLMWWMLAREVLRMRGTISREHPWEVMPDLYFYRDPEEIEKEEQAAAEKAVTKEEFQGEWTAPAPEFTVTQPEVADWSEGVQVPSVLFSYSLLKTGALSLPRKTGLQLPLLRPLNG

SEQ ID NO: 918947 - protein, 159 aa, Homo sapiens
SSIFLVQYEEKAYAESEDWRGRSWMSEDWYKIVIQERHQAVISSLYRPVGGQCILVSGSRKMTYHEDLLSNKDCGGEMNGEGAGKGLVIKGPPLLPQHLGRSEMWLQDWGIAKSEMSSSATVAILEGGLSHEREPGGALPAGGCRILAWVFCLLRGTDR

SEQ ID NO: 918948 - protein, 159 aa, Homo sapiens; identical to SEQ ID NO: 918947

SEQ ID NO: 918949 - protein, 192 aa, Homo sapiens
NLSILFYIMGLAWKRYLHNHVQSSIIHNNQKVEATQVSVDGWTDQQNAVYAYSGISAVNRRHFSAPQKLHADCEKEMLDGGVPGTTVRVSFDFSCLEMVRELWMWNVEEEEHEVGISTWGGQHCGCPAKSLPGPHPGGVSAPQSASQLMVKLLVWQKSVHKLRKIAAQSEEWSCVLNKISTHPFVSKEHDGT

SEQ ID NO: 918950 - protein, 154 aa, Homo sapiens
MQGIDRWIPSIPPLQNHSAVNRRHFSAPQKLHADCEKEMLDGGVPGTTVRVSFDFSCLEMVRELWMWNVEEEEHEVGISTWGGQHCGCPAKSLPGPHPGGVSAPQSASQLMVKLLVWQKSVHKLRKIAAQSEEWSCVLNKISTHPFVSKEHDGT

SEQ ID NO: 918951 - protein, 165 aa, Homo sapiens
PVVCNLGYILEQPGKLSKLPMPQWGTPGQGYRQKAYLAGLVLVIQNSLERSGSFSSNGPCPAKEVSNKEETHQGFRVYGEKAQHVEKLQNISSRTLEALVTVCHLIWMNTSVFRFGNPFSCTYPKFSKASWFPALVNSAQNERKVVVLAFKSPPNATDPGLPVLH

SEQ ID NO: 918952 - protein, 450 aa, Homo sapiens
MAQTVPPCELPCKEYDVARNTGAYTSSGLATASFRTSKYLLEEWFQNCYARYHQAFADRDQSERQRHESQQLATETQALAQRTQQDSTRTVGERLQDTHSWKSELQREMEALAAETNLAPWAPGSQRAWEPRPLGTPQKVPFSITTDNRMPVSAGAPTLATCELLKEAELIRNIQELLKRTIMQAVSQIRLNREHKETCEMDWSDKMEAYNIDETCGRHHSQSTEVQAHPYSTTFQERPAEGASPPPTRGRQTPGSKKRARALGTREGGLRGPEVLQRGPPGQRCWERGRGGTRGLSARGWVGCGGTQRSCGQGALGGREPEGLGFVGQHGVHRSPCTSSRSMGRGQGMGAQQGSQPSAEPPRPSPGCPPPRSASTPETRAKFTQDNLCRAQRERLASANLRVLVDCILRDTSEDLRLQCDAVNLAFGRRCEELEDARYKLHHHLHKAVE

SEQ ID NO: 918953 - protein, 570 aa, Homo sapiens
MAQTVPPCELPCKEYDVARNTGAYTSSGLATASFRTSKYLLEEWFQNCYARYHQAFADRDQSERQRHESQQLATETQALAQRTQQDSTRTVGERLQDTHSWKSELQREMEALAAETNLAPWAPGSQRAWEPRPLGTPQKVPFSITTDNRMPVSAGAPTLATCELLKEAELIRNIQELLKRTIMQAVSQIRLNREHKETCEMDWSDKMEAYNIDETCGRHHSQSTEVQAHPYSTTFQERPAEGASPPPTRGRQTPGSKKRARALGTREGGLRGPEVLQRGPPGQRCWERGRGGTRGLSARGWVGCGGTQRSCGQGALGGREPEGLGFVGQHGVHRSPCTSSRSMGRGQGMGAQQGSQPSAEPPRPSPGCPPPRSASTPETRAKFTQDNLCRAQRERLASANLRVLVDCILRDTSEDLRLQCDAVNLAFGRRCEELEDARYKLHHHLHKTLREITDQEHNVAALKQAIKDKEAPLHVAQTRLYLRSHRPNMELCRDAAQFRLLSEVEELNMSLTALREKLLEAEQSLRNLEDIHMSLEKDIAAMTNSLFIDRQKCMAHRTRYPTILQLAGYQ

SEQ ID NO: 918954 - protein, 118 aa, Homo sapiens
AFLMGFFHGVFPGPPASSHWEFWVPYTPEVHTSALPSPGSHPPNTPRLLSEVEELNMSLTALREKLLEAEQSLRNLEDIHMSLEKDIAAMTNSLFIDRQKCMAHRTRYPTILQLAGYQ

SEQ ID NO: 918955 - protein, 142 aa, Homo sapiens
MTTNAACEGAQGAAILTVACLSAVSPKCLKPSCAPTTLGTCCQDLLRPCHGICDCVNGSLVSELSQEALLSVNGRIPPSPQKIIYIHSYWSVKLPSQIVESKCQKHCFSKDFQERNVWSSCAEITKCSFFFQTSLSAVNSWH

SEQ ID NO: 918956 - protein, 1728 aa, Homo sapiens
QDCYNIEDMVYRLLGHVFPSTHTENELKEKKFPPDDEFVEAASKLTDEIIKEISEHEIRLSMAEDNAESMQLEPIENLVDSICNNILKTSEFQAEVQKDADKKGCSFLSKLAGFIMKEIMYHHLQPFLHGEESSFSDLSDYDHVSELAKSGKEKTQPSLYSATFLEDIIIDLVHKFCSLLIITEDSKKNEMAELDIMGLALKLANSLIREFKKSDIKVLPNAEKMFSFPPIDKETVDKISNFVYEQFIEKCTSHDIQKGDESNIAIGMIAALTQKAISAFRIQPLFSGDWSSTFFSFLNPDNITQRVQHLPQNTFTQISRCAKENQLSLPDQSYKDTSSTPDCKNMMSTLEINRGTMNRKKSFKTKDTSVKKGDIQNPVLSSINAIMKSGMINLTSGLATGVTNKKEVDENKVGICTQKHSENVSKVTSTTTVKSKDTQEPNLSETFNNNEIEKKRNLIPTDKKGKDDEIYTHFSLIIDDTEYEKEVLGSDSEIGYKKKIDNARESSFKKDDKLFQLSSLKSKRNLGTTTDTLEIRIRTSSNEGRRDSPTQTCRDEEHHSDYEHVQNVIENIFEDVLELSSSPEPAYYSKLSYDQSPPGDNVLNVIQEISRDSAQSVTTKKVSSSTNKNISAKEKEEEEREKEKVREEIKSEPSKPDDPQNQRESKPGIFPAKFLEDVITEMVKQLIFSSIPETQIQDRCQNVSDKQNQAKLYDTAMKLINSLLKEFSDAQIKVFRPDKGNQFPGGKVSSVPKVPPRYKEPTTDEAPSSIKIKSADKMPPMHKMMRKPSSDKIPSIDKTLVNKVVHSSVCNILNDYGSQDSIWKNINSNGENLARRLTSAVINEIFQRQVNLIFCDEVSVSACLPLESKDVVKKVQKLAQTASKECQTSSPYTIILPHKFLENVISALFSKIFSTISSTKTKEPEDNLSTELNFLQMKLVSAVATEISQDKYMTIQYVETLQSDDDEIIQLVVQSVYNNLLPQFGSQEIIQNCVTSGCKILSENIVDLVLREVASNQLQSYFCGELTPHQCVEVENIVEKILKDVFQTTDVPLPKPSHADKLSYNIIEEIAVKFLSKLLSIFPKVHKERTKSLETDMQKITSKVLNSVQEFISKSFLMVNAISNSEFQPQVEEEVSNSELVLEAVKIMEKVIKIIDELKSKEKSSSRKGLTLDAKLLEEVLALFLAKLIRLPSSSSKDEKNLSKTELNKIASQLSKLVTAEISRSSISLIASDPEEHCLNPENTERIYQVVDSVYSNILQQSGTNKEFYYDIKDTNTAFPKKVASLIIDGVSSFPLDTINSTISNADLSGELDVNRIVQKAQEHAFNVIPELEQEKLDQNLSEEESPIKIVPHVGKKPVKIDPKIISEHLAVISIKTQPLEKLKQECLKRTGHSIAELRRASISGRNYSLGSPDLEKRKTERRTSLDKTGRLDVKPLENIRKPDITKVELLKDVQSKNDLIVRLVAHDIDQVYLENYIKEERDSDEDEVVLTQTFAKEEGIKVFEDQVKEVKKPIQSKLSPKSTLSTSSLKKFLSLSKCCQTTASANIESTEAISNQVIESKETHVKRAVAELDMATPKTMPETASSSWEEKPQCKKEEKNLVTEPTHYFIHRIMSSSSYNQEDLISSTGEAEDCHSDPSAKILEESSQEQKPEHGNSVKFITIFERSKDVLGSANPSKEVISETPKPDVSKQGSKMLTKMSSALSKVFSQCNTNISRSSSPAHQDEH

SEQ ID NO: 918957 - protein, 1503 aa, Homo sapiens
QDCYNIEDMVYRLLGHVFPSTHTENELKEKKFPPDDEFVEAASKLTDEIIKEISEHEIRLSMAEDNAESMQLEPIENLVDSICNNILKTSEFQAEVQKDADKKGCSFLSKLAGFIMKEIMYHHLQPFLHGEESSFSDLSDYDHVSELAKSGKEKTQPSLYSATFLEDIIIDLVHKFCSLLIITEDSKKNEMAELDIMGLALKLANSLIREFKKSDIKVLPNAEKMFSFPPIDKETVDKISNFVYEQFIEKCTSHDIQKGDESNIAIGMIAALTQKAISAFRIQPLFSGDWSSTFFSFLNPDNITQRVQHLPQNTFTQISRCAKENQLSLPDQSYKDTSSTPDCKNMMSTLEINRGTMNRKKSFKTKDTSVKKGDIQNPVLSSINAIMKSGMINLTSGLATGVTNKKEVDENKVGICTQKHSENVSKVTSTTTVKSKDTQEPNLSETFNNNEIEKKRNLIPTDKKGKDDEIYTHFSLIIDDTEYEKEVLGSDSEIGYKKKIDNARESSFKKDDKLFQLSSLKSKRNLGTTTDTLEIRIRTSSNEGRRDSPTQTCRDEEHHSDYEHVQNVIENIFEDVLELSSSPEPAYYSKLSYDQSPPGDNVLNVIQEISRDSAQSVTTKKVSSSTNKNISAKEKEEEEREKEKVREEIKSEPSKPDDPQNQRESKPGIFPAKFLEDVITEMVKQLIFSSIPETQIQDRCQNVSDKQNQAKLYDTAMKLINSLLKEFSDAQIKVFRPDKGNQFPGGKVSSVPKVPPRYKEPTTDEAPSSIKIKSADKMPPMHKMMRKPSSDKIPSIDKTLVNKVVHSSVCNILNDYGSQDSIWKNINSNGENLARRLTSAVINEIFQRQVNLIFCDEVSVSACLPLESKDVVKKVQKLAQTASKECQTSSPYTIILPHKFLENVISALFSKIFSTISSTKTKEPEDNLSTELNFLQMKLVSAVATEISQDKYMTIQYVETLQSDDDEIIQLVVQSVYNNLLPQFGSQEIIQNCVTSGCKILSENIVDLVLREVASNQLQSYFCGELTPHQCVEVENIVEKILKDVFQTTDVPLPKPSHADKLSYNIIEEIAVKFLSKLLSIFPKVHKERTKSLETDMQKITSKVLNSVQEFISKSFLMVNAISNSEFQPQVEEEVSNSELVLEAVKIMEKVIKIIDELKSKEKSSSRKGLTLDAKLLEEVLALFLAKLIRLPSSSSKDEKNLSKTELNKIASQLSKLVTAEISRSSISLIASDPEEHCLNPENTERIYQVVDSVYSNILQQSGTNKEFYYDIKDTNTAFPKKVASLIIDGVSSFPLDTINSTISNADLSGELDVNRIVQKAQEHAFNVIPELEQEKLDQNLSEEESPIKIVPHVGKKPVKIDPKIISEHLAVISIKTQPLEKLKQECLKRTGHSIAELRRASISGRNYSLGSPDLEKRKTESSQEQKPEHGNSVKFITIFERSKDVLGSANPSKEVISETPKPDVSKQGSKMLTKMSSALSKVFSQCNTNISRSSSPAHQDEH

SEQ ID NO: 918958 - protein, 168 aa, Homo sapiens
DISTFSLSLKIVMILLPAFTQMAFLSASHLEERVPWSRGWAFPLVALSRGERQWLVTSSLWACGPYSLFSPSPAPTQVNVLVQVGAKARPLRRESLCSASSPPGPETPGAGVAGVPPPGRDSWDPRSRAGAATWRRGGDRAGRALGAGCPRSRAVSLSRSPGSLLAGE

SEQ ID NO: 918959 - protein, 581 aa, Homo sapiens
MVISAKETKLMKMEQKAMRTRWMDAPLPETSRFRTQLRPRGAPDPPRSVLRRTLLRLHCISKVCAEENAAPPSQRPPSAGAGAERRTRTRILTLTPKALQLQVHARSPKRGRRFALPPAGDWAPPSRGSGAGCHQGARPRCPGAWRRVCSCQCTCSCSHRCLCQEPDAQPDPALQRGCGSTACDSSPTPHSARSRGQRSRPSLAAAEPSEDRGHKLSRAGSRTLVARPRAQTWRQLAPDPLHGSPGSSLPTRRCSLGSLVRALVGARDDPMGQLAMPSPQAAPTVAPWARGLAPPVDIRPQEDGSHQVDIWPQIDTKVPDVQQAPTEPQTHVDIRPQVDNQAPGTHQALSGHPGPRLISSSQVITKPQVSGEHQVQVSKQALGGHNCVQMPLAIWQKPPAQVPQDRSHQVDIRPQMELPGQASPVIPPGPHLHIVLVQLEPLELIETQAHAEVTCSAEIQRFPVPAVEPVPAPGADSPPGTALELEEAPEPSCRCPGTAQDQPSEELPDFMAPPVEPPASALELKVWLELEVAERGGQHSSSQQLPHCSQSWAHRAAALLLKGLLLLLLGLFACLQEADRG

SEQ ID NO: 918960 - protein, 2332 aa, Homo sapiens
NIVINRLSPMANVIDDGWCQNGSTAVGSQCPFLPSEQGNNEETISSVDELKIPKDCDRYDDLCSYMSWKTRKDTQWPENNLADKDQVSVATSFDITDENIATKRSDHFDAARSYGQYWTQEDSSKQAETYLTKLKSSASLSEKSYNQAVGLGKTQSALFQCDIGNEPFLPFGKIKSVPSLDLAEKVGSSDVIYHVKVLTSESLVLQDLKQPTFEEVADYSNFNLEGLQGKVESDVITLDGLNENAVVCSERVAELQRKPTRESEYHSSDLRMLRMSPDTVPKAPKHLKAGDTSKGGIAKVTQSNLKSGITTTPVDSDIGSHLSLSLEDLSQLAVSSLETTTGQHTDTLNQKTLADTHLTEETLKVTAIPEPADQKTATPTVLSSSHSHRGKPSIFYQQGLPDSHLTEEALKVSAAPGLADQTTGMSTLTSTSYSHREKPGTFYQQELPESNLTEEPLEVSAAPGPVEQKTGIPTVSSTSHSHVEDLLFFYRQTLPDGHLTDQALKVSAVSGPADQKTGTATVLSTPHSHREKPGIFYQQEFADSHQTEETLTKVSATPGPADQKTEIPAVQSSSYSQREKPSILYPQDLADSHLPEEGLKVSAVAGPADQKTGLPTVPSSAYSHREKLLVFYQQALLDSHLPEEALKVSAVSGPADGKTGTPAVTSTSSASSSLGEKPSAFYQQTLPNSHLTEEALKVSIVPGPGDQKTGIPSAPSSFYSHREKPIIFSQQTLPDFLFPEEALKVSAVSVLAAQKTGTPTVSSNSHSHSEKSSVFYQQELPDSDLPRESLKMSAIPGLTDQKTVPTPTVPSGSFSHREKPSIFYQQEWPDSYATEKALKVSTGPGPADQKTEIPAVQSSSYPQREKPSVLYPQVLSDSHLPEESLKVSAFPGPADQMTDTPAVPSTFYSQREKPGIFYQQTLPESHLPKEALKISVAPGLADQKTGTPTVTSTSYSQHREKPSIFHQQALPGTHIPEEAQKVSAVTGPGNQKTWIPRVLSTFYSQREKPGIFYQQTLPGSHIPEEAQKVSPVLGPADQKTGTPTPTSASYSHTEKPGIFYQQVLPDNHPTEEALKISVASEPVDQTTGTPAVTSTSYSQYREKPSIFYQQSLPSSHLTEEAKNVSAVPGPADQKTVIPILPSTFYSHTEKPGVFYQQVLPHSHPTEEALKISVASEPVDQTTGTPTVTSTSYSQHTEKPSIFYQQSLPGSHLTEEAKNVSAVPGPGDRKTGIPTLPSTFYSHTEKPGSFYQQVLPHSHLPEEALEVSVAPGPVDQTIGTPTVTSPSSSFGEKPIVIYKQAFPEGHLPEESLKVSVAPGPVGQTTGAPTITSPSYSQHRAKSGSFYQLALLGSQIPEEALRVSSAPGPADQTTGIPTITSTSYSFGEKPIVNYKQAFPDGHLPEEALKVSIVSGPTEKKTDIPAGPLGSSALGEKPITFYRQALLDSPLNKEVVKVSAAPGPADQKTETLPVHSTSYSNRGKPVIFYQQTLSDSHLPEEALKVPPVPGPDAQKTETPSVSSSLYSYREKPIVFYQQALPDSELTQEALKVSAVPQPADQKTGLSTVTSSFYSHTEKPNISYQQELPDSHLTEEALKVSNVPGPADQKTGVSTVTSTSYSHREKPIVSYQRELPHFTEAGLKILRVPGPADQKTGINILPSNSYPQREHSVISYEQELPDLTEVTLKAIGVPGPADQKTGIQIASSSSYSNREKASIFHQQELPDVTEEALNVFVVPGQGDRKTEIPTVPLSYYSRREKPSVISQQELPDSHLTEEALKVSPVSIPAEQKTGIPIGLSSSYSHSHKEKLKISTVHIPDDQKTEFPAATLSSYSQIEKPKISTVIGPNDQKTPSQTAFHSSYSQTVKPNILFQQQLPDRDQSKGILKISAVPELTDVNTGKPVSLSSSYFHREKSNIFSPQELPGSHVTEDVLKVSTIPGPAGQKTVLPTALPSSFSHREKPDIFYQKDLPDRHLTEDALKISSALGQADQITGLQTVPSGTYSHGENHKLVSEHVQRLIDNLNSSDSSVSSNNVLLNSQADDRVVINKPESAGFRDVGSEEIQDAENSAKTLKEIRTLLMEAENMALKRCNFPAPLARFRDISDISFIQSKKVVCFKEPSSTGVSNGDLLHRQPFTEESPSSRCIQKDIGTQTNLKCRRGIENWEFISSTTVRSPLQEAESKVSMALEETLRQYQAAKSVMRSEPEGCSGTIGNKIIIPMMTVIKSDSSSDASDGNGSCSWDSNLPESLESVSDVLLNFFPYVSPKTSITDSREEEGVSESEDGGGSSVDSLAAHVKNLLQCESSLNHAKEILRNAEEEESRVRAHGKKKVSGL

SEQ ID NO: 918961 - protein, 228 aa, Homo sapiens
NCPPGFQTCLGIFPDKYCFESQMMWKVKTLEHPDSGPKYQMLKTQNTQVTAYECPHTKCQETLEYPGADQCRKSWSLSGVANNEPQRPGMRKLCGADRVDCVYPACITAQEPGKADTLGFISWGNETHRANVLKNIPFYEKLEYSTALRYSGPISFLQQVRSCHSKEAQMMAASGNICLQNLSLVHPVTILHCHRLQSACLEIVDTWIYIEQAGSKGLKEMPWTCIVE

SEQ ID NO: 918962 - protein, 225 aa, Homo sapiens
MVAVIVSIFITQEYEGGRNEAGERHGRGRARLPNGDTYEGSYEFGKRHGQGIYKFKNGARYIGEYVRNKKHGQGTFIYPDGSRYEGEWANDLRHGHGVYYYINNDTYTGEWFAHQRHGQGTYLYAETGSKYVGTWVNGQQEGTAELIHLNHRYQGKFLNKNPVGPGKYVFDVGCEQHGEYRLTDMVLQVKTESVTGVATVCPVTVSLSVVQHAPLNVPLLKGTTG

SEQ ID NO: 918963 - protein, 303 aa, Homo sapiens
MVAVIVSIFITQEYEGGRNEAGERHGRGRARLPNGDTYEGSYEFGKRHGQGIYKFKNGARYIGEYVRNKKHGQGTFIYPDGSRYEGEWANDLRHGHGVYYYINNDTYTGEWFAHQRHGQGTYLYAETGSKYVGTWVNGQQEGTAELIHLNHRYQGKFLNKNPVGPGKYVFDVGCEQHGEYRLTDMERGEEEEEEELVTVVPKWKATQITELALWTPTLPKKPTSTDGPGQDAPGAESAGEPGEEAQALLEGFEGEMDMRPGDEDADVLREESREYDQEEFRYDMDEGNINSEDEETRQSDLQD

SEQ ID NO: 918964 - protein, 271 aa, Homo sapiens
MSDLGSEELEEEGENDIGGIYKFKNGARYIGEYVRNKKHGQGTFIYPDGSRYEGEWANDLRHGHGVYYYINNDTYTGEWFAHQRHGQGTYLYAETGSKYVGTWVNGQQEGTAELIHLNHRYQGKFLNKNPVGPGKYVFDVGCEQHGEYRLTDMERGEEEEEEELVTVVPKWKATQITELALWTPTLPKKPTSTDGPGQDAPGAESAGEPGEEAQALLEGFEGEMDMRPGDEDADVLREESREYDQEEFRYDMDEGNINSEDEETRQSDLQD

SEQ ID NO: 918965 - protein, 303 aa, Homo sapiens; identical to SEQ ID NO: 918963

SEQ ID NO: 918966 - protein, 181 aa, Homo sapiens
MVAVIVSIFITQEYEGGRNEAGERHGRGRARLPNGDTYEGSYEFGKRHGQGIYKFKNGARYIGEYVRNKKHGQGTFIYPDGSRYEGEWANDLRHGHGVYYYINNDTYTGEWFAHQRHGQGTYLYAETGSKYVGTWVNGQQEGTAELIHLNHRYQGKFLNKNPVGPGKYVFDVGTVDVRSSR

SEQ ID NO: 918967 - protein, 303 aa, Homo sapiens; identical to SEQ ID NO: 918963

SEQ ID NO: 918968 - protein, 74 aa, Homo sapiens
DSAKCIVLSSSALKATGCPYRPGPTRVYTREFQATSKKGISRLDKQMRKFTDIRKKSRSAHAVKISIEGNKMPL

SEQ ID NO: 918969 - protein, 112 aa, Homo sapiens
DPPGCRQRRRMNSTGGQTPRRDLEKVLTGEEKALRPGDPGFCARARVPMPSNKDYVVRPKWNVEMESSRFQATSKKGISRLDKQMRKFTDIRKKSRSAHAVKISIEGNKMPL

SEQ ID NO: 918970 - protein, 612 aa, Homo sapiens
MSDSESEELPKPQVSDSESEEPPRHQASDSENEELPKPRISDSESEDPPRHQASDSENEELPKPRISDSESEDPPRNQASDSENEELPKPRVSDSESEGPQKGPASDSETEDASRHKQKPESDDDSDRENKGEDTEMQNDSFHSDSHMDRKKFHSSDSEEEEHKKQKMDSDEDEKEGEEEKVAKRKAAVLSDSEDEEKASAKKSRVVSDADDSDSDAVSDKSGKREKTIASDSEEEAGKELSDKKNEEKDLFGSDSESGNEEENLIADIFGESGDEEEEEFTGFNQEDLEEEKGETQVKEAEDSDSDDNIKRGKHMDFLSDFEMMLQRKKSMSGKRRRNRDGGTFISDADDVVSAMIVKMNEAAEEDRQLNNQKKPALKKLTLLPAVVMHLKKQDLKETFIDSGVMSAIKEWLSPLPDRSLPALKIREELLKILQELPSVSQETLKHSGIGRAVMYLYKHPKESRSNKDMAGKLINEWSRPIFGLTSNYKGMTREEREQRDLEQMPQRRRMNSTGGQTPRRDLEKVLTGEEKALRPGDPGFCARARVPMPSNKDYVVRPKWNVEMESSRFQATSKKGISRLDKQMRKFTDIRKKSRSAHAVKISIEGNKMPL

SEQ ID NO: 918971 - protein, 476 aa, Homo sapiens [sequence omitted]

SEQ ID NO: 918972 - protein, 594 aa, Homo sapiens
MNRLYVTQRDYELIGPLLCSVSVEIIGQEKNTVLPRDSENEELPKPRISDSESEDPPRNQASDSENEELPKPRVSDSESEGPQKGPASDSETEDASRHKQKPESDDDSDRENKGEDTEMQNDSFHSDSHMDRKKFHSSDSEEEEHKKQKMDSDEDEKEGEEEKVAKRKAAVLSDSEDEEKASAKKSRVVSDADDSDSDAVSDKSGKREKTIASDSEEEAGKELSDKKNEEKDLFGSDSESGNEEENLIADIFGESGDEEEEEFTGFNQEDLEEEKGETQVKEAEDSDSDDNIKRGKHMDFLSDFEMMLQRKKSMSGKRRRNRDGGTFISDADDVVSAMIVKMNEAAEEDRQLNNQKKPALKKLTLLPAVVMHLKKQDLKETFIDSGVMSAIKEWLSPLPDRSLPALKIREELLKILQELPSVSQETLKHSGIGRAVMYLYKHPKESRSNKDMAGKLINEWSRPIFGLTSNYKGMTREEREQRDLEQMPQRRRMNSTGGQTPRRDLEKVLTGEEKALRPGDPGFCARARVPMPSNKDYVVRPKWNVEMESSRFQATSKKGISRLDKQMRKFTDIRKKSRSAHAVKISIEGNKMPL

SEQ ID NO: 918973 - protein, 801 aa, Homo sapiens
MDSEYYSGDQSDDGGATPVQDERDSGSDGEDDVNEQHSGSDTGSVERHSENETSDREDGLPKGHHVTDSENDEPLNLNASDSESEELHRQKDSDSESEERAEPPASDSENEDVNQHGSDSESEETRKLPGSDSENEELLNGHASDSENEDVGKHPASDSEIEELQKSPASDSETEDALKPQISDSESEEPPRHQASDSENEEPPKPRMSDSESEELPKPQVSDSESEEPPRHQASDSENEELPKPRISDSESEDPPRHQASDSENEELPKPRISDSESEDPPRNQASDSENEELPKPRVSDSESEGPQKGPASDSETEDASRHKQKPESDDDSDRENKGEDTEMQNDSFHSDSHMDRKKFHSSDSEEEEHKKQKMDSDEDEKEGEEEKVAKRKAAVLSDSEDEEKASAKKSRVVSDADDSDSDAVSDKSGKREKTIASDSEEEAGKELSDKKNEEKDLFGSDSESGNEEENLIADIFGESGDEEEEEFTGFNQEDLEEEKGETQVKEAEDSDSDDNIKRGKHMDFLSDFEMMLQRKKSMSGKRRRNRDGGTFISDADDVVSAMIVKMNEAAEEDRQLNNQKKPALKKLTLLPAVVMHLKKQDLKETFIDSGVMSAIKEWLSPLPDRSLPALKIREELLKILQELPSVSQETLKHSGIGRAVMYLYKHPKESRSNKDMAGKLINEWSRPIFGLTSNYKGMTREEREQRDLEQMPQRRRMNSTGGQTPRRDLGARARVPMPSNKDYVVRPKWNVEMESSRFQATSKKGISRLDKQMRKFTDIRKKSRSAHAVKISIEGNKMPL

SEQ ID NO: 918974 - protein, 819 aa, Homo sapiens
MDSEYYSGDQSDDGGATPVQDERDSGSDGEDDVNEQHSGSDTGSVERHSENETSDREDGLPKGHHVTDSENDEPLNLNASDSESEELHRQKDSDSESEERAEPPASDSENEDVNQHGSDSESEETRKLPGSDSENEELLNGHASDSENEDVGKHPASDSEIEELQKSPASDSETEDALKPQISDSESEEPPRHQASDSENEEPPKPRMSDSESEELPKPQVSDSESEEPPRHQASDSENEELPKPRISDSESEDPPRHQASDSENEELPKPRISDSESEDPPRNQASDSENEELPKPRVSDSESEGPQKGPASDSETEDASRHKQKPESDDDSDRENKGEDTEMQNDSFHSDSHMDRKKFHSSDSEEEEHKKQKMDSDEDEKEGEEEKVAKRKAAVLSDSEDEEKASAKKSRVVSDADDSDSDAVSDKSGKREKTIASDSEEEAGKELSDKKNEEKDLFGSDSESGNEEENLIADIFGESGDEEEEEFTGFNQEDLEEEKGETQVKEAEDSDSDDNIKRGKHMDFLSDFEMMLQRKKSMSGKRRRNRDGGTFISDADDVVSAMIVKMNEAAEEDRQLNNQKKPALKKLTLLPAVVMHLKKQDLKETFIDSGVMSAIKEWLSPLPDRSLPALKIREELLKILQELPSVSQETLKHSGIGRAVMYLYKHPKESRSNKDMAGKLINEWSRPIFGLTSNYKGMTREEREQRDLEQMPQRRRMNSTGGQTPRRDLEKVLTGEEKALRPGDPGFCARARVPMPSNKDYVVRPKWNVEMESSRFQATSKKGISRLDKQMRKFTDIRKKSRSAHAVKISIEGNKMPL

SEQ ID NO: 918975 - protein, 781 aa, Homo sapiens
MDSEYYSGDQSDDGGATPVQDERDSGSDGEDDVNEQHSGSDTGSVERHSENETSDREDGLPKGHHVTDSENDEPLNLNASDSESEELHRQKDSDSESEERAEPPASDSENEDVNQHGSDSESEETRKLPGSDSENEELLNGHASDSENEDVGKHPASDSEIEELQKSPASDSETEDALKPQISDSESEEPPRHQASDSENEEPPKPRMSDSESEELPKPQVSDSESEEPPRHQASDSENEELPKPRISDSESEDPPRHQASDSENEELPKPRISDSESEDPPRNQASDSENEELPKPRVSDSESEGPQKGPASDSETEDASRHKQKPESDDDSDRENKGEDTEMQNDSFHSDSHMDRKKFHSSDSEEEEHKKQKMDSDEDEKEGEEEKVAKRKAAVLSDSEDEEKASAKKSRVVSDADDSDSDAVSDKSGKREKTIASDSEEEAGKELSDKKNEEKDLFGSDSESGNEEENLIADIFGESGDEEEEEFTGFNQEDLEEEKGETQVKEAEDSDSDDNIKRGKHMDFLSDFEMMLQRKKSMSGKRRRNRDGGTFISDADDVVSAMIVKMNEAAEEDRQLNNQKKPALKKLTLLPAVVMHLKKQDLKETFIDSGVMSAIKEWLSPLPDRSLPALKIREELLKILQELPSVSQETLKHSGIGRAVMYLYKHPKESRSNKDMAGKLINEWSRPIFGLTSNYKGMTREEREQRDLEQMPQRRRMNSTGGQTPRRDLEKVLTGEEKALRPGDPGFCARARVPMPSNKDYVVRPKWNVEMESSRLLKFV

SEQ ID NO: 918976 - protein, 787 aa, Homo sapiens [sequence omitted]

SEQ ID NO: 918977 - protein, 201 aa, Homo sapiens
MDSEYYSGDQSDDGGATPVQDERDSGSDGEDDVNEQHSGSDTGSVERHSENETSDREDGLPKGHHVTDSENDEPLNLNASDSESEELHRQKDSDSESEERAEPPASDSENEDVNQHGSDSESEETRKLPGSDSENEELLNGHASDSENEDVGKHPASDSEIEELQKSPASDSETEDALKPQISDSESETPQTLASRRGSSD

SEQ ID NO: 918978 - protein, 819 aa, Homo sapiens; identical to SEQ ID NO: 918974

SEQ ID NO: 918979 - protein, 263 aa, Homo sapiens
MNCKLLKENGNFQRETTSPLSSLPTSSSGAYNWALPAYSDWLTKGQISAVVTKGSFSTCLHLLGSLCLNLYWPSSDPKARMFPSLSKTKMNNGNLEGLFGFINRLRIKGKGLWPCHRQTRGSSARVLSESHGDGWFFTVCRSRNTNEMRGFLNHRCFPGTQGSGKVQLHLPPVFHQGNPSGSKDVYFLLLAKWLLNKEIKSLFRMKERKTPGEEALWIAPVSNASQLAGVILQVPVSNARFLAYCGREPGASGPDGKDSGLAE

SEQ ID NO: 918980 - protein, 824 aa, Homo sapiens
MITLLPRGSDQDPPEEDDGGATPVQDERDSGSDGEDDVNEQHSGSDTGSVERHSENETSDREDGLPKGHHVTDSENDEPLNLNASDSESEELHRQKDSDSESEERAEPPASDSENEDVNQHGSDSESEETRKLPGSDSENEELLNGHASDSENEDVGKHPASDSEIEELQKSPASDSETEDALKPQISDSESEEPPRHQASDSENEEPPKPRMSDSESEELPKPQVSDSESEEPPRHQASDSENEELPKPRISDSESEDPPRHQASDSENEELPKPRISDSESEDPPRNQASDSENEELPKPRVSDSESEGPQKGPASDSETEDASRHKQKPESDDDSDRENKGEDTEMQNDSFHSDSHMDRKKFHSSDSEEEEHKKQKMDSDEDEKEGEEEKVAKRKAAVLSDSEDEEKASAKKSRVVSDADDSDSDAVSDKSGKREKTIASDSEEEAGKELSDKKNEEKDLFGSDSESGNEEENLIADIFGESGDEEEEEFTGFNQEDLEEEKGETQVKEAEDSDSDDNIKRGKHMDFLSDFEMMLQRKKSMSGKRRRNRDGGTFISDADDVVSAMIVKMNEAAEEDRQLNNQKKPALKKLTLLPAVVMHLKKQDLKETFIDSGVMSAIKEWLSPLPDRSLPALKIREELLKILQELPSVSQETLKHSGIGRAVMYLYKHPKESRSNKDMAGKLINEWSRPIFGLTSNYKGMTREEREQRDLEQMPQRRRMNSTGGQTPRRDLEKVLTGEEKALRPGDPGFCARARVPMPSNKDYVVRPKWNVEMESSRFQATSKKGISRLDKQMRKFTDIRKKSRSAHAVKISIEGNKMPL

SEQ ID NO: 918981 - protein, 793 aa, Homo sapiens
MMVVLPQYRMNGIQDTGSVERHSENETSDREDGLPKGHHVTDSENDEPLNLNASDSESEELHRQKDSDSESEERAEPPASDSENEDVNQHGSDSESEETRKLPGSDSENEELLNGHASDSENEDVGKHPASDSEIEELQKSPASDSETEDALKPQISDSESEEPPRHQASDSENEEPPKPRMSDSESEELPKPQVSDSESEEPPRHQASDSENEELPKPRISDSESEDPPRHQASDSENEELPKPRISDSESEDPPRNQASDSENEELPKPRVSDSESEGPQKGPASDSETEDASRHKQKPESDDDSDRENKGEDTEMQNDSFHSDSHMDRKKFHSSDSEEEEHKKQKMDSDEDEKEGEEEKVAKRKAAVLSDSEDEEKASAKKSRVVSDADDSDSDAVSDKSGKREKTIASDSEEEAGKELSDKKNEEKDLFGSDSESGNEEENLIADIFGESGDEEEEEFTGFNQEDLEEEKGETQVKEAEDSDSDDNIKRGKHMDFLSDFEMMLQRKKSMSGKRRRNRDGGTFISDADDVVSAMIVKMNEAAEEDRQLNNQKKPALKKLTLLPAVVMHLKKQDLKETFIDSGVMSAIKEWLSPLPDRSLPALKIREELLKILQELPSVSQETLKHSGIGRAVMYLYKHPKESRSNKDMAGKLINEWSRPIFGLTSNYKGMTREEREQRDLEQMPQRRRMNSTGGQTPRRDLEKVLTGEEKALRPGDPGFCARARVPMPSNKDYVVRPKWNVEMESSRFQATSKKGISRLDKQMRKFTDIRKKSRSAHAVKISIEGNKMPL

SEQ ID NO: 918982 - protein, 297 aa, Homo sapiens
MDFLSDFEMMLQRKKSMSGKRRRNRDGGTFISDADDVVSAMIVKMNEAAEEDRQLNNQKKPALKKLTLLPAVVMHLKKQDLKETFIDSGVMSAIKEWLSPLPDRSLPALKIREELLKILQELPSVSQETLKHSGIGRAVMYLYKHPKESRSNKDMAGKLINEWSRPIFGLTSNYKGMTREEREQRDLEQMPQRRRMNSTGGQTPRRDLEKVLTGEEKALRPGDPGFCARARVPMPSNKDYVVRPKWNVEMESSRFQATSKKGISRLDKQMRKFTDIRKKSRSAHAVKISIEGNKMPL

SEQ ID NO: 918983 - protein, 819 aa, Homo sapiens; identical to SEQ ID NO: 918974

SEQ ID NO: 918984 - protein, 108 aa, Homo sapiens
MPQRRRMNSTGGQTPRRDLEKVLTGEEKALRPGDPGFCARARVPMPSNKDYVVRPKWNVEMESSRFQATSKKGISRLDKQMRKFTDIRKKSRSAHAVKISIEGNKMPL

SEQ ID NO: 918985 - protein, 511 aa, Homo sapiens
MDSEYYSGDQSDDGGATPVQDERDSGSDGEDDVNEQHSGSDTGSVERHSENETSDREDGLPKGHHVTDSENDEPLNLNASDSESEELHRQKDSDSESEERAEPPASDSENEDVNQHGSDSESEETRKLPGSDSENEELLNGHASDSENEDVGKHPASDSEIEELQKSPASDSETEDALKPQISDSESEEPPRHQASDSENEEPPKPRMSDSESEELPKPQVSDSESEEPPRHQASDSENEELPKPRISDSESEDPPRHQASDSENEELPKPRISDSESEDPPRNQASDSENEELPKPRVSDSESEGPQKGPASDSETEDASRHKQKPESDDDSDRENKGEDTEMQNDSFHSDSHMDRKKFHSSDSEEEEHKKQKMDSDEDEKEGEEEKVAKRKAAVLSDSEDEEKASAKKSRVVSDADDSDSDAVSDKSGKREKTIASDSEEEAGKELSDKKNEEKDLFGSDSESGNEEENLIADIFGESGDEEEEEFTVSIRWKYFLLDCAFFWCFYGSD

SEQ ID NO: 918986 - protein, 161 aa, Homo sapiens
FVTTRPAFQELLKEALNMERKKLVPATAKTYQNVKSIDTVKKLHQLIGKITSYSAAEMEKAGADLSFSDAWLGRGGNKIKYPMNERLLLTVFVKDTVASRHNSQILCLWILTKTGLSTYLHEAAISERDIGTPFWGWPSQLTTYFSEYSQRYQIFIIGDQS

SEQ ID NO: 918987 - protein, 164 aa, Homo sapiens
MPPGRWHAAYPAQAQSSRERGRLQTVKKEEEDESYTPVQAARPQTLNRPGQELFRQLFRQLRYHESSGPLETLSRLRELCRWWLRPDVLSKAQILELLVLEQFLSILPGELRVWVQLHNPESGEEAVALLEELQRDLDGTSWRTSFHNLNICGHIVVPFRASVR

SEQ ID NO: 918988 - protein, 164 aa, Homo sapiens
FYFHSMLSDAYCYFPSYLTSNSCILLPPDHLIGAHVLPHSTSNQRESSPTERLDVAGVQCCADGSDKCHGHMRYDKRSLKKVENQLSYEIFQRSQKTPAALLSPWKQDEHLHFLEWDKNLCSYLCPMHLHVAGQRTLLLPAHLSSDMRGNRHNLEAAKKQLFLK

SEQ ID NO: 918989 - protein, 164 aa, Homo sapiens; identical to SEQ ID NO: 918988

SEQ ID NO: 918990 - protein, 139 aa, Homo sapiens
MSTVKEAAHRLSKSEMSLYAVLDLKKGASPEDFKKSYSHSALLPHPPFEYHLGRKLALRYHPDKNPGNAQAAEIFKEINAAHAILSDSKKRKIYDQHGSLGIYLYDHFGEEGVRYYFILNSCWFKVHNSPGPLRIRKEG

SEQ ID NO: 918991 - protein, 189 aa, Homo sapiens
MSTVKEAAHRLSKSEMSLYAVLDLKKGASPEDFKKSYSHSALLPHPPFEYHLGRKLALRYHPDKNPGNAQAAEIFKEINAAHAILSDSKKRKIYDQHGSLGIYLYDHFGEEGVRYYFILNSCWFKTLVILCTLLTCCCFCCCCCFCCGALKPPPEQDSGRKYQQNVQSQPPRSGAKCDFRSEENSEDDF

SEQ ID NO: 918992 - protein, 169 aa, Homo sapiens
GVCIVNCKGKQDCGCRAQGGLRATFTLCSVMWELALHTTPLPCLLLCEGSARRNSSLVVFTPRGTSVPIHWTGCADCPQVGTAGPGSSTALPSGQPRTRHLASIRRMYSINHRRIFQSLLRDGDLTVHLLSSAPECRTPSSVMSTPAYNSTIDWALGSSGFSGSVLSQQ

SEQ ID NO: 918993 - protein, 232 aa, Homo sapiens
GITLQFSPFLPFCKVSCFYLMVSLACRHNEGWWKGMKQFLPAKAVDHEETPVRYSSSEVNHLSPREVTTVLQADSAEYAQPLVGGIVGTLHQRSTFKPEEGKEAGYADLDPYNSPGQEVYHAYAEPLPITGPEYATPIIMDMSGHPTTSVGQPSTSTFKATGNQPPPLVGTYNTLLSRTDSCSSAQAQYDTPKAGKPGLPAPDELVYQVPQSTQEVSGAGRDGECDVFKEIL

SEQ ID NO: 918994 - protein, 232 aa, Homo sapiens; identical to SEQ ID NO: 918993

SEQ ID NO: 918995 - protein, 232 aa, Homo sapiens; identical to SEQ ID NO: 918993

SEQ ID NO: 918996 - protein, 232 aa, Homo sapiens; identical to SEQ ID NO: 918993

SEQ ID NO: 918997 - protein, 232 aa, Homo sapiens; identical to SEQ ID NO: 918993

SEQ ID NO: 918998 - protein, 232 aa, Homo sapiens; identical to SEQ ID NO: 918993

SEQ ID NO: 918999 - protein, 232 aa, Homo sapiens; identical to SEQ ID NO: 918993

SEQ ID NO: 919000 - protein, 232 aa, Homo sapiens; identical to SEQ ID NO: 918993

SEQ ID NO: 919001 - protein, 1274 aa, Homo sapiens
MLITWCYTTEMLRINGATYKSLNLKLREEEEDWECFGDCDTGHRFDTCKRERNEMEEEWIRKVHQILRWPDQGVDLGHISLIELLHSQFDLVLVGLDILNEHNCVVSFALHGRISGQGELDDGIVVILVSPGALLRYLGCFGASVSWATRRLKELKQREFARNVASKSRKDERKQEKALQRLHKLAELRKETVCAPGSGPMFKSTTVTVRENCNEISQRVVVDSVNNQQDFKYTLIHSEENTKDATTVAEDPESANNYTAKNNQVGDQAQGIHRHKIGFSFAFPKKASVKLESSAAAFSEYSDDASVGKGFSRKSRFVPSACHLQQSSPTDVLLSSEEKTNSFHPPEAMCRDKETVQTQEIKEVSSEKDALLLPSFCKFQLQLSSDADNCQNSVPLADQIPLESVVINEDIPVSGNSFELLGNKSTVLDMSNDCISVQATTEENVKHNEASTTEVENKNGPETLAPSNTEEVNITIHKKTNFCKRQCEPFVPVLNKHRSTVLQWPSEMLVYTTTKPSISYSCNPLCFDFKSTKVNNNLDKNKPDLKDLCSQQKQEDICMGPLSDYKDVSTEGLTDYEIGSSKNKCSQVTPLLADDILSSSCDSGKNENTGQRYKNISCKIRETEKYNFTKSQIKQDTLDEKYNKIRLKETHEYWFHKSRRKKKRKKLCQHHHMEKTKESETRCKMEAENSYTENAGKYLLEPISEKQYLAAEQLLDSHQLLDKRPKSESISLSDNEEMCKTWNTEYNTYDTISSKNHCKKNTILLNGQSNATMIHSGKHNLTYSRTYCCWKTKMSSCSQDHRSLVLQNDMKHMSQNQAVKRGYNSVMNESERFYRKRRQHSHSYSSDESLNRQNHLPEEFLRPPSTSVAPCKPKKKRRRKRGRFHPGFETLELKENTDYPVKDNSSLNPLDRLISEDKKEKMKPQEVAKIERNSEQTNQLRNKLSFHPNNLLPSETNGETEHLEMETTSGELSDVSNDPTTSVCVASAPTKEAIDNTLLEHKERSENINLNEKQIPFQVPNIERNFRQSQPKSYLCHYELAEALPQGKMNETPTEWLRYNSGILNTQPPLPFKEAHVSGHTFVTAEQILAPLALPEQALLIPLENHDKFKNVPCEVYQHILQPNMLANKVKFTFPPAALPPPSTPLQPLPLQQSLCSTSVTTIHHTVLQQHAAAAAAAAAAAAAGTFKVLQPHQQFLSQIPALTRTSLPQLSVGPVGPRLCPGNQPTFVAPPQMPIIPASNQGNQANRLKNNNEQSNQTVHIPLENKTRPYAPS

SEQ ID NO: 919002 - protein, 266 aa, Homo sapiens
MDEAGSSASGGGFRPGVDSLDEPPNSRIFLVISKYTPESVLRERFSPFGDIQDIWVVRDKHTKESKGIAFVKFARSSQACRAMEEMHGQCLGPNDTKPIKVFIAQSRSSGSHRDVEDEELTRIFVMIPKSYTEEDLREKFKVYGDIEYCSIIKNKVTGESKGLGYVRYLKPSQAAQAIENCDRSFRAILAEPKNKASESSEQDYYSNMRQEALGHEPRVNMFPFEQQSEFQVLTRMIAEARKQSPNACQLYQEFLSLKNSFSAFLI

SEQ ID NO: 919003 - protein, 266 aa, Homo sapiens; identical to SEQ ID NO: 919002

SEQ ID NO: 919004 - protein, 266 aa, Homo sapiens; identical to SEQ ID NO: 919002

SEQ ID NO: 919005 - protein, 266 aa, Homo sapiens; identical to SEQ ID NO: 919002

SEQ ID NO: 919006 - protein, 238 aa, Homo sapiens
MDEAGSSASGGGFRPGVDSLDEPPNSRIFLVISKYTPESVLRERFSPFGDIQDIWVVRDKHTKESKGIAFVKFARSSQACRAMEEMHGQCLGPNDTKPIKVRVPGSGCPRGKEWASWTSLHLLLCRGEGGVEHPFPAADQTAPGLGTGAALRRGSPPTKLRRVAGKGTGCGVFAPRERTRQPRPPGDRTAVAGLPLSLALTNPPALEFTAKLVLAYFEYFSDLPLSDAQISIYKKRKN

SEQ ID NO: 919007 - protein, 266 aa, Homo sapiens; identical to SEQ ID NO: 919002

SEQ ID NO: 919008 - protein, 266 aa, Homo sapiens; identical to SEQ ID NO: 919002

SEQ ID NO: 919009 - protein, 127 aa, Homo sapiens
MIWQNSLRDIIIIVTIRLFHRNQKMLPKSVVLEYIYLTGSDLSAYVSSSSGSSLAPSSLNLRLSGISSNHGALSPASFQVQAWPTKKAMTHHLLVPRRFPPRIWKKGKMVLRTLVQRHEGVRATSAT

SEQ ID NO: 919010 - protein, 150 aa, Homo sapiens
MKRLNWIIFRFPLSQNGPYDSSKNVLRQEARFFTTLSSFGDFPMNYPLPKNDTPIPTIHFSGASWQQTESSLAGREPWQTPTFRLPKGKDKLKAEQEEYSVTERGKRVFKEWAFSQTRRSGVTDRKMIMRFSDELVTGAFSHRSLSGIKS

SEQ ID NO: 919011 - protein, 158 aa, Homo sapiens
TVIQIMPLREREQKRTVAAPSVFIFPPSDEQLKSGTASVVCLLNNFYPREAKVQWKVDNALQSGNSQESVTEQDSKDSTYSLSSTLTLSKADYEKHKVYACEVTHQGLSSPVTKSFNRGDQYWESGEGQSWRNYIRKHLALLPLENVDEYQIFQTLEV

SEQ ID NO: 919012 - protein, 151 aa, Homo sapiens
MCCVLGWPGAQGQAAFVASTCLLYSSPGLSSWLQAAQPLTTRGGSGPCPQIVAHLSRPFVCLEDIPTAHKQLAFAQRRVSMEEGMAIKNSWFSKRLPRFEKRWLMMTTATALSTENSTGLGSAHRTASISGCPDSRRFKTRVTAAIFLESL

SEQ ID NO: 919013 - protein, 151 aa, Homo sapiens; identical to SEQ ID NO: 919012

SEQ ID NO: 919014 - protein, 1415 aa, Homo sapiens
MGEKRVHPQKTKENVCFVNLDVNKDECSTEHLQQKLVNVSPDLPKLISSMNVQQPKENEIVVLSGLASGNLQADFEVSQCPWLPDICLVQCARGNRPNSTNCIIFEINKFLIGLELVQERQLHLETNILKLEDDTNCSLSSIEEDFLTASEHLEEESEVDESRNDYENINVSANVLESKQLKGATQVEWNCNKEKWLYALEDKYINKYPTPLIKTERSPENLTKNTALQSLDPSAKPSQWKREAVGNGRQATHYYHSEAFKGQMEKSQALYIPKDAYFSMMDKDVPSACAVAEQRSNLNPGDHEDTRNALPPRQDGEVTTGKYATNLAESVLQDAFIRLSQSQSTLPQESAVSVSVGSSLLPSCYSTKDTVVSRSWNELPKIVVVQSPDGSDAAPQPGISSWPEMEVSVETSSILSGENSSRQPQSALEVALACAATVIGTISSPQATERLKMEQVVSNFPPGSSGALQTQAPQGLKEPSINEYSFPSALCGMTQVASAVAVCGLGEREEVTCSVAPSGSLPPAAEASEAMPPLCGLASMELGKEAIAKGLLKEAALVLTRPNTYSSIGDFLDSMNRRIMETASKSQTLCSENVVRNELAHTLSNVILRHSIDEVHHKNMIIDPNDNRHSSEILDTLMESTNQLLLDVICFTFKKMSHIVRLGECPAVLSKETIRRRETEPSCQPSDPGASQAWTKATESSSSSPLSNSHNTSLVINNLVDGMYSKQDKGGVRPGLFKNPTLQSQLSRSHRVPDSSTATTSSKEIYLKGIAGEDTKSPHHSENECRASSEGQRSPTVSQSRSGSQEAEESIHPNTQEKYNCATSRINEVQVNLSLLGDDLLLPAQSTLQTKHPDIYCITDFAEELADTVVSMATEIAAICLDNSSGKQPWFCAWKRGSEFLMTPNVPCRSLKRKKESQGSGTAVRKHKPPRLSEIKRKTDEHPELKEKLMNRVVDESMNLEDVPDSVNLFANEVAAKIMNLTEFSMVDGMWQAQGYPRNRLLSGDRWSRLKASSCESIPEEDSEARAYVNSLGLMSTLSQPVSRASSVSKQSSCESITDEFSRFMVNQMENEGRGFELLLDYYAGKNASSILNSAMQQACRKSDHLSVRPSCPSKQSSTESITEEFYRYMLRDIERDSRESASSRRSSQDWTAGLLSPSLRSPVCHRQSSMPDSRSPCSRLTVNVPIKANSLDGFAQNCPQDFLSVQPVSSASSSGLCKSDSCLYRRGGTDHITNMLIHETWASSIEALMRKNKIIVDDAEEADTEPVSGGSPSQAEKCANRLAASRMCSGPTLLVQESLDCPRKDSVTECKQPPVSSLSKTASLTNHSPLDSKKETSSCQDPVPINHKRRSLCSREVPLIQIETDQREACAGEPEPFLSKSSLLEEAEGHSNDKNIPDVVRGGDTAVSACQIHR

SEQ ID NO: 919015 - protein, 1577 aa, Homo sapiens
MGEKRVHPQKTKENVCFVNLDVNKDECSTEHLQQKLVNVSPDLPKLISSMNVQQPKENEIVVLSGLASGNLQADFEVSQCPWLPDICLVQCARGNRPNSTNCIIFEINKFLIGLELVQERQLHLETNILKLEDDTNCSLSSIEEDFLTASEHLEEESEVDESRNDYENINVSANVLESKQLKGATQVEWNCNKEKWLYALEDKYINKYPTPLIKTERSPENLTKNTALQSLDPSAKPSQWKREAVGNGRQATHYYHSEAFKGQMEKSQALYIPKDAYFSMMDKDVPSACAVAEQRSNLNPGDHEDTRNALPPRQDGEVTTGKYATNLAESVLQDAFIRLSQSQSTLPQESAVSVSVGSSLLPSCYSTKDTVVSRSWNELPKIVVVQSPDGSDAAPQPGISSWPEMEVSVETSSILSGENSSRQPQSALEVALACAATVIGTISSPQATERLKMEQVVSNFPPGSSGALQTQAPQGLKEPSINEYSFPSALCGMTQVASAVAVCGLGEREEVTCSVAPSGSLPPAAEASEAMPPLCGLASMELGKEAIAKGLLKEAALVLTRPNTYSSIGDFLDSMNRRIMETASKSQTLCSENVVRNELAHTLSNVILRHSIDEVHHKNMIIDPNDNRHSSEILDTLMESTNQLLLDVICFTFKKMSHIVRLGECPAVLSKETIRRRETEPSCQPSDPGASQAWTKATESSSSSPLSNSHNTSLVINNLVDGMYSKQDKGGVRPGLFKNPTLQSQLSRSHRVPDSSTATTSSKEIYLKGIAGEDTKSPHHSENECRASSEGQRSPTVSQSRSGSQEAEESIHPNTQEKYNCATSRINEVQVNLSLLGDDLLLPAQSTLQTKHPDIYCITDFAEELADTVVSMATEIAAICLDNSSGKQPWFCAWKRGSEFLMTPNVPCRSLKRKKESQGSGTAVRKHKPPRLSEIKRKTDEHPELKEKLMNRVVDESMNLEDVPDSVNLFANEVAAKIMNLTEFSMVDGMWQAQGYPRNRLLSGDRWSRLKASSCESIPEEDSEARAYVNSLGLMSTLSQPVSRASSVSKQSSCESITDEFSRFMVNQMENEGRGFELLLDYYAGKNASSILNSAMQQACRKSDHLSVRPSCPSKQSSTESITEEFYRYMLRDIERDSRESASSRRSSQDWTAGLLSPSLRSPVCHRQSSMPDSRSPCSRLTVNVPIKANSLDGFAQNCPQDFLSVQPVSSASSSGLCKSDSCLYRRGGTDHITNMLIHETWASSIEALMRKNKIIVDDAEEADTEPVSGGSPSQAEKCANRLAASRMCSGPTLLVQESLDCPRKDSVTECKQPPVSSLSKTASLTNHSPLDSKKETSSCQDPVPINHKRRSLCSREVPLIQIETDQREACAGEPEPFLSKSSLLEEAEGHSNDKNIPDVVRGGDTAVSACQIHSDSLDTRDVPEAEASTEARAPDEAPNPPSSSEESTGSWTQLANEEDNPDDTSSFLQLSERSMSELVEEKKILKGQSESTEAPASGPPTGTASPQRSLLVINFDLEPECPDAELRATLQWIAASELGIPTIYFKKSQENRIEKVSCTRFGKQESFVFSSPLETQ

SEQ ID NO: 919016 - protein, 1603 aa, Homo sapiens
MGEKRVHPQKTKENVCFVNLDVNKDECSTEHLQQKLVNVSPDLPKLISSMNVQQPKENEIVVLSGLASGNLQADFEVSQCPWLPDICLVQCARGNRPNSTNCIIFEINKFLIGLELVQERQLHLETNILKLEDDTNCSLSSIEEDFLTASEHLEEESEVDESRNDYENINVSANVLESKQLKGATQVEWNCNKEKWLYALEDKYINKYPTPLIKTERSPENLTKNTALQSLDPSAKPSQWKREAVGNGRQATHYYHSEAFKGQMEKSQALYIPKDAYFSMMDKDVPSACAVAEQRSNLNPGDHEDTRNALPPRQDGEVTTGKYATNLAESVLQDAFIRLSQSQSTLPQESAVSVSVGSSLLPSCYSTKDTVVSRSWNELPKIVVVQSPDGSDAAPQPGISSWPEMEVSVETSSILSGENSSRQPQSALEVALACAATVIGTISSPQATERLKMEQVVSNFPPGSSGALQTQAPQGLKEPSINEYSFPSALCGMTQVASAVAVCGLGEREEVTCSVAPSGSLPPAAEASEAMPPLCGLASMELGKEAIAKGLLKEAALVLTRPNTYSSIGDFLDSMNRRIMETASKSQTLCSENVVRNELAHTLSNVILRHSIDEVHHKNMIIDPNDNRHSSEILDTLMESTNQLLLDVICFTFKKMSHIVRLGECPAVLSKETIRRRETEPSCQPSDPGASQAWTKATESSSSSPLSNSHNTSLVINNLVDGMYSKQDKGGVRPGLFKNPTLQSQLSRSHRVPDSSTATTSSKEIYLKGIAGEDTKSPHHSENECRASSEGQRSPTVSQSRSGSQEAEESIHPNTQEKYNCATSRINEVQVNLSLLGDDLLLPAQSTLQTKHPDIYCITDFAEELADTVVSMATEIAAICLDNSSGKQPWFCAWKRGSEFLMTPNVPCRSLKRKKESQGSGTAVRKHKPPRLSEIKRKTDEHPELKEKLMNRVVDESMNLEDVPDSVNLFANEVAAKIMNLTEFSMVDGMWQAQGYPRNRLLSGDRWSRLKASSCESIPEEDSEARAYVNSLGLMSTLSQPVSRASSVSKQSSCESITDEFSRFMVNQMENEGRGFELLLDYYAGKNASSILNSAMQQACRKSDHLSVRPSCPSKQSSTESITEEFYRYMLRDIERDSRESASSRRSSQDWTAGLLSPSLRSPVCHRQSSMPDSRSPCSRLTVNVPIKANSLDGFAQNCPQDFLSVQPVSSASSSGLCKSDSCLYRRGGTDHITNMLIHETWASSIEALMRKNKIIVDDAEEADTEPVSGGSPSQAEKCANRLAASRMCSGPTLLVQESLDCPRKDSVTECKQPPVSSLSKTASLTNHSPLDSKKETSSCQDPVPINHKRRSLCSREVPLIQIETDQREACAGEPEPFLSKSSLLEEAEGHSNDKNIPDVVRGGDTAVSACQIHSDSLDTRDVPEAEASTEARAPDEAPNPPSSSEESTGSWTQLANEEDNPDDTSSFLQLSERSMSELVEEKKILKGQSESTEAPASGPPTGTASPQRSLLVINFDLEPECPDAELRATLQWIAASELGIPTIYFKKSQENRIEKFLDVVQLVHRKSWKVGDIFHAVVQYCKMHEEQKDGRLSLFDWLLELG

SEQ ID NO: 919017 - protein, 136 aa, Homo sapiens
MSSRFHSVATDDLISVPVSGCRVSGRDWILQFLDLILWGWTGRLIPYLGYCDWFRSQRGKADVSSFSEEPPASVVCVPIYLLTVVDKRALLFGNSQQHFVVSLLLRYMKVFVILIPPRETQYLSLVLIFIFVMISD

SEQ ID NO: 919018 - protein, 204 aa, Homo sapiens
MPFDATPSMATLEERLVPESNSLVQTVVIRGNVPPASAGPALPQCVATCSSGLIQMSVLRGRHCAILFGPYVLPWTGSFLPDMDIMVTCSPDDYPKGTGVDIEDKAVNLTASCTQVLRVKEGDAGPPRLGFGLCGGGAGVVVKLQLGEQTETAIGQSQGNALRQFCNNPVENCVYETSCICLIECMFLYYFTQPNICWCHPEGC

SEQ ID NO: 919019 - protein, 127 aa, Homo sapiens
VKTSFSEMVDRAKLRRNGLYFQVTHSFGNSYTEDDHKDNFLYSKMFFLRTFHTNPLMWKPQEPLKAQLQPHLPCGLLQADPYQALCALETASEVKWGGIGATATLYACCTSQTAGQYSMRGTNIHPG

SEQ ID NO: 919020 - protein, 151 aa, Homo sapiens
MPAFPGDEGCLLRFTSCRVLYRANDNEDPPEDPQNFASPPHSSQESFGMDRTSGAVSVDSVPSYSAHTRPVWKPTTNYTSNWISRLIMCLLPNPRQMEIWHCKCDLLSASESANTLSSFQVFSIFPVPERLDLKSITELLSLNSYGPVYHS

SEQ ID NO: 919021 - protein, 262 aa, Homo sapiens
MSSLQRRSITMVSSNSSFISSNWLRDDIITSSKMGSASSSIRPRLVVDEREFFEIMPNYAKNIIVGFARMNGRTVGIVGNQPKVASGCLDINSSVKGARFVRFCDAFNIPLITFVDVPGFLPGTAQEYGGIIRHGAKLLYAFAEATVPKVTVITRKAYGGAYDVMSSKHLCGDTNYAWPTAEIAVMGAKGAVEIIFKGHENVEAAQAEYIEKFANPFPAAVRGFVDDIIQPSSTRARICCDLDVLASKKVQRPWRKHANIPL

SEQ ID NO: 919022 - protein, 276 aa, Homo sapiens
  misc_feature (6)..(6): Xaa can be any naturally occurring amino acid
DVDALXNLRDFFNYLPLSSQDPAPVRKCHDPSDLLVPELNTIVPLESTKAYNMVYIIHSVVDEREFFEIMPNYAKNIIVGFARMNGRTVGIVGNQPKVASGCLDINSSVKGARFVRFCDAFNIPLITFVDVPGFLPGTAQEYGGIIRHGAKLLYAFAEATVPKVTVITRKAYGGAYDVMSSKHLCGDTNYAWPTAEIAVMGAKGAVEIIFKGHENVEAAQAEYIEKFANPFPAAVRGFVDDIIQPSSTRARICCDLDVLASKKVQRPWRKHANIPL

SEQ ID NO: 919023 - protein, 281 aa, Homo sapiens
MSHYTWPPYFCSLLSFEEQEFLILVKPNLPIFNFIIVWPRLVVKTSHHWGMLLRHAQAAVNVAHHDALLATSIWRVDYQKGIVWASSALQAAGSLIFPAKTCGLQEPQLYFTEPQQLLDVFRELEEQNLSLIQNSQETEKTLEELSHTLKHTQIRITGSQVGETAHTRPWPWPGPGCLKSSERSSVCGPDPGERVVELGVGRAQAPVPTLKQPMARARPLQGPSALGAFCCCQAPGRPLEWLEVHSDPDPPVHSSTNMLHTGTESSHLLRRAWKLLLLHIS

SEQ ID NO: 919024 - protein, 148 aa, Homo sapiens
MAENLFIHVFLTPLPPSISPNYGVQATISTGPDHCPSILNELSAPICVFQQFTLYLIAGVTLLKHKRVCVTSLLKPSSGSSFFSEKIPIPYGDHKVPPLSLQHENRDISLLCPWNCLQSLQQCSAYERCLLEDFPFQQASFICNWQFL

SEQ ID NO: 919025 - protein, 196 aa, Homo sapiens
TQLSDQHLLEMEYCCGSRKGIFLSLGTYSVMPKLEAFIHISTAFSNGNLKHIDEVVYPCPVEPKKKSSIPLSNWSNKGIKVANKERRKVSVRWCPTKRTLGSHTAHTGFTAGPLGSNTGDGLCVQQLVSPPGTDSLATKLSSASWTVRILSDWISNCNVKNGCKVADSFALCWWYIVGKATNAWLQDPLKLEQALL

SEQ ID NO: 919026 - protein, 245 aa, Homo sapiens
FMEEMIFEVGTRSMFNMHNYYDKAWEKLLFGVCFFHALVQERKKFGPLGWNIPYGFNESDLRISIRQLQLFINEYDTIPFEAISYLTGECNYGGRVTDDWDRRLLLTMLADFYNLYIVENPHYKFSPSGNYFAPPKGTYEDYIEFIKKLPFTQHPEIFGLHENVDISKDLQQTKTLFESLLLTQGGSKQTGASGSTDQILLEITKDILNKLPSDFDIEMALRKYPVRYEESMNTVLVQEMERFNK

SEQ ID NO: 919027 - protein, 154 aa, Homo sapiens
MRHGGLHHPQLVTRHFKESIKFIHECRLRGESCLVHCLAGVSRSVTLVIAYIMTVTDFGWEDALHTVRAGRSCANPNVGFQRQLQEFEKHEVHQYRQWLKEEYGESPLQDAEEAKNILGKYKEQGRTEPQPGARRWSSFPALAPLTYDNYTTET

SEQ ID NO: 919028 - protein, 1345 aa, Homo sapiens
MKFLHIKTSSYPNLKVVAYHYCQADNTYTCLVPEFVHSIAALLCRSHQLAAYRDLLIKEPQLQSMLSLRSCVQDPVAAFKRGVLEPLTNLRNDDFPDNKDIHSDLHAYVQHRVHSSQDILSNISLNGKADATLIGKVSSHLVLRSLGSYLYLKLTLDLFQRGHLVIKSASYKVVPVSLSELYLLQCNMKFMTQSAFERALPILNVALASLHPMTDEQIFQAINAGHIQGEQGWEDFQQRMDALSCFLIKRRDKTRMFCHPSFREWLVWRADGENTAFLCEPRNGHALLAFMFSRQEGKLNRQQTMELGHHILKAHIFKAFFVCDPVPSAGICTLCGRPTFRVTLQGLSKKTGISSSHLQALWIGYSTEGLSAALASLRNLYTPNVKSHLGHEEVVTLLLEFGACLDGTSENGMTALCYAAAAGHMKLVCLLTKKGVRVDHLDKKGQCALVHSALRGHGDILQYLLTCEWSPGPPQPGTLRKSHALQQALTAAASMGHSSVVQCLLGMEKEHEVEVNGTDTLWGETGPQDQDCLLPTLTPSLSGDEAPDRTQSSGDPRERCGYLSVTCEETCSVLLIDYATFLKLANDDDDGCLDCLQPGVRLPGMGTTPFEGLFLCCPIFSLRALTAAAGRGKLEVCELLLGHGAAIVRLLLERGCDVNLSDKQGRTPLMVAACEGHLSTVEFLLSKDKEGLSALSWACLKGHRAVVQYLVEEGAAIDQTDKNGRTPLDLAAFYGDAETVLYLVEKGAVIEHVDHSGMRPLDRAIGCRNTSVVVALLRKGAKLGMHLGFVSLASVMRSKCSLLLCSFPTLLLLALPSPDSGESNPSLIVVGLPSDFGMAEEFASKALELKPKSYEAFYARARAKRNSRQFVAALADLQEAVKLCPTNQEVKRLLARVEEECKQLQRSQQQKQQGPLPAPLNDSENEEDTPTPGLSDHFHSEETEEEETSPQEESVSPTPRSQPSSSVPSSYIRNLQEGLQSKGRPVSPQSRAGIGKSLREPVAQPGLLLQPSKQAQIVKTSQHLGSGQSAVRNGSMKVQISSQNPPPSPMPGRIAATPAGSRTQHLEGTGTFTTRAGCGHFGDRLGPSQNVRLQCGENGPAHPLPSKTKTTERLLSHSSVAVDAAPPNQGGLATCSDVRHPASLTSSGSSGSPSSSIKMSSSTSSLTSSSSFSDGFKVQGPDTRIKDKVVTHVQSGTAEHRPRNTPFMGIMDKTARFQQQSNPPSRSWHCPAPEGLLTNTSSAAGLQSANTEKPSLMQVGGYNNQAKTCSVSTLSASVHNGAQVKELEESKCQIPVHSQENRITKTVSHLYQESISKQQPHISNEAHRSHLTAAKPKRSFIESNV

SEQ ID NO: 919029 - protein, 355 aa, Homo sapiens
MKFLHIKTSSYPNLKVVAYHYCQADNTYTCLVPEFVHSIAALLCRSHQLAAYRDLLIKEPQLQSMLSLRSCVQDPVAAFKRGVLEPLTNLRNEQKIPEEEYIILIDGLNEAEFHKPDYGDTLSSFITKIISKFPAWLKLIVTVRANFQEIISALPFVKLSLDDFPDNKDIHSDLHAYVQHRVHSSQDILSNISLNGKADATLIGKVSSHLVLRSLGSYLYLKLTLDLFQRGHLVIKSASYKVVPVSLSELYLLQCNMKFMTQSAFERALPILNVALASLHPMTDEQIFQAINAGHIQGEQGWEDFQQRMDALSCFLIKRRDKTRMFCHPSFREWLVWRADGENTAFLCEPSDSWW

SEQ ID NO: 919030 - protein, 1500 aa, Homo sapiens
MKFLHIKTSSYPNLKVVAYHYCQADNTYTCLVPEFVHSIAALLCRSHQLAAYRDLLIKEPQLQSMLSLRSCVQDPVAAFKRGVLEPLTNLRNEQKIPEEEYIILIDGLNEAEFHKPDYGDTLSSFITKIISKFPAWLKLIVTVRANFQEIISALPFVKLSLDDFPDNKDIHSDLHAYVQHRVHSSQDILSNISLNGKADATLIGKVSSHLVLRSLGSYLYLKLTLDLFQRGHLVIKSASYKVVPVSLSELYLLQCNMKFMTQSAFERALPILNVALASLHPMTDEQIFQAINAGHIQGEQGWEDFQQRMDALSCFLIKRRDKTRMFCHPSFREWLVWRADGENTAFLCEPRNGHALLAFMFSRQEGKLNRQQTMELGHHILKAHIFKAFFVCDPVPSAGICTLCGRPTFRVTLQGLSKKTGISSSHLQALWIGYSTEGLSAALASLRNLYTPNVKVSRLLILGGANVNYRTEVLNNAPILCVQSHLGHEEVVTLLLEFGACLDGTSENGMTALCYAAAAGHMKLVCLLTKKGVRVDHLDKKGQCALVHSALRGHGDILQYLLTCEWSPGPPQPGTLRKSHALQQALTAAASMGHSSVVQCLLGMEKEHEVEVNGTDTLWGETGPQDQDCLLPTLTPSLSGDEAPDRTQSSGDPRERCGYLSVTCEETCSVLLIDYATFLKLANDDDDGCLDCLQPGVRLPGMGTTPFEGLFLCCPIFSLRALTAAAGRGKLEVCELLLGHGAAVSRTNRRGVPPLFCAARQGHWQIVRLLLERGCDVNLSDKQGRTPLMVAACEGHLSTVEFLLSKGAALSSLDKEGLSALSWACLKGHRAVVQYLVEEGAAIDQTDKNGRTPLDLAAFYGDAETVLYLVEKGAVIEHVDHSGMRPLDRAIGCRNTSVVVALLRKGAKLGNAAWAMATSKPDILIILLQKLMEEGNVMYKKGKMKEAAQRYQYALRKFPREGFGEDMRPFNELRVSLYLNLSRCRRKTNDFGMAEEFASKALELKPKSYEAFYARARAKRNSRQFVAALADLQEAVKLCPTNQEVKRLLARVEEECKQLQRSQQQKQQGPLPAPLNDSENEEDTPTPGLSDHFHSEETEEEETSPQEESVSPTPRSQPSSSVPSSYIRNLQEGLQSKGRPVSPQSRAGIGKSLREPVAQPGLLLQPSKQAQIVKTSQHLGSGQSAVRNGSMKVQISSQNPPPSPMPGRIAATPAGSRTQHLEGTGTFTTRAGCGHFGDRLGPSQNVRLQCGENGPAHPLPSKTKTTERLLSHSSVAVDAAPPNQGGLATCSDVRHPASLTSSGSSGSPSSSIKMSSSTSSLTSSSSFSDGFKVQGPDTRIKDKVVTHVQSGTAEHRPRNTPFMGIMDKTARFQQQSNPPSRSWHCPAPEGLLTNTSSAAGLQSANTEKPSLMQVGGYNNQAKTCSVSTLSASVHNGAQVKELEESKCQIPVHSQENRITKTVSHLYQESISKQQPHISNEAHRSHLTAAKPKRSFIESNV

SEQ ID NO: 919031 - protein, 1880 aa, Homo sapiens
MLKAVLKKSREGGKGGKKEAGSDFGPETSPVLHLDHSADSPVSSLPTAEDTYRVSLAKGVSMSLPSSPLLPRQSHLVQSRVNKKSPGPVRKPKYVESPRVPGDAVIMPFREVAKPTEPDEHATITSSSENDDRSGSSLEWNKDGSLRLGVQKGVLHDRRADNCSPVAEEETTGSAESTLPKAESSAGDGPVPYSQGSSSLIMPRPNSVAATSSTKLEDLSYLDGQRNAPLRTSIRLPWHNTAGGRAQEVKARFAPYKPQDILLKPLLFEVPSITTDSVFVGRDWLFHQIEENLRNTELAENRGAVVVGNVGFGKTAIISKLVALSCHGSRMRQIASNSPGSSPKTSDPTQDLHFTPLLSPSSSTSASSTAKTPLGSISAENQRPREDAVKYLASKVVAYHYCQADNTYTCLVPEFVHSIAALLCRSHQLAAYRDLLIKEPQLQSMLSLRSCVQDPVAAFKRGVLEPLTNLRNEQKIPEEEYIILIDGLNEAEFHKPDYGDTLSSFITKIISKFPAWLKLIVTVRANFQEIISALPFVKLSLDDFPDNKDIHSDLHAYVQHRVHSSQDILSNISLNGKADATLIGKVSSHLVLRSLGSYLYLKLTLDLFQRGHLVIKSASYKVVPVSLSELYLLQCNMKFMTQSAFERALPILNVALASLHPMTDEQIFQAINAGHIQGEQGWEDFQQRMDALSCFLIKRRDKTRMFCHPSFREWLVWRADGENTAFLCEPRNGHALLAFMFSRQEGKLNRQQTMELGHHILKAHIFKAFFVCDPVPSAGICTLCGRPTFRVTLQGLSKKTGISSSHLQALWIGYSTEGLSAALASLRNLYTPNVKVSRLLILGGANVNYRTEVLNNAPILCVQSHLGHEEVVTLLLEFGACLDGTSENGMTALCYAAAAGHMKLVCLLTKKGVRVDHLDKKGQCALVHSALRGHGDILQYLLTCEWSPGPPQPGTLRKSHALQQALTAAASMGHSSVVQCLLGMEKEHEVEVNGTDTLWGETGPQDQDCLLPTLTPSLSGDEAPDRTQSSGDPRERCGYLSVTCEETCSVLLIDYATFLKLANDDDDGCLDCLQPGVRLPGMGTTPFEGLFLCCPIFSLRALTAAAGRGKLEVCELLLGHGAAVSRTNRRGVPPLFCAARQGHWQIVRLLLERGCDVNLSDKQGRTPLMVAACEGHLSTVEFLLSKGAALSSLDKEGLSALSWACLKGHRAVVQYLVEEGAAIDQTDKNGRTPLDLAAFYGDAETVLYLVEKGAVIEHVDHSGMRPLDRAIGCRNTSVVVALLRKGAKLGNAAWAMATSKPDILIILLQKLMEEGNVMYKKGKMKEAAQRYQYALRKFPREGFGEDMRPFNELRVSLYLNLSRCRRKTNDFGMAEEFASKALELKPKSYEAFYARARAKRNSRQFVAALADLQEAVKLCPTNQEVKRLLARVEEECKQLQRSQQQKQQGPLPAPLNDSENEEDTPTPGLSDHFHSEETEEEETSPQEESVSPTPRSQPSSSVPSSYIRNLQEGLQSKGRPVSPQSRAGIGKSLREPVAQPGLLLQPSKQAQIVKTSQHLGSGQSAVRNGSMKVQISSQNPPPSPMPGRIAATPAGSRTQHLEGTGTFTTRAGCGHFGDRLGPSQNVRLQCGENGPAHPLPSKTKTTERLLSHSSVAVDAAPPNQGGLATCSDVRHPASLTSSGSSGSPSSSIKMSSSTSSLTSSSSFSDGFKVQGPDTRIKDKVVTHVQSGTAEHRPRNTPFMGIMDKTARFQQQSNPPSRSWHCPAPEGLLTNTSSAAGLQSANTEKPSLMQVGGYNNQAKTCSVSTLSASVHNGAQVKELEESKCQIPVHSQENRITKTVSHLYQESISKQQPHISNEAHRSHLTAAKPKRSFIESNV

SEQ ID NO: 919032 - protein, 1214 aa, Homo sapiens
MKFLHIKTSSYPNLKVVAYHYCQADNTYTCLVPEFVHSIAALLCRSHQLAAYRDLLIKEPQLQSMLSLRSCVQDPVAAFKRGVLEPLTNLRNEQKIPEEEYIILIDGLNEAEFHKPDYGDTLSSFITKIISKFPAWLKLIVTVRANFQEIISALPFVKLSLDDFPDNKDIHSDLHAYVQHRVHSSQDILSNISLNGKADATLIGKVSSHLVLRSLGSYLYLKLTLDLFQRGHLVIKSASYKVVPVSLSELYLLQCNMKFMTQSAFERALPILNVALASLHPMTDEQIFQAINAGHIQGEQGWEDFQQRMDALSCFLIKRRDKTRMFCHPSFREWLVWRADGENTAFLCEPRNGHALLAFMFSRQEGKLNRQQTMELGHHILKAHIFKAFFVCDPVPSAGICTLCGRPTFRVTLQGLSKKTGISSSHLQALWIGYSTEGLSAALASLRNLYTPNVKVSRLLILGGANVNYRTEVLNNAPILCVQSHLGHEEVVTLLLEFGACLDGTSENGMTALCYAAAAGHMKLVCLLTKKGVRVDHLDKKGQCALVHSALRGHGDILQYLLTCEWSPGPPQPGTLRKSHALQQALTAAASMGHSSVVQCLLGMEKEHEVEVNGTDTLWGETGPQDQDCLLPTLTPSLSGDEAPDRTQSSGDPRERCGYLSVTCEETCSVLLIDYATFLKLANDDDDGCLDCLQPGVRLPGMGTTPFEGLFLCCPIFSLRALTAAAGRGKLEVCELLLGHGAAVSRTNRRGVPPLFCAARQGHWQIVRLLLERGCDVNLSDKQGRTPLMVAACEGHLSTVEFLLSKGAALSSLDKEGLSALSWACLKGHRAVVQYLVEEGAAIDQTDKNGRTPLDLAAFYGDAETVLYLVEKGAVIEHVDHSGMRPLDRAIGCRNTSVVVALLRKGAKLGNAAWAMATSKPDILIILLQKLMEEGNVMYKKGKMKEAAQRYQYALRKFPREGFGEDMRPFNELRVSLYLNLSRCRRKTNDFGMAEEFASKALELKPKSYEAFYARARAKRNSRQFVAALADLQEAVKLCPTNQEVKRLLARVEEECKQLQRSQQQKQQGPLPAPLNDSENEEDTPTPGLSDHFHSEETEEEETSPQEESVSPTPRSQPSSSVPSSYIRNLQEGLQSKGRPVSPQSRAGIGKSLREPVAQPGLLLQPSKQAQIVKTSQHLGSGQSAVRNGSMKVQISSQNPPPASLVPSSIVSCQ

SEQ ID NO: 919033 - protein, 140 aa, Homo sapiens
MRVCFAGNAAWAMATSKPDILIILLQKLMEEGNVMYKVSGSALFFAIETAWEHPLNWVHNGYSCATAQSPCNRSAKSGWVGWLTPVTPALLEAEVGRSLEARNSRPTWPIWQNPIFTKNTKISQVPVIPATREAEAGELF

SEQ ID NO: 919034 - protein, 1915 aa, Homo sapiens
RRLCCGSCWSGGRLGSRRRGSRGAPSWPRPEARPWVWGTALRSWKLSRQKQVLKMLKAVLKKSREGGKGGKKEAGSDFGPETSPVLHLDHSADSPVSSLPTAEDTYRVSLAKGVSMSLPSSPLLPRQSHLVQSRVNKKSPGPVRKPKYVESPRVPGDAVIMPFREVAKPTEPDEHEAKADNEPSCSPAAQELLTRLGFLLGEGIPSATHITIEDKNETMCTALSQGISPCSTLTSSTASPSTDSPCSTLNSCVSKTAANKSPCETISSPSSTLESKDSGIIATITSSSENDDRSGSSLEWNKDGSLRLGVQKGVLHDRRADNCSPVAEEETTGSAESTLPKAESSAGDGPVPYSQGSSSLIMPRPNSVAATSSTKLEDLSYLDGQRNAPLRTSIRLPWHNTAGGRAQEVKARFAPYKPQDILLKPLLFEVPSITTDSVFVGRDWLFHQIEENLRNTELAENRGAVVVGNVGFGKTAIISKLVALSCHGSRMRQIASNSPGSSPKTSDPTQDLHFTPLLSPSSSTSASSTAKTPLGSISAENQRPREDAVKYLASKVVAYHYCQADNTYTCLVPEFVHSIAALLCRSHQLAAYRDLLIKEPQLQSMLSLRSCVQDPVAAFKRGVLEPLTNLRNEQKIPEEEYIILIDGLNEAEFHKPDYGDTLSSFITKIISKFPAWLKLIVTVRANFQEIISALPFVKLSLDDFPDNKDIHSDLHAYVQHRVHSSQDILSNISLNGKADATLIGKVSSHLVLRSLGSYLYLKLTLDLFQRGHLVIKSASYKVVPVSLSELYLLQCNMKFMTQSAFERALPILNVALASLHPMTDEQIFQAINAGHIQGEQGWEDFQQRMDALSCFLIKRRDKTRMFCHPSFREWLVWRADGENTAFLCEPRNGHALLAFMFSRQEGKLNRQQTMELGHHILKAHIFKGLSKKTGISSSHLQALWIGYSTEGLSAALASLRNLYTPNVKVSRLLILGGANVNYRTEVLNNAPILCVQSHLGHEEVVTLLLEFGACLDGTSENGMTALCYAAAAGHMKLVCLLTKKGVRVDHLDKKGQCALVHSALRGHGDILQYLLTCEWSPGPPQPGTLRKSHALQQALTAAASMGHSSVVQCLLGMEKEHEVEVNGTDTLWGETALTAAAGRGKLEVCELLLGHGAAVSRTNRRGVPPLFCAARQGHWQIVRLLLERGCDVNLSDKQGRTPLMVAACEGHLSTVEFLLSKGAALSSLDKEGLSALSWACLKGHRAVVQYLVEEGAAIDQTDKNGRTPLDLAAFYGDAETVLYLVEKGAVIEHVDHSGMRPLDRAIGCRNTSVVVALLRKGAKLGNAAWAMATSKPDILIILLQKLMEEGNVMYKKGKMKEAAQRYQYALRKFPREGFGEDMRPFNELRVSLYLNLSRCRRKTNDFGMAEEFASKALELKPKSYEAFYARARAKRNSRQFVAALADLQEAVKLCPTNQEVKRLLARVEEECKQLQRSQQQKQQGPLPAPLNDSENEEDTPTPGLSDHFHSEETEEEETSPQEESVSPTPRSQPSSSVPSSYIRNLQEGLQSKGRPVSPQSRAGIGKSLREPVAQPGLLLQPSKQAQIVKTSQHLGSGQSAVRNGSMKVQISSQNPPPSPMPGRIAATPAGSRTQHLEGTGTFTTRAGCGHFGDRLGPSQNVRLQCGENGPAHPLPSKTKTTERLLSHSSVAVDAAPPNQGGLATCSDVRHPASLTSSGSSGSPSSSIKMSSSTSSLTSSSSFSDGFKVQGPDTRIKDKVVTHVQSGTAEHRPRNTPFMGIMDKTARFQQQSNPPSRSWHCPAPEGLLTNTSSAAGLQSANTEKPSLMQVGGYNNQAKTCSVSTLSASVHNGAQVKELEESKCQIPVHSQENRITKTVSHLYQESISKQQPHISNEAHRSHLTAAKPKRSFIESNV

SEQ ID NO: 919035 - protein, 1431 aa, Homo sapiens
MKFLHIKTSSYPNLKVVAYHYCQADNTYTCLVPEFVHSIAALLCRSHQLAAYRDLLIKEPQLQSMLSLRSCVQDPVAAFKRGVLEPLTNLRNDDFPDNKDIHSDLHAYVQHRVHSSQDILSNISLNGKADATLIGKVSSHLVLRSLGSYLYLKLTLDLFQRGHLVIKSASYKVVPVSLSELYLLQCNMKFMTQSAFERALPILNVALASLHPMTDEQIFQAINAGHIQGEQGWEDFQQRMDALSCFLIKRRDKTRMFCHPSFREWLVWRADGENTAFLCEPRNGHALLAFMFSRQEGKLNRQQTMELGHHILKAHIFKAFFVCDPVPSAGICTLCGRPTFRVTLQGLSKKTGISSSHLQALWIGYSTEGLSAALASLRNLYTPNVKVSRLLILGGANVNYRTEVLNNAPILCVQSHLGHEEVVTLLLEFGACLDGTSENGMTALCYAAAAGHMKLVCLLTKKGVRVDHLDKKGQCALVHSALRGHGDILQYLLTCEWSPGPPQPGTLRKSHALQQALTAAASMGHSSVVQCLLGMEKEHEVEVNGTDTLWGETGPQDQDCLLPTLTPSLSGDEAPDRTQSSGDPRERCGYLSVTCEETCSVLLIDYATFLKLANDDDDGCLDCLQPGVRLPGMGTTPFEGLFLCCPIFSLRALTAAAGRGKLEVCELLLGHGAAVSRTNRRGVPPLFCAARQGHWQIVRLLLERGCDVNLSDKQGRTPLMVAACEGHLSTVEFLLSKGAALSSLDKEGLSALSWACLKGHRAVVQYLVEEGAAIDQTDKNGRTPLDLAAFYGDAETVLYLVEKGAVIEHVDHSGMRPLDRAIGCRNTSVVVALLRKGAKLGNAAWAMATSKPDILIILLQKLMEEGNVMYKKGKMKEAAQRYQYALRKFPREGFGEDMRPFNELRVSLYLNLSRCRRKTNDFGMAEEFASKALELKPKSYEAFYARARAKRNSRQFVAALADLQEAVKLCPTNQEVKRLLARVEEECKQLQRSQQQKQQGPLPAPLNDSENEEDTPTPGLSDHFHSEETEEEETSPQEESVSPTPRSQPSSSVPSSYIRNLQEGLQSKGRPVSPQSRAGIGKSLREPVAQPGLLLQPSKQAQIVKTSQHLGSGQSAVRNGSMKVQISSQNPPPSPMPGRIAATPAGSRTQHLEGTGTFTTRAGCGHFGDRLGPSQNVRLQCGENGPAHPLPSKTKTTERLLSHSSVAVDAAPPNQGGLATCSDVRHPASLTSSGSSGSPSSSIKMSSSTSSLTSSSSFSDGFKVQGPDTRIKDKVVTHVQSGTAEHRPRNTPFMGIMDKTARFQQQSNPPSRSWHCPAPEGLLTNTSSAAGLQSANTEKPSLMQVGGYNNQAKTCSVSTLSASVHNGAQVKELEESKCQIPVHSQENRITKTVSHLYQESISKQQPHISNEAHRSHLTAAKPKRSFIESNV

SEQ ID NO: 919036 - protein, 1500 aa, Homo sapiens; identical to SEQ ID NO: 919030

SEQ ID NO: 919037 - protein, 852 aa, Homo sapiens
MKFLHIKTSSYPNLKVVAYHYCQADNTYTCLVPEFVHSIAALLCRSHQLAAYRDLLIKEPQLQSMLSLRSCVQDPVAAFKRGVLEPLTNLRNEQKIPEEEYIILIDGLNEAEFHKPDYGDTLSSFITKIISKFPAWLKLIVTVRANFQEIISALPFVKLSLDDFPDNKDIHSDLHAYVQHRVHSSQDILSNISLNGKADATLIGKVSSHLVLRSLGSYLYLKLTLDLFQRGHLVIKSASYKVVPVSLSELYLLQCNMKFMTQSAFERALPILNVALASLHPMTDEQIFQAINAGHIQGEQGWEDFQQRMDALSCFLIKRRDKTRMFCHPSFREWLVWRADGENTAFLCEPRNGHALLAFMFSRQEGKLNRQQTMELGHHILKAHIFKAFFVCDPVPSAGICTLCGRPTFRVTLQGLSKKTGISSSHLQALWIGYSTEGLSAALASLRNLYTPNVKVSRLLILGGANVNYRTEVLNNAPILCVQSHLGHEEVVTLLLEFGACLDGTSENGMTALCYAAAAGHMKLVCLLTKKGVRVDHLDKKGQCALVHSALRGHGDILQYLLTCEWSPGPPQPGTLRKSHALQQALTAAASMGHSSVVQCLLGMEKEHEVEVNGTDTLWGETGPQDQDCLLPTLTPSLSGDEAPDRTQSSGDPRERCGYLSVTCEETCSVLLIDYATFLKLANDDDDGCLDCLQPGVRLPGMGTTPFEGLFLCCPIFSLRALTAAAGRGKLEVCELLLGHGAAVSRTNRRGVPPLFCAARQGHWQIVRLLLERGCDVNLSDKQGRTPLMVAACEGHLSTVEFLLSKGSSVMPSKVSFGRTQRELQQTHSVLSDSNSKFSVNGNFLINSRENR

SEQ ID NO: 919038 - protein, 143 aa, Homo sapiens
FMNGFRVLMQGLEGVGFSCFALLPSAICFTVTRSSSGEKHFYRGDFPLVLCDAQEQTYVEAFKYFVSRGSGPGGPEAPTPITPLTTSPLQPPLRLPQNPRHVLLNLFKAATAGVRRAKQESAWAMRMREARAHSPVTVTPTVG

SEQ ID NO: 919039 - protein, 143 aa, Homo sapiens; identical to SEQ ID NO: 919038

SEQ ID NO: 919040 - protein, 182 aa, Homo sapiens [sequence omitted]

SEQ ID NO: 919041 - protein, 143 aa, Homo sapiens
LAAQLGKMSTSGSVTLGRGKLSCVWGSGGWQHRTCKHTQTKVLEVSHSKEMRVGSWVVELTPTPSLLSGPDQLGFYSKRLPSVNLCVMHILSLTAASELPCLNDTGRELMATGHLFLTGAHCVLTPSFTLECGREQEHGVGEE

SEQ ID NO: 919042 - protein, 155 aa, Homo sapiens
PDKTGFKMKVGGVNGEKNGIAGSNDFQLDVSLNSTIKQNCHSFTLQLENNTPTSHQCKYFRLISNMNVTNALLYIKESGEALGLSTGNGDTAAVGCMRFVITDLRVAVTFGATRSSFQNCPSVTENSRRVVHGPSILEGLLALLRLRITGPAQAN

SEQ ID NO: 919043 - protein, 129 aa, Homo sapiens
MFYTHSTCINKGLLDASDFLHAKEDHGSPASTRRQKKGMERMLSLSPLKGISPADALTLAFQSLELRNTIILLFQSHQFVVLCYDIVRELTQQGAHWIEDHESCTPVSTLPLTAGSAHVVMPVLPGLQV

SEQ ID NO: 919044 - protein, 134 aa, Homo sapiens
MLNIGPHSLLACRVSAERSAVSVMGFPLWSGPSAAGLLQFTGGPLQTLFAWVSAAVAAEQWILVNCKCCRLIVPLEVLSQRSTRLLGILQRRCCVLLHASYQETQEMKVYYNIGGGNYDHFVNVISIGFSTVKL

SEQ ID NO: 919045 - protein, 214 aa, Homo sapiens
RHRSWSQREEASGQPNRMMRKTEAQGTFPRPRAENAAELKFKSSLSDPPNPTLSPRPAMAHIPGGPVTILHLGSPKALFLSFTASLYLIPITKGFFSLSLFLLFVRMESTGPGEKNLRQSDVRSVDKTQESPGRGAGAKASARLAAAVMFGNDGSTLENLLGKGWAILRFRQACPGDFERPNHCWVSDPLLGRCPDANWEKLGQANQVLPEPSL

SEQ ID NO: 919046 - protein, 724 aa, Homo sapiens
MKYAICKTELVLFPPNVSPRCPEYAICKTELVLSPQNVSPGCPEYAICKTELVLFPQNVSPGCPEYAICKTELVLFPPNVSSPRCPEYAICKTELVLSPQNVSPRCPEYAICKTELILFPQNVSPGCREYAICKTELVLFPPNVSPRCPEYAICKTELVLFPPNVSSPRCPEYAICKTELILFPQNVSRGCPEYAICKTELVLFPQNVSPGCPEYAICKTELVLFPQNVSPGCPEYAICKTELVLFPPNVSPGCPEYTICKTELVLFPPNVSPGCPEYAICKTELVLFPPNVSPGCPEYAICKTELVLFPPNVSPGCPEYAICKTELVLFPPNVSPGCPEYAICKTELVLFPQNVSPGCPEYSICKTELILFPPNVSPGCPEYAICKTELVLFPPNVSPGCTEYAICKTELVLFPPNVSPGCPEYAICKTELVLFPQNVSPGCPEYAICKTELVLFPPNVSPGCPEYAICKTELVLFPPNVSPGCPEYAICKTELVLFPPNVSPGCPEYAICKTELVLFPQNVSPGCPEYSICKTELVLFPPNVSPGCPEYSICKTELVLFPQNVSPGCPEYAICKTELVLFLPNVSPGCPEYAICKTELVLFPPNVSPGCPEYAICKTELVLFPPNVSPGCPEYAIGKTELVLFPQNVSPGCPEYAICKTELVLFPPNVSPGCPEYAIGKTELVLFPPNVSPGCPEYAICKTELVLFPPNVCPLLEPGNWISS

SEQ ID NO: 919047 - protein, 164 aa, Homo sapiens
DCHHIYVHKYPMFSFHLQRLKRSKSRKRKAIKETKRRLPDETITLKNSCILLKEYKYPTNDNKSPIPLLSTLFGNNGLGTLQITLQHHQLLTFFQEIPEGKLGSWRRRGEDHAFPRQKTKPFASAINRTPSGKLELLILPVMELSICLRSREFRSSHGPPTAGI

SEQ ID NO: 919048 - protein, 127 aa, Homo sapiens
MIGLMKRKGNGVFKTSVMNQMLPLTSYVHVIQRFPPLKQNNSAYLTRHHGSLLSPWISSSMPLPFHSASTRIMAPKIHEFKSKFHRLRDEPKLPNAQAPPVYGYSSSIYESFFHFLPTLTNLMNGKW

SEQ ID NO: 919049 - protein, 169 aa, Homo sapiens
GRTLCRAAMLENSGAMAACLGLVFSLKESQEDVLIPAGLSSILTIPGVLTGSSSPVSLAAIHSVNTLAPMAAFTDEETKDHSGGDVCKVTQLRRSSCGLYPDLMPLPACFLLPSRDSAGQQVYDRSIYISQNMVSVICFLTQIKVILRTWTAQFRIKCSAKSGSGQEFT

SEQ ID NO: 919050 - protein, 709 aa, Homo sapiens
QLRAGVMAGGRRRRRRLAELTVDEFLASGFDSKSEYSPEAETREAREAARSPDEPGGSPSASRRKGRASEHKDQLSRLKDRDAEFYKFLQENDQSQLNFSDSDSSEEEEEPFHSLPYVLEEASEDEDGAEEGEDGDRVPRGLKGKKNCVPVTLAMVERWKQAAKQRLTPKLFHEVVQAFRAAVATTQGDQESAEANKFQVTDSAVFNALVVFNALVTFCIRDLTGCLQKLLIGKVAKDSSRMLQPSSSLLWGKLRVDIKAYLGSVIQLVSCVAETVVLAAVLWHISVLVPCFLTFPKQCSRECRVCRHKKDTFLGPILKQMYIMYVRNCKFTSPGALPFISSMQRTLTELLALEPGVAYQHAFLYIRQLAIHLHNAMTTRKKETSVYNWQYMHCLFLWCRVLSTVGPSEALQPLVYSLAQVIIGCIKLIPTARFYPLRMHCIRALTLLSGSSGAFIPVLPFILEMFQQVDFSRKPGRMSSKPINFSVILKLSNVNLQEKAYQDGLVEQLYDLTLEYLHSQAHCIGFPELALPVVLQLKLFLRERKVANYCRQVQQLLGKAVEAWQKLTLEEGTPLTLYYSHWRKLHDREIQLEISGKERLEDLNFPEIKRRKVADRKDEDRKQFKDLFDLNSCEEDDTEGFLERGILGPLSTRHGVEEDKEDKEEGEEDSSNLEDGDPDAEAGLAPGELQRLAQGPEDELEDLQLSEED

SEQ ID NO: 919051 - protein, 140 aa, Homo sapiens
MSPTSTGNASVGLSCFVPTYVTPKWYSLHLRWHSWNVPGLGRQPQAPSSAAPEALAVAAPGVRSEPRLLGVPAPRPPLSGGSVKPGGEGGGGGPAGGELAANMFPMVAGGGACSRPGLRSHPVRHAQPNSLPPPPPPLYY

SEQ ID NO: 919052 - protein, 268 aa, Homo sapiens
LWLAAVSIAATNHKQGCKQEGFYSPAERSSALAVPPARPPGSLLRRTLLCLRCISEVCAEENSAPPSQCSPAPPSQRHTALAPARRRGGQRRRGGQRRRGGEADSGGEAASGGAADSGGAADSGGAAERRTAAARRRGGETDSGGEADSGSAAERRPAAERRTAAERRTAAARRRDGQWRRGRQRRRGAERRWRRLWRGEAQAQAPLPSCERLQHCFMACVVVFHSIVVVYPVYGGCNVYHTPWMISEDHPILRSAALHSGGCFLSVG

SEQ ID NO: 919053 - protein, 134 aa, Homo sapiens [sequence omitted]

SEQ ID NO: 919054 - protein, 134 aa, Homo sapiens [sequence omitted]

SEQ ID NO: 919055 - protein, 400 aa, Homo sapiens
MLEYEKHGELKTKSIDLLDLGPSTDVSALVEEIQKAEPLLTASRTEQVKLLIQRLQEKLGQNSNHTFYLFKVLKAHILPLTNVALNKSGSCFITGSYDRTCKLWDTASGEELNTLEGHRNVVYAIAFNNPYGDKIATGSFDKTCKLWSVETGKCYHTFRGHTAEIVCLSFNPQSTLVATGSMDTTAKLWDIQNGEEVYTLRGHSAEIISLSFNTSGDRIITGSFDHTVVVWDADTGRKVNILIGHCAEISSASFNWDCSLILTGSMDKTCKLWDATNGKCVATLTGHDDEILDSCFDYTGKLIATASADGTARIFSAATRKCIAKLEGHEGEISKISFNPQGNHLLTGSSDKTARIWDAQTGQCLQVLEGHTDEIFSCAFNYKGNIVITGSKDNTCRIWR

SEQ ID NO: 919056 - protein, 415 aa, Homo sapiens
MKLKSLLLRYYPPGIMLEYEKHGELKTKSIDLLDLGPSTDVSALVEEIQKAEPLLTASRTEQVKLLIQRLQEKLGQNSNHTFYLFKVLKAHILPLTNVALNKSGSCFITGSYDRTCKLWDTASGEELNTLEGHRNVVYAIAFNNPYGDKIATGSFDKTCKLWSVETGKCYHTFRGHTAEIVCLSFNPQSTLVATGSMDTTAKLWDIQNGEEVYTLRGHSAEIISLSFNTSGDRIITGSFDHTVVVWDADTGRKVNILIGHCAEISSASFNWDCSLILTGSMDKTCKLWDATNGKCVATLTGHDDEILDSCFDYTGKLIATASADGTARIFSAATRKCIAKLEGHEGEISKISFNPQGNHLLTGSSDKTARIWDAQTGQCLQVLEGHTDEIFSCAFNYKGNIVITGSKDNTCRIWR

SEQ ID NO: 919057 - protein, 99 aa, Homo sapiens
CVICCQQYGTARIFSAATRKCIAKLEGHEGEISKISFNPQGNHLLTGSSDKTARIWDAQTGQCLQVLEGHTDEIFSCAFNYKGNIVITGSKDNTCRIWR

SEQ ID NO: 919058 - protein, 253 aa, Homo sapiens [sequence omitted]

SEQ ID NO: 919059 - protein, 72 aa, Homo sapiens
MTTMPESLNSPVSGKAVFMEFGPPNQQMSPSPMSHGHYSMHCLHSAGHSQPDGAYSSASSFSRPLGYPYVNS

SEQ ID NO: 919060 - protein, 253 aa, Homo sapiens [sequence omitted]

SEQ ID NO: 919061 - protein, 151 aa, Homo sapiens
MSFPPPSRAEAWTVSSSMKLQDLTSMEWAIHTARILPLLIQQQWDRLAVGTAEMCPARSPGGSQRGCEQVATAAGSSHTVLLMLRDQREKSGKRVEQGQTIMTWITIPKTCRRRPRGVGRAWFSSAYELHGLAKFLNPGISRVDINYQDSD

SEQ ID NO: 919062 - protein, 151 aa, Homo sapiens; identical to SEQ ID NO: 919061

SEQ ID NO: 919063 - protein, 131 aa, Homo sapiens
MQSLCSGDGNLQTNASLSQSSENSLTRETAFTHEFKKKKIPDPYFLPTSMLISSGTKKNATEPPSSRGSQSCVEIKNPSPVTGVLPKGPASLGIPEVQPASRPEPESRHLPVYLSLHVAGDRGARGMAGVL

SEQ ID NO: 919064 - protein, 165 aa, Homo sapiens [sequence omitted]

SEQ ID NO: 919065 - protein, 142 aa, Homo sapiens
MYDPINEGKAGSPPAVSKATHRLDKHRLFCFPLWRSPLQPIRGEQAWSETLSPSVARTVRKCKAVSRDAYSSKLRGWNYQSICACWLLLAVCTRSGNTTVNCTCKGSRLCAPYENLMPDDLRWNSFIWEPTLNPCIHEKTVF

SEQ ID NO: 919066 - protein, 332 aa, Homo sapiens
MVRELWMWNVEEEEHEVGICTWGGQHCGCPAKSLPGPHPGGVSAPQSASQLMVKLLVWQKSVHKLRKVSATSSIAVYPCPGQYFMGERKVLLPGQGWLAWSHLCGAALAEVQSGPECRKQAVSDCLPGAGVVPGRLQTRADQRAAWWPRWKVTGFAAPGDPAEPEPGHPASPAASQVGLVLVKWRPVHKAYDPVPEASPLSANFRNPGPAEAPGPMGKTKGRGSAGGAECRQCRPGSTAAELAGRSRHRAVTRASRGGCAPLQRLLPCVQPIRGDSTCTPSSLSLSRAAAARSLLPWRDSRVQEPGLSRWSRVSSAKNPARVAPQGGTGGRI

SEQ ID NO: 919067 - protein, 208 aa, Homo sapiens
MRKRRSTGWGREDIICPSNAIPVRCLSIPKPDVISLLEQGKESCMVSRDVPGGWCPGVLKVVCKWVVALSGRRQWDVPLGCERLVELGPPDLEIMGTETYYCQTLRRCHGIQGCFGSAQSLSQIIVSVTGELLSSTRPYEGLMCPQIPKPVTLSIGVFLAMFQSEVLGESAELEPDGSLMGRGLGGGHMENVSGLCIPHLQNGNNKNI

SEQ ID NO: 919068 - protein, 343 aa, Homo sapiens
MQVSFDFSCFRNGARTLDVERGGGGTRSGDLHLGWSALRMPSKVTAWSTSRRGLCASVGIAADGETFGVAEECPQTSEGIRYILHSRVSLPRAIFMGERKVLLPGQGWLAWSHLCGAALAEVQSGPECRKQAVSDCLPGAGVVPGRLQTRADQRAAWWPRWKVTGFAAPGDPAEPEPGHPASPAASQVGLVLVKWRPVHKAYDPVPEASPLSANFRNPGPAEAPGPMGKTKGRGSAGGAECRQCRPGSTAAELAGRSRHRAVTRASRGGCAPLQRLLPCVQPIRGDSTCTPSSLSLSRAAAARSLLPWRDSRVQEPGLSRWSRVSSAKNPARVAPQGGTGGRI

SEQ ID NO: 919069 - protein, 141 aa, Homo sapiens
MVRELWMWNVEEEEHEVGICTWGGQHCGCPAKSLPGPHPGGVSAPQSASQLMVKLLVWQKSVHKLRKKENAYKLRAPVVQLVVSLGRVALEPTPIEENPSEDMSSLQVLIYFLGGLPGSSEVWTPYCPAGDSPLLQNCLQK

SEQ ID NO: 919070 - protein, 136 aa, Homo sapiens
MEKRRSKNIKDIEEEERFVLPNIRTFIKLQQFKEHEKILTHRNTHKTQNCRGMHRFPETSDAQYDGLTHYTGLTRTYTSSAYRVGPAGGTPTKFTGAVLAYATGIAAISRARHCYTEADAAAGINCGKPLSPTIAP

SEQ ID NO: 919071 - protein, 170 aa, Homo sapiens
MHVAQDSFESYVGPPLTHPLGQSFGTQYTLCFCGSPMGREWVVGARIWKLPVDEEDVSATTRLTPTGCPCRPAGCHRTRAHCNQSFQKLGMLEVSRQEANSSRDPVALGCRWPLLTKFMLVAGDTGSPTCSKSPSQAVGELDCTKSDTNSRWLKDLSGNVKLSSHERTPL

SEQ ID NO: 919072 - protein, 259 aa, Homo sapiens
MMSSGLSNWKDEVAINPDGERTDCLLSGSLNPVPPERETPPSRGRQIPQTGHLQLAYGWCPSGTRLPEEGESSNLCCSAASTGDTHANRVWNGPQQTPADLQKRGPTGRKKTNKQKAIAPTSTKRMTTQKLTEGHQQQRTKVDKSMKMRKTGKKRLKISETRMPPLLQRITTPWQQGKKNWMENEFDKLTEVGFRKWVITNSSELQEHVLIQCKEAKNFDKRLEELLTRITSLEKNINDLMELKNIAQELCEAYTSINS

SEQ ID NO: 919073 - protein, 183 aa, Homo sapiens
SGRRQQDSCAINHFLKIDNMELLTLGQVLCGVLDPGRGGTQGPRQEVTDSWEWTKWTALGHKVDMGGENEIGVEVSGLDKKNKHLRNKSPLSSHAWDSHTESSHLRCQSPPRSHAWDSHTQSGHLRRRSPPHSCPQDSHTESSHLRCRSPPRSRPQDSHAKSSHLRRQSCPCSHAWHNRLRNT

SEQ ID NO: 919074 - protein, 251 aa, Homo sapiens
SARAMWGPGVTAEGLSVAPAPPPLLPLLLLLALALVAPSRGGGGCAELACGERERCCDATNATAVRCCKLPLHAFLDNVGWFVRKLSGLLILLVLFAIGYFLQRIICPSPRRYPRGQARPGQRPGPPGGAGPLGGAGPPDDDDDSPALLRDEAAAGSQDSLLDSGGGGRGRGGGGRSDPSCASEHEMRVVSPVFLQLPSYEEVKYLPTYEESMRLQQLSPGEVVLPVSVLGRPRGGVAAEPDGGEGRYPLI

SEQ ID NO: 919075 - protein, 173 aa, Homo sapiens
SSLLCTRKPSAMRIIRVSHDFGIYIPITYLYKYGPKKTKHHFIFDNAPCMIFVPNKPNVTVALVHYQCQTQFLIKPYKYIDPILISLTISSPRQEKRIHSTKYTSLRLALEFFFALIQTEEICFTIPSIVPTERSQKSDCVCQASEPKPACIHPDSLKQLKNHKRSENGRFLT

SEQ ID NO: 919076 - protein, 136 aa, Homo sapiens
MPYQPNCFAYPPHGAKPIYSPILNSSLHNPLFCIVGYFHLWIPGFAILTKPLYKLTKGNLADPIDPKSFLHSSFHSLKTALETAPTLALADSSQPFSLHTAEVQGCAVGILTQGLGSHPVGFLSKQLDLTVLGWPS

SEQ ID NO: 919077 - protein, 129 aa, Homo sapiens
MSSQGSPSVALSTTTVSSVAVQAGDSKIVIAVIKCGKWVQLQLAESQPNLLEIGSSQDETKKLLHDHELLLAKLKLENAGGDLKDGHHHYEGAVVILDAGAQYGKVIDRRVRELSCSLKFSPWKHQHLL

SEQ ID NO: 919078 - protein, 119 aa, Homo sapiens
MELRNGLPVHEVPLASSDSVAANPHLGAPQACWSTAPVGFCAWNPPQDHKPHSVSFYRSGTRSPAWLGTCLRSLGSKYWNRDSNPHLQRELRSLVLSMSAAVSRGLRPCLTFPDCLERL

SEQ ID NO: 919079 - protein, 190 aa, Homo sapiens
GPLGRGIIMDTSLRGQLPLEPCCEEARATCQNKGPEESKPLNARRDKCNSCSRFVDFVGTDPSETLLLKKTDRLSKISVDLYNRSLVLTLAKFKKGPDWGSSPPSDLETQAPFISCIINLSMNLPKASGRERTWMILHGSFWGASPGSKCSFIVLTRNQSHGYISFCKKGWEMQSSCVPRKAGEMGFMNI

SEQ ID NO: 919080 - protein, 190 aa, Homo sapiens; identical to SEQ ID NO: 919079

SEQ ID NO: 919081 - protein, 142 aa, Homo sapiens
MLAKMCIYPKERKSLCQKDTCTLMFIITLFTIAKIRNQSKCPSVDEWRKKMWFIYIVEYYLTIKKQNHCYMNILQKNMSFAATWMKLKVIMLSEISQTQKDKYCMYSYEVSCFTILSHNTQRENVAAIQRKEHLGENPQNWK

SEQ ID NO: 919082 - protein, 197 aa, Homo sapiens
AHDGGRRRPLLPGPMNKAGDAALESALGPASSLGFGDRSPGRSLRIGGQGLRGVCDSGPPAGQQRPPSMARSSASFSPPRPGMAGFGWEPARDIQVGSATAQALSQADAARGSLSTTQAAGSVGKERGPRCLGPVTWPLLSPSSAAGFRDLGKVWITLPAFWGGKPVAPLASTVALRSKGSQADRWFHLHHPTPSGR

SEQ ID NO: 919083 - protein, 177 aa, Homo sapiens [sequence omitted]

SEQ ID NO: 919084 - protein, 167 aa, Homo sapiens
MFAAPSSTSVLPLRLTIFFCCFSKSRTPNVPWPSPSQGLCSSGFLLQGILSLPDVVVYPGVIAAIYLEESLVPGELPSTARMHAANDIHIRDFQKRTKKYDLHCASKQNNNTGQTLFPIDSGMELQADLKHKVQLHPRPLSLNSQCHRMFRDHSMSIILLSKCSDEG

SEQ ID NO: 919085 - protein, 667 aa, Homo sapiens
MDCVDNEKEWNSAVEKLKSEALRILLSKDYVEKEHLQLSHQKLSQLQEEFGQLMVERNTWLKKANEFFNSANKEVIKCTYEHLIWHTSTRPQGQSKPYKTDPKSPEPVPRPVRELHIKEVCSRHEGPMSTVDVAVTSSEKGDTIRKSEIKTGQMKGSQVSGIHEMMGCIKRRVDHLTEQCSAHKEYALKKQQLTASVEGYLRKVEMQFQSLKEFYETEIPQKEQDDAKAKHCSDSAEKQWQLFLKKSFITQDLGLEFLNLINMAKENEILDVKNEVYLMKNTMENQKAEREELSLLRLAWQLKATESKPGKQQWAAFKEQLKKTSHNLKLLQEALMPVSALDLGGSLQFILDLRQKWNDMKPQFQQLNDEVQYIMKESEELTGRGAPVKEKSQQLKDLIHFHQKQKERIQDYEDILYKVVQFHQVKEELGRLIKSRELEFVEQPKELGDAHDVQIHLRCSQEKQARVDHLHRLALSLGVDIISSVQRPHCSNVSAKNLQQQLELLEEDSMKWRAKAEEYGRTLSRSVEYCAMRDEINELKDSFKDIKKKFNNLKFNYTKKNEKSRNLKALKYQIQQVDMYAEKMQALKRKMEKVSNKTSDSFLNYPSDKVNVLLEVMKDLQKHVDDFDKVVTDYKKNLDLTEHFQEVIEECHFWYEDASATVVRRLE

SEQ ID NO: 919086 - protein, 1132 aa, Homo sapiens
MDCVDNEKEWNSAVEKLKSEALRILLSKDYVEKEHLQLSHQKLSQLQEEFGQLMVERNTWLKKANEFFNSANKEVIKCTYEHLIWHTSTRPQGQSKPYKTDPKSPEPVPRPVRELHIKEVCSRHEGPMSTVDVAVTSSEKGDTIRKSEIKTGQMKGSQVSGIHEMMGCIKRRVDHLTEQCSAHKEYALKKQQLTASVEGYLRKVEMQFQSLKEFYETEIPQKEQDDAKAKHCSDSAEKQWQLFLKKSFITQDLGLEFLNLINMAKENEILDVKNEVYLMKNTMENQKAEREELSLLRLAWQLKATESKPGKQQWAAFKEQLKKTSHNLKLLQEALMPVSALDLGGSLQFILDLRQKWNDMKPQFQQLNDEVQYIMKESEELTGRGAPVKEKSQQLKDLIHFHQKQKERIQDYEDILYKVVQFHQVKEELGRLIKSRELEFVEQPKELGDAHDVQIHLRCSQEKQARVDHLHRLALSLGVDIISSVQRPHCSNVSAKNLQQQLELLEEDSMKWRAKAEEYGRTLSRSVEYCAMRDEINELKDSFKDIKKKFNNLKFNYTKKNEKSRNLKALKYQIQQVDMYAEKMQALKRKMEKVSNKTSDSFLNYPSDKVNVLLEVMKDLQKHVDDFDKVVTDYKKNLDLTEHFQEVIEECHFWYEDASATVVRVGKYSTECKTKEAVKILHQQFNKFIAPSVPQQEERIQEATDLAQHLYGLEEGQKYIEKIVTKHKEVLESVTELCESLTELEEKLKQGDVLKMNPNLEDFHYDYIDLLKEPAKNKQTIFNEERNKGQVQVADLLGINGTGEERLPQDLKVSTDKEGGVQDLLLPEDMLSGEEYECVSPDDISLPPLPGSPESPLAPSDMEVEEPVSSSLSLHISSYGVQAGTSSPGDAQESVLPPPVAFADACNDKRETFSSHFERPYLQFKAEPPLTSRGFVEKSTALHRISAEHPESMMSEVHERALQQHPQAQGGLLETREKMHADNNFTKTQDRLHASSDAFSGLRFQSGTSRGYQRQMVPREEIKSTSAKSSVVSLADQAPNFSRLLSNVTVMEGSPVTLEVEVTGFPEPTLTWYKKGQKLSADGHLQVLHKETRHSVFIPKVCKADAGLYVARAQNSSGALSSNVILHVTEFV

SEQ ID NO: 919087 - protein, 337 aa, Homo sapiens
PGSSWIPGPMDEGPDLDLGPPVDPDEDSDNSAIYVQGLNDNVTLDDLVDFFKQCGVVKMNKRTEQPMIHTYLDKETRKPKGDATVSCEDSPTAKAAVEWFDGKDFQGSKLKVSLARKRPPVNSMQGGMPPHEGRGMPPPLCGGPGGPGSPGGPMGHMGGRGGDRGGLPPRGPQGSRGNTSGGGNVQHQAGDRQCPNPGCGNQNFAWRTESNKCKAPKPEGFLPPPFPPPGGDHGRGGPGGMWGGRGGLMDHGGPGGMFRGGCGRDRSGFCGGWAWTEVALVEEDKVALGGPRTFDSNPEIESRMVTARGRRKERMKNCSVYVEFQFHKMERFRRLVA

SEQ ID NO: 919088 - protein, 393 aa, Homo sapiens
MGVYGQESGGFSGLGENRSMSGPDNWGRGRGGFDRGGMSRGGRGGGCGGMGSAGEQVGFNKPGGPMDEGPDLDLGPPVDPDEDSDNSAIYVQGLNDNVTLDDLVDFFKQCGVVKMNKRTEQPMIHTYLDKETRKPKGDATVSCEDSPTAKAAVEWFDGKDFQGSKLKVSLARKRPPVNSMQGGMPPHEGRGMPPPLCGGPGGPGSPGGPMGHMGGRGGDRGGLPPRGPQGSRGNTSGGGNVQHQAGDRQCPNPGCGNQNFAWRTESNKCKAPKPEGFLPPPFPPPGGDHGRGGPGGMWGGRGGLMDHGGPGGMFRGGCGRDRSGFCGGWAWTEVALVEEDKVALGGPRTFDSNPEIESRMVTARGRRKERMKNCSVYVEFQFHKMERFRRLVA

SEQ ID NO: 919089 - protein, 488 aa, Homo sapiens
MVGDTCDEQNDTQKQFCEEQNTGILHDEILIHEEKQIEVVEKMNSELSLSCKKEKDFLHENSTLREEIAMLRLELDTMKHQSQLRKKKYLEDIESVKKKNDNLLKALQLNELTMDDDTAVLVIDNGSGMCKAGFAGDDAPRAVFPSIVGRPRQQGMMGGMHQKESYVGKEAQSKRGILTLKYPMEHGIITNWDDMEKIWHHTFYNELRVAPEEHPILLTEAPLNPKANREKMTQIMFETFNTPAMYVAIQAMLSLYTSGRTTGIVMDSGDGVTHTVPIYDGNALPHATLRLDLAGRELTDYLMKILTERGYRFTTMAEREIVRDIKEKLCYVALDFEQEMAMAASSSSLEKSYELPDGQVITIGNEWFRCPEALFQPCFLGMESCGIHETTFNSIMKSDVDIRKDLYTNTVLSGGTTMYPGMAHRMQKEIAALAPSMLKIRIIAPPKRKYSVWVGGSILASLSTFQQMWISKQEYDESGPSIVHRKCF

SEQ ID NO: 919090 - protein, 169 aa, Homo sapiens
MDMEVLGQEQSSEQLDLEEISRKISFLDKWREIFSYHREKKRKFKTRSSPALFALSFVGVIFAQNHEGNHTSADENEDGTGLSQPKGQGHLPSSGLCSIPNPSIISSKLGGFPISLAMATMPEATGRWAGMQSSRNTALSSLAFKPLDGALTCILYRYLIAVLSSNEDR

SEQ ID NO: 919091 - protein, 187 aa, Homo sapiens [sequence omitted]

SEQ ID NO: 919092 - protein, 205 aa, Homo sapiens
SAAAAISFNLRPRPVAELQRTAPPLLKRLSLNCARKRASPDSGARGNATRPVPLAWPLFGGLGWRSSRPGWFRTPAFRTWLGDGLGAPPSWPRSAAIAPVRARSVGGAGSRSRAVIGRVQATAETPSSTDRARNQRRGSQRPRTAGILRPRRAAFARRNRCLIHQRDAYLARPLGSGGPGRMGGWLLSGSRHVFHPTYCLEFAVT

SEQ ID NO: 919093 - protein, 205 aa, Homo sapiens; identical to SEQ ID NO: 919092

SEQ ID NO: 919094 - protein, 174 aa, Homo sapiens
LLPTVLMLKPHPSGATCCLGPRSLCTLLGNFEESLLQGRFAPSGHIEGFTAETGASGSYCPHHVTLPVTVTFFEVSEQNAPTHFLGFVDLNLLGRKSYSVPKVGTTQVTFNPNQTVVKMFLVTFDFLDMAAATCPYCAIASFWCLWVRRKMLTPPTASSATRCTLGSGAPAQAS

SEQ ID NO: 919095 - protein, 152 aa, Homo sapiens
MSLRCCWTWERGNWDMGLCQKVLLVTGQRGKGQREKNLKSENLDCRRLPRSWEKGEKTRMKTERGRGMKCCQMSKGIWREGTGRLLQKGHGAEGLCCEPAKEVCVGTVGSECVGNNMENWELPWNLQGRAEEKKNGIHAVPILQMKTRGLFL

SEQ ID NO: 919096 - protein, 156 aa, Homo sapiens
MASNVTNKTDPRSMNSRVFIGNLNTLVVKKSDVEAIFSKYGKIVGCSVHKGFAFFQYVNERNARAAVAGEDGRMIAGQVLDINLAAEPKVNRGKAGVKRSAAEMYGSSFDLDCDFQRDYYDRMYSYPARVPPPPPIARAVVPSKQKNSASHTLIYV

SEQ ID NO: 919097 - protein, 602 aa, Homo sapiens
MGDDLILMHVSLRLKPAKIDHKQYFRKQVLHGKDFQVDCKASGSPVPEISWSLPDGTMINNAMQADDSGHRTRRYTLFNNGTLYFNKVGVAEEGDYTCYAQNTLGKDEMKVHLTVITAAPRIRQSNKTNKRIKAGDTAVLDCEVTGDPKPKIFWLLPSNDMISFSIDRYTFHANGSLTINKVKLLDSGEYVCVARNPSGDDTKMYKLDVVSKPPLINGLYTNRTVIKATAVRHSKKHFDCRAEGTPSPEVMWIMPDNIFLTAPYYGSRITVHKNGTLEIRNVRLSDSADFICVARNEGGESVLVVQLEVLEMLRRPTFRNPFNEKIVAQLGKSTALNCSVDGNPPPEIIWILPNGTRFSNGPQSYQYLIASNGSFIISKTTREDAGKYRCAARNKVGYIEKLVILEIGQKPVILTYAPGTVKGISGESLSLHCVSDGIPKPNIKWTMPSGYVVDRPQINGKYILHDNGTLVIKEATAYDRGNYICKAQNSVGHTLITVPVMIVAYPPRITNRPPRSIVTRTGAAFQLHCVALGVPKPEITWEMPDHSLLSTASKERTHGSEQLHLQGTLVIQNPQTSDSGIYKCTAKNPLGSDYAATYIQVI

SEQ ID NO: 919098 - protein, 650 aa, Homo sapiens
MVESVRLENQPCDLRVGSWIHVYPNGSLFIGSVTEKDSGVYLCVARNKMGDDLILMHVSLRLKPAKIDHKQYFRKQVLHGKDFQVDCKASGSPVPEISWSLPDGTMINNAMQADDSGHRTRRYTLFNNGTLYFNKVGVAEEGDYTCYAQNTLGKDEMKVHLTVITAAPRIRQSNKTNKRIKAGDTAVLDCEVTGDPKPKIFWLLPSNDMISFSIDRYTFHANGSLTINKVKLLDSGEYVCVARNPSGDDTKMYKLDVVSKPPLINGLYTNRTVIKATAVRHSKKHFDCRAEGTPSPEVMWIMPDNIFLTAPYYGSRITVHKNGTLEIRNVRLSDSADFICVARNEGGESVLVVQLEVLEMLRRPTFRNPFNEKIVAQLGKSTALNCSVDGNPPPEIIWILPNGTRFSNGPQSYQYLIASNGSFIISKTTREDAGKYRCAARNKVGYIEKLVILEIGQKPVILTYAPGTVKGISGESLSLHCVSDGIPKPNIKWTMPSGYVVDRPQINGKYILHDNGTLVIKEATAYDRGNYICKAQNSVGHTLITVPVMIVAYPPRITNRPPRSIVTRTGAAFQLHCVALGVPKPEITWEMPDHSLLSTASKERTHGSEQLHLQGTLVIQNPQTSDSGIYKCTAKNPLGSDYAATYIQVI

SEQ ID NO: 919099 - protein, 145 aa, Homo sapiens
MSNLGLFPHLLNKPLDFEFNLRHRLQVHGFKFMALVRGREKKDKPWGLGPSQPPGFFPEHFGIGHLQVQTRDSSQHSLPGHSAELGASVTWDSAQHHPVYPMWMPCSSSTEPLEPLTAGSLQAVKWEPSQAPPASVLPKSIEGNH

SEQ ID NO: 919100 - protein, 273 aa, Homo sapiens
QSLREVKRLILCQGVESRLIPMPFNFKIGRLIIGQNGILSTPAVSCIIRKIKAAGGIILTASHCPGGPGGEFGVKFNVANGVLNGALDVEKVDDEQEQNSSFQETYSQYGKCNLLKYKSAIVLHAVQKYMLTWASGIRQVAAPSSSCLIQIQPTFSQVTMVAPPQGGADPLHEAACNMAACFFKGVKRESPERQSRISSKSGLGVEQISLDVPLIWKTKDTSYLPPTYATHNGLWSPTHTSAHSHRHSLCPQNITEESSVSAAWCEHWEYKEK

SEQ ID NO: 919101 - protein, 138 aa, Homo sapiens
MGDVGAAGLLEFAGGPLQTLFAWVSPAEAAEQQILLPDPSSGSFVPEEHPPVQGVFGLLLGGVSQLDARHKYWVRRLPTLLSDLAANQGSHHPQPLQEGTHQRGEACQDETGDQLNPGEIREGSRHLWGENDSIHSII

SEQ ID NO: 919102 - protein, 2024 aa, Homo sapiens
MHKRKQRIPSWGPSVGSEEIKKLRKQLEEIQKENGRYIELLKANDICLYDDPTIHWKGNLKNSKVSVVIPSDQVQKKIIVYSNGNQPGGNSQGTAVQGITFNVSHNLQKQTANVVPVQRTCNLVTPVSISGVYPSENKPWHQTTVPALATNQPVPLCLPAAISAQSILELPTSESESNVLGATSGSLIAVSIESEPHQHHSLHTCLNDQNSSENKNGQENPKVLKKMTPCVTNIPHSSSATATKVHHGNKSCLSIQDFRGDFQNTFVVSVTTTVCSQPPRTAGDSSPMSISKSADLTSTATVVASSAPGVGKATIPISTLSGNPLDNGWTLSCSLPSSSVSTSDLKNINSLTRISSAGNTQTTWTTLQLAGNTIQPLSQTPSSAVTPVLNESGTSPTTSNHSRYVATDINLNNSFPADGQPVEQVVVTLPSCPSLPMQPLIAQPQVKSQPPKNILPLNSAMQVIQMAQPVGSAVNSAPTNQNVIILQPPSTTPCPTVMRAEVSNQTVGQQIVIIQAANQNPLPLLPAPPPGSVRLPINGANTVIGSNNSVQNVPTPQTFGGKHLVHILPRPSSLSASNSTQTFSVTMSNQQPQTISLNGQLFALQPVMSSSGTTNQTPMQIIQPTTSEDPNTNVALNTFGALASLNQSISQMAGQSCVQLSISQPANSQTAANSQTTTANCVSLTTTAAPPVTTDSSATLASTYNLVSTSSMNTVACLPNMKSKRLNKKPGGRKHLAANKSACPLNSVRDVSKLDCPNTEGSAEPPCNDGLLESFPAVLPSVSVSQANSVSVSASHSLGVLSSESLIPESVSKSKSAEKSSPPSQESVTSEHFAMAAAKSKDSTPNLQQETSQDKPPSSLALSDAAKPCASANVLIPSPSDPHILVSQVPGLSSTTSTTSTDCVSEVEIIAEPCRVEQDSSDTMQTTGLLKGQGLTTLLSDLAKKKNPQKSSLSDQMDHPDFSSENPKIVDSSVNLHPKQELLLMNNDDRDPPQHHSCLPDQEVINGSLINGRQADSPMSTSSGSSRSFSVASMLPETTREDVTSNATTNTCDSCTFDSTSQPPSITSLSVNNLIHQSSISHPLASCAGLSPTSEQTTVPATVNLTVSSSSYGSQPPGPSLMTEYSQEQLNTMTSTIPNSQIQEPLLKPSHESRKDSAKRAVQDDLLLSSAKRQKHCQPAPLRLESMSLMSRTPDTISDQTQMMVSQIPPNSSNSVVPVSNPAHGDGLTRLFPPSNNFVTPALRQTEVQCGSQPSVAEQQQTQASQHLQALQQHVPAQGVSHLHSNHLYIKQQQQQQQQQQQQQQQQQAGQLRERHHLYQMQHHVPHAESSVHSQPHNVHQQRTLQQEVQMQKKRNLVQGTQTSQLSLQPKHHGTDQSRSKTGQPHPHHQQMQQQMQQHFGSSQTEKSCENPSTSRNHHNHPQNHLNQDIMHQQQDVGSRQQGSGVSSEHVSGHNPMQRLLTSRGLEQQMVSQPSIVTRSSDMTCTPHRPERNRVSSYSAEALIGKTSSNSEQRMGISIQGSRVSDQLEMRSYLDVPRNKSLAIHNMQGRVDHTVASDIRLSDCQTFKPSGASQQPQSNFEVQSSRNNEIGNPVSSLRSMQSQAFRISQNTGPPPIDRQKRLSYPPVQSIPTGNGIPSRDSENTCHQSFMQSLLAPHLSDQVIGSQRSLSEHQRNTQCGPSSAIEYNCPPTHENVHIRRESESQNRESCDMSLGAINTRNSTLNIPFSSSSSSGDIQGRNTSPNVSVQKSNPMRITESHATKGHMNPPVTTNMHGVARPALPHPSVSHGNGDQGPAVRQANSSVPQRSRHPLQDSSGSKIRQPERNRSGNQRQSTVFDPSLPHLPLSTGGSMILGRQQPATEKRGSIVRFMPDSPQVPNDNSGPDQHTLSQNFGFSFIPEGGMNPPINANASFIPQVTQPSATRTPALIPVDPQNTLPSFYPPYSPAHPTLSNDISIPYFPNQMFSNPSTEKRDDYSFALKHLLGPPCMDQHVVDNGYFLEKDKGMISRREEYFKSIVIFYCTG

SEQ ID NO: 919103 - protein, 1936 aa, Homo sapiens
MHKRKQRIPSWGPSVGSEEIKKLRKQLEEIQKENGRYIELLKANDICLYDDPTIHWKGNLKNSKVSVVIPSDQVQKKIIVYSNGNQPGGNSQGTAVQGITFNVSHNLQKQTANVVPVQRTCNLVTPVSISGVYPSENKPWHQTTVPALATNQPVPLCLPAAISAQSILELPTSESESNVLGATSGSLIAVSIESEPHQHHSLHTCLNDQNSSENKNGQENPKVLKKMTPCVTNIPHSSSATATKVHHGNKSCLSIQDFRGDFQNTFVVSVTTTVCSQPPRTAGDSSPMSISKSADLTSTATVVASSAPGVGKATIPISTLSGNPLDNGWTLSCSLPSSSVSTSDLKNINSLTRISSAGNTQTTWTTLQLAGNTIQPLSQTPSSAVTPVLNESGTSPTTSNHSRYVATDINLNNSFPADGQPVEQVVVTLPSCPSLPMQPLIAQPQVKSQPPKNILPLNSAMQVIQMAQPVGSAVNSAPTNQNVIILQPPSTTPCPTVMRAEVSNQTVGQQIVIIQAANQNPLPLLPAPPPGSVRLPINGANTVIGSNNSVQNVPTPQTFGGKHLVHILPRPSSLSASNSTQTFSVTMSNQQPQTISLNGQLFALQPVMSSSGTTNQTPMQIIQPTTSEDPNTNVALNTFGALASLNQSISQMAGQSCVQLSISQPANSQTAANSQTTTANCVSLTTTAAPPVTTDSSATLASTYNLVSTSSMNTVACLPNMKSKRLNKKPGGRKHLAANKSACPLNSVRDVSKLDCPNTEGSAEPPCNDGLLESFPAVLPSVSVSQANSVSVSASHSLGVLSSESLIPESVSKSKSAEKSSPPSQESVTSEHFAMAAAKSKDSTPNLQQETSQDKPPSSLALSDAAKPCASANVLIPSPSDPHILVSQVPGLSSTTSTTSTDCVSEVEIIAEPCRVEQDSSDTMQTTGLLKGQGLTTLLSDLAKKKNPQKSSLSDQMDHPDFSSENPKIVDSSVNLHPKQELLLMNNDDRDPPQHHSCLPDQEVINGSLINGRQADSPMSTSSGSSRSFSVASMLPETTREDVTSNATTNTCDSCTFDSTSQPPSITSLSVNNLIHQSSISHPLASCAGLSPTSEQTTVPATVNLTVSSSSYGSQPPGPSLMTEYSQEQLNTMTSTIPNSQIQEPLLKPSHESRKDSAKRAVQDDLLLSSAKRQKHCQPAPLRLESMSLMSRTPDTISDQTQMMVSQIPPNSSNSVVPVSNPAHGDGLTRLFPPSNNFVTPALRQTEVQCGSQPSVAEQQQTQASQHLQALQQHVPAQGVSHLHSNHLYIKQQQQQQQQQQQQQQQQQAGQLRERHHLYQMQHHVPHAESSVHSQPHNVHQQRTLQQEVQMQKKRNLVQGTQTSQLSLQPKHHGTDQSRSKTGQPHPHHQQMQQQMQQHFGSSQTEKSCENPSTSRNHHNHPQNHLNQDIMHQQQDVGSRQQGSGVSSEHVSGHNPMQRLLTSRGLEQQMVSQPSIVTRSSDMTCTPHRPERNRVSSYSAEALIGKTSSNSEQRMGISIQGSRVSDQLEMRSYLDVPRNKSLAIHNMQGRVDHTVASDIRLSDCQTFKPSGASQQPQSNFEVQSSRNNEIGNPVSSLRSMQSQAFRISQNTGPPPIDRQKRLSYPPVQSIPTGNGIPSRDSENTCHQSFMQSLLAPHLSDQVIGSQRSLSEHQRNTQCGPSSAIEYNCPPTHENVHIRRESESQNRESCDMSLGAINTRNSTLNIPFSSSSSSGDIQGRNTSPNVSVQKSNPMRITESHATKGHMNPPVTTNMHGVARPALPHPSVSHGNGDQGPAVRQANSSVPQRSRHPLQDSSGSKIRQPERNRSGNQRQSTVFDPSLPHLPLSTGGSMILGRQQPATEKRGSIVRFMPDSPQVPNDNSGPDQHTLSQNFGFSFIPEGGMNPPINANASFIPQVTQPSATRTPAWATEPDSIY

SEQ ID NO: 919104 - protein, 2075 aa, Homo sapiens
MHKRKQRIPSWGPSVGSEEIKKLRKQLEEIQKENGRYIELLKANDICLYDDPTIHWKGNLKNSKVSVVIPSDQVQKKIIVYSNGNQPGGNSQGTAVQGITFNVSHNLQKQTANVVPVQRTCNLVTPVSISGVYPSENKPWHQTTVPALATNQPVPLCLPAAISAQSILELPTSESESNVLGATSGSLIAVSIESEPHQHHSLHTCLNDQNSSENKNGQENPKVLKKMTPCVTNIPHSSSATATKVHHGNKSCLSIQDFRGDFQNTFVVSVTTTVCSQPPRTAGDSSPMSISKSADLTSTATVVASSAPGVGKATIPISTLSGNPLDNGWTLSCSLPSSSVSTSDLKNINSLTRISSAGNTQTTWTTLQLAGNTIQPLSQTPSSAVTPVLNESGTSPTTSNHSRYVATDINLNNSFPADGQPVEQVVVTLPSCPSLPMQPLIAQPQVKSQPPKNILPLNSAMQVIQMAQPVGSAVNSAPTNQNVIILQPPSTTPCPTVMRAEVSNQTVGQQIVIIQAANQNPLPLLPAPPPGSVRLPINGANTVIGSNNSVQNVPTPQTFGGKHLVHILPRPSSLSASNSTQTFSVTMSNQQPQTISLNGQLFALQPVMSSSGTTNQTPMQIIQPTTSEDPNTNVALNTFGALASLNQSISQMAGQSCVQLSISQPANSQTAANSQTTTANCVSLTTTAAPPVTTDSSATLASTYNLVSTSSMNTVACLPNMKSKRLNKKPGGRKHLAANKSACPLNSVRDVSKLDCPNTEGSAEPPCNDGLLESFPAVLPSVSVSQANSVSVSASHSLGVLSSESLIPESVSKSKSAEKSSPPSQESVTSEHFAMAAAKSKDSTPNLQQETSQDKPPSSLALSDAAKPCASANVLIPSPSDPHILVSQVPGLSSTTSTTSTDCVSEVEIIAEPCRVEQDSSDTMQTTGLLKGQGLTTLLSDLAKKKNPQKSSLSDQMDHPDFSSENPKIVDSSVNLHPKQELLLMNNDDRDPPQHHSCLPDQEVINGSLINGRQADSPMSTSSGSSRSFSVASMLPETTREDVTSNATTNTCDSCTFDSTSQPPSITSLSVNNLIHQSSISHPLASCAGLSPTSEQTTVPATVNLTVSSSSYGSQPPGPSLMTEYSQEQLNTMTSTIPNSQIQEPLLKPSHESRKDSAKRAVQDDLLLSSAKRQKHCQPAPLRLESMSLMSRTPDTISDQTQMMVSQIPPNSSNSVVPVSNPAHGDGLTRLFPPSNNFVTPALRQTEVQCGSQPSVAEQQQTQASQHLQALQQHVPAQGVSHLHSNHLYIKQQQQQQQQQQQQQQQQQAGQLRERHHLYQMQHHVPHAESSVHSQPHNVHQQRTLQQEVQMQKKRNLVQGTQTSQLSLQPKHHGTDQSRSKTGQPHPHHQQMQQQMQQHFGSSQTEKSCENPSTSRNHHNHPQNHLNQDIMHQQQDVGSRQQGSGVSSEHVSGHNPMQRLLTSRGLEQQMVSQPSIVTRSSDMTCTPHRPERNRVSSYSAEALIGKTSSNSEQRMGISIQGSRVSDQLEMRSYLDVPRNKSLAIHNMQGRVDHTVASDIRLSDCQTFKPSGASQQPQSNFEVQSSRNNEIGNPVSSLRSMQSQAFRISQNTGPPPIDRQKRLSYPPVQSIPTGNGIPSRDSENTCHQSFMQSLLAPHLSDQVIGSQRSLSEHQRNTQCGPSSAIEYNCPPTHENVHIRRESESQNRESCDMSLGAINTRNSTLNIPFSSSSSSGDIQGRNTSPNVSVQKSNPMRITESHATKGHMNPPVTTNMHGVARPALPHPSVSHGNGDQGPAVRQANSSVPQRSRHPLQDSSGSKIRQPERNRSGNQRQSTVFDPSLPHLPLSTGGSMILGRQQPATEKRGSIVRFMPDSPQVPNDNSGPDQHTLSQNFGFSFIPEGGMNPPINANASFIPQVTQPSATRTPALIPVDPQNTLPSFYPPYSPAHPTLSNDISIPYFPNQMFSNPSTEKVNSGSLNNRFGSILSPPRPVGFAQPSFPLLPDMPPMHMTNSHLSNFNMTSLFPEIATVLPDGSAMSPLLTIANSSASDSSKQSSNRPAHNISHILGHDCSSAV

SEQ ID NO: 919105 - protein, 181 aa, Homo sapiens
MHCYLIPGSARSVGEETEAQGTGKDPRRGPLLEQAWGPSLICGSTTPTVIGRYQGHVPTVAFSFGAPYGTTTLKYFQDHRNRAMEKSHTPFSQGGHFPTIFSTNPNLLLMERASTRDRWLHKPSYTRFNLDSHRSTELTNFYQMVQQHRKYYQDKTGTVPRVPYFAMPVREPERYPLPTVL

SEQ ID NO: 919106 - protein, 189 aa, Homo sapiens
MHCYLIPGSARSVGEETEAQGTGKDPRRGPLLEQAWGPSLICGSTTPTVIGRYQGHVPTVAFSFGAPYGTTTLKYFQDHRNRAMEKSHTPFSQGGHFPTIFSTNPNLLLMERASTRDRWLHKPSYTRFNLDSHRSTELTNFYQMVQQHRKYYQDKTGTVPRVPYFAMPVREPERYPLPTVLLPGHLHCC

SEQ ID NO: 919107 - protein, 189 aa, Homo sapiens; identical to SEQ ID NO: 919106

SEQ ID NO: 919108 - protein, 228 aa, Homo sapiens
MHCYLIPGSARSVGEETEAQGTGKDPRRGPLLEQAWGPSLICGSTTPTVIGRYQGHVPTVAFSFGAPYGTTTLKYFQDHRNRAMEKSHTPFSQGGHFPTIFSTNPNLLLMERASTRDRWLHKPSYTRFNLDSHRSTELTNFYQMVQQHRKYYQDKTGTVPRVPYFAMPVREPERYPLPTVLPPLCPKKKWHLLRLAPENLKTYQTFPSGKRVSPQERKKRDCYFEFRA

SEQ ID NO: 919109 - protein, 134 aa, Homo sapiens
MREASRIFLKEDEGRFGKQGTKSFISVVRFCSLFIGFSQEQVFQLLESVNAGCSVYSGSPWQSVLAQERKGRRGEEERLASVKGRAFPQGSMVAIVTASFVCTYSEQLLLFGCWWQGYYGGNRRMRVRYLSEGD

SEQ ID NO: 919110 - protein, 134 aa, Homo sapiens; identical to SEQ ID NO: 919109

SEQ ID NO: 919111 - protein, 134 aa, Homo sapiens; identical to SEQ ID NO: 919109

SEQ ID NO: 919112 - protein, 155 aa, Homo sapiens
MAPKRNAEGLSTVSTCKKAAMCLIEKGCELGEQVLQMPGDLPEHRVERTLLHHTSAQEGWVAQAIQLSETPAISRALQCVQPLRLMQKISKSSKGRRRKWRTLLIMYDTFMTIKKKTSCHIMSYTLEKFPCNMDAAGGHYLNQLLQEQKCQPHVL

SEQ ID NO: 919113 - protein, 154 aa, Homo sapiens
MPLHSSLGNRVRLCLKQTNKHPPTIYANNIREARKLYELFSAEAFRSSSIPMCLWNSTVRSKSAQELREADVRNYLHALPKTVGTTARGKLTRYNEPVTVTEFLKITLFPTTADCFRIEEAPRAVYPHPQNLLHLDPPHSSYYRPLQVTNSVKY

SEQ ID NO: 919114 - protein, 154 aa, Homo sapiens
APMMCYTLAIAPFTFKSRQETANTLQWLSRFSKRSFPAHLYFLISTLLSNIRLLSIPRIFQSHPSSLPLLFPVLGIPSTSLCLKMMEMALELGNSQQKGTSLLQQQGTAFCQKPNELGSRLFSGVCRKFSSTPNTFCLIHYFCPLLLDIELDEC

SEQ ID NO: 919115 - protein, 145 aa, Homo sapiens
MWLRKDDAAGVPQGEQAHQGGLSQRPAGSQADPASAILDLPHLPRQHPAYPHPGSWTGPPVARICMSLPGGLSGWQLWENQEAEGFLKNPSAAAAAGNRKPLDHMSNLGKGTQNPIYNGSLNWGHLRGSCRRGKLVAQWDVQGHR

SEQ ID NO: 919116 - protein, 210 aa, Homo sapiens
MRTEAGAAAAKRLFPEKQTSEQEERSLGLQVGMWVRKPLTPPPPHSSKEELNRPVGRGLNMNPFCENASTQSCMLFIVGSVYYLIDSTILKRVEVLPLLFTILNPKCERNESKKKPPESTELIKSSKITVAAKASILVEAVASAIIVVVVAVIIKVLLVVEAASSSSNSSTSNSSESRSSRSTSFSSSSNCSNSNRSCSIRVSIKCNENP

SEQ ID NO: 919117 - protein, 131 aa, Homo sapiens
KKSDMVWLCPHPNLNLNCSSHNLHMSWERPGRSLFPIIKYLQEVKDKKKEINELRVNTDEGEDVIKNNGYSEPGEGYLRDTASRKQFASVILIYLYLFHEIENTIRKPTNAMVAHTEKSKTSETSSHHSLM

SEQ ID NO: 919118 - protein, 690 aa, Homo sapiens
QGNRQSSASGCSVAIVTAPITAVVVMAGLSGAQIPDGEFTAVVYRLIRNARYAEAVQLLGGELQRSPRSRAGLSLLGYCYYRLQEFALAAECYEQLGQLHPELEQYRLYQAQALYKACLYAEATRVAFLLLDNPAYHSRVLHLQAAIKYSEGDLPGSRSLVEQLPSREGGEESGGENETDGQINLGCLLYKEGQYEAACSKFFAALQASGYQPDLSYNLALAYYSSRQYASALKHIAEIIERGIRQHPELGVGMTTEGIDVRSVGNTLVLHQTALVEAFNLKAAIEYQLRNYEAAQEALTDMPPRAEEELDPVTLHNQALMNMDARPTEGFEKLQFLLQQNPFPPETFGNLLLLYCKYEYFDLAADVLAENAHLIYKFLTPYLYDFLDAVITCQTAPEEAFIKLDGLAGMLTEVLRKLTIQVQEARHNRDDEAIKKAVNEYDETMEKYIPVLMAQAKIYWNLENYPMVEKIFRKSVEFCNDHDVWKLNVAHVLFMQENKYKEAIGFYEPIVKKHYDNILNVSAIVLANLCVSYIMTSQNEEAEELMRKIEKEEEQLSYDDPDKKMYHLCIVNLVIGTLYCAKGNYDFGISRVIKSLEPYNKKLGTDTWYYAKRCFLSLLENMSKHTIMLRDSVIQECVQFLEHCELHGRNIPAVIEQPLEEERMHVGKNTVTYESRQLKALIYEIIGWNI

SEQ ID NO: 919119 - protein, 168 aa, Homo sapiens
KSQPPAGRVASPSFSSLCLHQSGKWLGVMAEAPLHRIKAWPGTCSDAIDIWFAVVIWSPWVCGRRSSGVDTMGRWCPSKNITLGMLVASLEPRLEIEGKWEKNRGLDSDPGALISVDVDLGPYRSALDIVGSGSMRMRNPVFGREEAAEMSLHLYKGKCSPGPLMQRS

SEQ ID NO: 919120 - protein, 128 aa, Homo sapiens
KTKMLRILTRMAKIMSFITFQDTEMRSPRDETGEQNISSSSWDDEASSLGKEEHQNQRGQLGGYCNISAPKTQEALKTPLPTSPLHEKRKGQPKKQEAAVQGEKSTGFRVRHPGSSSSLQFIEAVFPA

SEQ ID NO: 919121 - protein, 126 aa, Homo sapiens
MKLETIILSKLLQGQKTEHPMFSLIEKKKNKEKKTFWAGLGLGKGFLPLSWGARGGAKMGSRDTWGKSVVPRGRTRGQQTSGVRFLHQMKKTARGTTRRVSGQFPKRSSRRAIAGSYTRRGPVEAE

SEQ ID NO: 919122 - protein, 139 aa, Homo sapiens
MKLETIILSKLLQGQKTEHPMFSLIDQSLPKGTGPQPSLKGPGSGINLTMGENRIQLQTTSRANLKGSKNHNMVTAGEPLHTTDSLLLQIRLLDKSSPGFVAVMTTENVKGELSHNTGATGPMQVRNPAGRSLNLKAPK

SEQ ID NO: 919123 - protein, 134 aa, Homo sapiens
MCLCDFSFQSYYKLTETQILCKNFLLPSQHLLQCLPKHHKHLDSPCSSHLDSPPNPRSHSHDTVGHLLGQPPPPVGCSACSLPPAWTAVSSSQRSSFHLSLIFPLLITFFLCSSPDLSFTCPKALRPTCLWLTM

SEQ ID NO: 919124 - protein, 380 aa, Homo sapiens
MQICGSSVASVAAGTSFQVLGPVCWQQLDLKMAVRVLWGGLSLLRVLWCLLPQTGYVHPDEFFQSPEVMAEDILGVQAARPWEFYPSSSCRSVLFPLLISGSTFWLLRLWEELGPWPGLVSGYALLVGPRLLLTALSFALDGAVYHLAPPMGADRWNALALLSGSYVTLVFYTRTFSNTIEGLLFTWLLVLVSSHVTWGPTRKEPAPGPRWRSWLLGGIVAAGFFNRPPFWPLLWSPSTSGALVEPQTWFEVSDPGGPGAAPWGDPHSSGVCGHGQLVFLQPRYIQEPCPDTCQLLALQPESPKPGETWHAGRGSLTWQSTASCSSGCCMPRPARLRGTGCKSAFQASAQMGLLRALGARSLLSSPRSYLLLLYFMPLAL

SEQ ID NO: 919125 - protein, 61 aa, Homo sapiens
MSSKSTSRAAASLSGVRTWKWGLHISFPSGDTDLLGNANKPPVSLMYPCLDQQYRSFRMRA

SEQ ID NO: 919126 - protein, 380 aa, Homo sapiens; identical to SEQ ID NO: 919124

SEQ ID NO: 919127 - protein, 167 aa, Homo sapiens
LSQSQAVAPTSVLRGMLLHLYGDPQVCAEQNAAPPSRYPQPARPPGSDLRRTLLRLRSTTEICAEDNAGERNSAVAKAPRAAPAQRGAPRRRRRREAQGSLAYSGRQRPLLAPGHCRALLLTVSDFQQLLACARVQAEHWSGVFLWRGAMPRVGWAIVHLLAPVVCM

SEQ ID NO: 919128 - protein, 384 aa, Homo sapiens
SGWAWALQDLHLEWPAGTTRPRAVRGLAPRSAAQHPDAPAPPALLARPRPARILAGPQPPPRGAGLGTCSLPCQSPPTPMGSHAVRVSPTGATPCSMAPSPIDHPRAEECRRAAWDWWAALPTAPAEDPLAKPAGLLSWVGTWRTFMSSWRIVNAPISTLCLARASLLKPARPRTHQKEETLDTSEHVKEQTPDTPSLRTVTLTVRDDRNVVAVALRLIKPMGNMPFYKEIIMLEKIRNKNDCKSQSCLDKEATRDIVIKGSKSESKISEGKVITNTFSLHDRMNIRKSKRQQVAQRKNCLKFYLLQQSTSGASRLDKSIYGFDAGPGNTCCTTDSGGPICQPGSNTVLWPIGSLPVVLVYLVKTQRKYPLKDCKCTNERSVSS

SEQ ID NO: 919129 - protein, 141 aa, Homo sapiens
MDSSACKKSHQSKKWRIQAQENFAKKFPYRLSWLTEPDPEPLQPWEVTNDSNTVQLPLQKRLVPTRSIPVRGLGAPDFTSPSGSCPAPLPAPSPPPLCNLWELKLLSRRFPRQLAFLLSTRHTEAACPQTSKAAGLSRGLS

SEQ ID NO: 919130 - protein, 866 aa, Homo sapiens
MSEQSYGGTILQRYGWAWGKPDAVQSSEVGKLSTVNSTWLGAGGEREKVVGARELEMLPDKAVTFCHRTQPVLSDPRRRKEGGDVMGLNCSPKTHMWKPEPPVLHNVTVFENGAETEMNKLKIEALIQLTGVIGRRGNPDILRDTRVTHTERRDCVRTQGEGGTERNPFLLFKALSLRSTVMAALASRYNESPNLLPSSLLPLAGAPYWPNPTKARGQGCEWVQSRQASLPGPEQGDEGGEYGPEQQTGVSAHLGGVWSRGNVSSDEMTQAPDNTRFTNRTQNSMVKAGQHLDQDWEKRETMTMVGRTAADLFSPSFYFIYLFFSDMVICFRLKRANPEADFSDETAESSLRAGRLLGQKGGGRGQAAPLNCLSSIREEICVSPVPFAPGFSHDKGYDQERDLLGMMGASPSPGLRLNMGPGTQGTALRGTKAWGAVLSIPHPSLLPQSPGETSFVTSVAWCSCLRFTGMRVSSLLDETGGAVGCLPQPFSLSISVAGALAPVPQDCPPAHPPCQPLALHTLVLQTRRCCLFSSVLMGTAGRTTWRGVLKTYPSPFHRVAMGTHAQLPPNLLNLWKLLNGNINTGPPSAQSPYEGGMRVRTGLSAQDMQVCLTDGVGADKPQSNQVTKSWERAQLCDTHIVAHNYAQIQMGSCATFFNTPGHSMRDAVISTLYRQEAELQSDRIKPRDTQIVMVQPGFEPRQIPEAAVCVAGLSFLLAKGSRERTYRLEENKIYFHKQQEALMRTTGLVVGSPKELPAFSWLRSTSVCKLMSLALKRADLSYPTGASAGLGAPAALTSPGHLRLPDSAQDLQSSLEGINCGQQWGRSIFSLPNLLWELFDLNSLTSRVFTEAYLFRMCESNKGCKL

SEQ ID NO: 919131 - protein, 73 aa, Homo sapiens
PLAFVSSPCQQHISVSDSLLPSRQPGGYEGLQRSSSPACRPGHTGPMRSATLSAGTSGSYSPPRSSPGPLTRR

SEQ ID NO: 919132 - protein, 127 aa, Homo sapiens
MSAQCTFLPLKVQEERGNPQVELTMRTVTALRGKSRNQPSSFLYQEDWRLQPWLCGASLALSSDCPTWLQVRVRGSWRWKMQLGELTRQVSGNSLNKRTPDHACSSSPGATSTSLSMEQDFSSSSED

SEQ ID NO: 919133 - protein, 733 aa, Homo sapiens
MVMFFRLKRANPEADFSDETAESSLRAGRLLGQKGGGRGQAAPLNCLSSIREEICVSPVPFAPGFSHDKGYDQERDLLGMMGASPSPGLRLNMGPGTQGTALRGTKAWGAVLSIPHPSLLPQSPGETSFVTSVAWCSCLRFTGMRVSSLLDETGGAVGCLPQPFSLSISVAGALAPVPQDCPPAHPPCQPLALHTLVLQTRRCCLFSSVLMGTAGRTTWRGVLKTYPSPFHRVAMGTHAQLPPNLLNLWKLLKWKINTGPPSAQSPYEGGMRVRTGLWAQDMQVCLTDGVGADKPQSNQVTKSWERAQLCDTHIVAHNMRQIQMGSCATFFNTPGHSMRDAVISTLYRQEAELQSDRIKPRDTQIVMVQPGFEPRQIPEAAVCVAGLSFLLAKGSRERTYRLEENKIYFHKQQEALMRTTGLVVGSPKELPAFSWLRSTSVCKLMSLALKRADLSYPTGASAGLGAPAALTSPGHLRLPDSAQDLQSSLEGINCGQQWGRSIFSLPNLLWELFDLNSLTSRVFTEAYLFRMCESNKGCKLWVLLGRNGLFLTTAALLPLSISEVDMGPSISVVSAVWLGGGGEREKVQPFNLPLFDTRKYPTLISPTLISSFLRQKLSWESPRWGSVPIIHYYYARDIQQGSVEFSVLILYPESTRHSKAKLDSGHLIIHRFQHKLACNISHNTKYLIKQAVRDIYRTNTSSDHFICLREQTCHNGPYPAKQAACWEGKMAVT

SEQ ID NO: 919134 - protein, 146 aa, Homo sapiens
MHHKYPYLNMDLEMSKFYQNITFGSVMSLNYITGVQAGFVFQISKTFPFLRLFQFCLIRIILNYLKCQHQKSSSTCRLDINAYGTTDLNRSSPVTTASKGQRVNHRGNSNACTVGSITREPELGTRGAHHHQKILPTCPRVCFPYF

SEQ ID NO: 919135 - protein, 266 aa, Homo sapiens
MGSKTLPAPVPIHPSLQLTNYSFLQAVNGLPTVPSDHLPNLYGFSALHAVHLHQWTLGYPAMHLPRSSFSKVPGTVSSLVDARFQLPAFPWFPHVIQPKPEITAGGSVPALKTKPRFDFANLALAATQEDPAKLGRGEGPGSPAGGLGALLDVTKLSPEKKPTRGRLPSKTKKEFVCKFCGRHFTKSYNLLIHERTHTDERPYTCDICHKAFRRQDHLRDHRYIHSKEKPFKCQECGKGFCQSRTLAVHKTLHSQVKELKTSKIKC

SEQ ID NO: 919136 - protein, 266 aa, Homo sapiens; identical to SEQ ID NO: 919135

SEQ ID NO: 919137 - protein, 138 aa, Homo sapiens
MLKVDILGAAVIKQAYSVYPVGKYSQWMKIQPMDKHRKFFLNMSCQKLSKIPKSCLKNCAMPFVVLVWHGVKRVGSGVILLGLECTLKNSGESIRFVCVPQFLEVEKLSFFPKHQNGRGHRTVRMINNALRLWCLYDP

SEQ ID NO: 919138 - protein, 254 aa, Homo sapiens
QVGTQPNMSDNQPALPSHPEGPRDFNIKLFYFRFSKLCLRDDSGQQRLSKNFCGLVAYAAPELLQGIPYQPMVYDIWSLGMILYIMVCSSMPYDSNIRKMLRIQKEHRVDFPHSKNLTDECKDLIYCMLQPDVSQRLHIHDTLSQCWVQPKAQGLPSMVFNKEGESSQGTELLWTPEPGSAKRSATKLEPGEQTQPEGQPETKPEGLAMQMSRQSDILGFPSKPSTREKEEGPPSSLQRCAPSEPFVAQCASGE

SEQ ID NO: 919139 - protein, 143 aa, Homo sapiens
MPHFTLLPFFCFLELCGILFFPNIVNLWLVESTDGKPTNMEDKLCGKHMLKVVEYYFHPYERPDISSFRLCEFLILQWASNSGSVASDNKNLGETLGGFIFQGSAKPVGSLRHSPGSLSELLLFHQASLEHDFLQKPSQTSLS

SEQ ID NO: 919140 - protein, 1843 aa, Homo sapiens
MADTQTQVAPTPTMRMATAEDLPLPPPPALEDLPLPPPKESFSKFHQQRQASELRRLYRHIHPELRKNLAEAVAEDLAEVLGSEEPTEGDVQCMRWIFENWRLDAIGEHERPAAKEPVLCGDVQATSRKFEEGSFANSTDQEPTRPQPGGGDVRAARWLFETKPLDELTGQAKELEATVREPAASGDVQGTRMLFETRPLDRLGSRPSLQEQSPLELRSEIQELKGDVKKTVKLFQTEPLCAIQDAEGAIHEVKAACREEIQSNAVRSARWLFETRPLDAINQDPSQVRVIRGISLEEGARPDVSATRWIFETQPLDAIREILVDEKDFQPSPDLIPPGPDVQQQQHLFETRALDTLKGDEEAGAEAPPKEEVVPGDVRSTLWLFETKPLDAFRDKVQVGHLQRVDPQDGEGHLSSDSSSALPFSQSAPQRDELKGDVKTFKNLFETLPLDSIGQGEVLAHGSPSREEGTDSAGQAQGIGSPVYAMQDSKGRLHALTSVSREQIVGGDVQGYRWMFETQPLDQLGRSPSTIDVVRGITRQEVVAGDVGTARWLFETQPLEMIHQREQQERQKEEGKSQGDPQPEAPPKGDVQTIRWLFETCPMSELAEKQGSEVTDPTAKAEAQSCTWMFKPQPVDRPVGSREQHLQVSQVPAGERQTDRHVFETEPLQASGRPCGRRPVRYCSRVEIPSGQVSRQKEVFQALEAGKKEEQEPRVIAGSIPAGSVHKFTWLFENCPMGSLAAESIQGGNLLEEQPMSPSGNRMQESQETAAEGTLRTLHATPGILHHGGILMEARGPGELCLAKYVLSGTGQGHPYIRKEELVSGELPRIICQVLRRPDVDQQGLLVQEDPTGQLQLKPLRLPTPGSSGNIEDMDPELQQLLACGLGTSVARTGLVMQETEQGLVALTAYSLQPRLTSKASERSSVQLLASCIDKGDLSGLHSLRWEPPADPSPVPASEGAQSLHPTESIIHVPPLDPSMGMGHLRASGATPCPPQAIGKAVPLAGEAAAPAQLQNTEKQEDSHSGQKGMAVLGKSEGATTTPPGPGAPDLLAAMQSLRMATAEAQSLHQQVLNKHKQGPTPTATSNPIQDGLRKAGATQSNIRPGGGSDPRIPAAPRKVSREEQALPRGLPGGWVTIQDGIYTAHPVRTFDPPGGVQLSQREPQSRHRETALSVQAPRPLQGGPGQSTGPGREEPGGCTQMAWGPPGKAMAEVCPGGLQAAETTLKTAPLGRHILASGPQAAGASPHPHNAFVPPPPTLPAAVTGPDFPAGAHRAEDSIQQASEPLKDPLLHSHSSPAGQRTPGGSQTKTPKLDPTMPPKKKPQLPPKPAHLTQSHPPQRLPKPLPLSPSFSSEVGQREHQRGERDTAIPQPAKVPTTVDQGHIPLARCPSGHSQPSLQHGLSTTAPRPTKNQATGSNAQSSEPPKLNALNHDPTSPQWGPGPSGEQPMEGSHQGAPESPDSLQRNQKELQGLLNQVQALEKEAASSVDVQALRRLFEAVPQLGGAAPQAPAAHQKPEASVEQAFGELTRVSTEVAQLKEQTLARLLDIEEAVHKALSSMSSLQPEASARGHFQGPPKDHSAHKISVTVSSSARPSGSGQEVGGQTAVKNQAKVECHTEAQSQVKIRNHTEARGHTASTAPSTRRQETSREYLCPPRVLPSSRDSPSSPTFISIQSATRKPLETPSFKGNPDVSVKSTQLAQDIGQALLHQKGVQDKTGKKDITQCSVQPEPAPPSASPLPRGWQKSVLELQTGPGSSQHYGAMRTVTEQYEEVDQFGNTVLMSSTTVTEQAEPPRNPGSHLGLHASPLLRQFLHSPAGFSSDLTEAETVQVSCSYSQPAAQ

SEQ ID NO: 919141 - protein, 1750 aa, Homo sapiens
MRWIFENWRLDAIGEHERPAAKEPVLCGDVQATSRKFEEGSFANSTDQEPTRPQPGGGDVRAARWLFETKPLDELTGQAKELEATVREPAASGDVQGTRMLFETRPLDRLGSRPSLQEQSPLELRSEIQELKGDVKKTVKLFQTEPLCAIQDAEGAIHEVKAACREEIQSNAVRSARWLFETRPLDAINQDPSQVRVIRGISLEEGARPDVSATRWIFETQPLDAIREILVDEKDFQPSPDLIPPGPDVQQQQHLFETRALDTLKGDEEAGAEAPPKEEVVPGDVRSTLWLFETKPLDAFRDKVQVGHLQRVDPQDGEGHLSSDSSSALPFSQSAPQRDELKGDVKTFKNLFETLPLDSIGQGEVLAHGSPSREEGTDSAGQAQGIGSPVYAMQDSKGRLHALTSVSREQIVGGDVQGYRWMFETQPLDQLGRSPSTIDVVRGITRQEVVAGDVGTARWLFETQPLEMIHQREQQERQKEEGKSQGDPQPEAPPKGDVQTIRWLFETCPMSELAEKQGSEVTDPTAKAEAQSCTWMFKPQPVDRPVGSREQHLQVSQVPAGERQTDRHVFETEPLQASGRPCGRRPVRYCSRVEIPSGQVSRQKEVFQALEAGKKEEQEPRVIAGSIPAGSVHKFTWLFENCPMGSLAAESIQGGNLLEEQPMSPSGNRMQESQETAAEGTLRTLHATPGILHHGGILMEARGPGELCLAKYVLSGTGQGHPYIRKEELVSGELPRIICQVLRRPDVDQQGLLVQEDPTGQLQLKPLRLPTPGSSGNIEDMDPELQQLLACGLGTSVARTGLVMQETEQGLVALTAYSLQPRLTSKASERSSVQLLASCIDKGDLSGLHSLRWEPPADPSPVPASEGAQSLHPTESIIHVPPLDPSMGMGHLRASGATPCPPQAIGKAVPLAGEAAAPAQLQNTEKQEDSHSGQKGMAVLGKSEGATTTPPGPGAPDLLAAMQSLRMATAEAQSLHQQVLNKHKQGPTPTATSNPIQDGLRKAGATQSNIRPGGGSDPRIPAAPRKVSREEQALPRGLPGGWVTIQDGIYTAHPVRTFDPPGGVQLSQREPQSRHRETALSVQAPRPLQGGPGQSTGPGREEPGGCTQMAWGPPGKAMAEVCPGGLQAAETTLKTAPLGRHILASGPQAAGASPHPHNAFVPPPPTLPAAVTGPDFPAGAHRAEDSIQQASEPLKDPLLHSHSSPAGQRTPGGSQTKTPKLDPTMPPKKKPQLPPKPAHLTQSHPPQRLPKPLPLSPSFSSEVGQREHQRGERDTAIPQPAKVPTTVDQGHIPLARCPSGHSQPSLQHGLSTTAPRPTKNQATGSNAQSSEPPKLNALNHDPTSPQWGPGPSGEQPMEGSHQGAPESPDSLQRNQKELQGLLNQVQALEKEAASSVDVQALRRLFEAVPQLGGAAPQAPAAHQKPEASVEQAFGELTRVSTEVAQLKEQTLARLLDIEEAVHKALSSMSSLQPEASARGHFQGPPKDHSAHKISVTVSSSARPSGSGQEVGGQTAVKNQAKVECHTEAQSQVKIRNHTEARGHTASTAPSTRRQETSREYLCPPRVLPSSRDSPSSPTFISIQSATRKPLETPSFKGNPDVSVKSTQLAQDIGQALLHQKGVQDKTGKKDITQCSVQPEPAPPSASPLPRGWQKSVLELQTGPGSSQHYGAMRTVTEQYEEVDQFGNTVLMSSTTVTEQAEPPRNPGSHLGLHASPLLRQFLHSPAGFSSDLTEAETVQVSCSYSQPAAQ

SEQ ID NO: 919142 - protein, 156 aa, Homo sapiens
ETAACHNQSHCFLQMGNLMPKEKKSRSQAFCSLLCLTNAILANLMSALARAGEPLKETGPLLKRKSQRNALAGLEGAMPYCGKGHMAETSSQPLGAGNGLTDSQQGKLDEIVLVKSVKPVKRTRKRDSDHLELWQCLARILLKIGCHGKLNFASQF

SEQ ID NO: 919143 - protein, 360 aa, Homo sapiens
MGCQASWLRRKLRGKRRPVIAFCLLMILSAMAVTRFPPQRPSAGPDPGPMEPQGHVVLLREDEVGDPGTKDLGHPQHGSPIQETQSEVVTLAPPWLTDHDVQMLRLLAQGEVVDKARVPAHGQVLQVGFSTEAALQDLSSPRLSQLCSQGLCGLIKRPGDLPEVLSFHVDRVLGLRRSLPAVARRFHSPLLPYRYTDGGARPVIWWAPDVQHLSDPDEDQNSLALGWLQYQALLAHSCNWPGQAPCPGIHHTEWARLALFDFLLQGCSVGLFLSCQPLLWGQVSVAKAYTVEEVAKEPKSKSGGSKSSAMSSDRSLAENGAMAEEKPTPQMNGTPGDDRAPSHSESALNNDSKMCNTNPH

SEQ ID NO: 919144 - protein, 360 aa, Homo sapiens; identical to SEQ ID NO: 919143

SEQ ID NO: 919145 - protein, 167 aa, Homo sapiens
QSYLILWSPWVSEKKHYMGHTTVGGDCGGGAGGGGGGDGGSGGGGGGGGSDGGDGGGGGGGDGGGGGGGGSDGGDGGGGDGGGDDHGGDTDNDGGGNGSGDVGGGDGDNGGDGSHGGDGCDGDSGGDGEGDDDVDGGGDVGNDGDGNGDCTQIPKYELKTLTGMLDT

SEQ ID NO: 919146 - protein, 250 aa, Homo sapiens
DGKSPVRMLTCLGTMLLEALDCILPPTRPTDKPLHLPLQDVYKIGGIGTVPVGRVETGVLKPGMVVTFAPVNVTTEVKSVEMHHEALSEALPGDNVGFNVKNVSVKDVRRGNVAGDSKNDPPMEAAGFTAQVIILNHPGQISAGYAPVLDCHTAHIACKFAELKEKIDRRSGKKLEDGPKFLKSGDAAIVDMVPGKPMCVESFSDYPPLGRFAVRDMRQTVAVGVIKAVDKKAAGAGKVTKSAQKAQKAK

SEQ ID NO: 919147 - protein, 413 aa, Homo sapiens
MGKEKTHTNIVVIGHIDSGKSTTTGHLIYKGGGIDKRTIEKFEKEAAEMGKGSFKYAWVLDKLKAECEHGITIDTSLWKFETSKYYVTIVDAPGHRDFIKNMITETSQADCAVLIVAAGVGEFEAGISKNGQTQEHALLAYTLGVKQLIVGVNKMDSTEPPYSQKRYEENLLTCLGTMLLEALDCILPPTRPTDKPLHLPLQDVYKIGGIGTVPVGRVETGVLKPGMVVTFAPVNVTTEVKSVEMHHEALSEALPGDNVGFNVKNVSVKDVRRGNVAGDSKNDPPMEAAGFTAQVIILNHPGQISAGYAPVLDCHTAHIACKFAELKEKIDRRSGKKLEDGPKFLKSGDAAIVDMVPGKPMCVESFSDYPPLGRFAVRDMRQTVAVGVIKAVDKKAAGAGKVTKSAQKAQKAK

SEQ ID NO: 919148 - protein, 430 aa, Homo sapiens
MGRRCCRRRVLAAACLGAALLLLCAAPRSLRPAFGNRALGSSWLGGEKRSPLQKLYDLDQDPRSTLAKVHRQRRDLLNSACSRHSRRQRLLQPEDLRHVLVDDAHGLLYCYVPKVACTNWKRVLLALSGQARGDPRAISAQEAHAPGRLPSLADFSPAEINRRLRAYLAFLFVREPFERLASAYRNKLARPYSAAFQRRYGARIVQRLRPRALPDARARGHDVRFAEFLAYLLDPRTRREEPFNEHWERAHALCHPCRLRYDVVGKFETLAEDAAFRSWRSCGHAGQVPFRQDPRGMQVLPAPGPLFKSHCVHSPGRRASGRRAHLARLGGSPSQVALHACACLGLSPEACFLHLLQLTGTSPGPCGPSLCPPHLAHPGKDSCGQGRKPSLGWPHDGAVPGASSAKPWALCCLPPLCVCDCESVHECVSI

SEQ ID NO: 919149 - protein, 159 aa, Homo sapiens
VTMSDERAREGEEFLLGSEMKEEEPSLKGRPLPCSQVNPFRDRICRVFSHKGMFSFEDVLGMASVFSEQACPSLKIEYAFRIYDFNENGFIDEEDLQRIILRLLNSDDMSEDLLMDLTNHVLSESDLDNDNMLSFSEFEHAMAKSPDFMNSFRIHFWGC

SEQ ID NO: 919150 - protein, 185 aa, Homo sapiens
MGQCLRYQMHWEDLEEYQALTFLTRNEILCIHDTFLKLCPPGKYYKEATLTMDQVSSLPALRVNPFRDRICRVFSHKGMFSFEDVLGMASVFSEQACPSLKIEYAFRIYDFNENGFIDEEDLQRIILRLLNSDDMSEDLLMDLTNHVLSESDLDNDNMLSFSEFEHAMAKSPDFMNSFRIHFWGC

SEQ ID NO: 919151 - protein, 261 aa, Homo sapiens
MSFPCLQSGLGNPERPVLGQQFIEQSDAWAWLPLVGVARRMRALWQSCKNALGGWDPGVGDMAVEPAGLGPTLPMGYGLLAYCHFLNGLSPFGPTELRCNPGQFACRSGTIQCIPLPWQCDGWATCEDESDEANCPDAPGGPHLSVLLGQLPRSPSVWENQSLSPVSPCCVPVLGKQQRGTLVVLEAGGAHVLRAAQVMEPRVGADVALGATVTPAPGPQLGCEAGLLGPHGPGGGGRGPPAYQRLALRGKRDILYCQRQA

SEQ ID NO: 919152 - protein, 145 aa, Homo sapiens
MTKGEIRRSLIRLFELQVTVIRFELASSKGKFTSWVLILLIKKIEKSNKESSKDVVGYRKKLAPEDLHAARTHSLPINYGQGSGTMKESAVPVGITGFEVGGWKEQHPEVEETSFILRRREAYLADKIIGFLYRWINYLPTHPPP

SEQ ID NO: 919153 - protein, 189 aa, Homo sapiens
MCFENMRIMRYEEFISMIFRLDYTQPLSDEYITVTDTTFVDIPVRLYLPKRKSETRRRAVIYFHGGGFCFGSSKQRAFDFLNRWTANTLDAVVVGVDYRLAPQHHFPAQFEDGLAAVKFFLLEKILTKYGVDPTRICIAGDSSGGNLATAVTQQKGNIMGRKTILFLIAGVLGAYYVYTPLSDNIEELW

SEQ ID NO: 919154 - protein, 134 aa, Homo sapiens
SEGWKDKMRVPEWSFLVRLLSFSTDGPLCAVSSHGLCSVSAHPWYLSSYRAVLLKLANLCAPFPEDLPGSLGKPKRDSISHNATGWFTQNKAPLLYLRVPGVKDYSAASTAGERGDLCPQVTATQQIAPNEDGE

SEQ ID NO: 919155 - protein, 288 aa, Homo sapiens
MGLGRRQLWHSEQGHQKPLHSSGSCRERGPRNLVYQQKGKHKIITNSLGCLGKNRRYHGPHSGKNFCFPMEPQELKENKSLSKSKALSAFKGALGGGSFITPTGFCYIFSRDNGFSLPTALMSNSESPKEPEQLQKLFIGELSFETTDESLRSHSEQWGMLMDCVVMRDPNTKCSRGFGFVTYATVEEVDAAMNARPHKVDGRVVEPKSYWTPQGVQGPKMDLLKVAQRARYEIGDRLTAQYYPRSGPLSKVSYLGRRSNGNVLWMFPIPHSGKVTGQGAPCEKGAGY

SEQ ID NO: 919156 - protein, 298 aa, Homo sapiens
FLSPWAAALRLPWPWSSGSWAGGGSLVALTSPGGEGGPAMTLLTDATPLVKEPHPLPLVPRPWFLPSLFAAFNVVLLVFFSGLFFAFPCRWLAQNGEWAFPVITGSLFVLTFFSLVSLNFSDPGILHQGSAEQGPLTVHVVWVNHGAFRLQWCPKCCFHRPPRTYHCPWCNICVEDFDHHCKWVNNCIGHRNFRFFMLLVLSLCLYSGAMLVTCLIFLVRTTHLPFSTDKAIAIVVAVSAAVLLVPLSLLLLIQALSVSSADRTYKGKCRQPFRDNKPLPTRGCAKQLVFNQFVPPWD

SEQ ID NO: 919157 - protein, 263 aa, Homo sapiens
FLSPWAAALRLPWPWSSGSWAGGGSLVALTSPGGEGGPAMTLLTDATPLVKEPHPLPLVPRPWFLPSLFAAFNVVLLVFFSGLFFAFPLVSLNFSDPGILHQGSAEQGPLTVHVVWVNHGAFRLQWCPKCCFHRPPRTYHCPWCNICVEVSAPLPVHQPSPHIWLGPGASLIQGPGLGVKLFSGLLKAKGGSNSQPPLVTHVFSTCTCPGRLAVACRGADMHRASASVLGWVRPGEERQPSVPPLGSLTRDTQAPQAGCPPGL

SEQ ID NO: 919158 - protein, 294 aa, Homo sapiens
FLSPWAAALRLPWPWSSGSWAGGGSLVALTSPGGEGGPAMTLLTDATPLVKEPHPLPLVPRPWFLPSLFAAFNVVLLVFFSGLFFAFPCRWLAQNGEWAFPVITGSLFVLTFFSLVSLNFSDPGILHQGSAEQGPLTVHVVWVNHGAFRLQWCPKCCFHRPPRTYHCPWCNICVESYSRMCLTEGQASLLSKGLLQDFDHHCKWVNNCIGHRNFRFFMLLVLSLCLYSGAMLVTCLIFLVRTTHLPFSTDKAIAIVVAVSAAVLLVPLSLLLLIQALSVSSADRTYKGKAVWIL

SEQ ID NO: 919159 - protein, 155 aa, Homo sapiens
RRKKGVKMMRAQRNFSHCLPDSFFLGYPYSSPYLHPKELYLASKRGILRIQPHGGWRLVPTGRDDGQTKTTAVHFIQPIGCLVHRHSTIIHTPEECVDKDHGRLAIHVPILPFICSVLELILSSLALWLFVRFCQGDKSRKIGLEQKAAEGSLLC

SEQ ID NO: 919160 - protein, 151 aa, Homo sapiens
MTEAFGRPIANIKNEERQSKEIENYKSLLKEREDTNKWKNIPCSWIGRINIVKMAILPKVIYRFNAISIKIPLIFFTELEKNYFKIHMKPKKSLYSHDDPKQKEQSWRHHITQLQTVLQGYTFTVHIYGNKEMYTRIQILLSYTNRDDWLV

SEQ ID NO: 919161 - protein, 141 aa, Homo sapiens
MSHIQLLSAFESHRTTCRKNSREFGKKGGEDRQKMHFSFKKQENVRKIEGVLKCVCCCLTQGFWGPLSDGLAAPLRPCLPGSWYSGSELQPHQPLLNDSITPSSIPFTFQTATHLLLINYLVTLATCEPFGAHISHGFMKE

SEQ ID NO: 919162 - protein, 178 aa, Homo sapiens
RGGQRVRPGRGGRRGRAAASMERELEALAARLARPAEPPFQALVEAAGGRGQVLLVGELWEREQSRALLRDFARAGGEGGWGGGGGGGGGGAIRSPLVFVLCRASSLAAREPRRRLREMLRDVRGRRRAGAALVGVLVAEAGPEDAVAPGLRLLEALKLVLNKDYEQGFSLFWLPEVF

SEQ ID NO: 919163 - protein, 172 aa, Homo sapiens
GLPEEQIMTAGEKKATQLQRPAPNPSKTVSLLGDLNVSVKGIICNSILSGNSQDWMKEDRVRGFIPNHGHVGDKDEQVVLGDGFEKGCDLGDSWWTVASLPLSNLHSVDQPLNSYCPLGIAFLDASRQCSYLAVWFHQELYPKEETARRTFALFVGGKWSSYKQIFRHLRNC

SEQ ID NO: 919164 - protein, 172 aa, Homo sapiens; identical to SEQ ID NO: 919163

SEQ ID NO: 919165 - protein, 172 aa, Homo sapiens; identical to SEQ ID NO: 919163

SEQ ID NO: 919166 - protein, 137 aa, Homo sapiens
MDEAGIHSQQTNTGTENQTLHVPTHKWELSNENTWTQGGEHHTLGPVRGWGARGGVALGEVPNVDDGLMGAANPHGTCIPRVAFGNCNGLAVVDFIQKTVLLSMGTIDLYRSSDLYQRQPRSPRKNKQFIAGKSVKL

SEQ ID NO: 919167 - protein, 151 aa, Homo sapiens
MVLLGPRALQSIYVECCLGLTLQGNGLPSVPHTADTEMLSKSPRPGTGDPQGAVWCSVPLWLTWYLIFGSYEDMAECWKKVKKVPGVKDEVRRKNQSSEGSNAHSHQPLTYCCTIPFLTGHRLVQVRNHGDPCKLEIFSTTTLTHPTTLSS

SEQ ID NO: 919168 - protein, 146 aa, Homo sapiens
MHKPFDSGIQIYSDACQKPRKPGVAQEVWLGLRAFPSGPAGRDPGRAAAVASRAAFSQAGTMRPLLCALAGLALLCAVGALADGREDRGSPGDTGERPAGPARGPGLEPARGTLQPRPRPPRKRWLLSPGAGAQQLEVVHLPGSTL

SEQ ID NO: 919169 - protein, 147 aa, Homo sapiens
HILICMFYKGMSDGFAVIHAICTFSIKMENGYCLFTSLSLSSLTWQFFLPPWKPELSQKHLTVNTLCDPFIQVAFTYLPFRLLLTSLSSILSSTELKSPPLSFGVCLEVEHSSPPALGHQNTRFFGLWTLGLAPVAFWGLLGLWPQS

SEQ ID NO: 919170 - protein, 445 aa, Homo sapiens
GGAEQGGGLRAPPQLWTNGYWGRLLQAGPGGGLGLVSGEPGGPGEPPGGGDPGGGSGGFPGGRGKQDIGDILQQIMTITDQSLDEAQAKKHALNCHRMKPALFSVLCEIKEKTGLSIRSSQEEEPVDPQLMRLDNMLLAEGVAGPEKGGGSAAAAAAAAASGGGVSPDNSIEHSDYRSKLAQIRHIYHSELEKYEQACNEFTTHVMNLLREQSRTRPVAPKEMERMVSIIHRKFSAIQMQLKQSTCEAMMMLRSRFLDARRKRRNFSRQATEVLNEYFYSHLSNPYPSEEAKEELAKKCGITVSQVSNRFGNKKIRYKKNIGKFQEEANIYAVKTAVSVTQGGHSSTSSPTPPSSAGSGGSFNISGSGDMFLGMPGLNGDSYSASQVASLRRSMGPGGYGDNLGGGQMYSPREMRANGRRQEAVTPSSVTSPTEGPGSVHSDTSN

SEQ ID NO: 919171 - protein, 296 aa, Homo sapiens [sequence omitted]

SEQ ID NO: 919172 - protein, 277 aa, Homo sapiens
FFLSLRSASFSQGSEAPFIMRRNTAMQNLAQHSGYSVDGVSGHIHGFHSLSKPSQHNAEFRGSTHRIPWSLASHGHTRGSLTGSEADNEGVYPFKAPRSTLFQEFGGHLVNNSGVPATPLSVHQIPRTVTLDKNLYAMVVATPGPIASLPLPKASQAEACQWGSPQQRPLVSESSRWSVAAAIPRRNTLPAVDNSRCHQGLKVISGKDEPHPEVLDPGAGIQEGHCVGNTGAGPGSPGGVVVGSRDVLELPPASTPSMVEGMPAGLLSPCMRESVLS

SEQ ID NO: 919173 - protein, 160 aa, Homo sapiens
RKQQWLGSRLGGCGGEVGATSALAPKIGPLGLSPKKVGDDIAKATGDWKGLRITVKLTIQNRQAQIEVVPSASALIIKALKEPPRDRKKQKNIKHSGNITFDEIVNIARQMRHRSLARELSGTIKEILGTAQSVGCNVDGRHPHDIIDDINSGAVECPAS

SEQ ID NO: 919174 - protein, 446 aa, Homo sapiens
MASAKLNTLLQTKVIENQDEACYILGKLEHVLSQSIKEQTEIYSFLIPLVRTLVSKIYELLFMNLHLPSLPFTNGSSSFFEDFQEYCNSNEWQVYIEKYYEAHTFYDGHENMALYWKDCYEALMVNMHKRDREGGESKLKFQELFVEPFNRKARQENLRYNNMLKQLSSQQLATLRRWKAIQLYLTCERGPWAKSDEKEEQDQKEKLVLMEDCELITIIDVIPGRLEITTQHIYFYDGSIEKEDGVGFDFKWPHSQIREIHLRRYNLRRSALEIFHVDQSNYFLNFKKEKWVNREISNFDYLIQINTMAGRTYNDLAQYPVFPWILQDYTSEELDLNNPAVFRDLSKPIGVVNEKNAKAMREKYENFEDPMGTIDKFHYGTHYSNSAGVMHYLIRVEPFTTLHIQLQSGRSDLELNLRHHRRVKPIQCLCLCSPKNMYHEEWKEEQ

SEQ ID NO: 919175 - protein, 446 aa, Homo sapiens; identical to SEQ ID NO: 919174

SEQ ID NO: 919176 - protein, 107 aa, Homo sapiens
MHTSLAHSSSSHSCSARSWNSTKRYALSNAIDRDREAGRGTTGAELIPGGEVFDSLLMRHRSLARELSGTIKEILGTAQSVGCNVDGRHPHDIIDDINSGAVECPAS

SEQ ID NO: 919177 - protein, 446 aa, Homo sapiens; identical to SEQ ID NO: 919174

SEQ ID NO: 919178 - protein, 446 aa, Homo sapiens; identical to SEQ ID NO: 919174

SEQ ID NO: 919179 - protein, 859 aa, Homo sapiens
MGPEGNGWALGCPRVLEGTGCSGFAQVQEGPATALPPPREAPPGTGVPGIGGDPRGFRSPASAMHCLLGALGEPRGRLGEMGWSPPGGGGAGPGRRREESRGGGAARSPSPPARRPAGPSRGAQSCEPLAPPPLRPGPPCRCGEWGWGPSGAWAGAWARGSPSSVATDGRRDSRDRRCPRARRAGLSFPGADGRAGAAAAAGDVRGTRPRTRGGRRGVSGRRAQLPGPAALDTAPGPWRLGPQVLPAAGSPLPSRPLRAPCVRATLLLSGLPSAGPRTAARPAPLRPSRAFPTNGADPAGGAPAAQGLAAFPVHPPTSPVPASVGGFPGTPEGWQGRIRSPPFPPRRAGPWVTPPSLHLRCPCLPPTTCPSNLGTLWGKCRSMGLSLHSPWGLDLQPDQPSGQPRRLHGLPVSPGTLLLPLGGQRHLSARLALEGHSAVPRALSPQVSTGEGGAGVLAAPGGKKTVYRSLCLALALLVAVTVFQRSLTPGQFLQEPPPPTLEPQKAQKPNGQLVNPNNFWKNPKDVAAPTPMASQGPQAWDVTTTNCSANINLTHQPWFQVLEPQFRQFLFYRHCRYFPMLLNHPEKCRGDVYLLVVVKSVITQHDRREAIRQTWGRERQSAGGGRGAVRTLFLLGTASKQEERTHYQQLLAYEDRLYGDILQWGFLDTFFNLTLKEIHFLKWLDIYCPHVPFIFKGDDDVFVNPTNLLEFLADRQPQENLFVGDVLQHARPIRRKDNKYYIPGALYGKASYPPYAGGGGFLMAGSLARRLHHACDTLELYPIDDVFLGMCLEVLGVQPTAHEGFKTFGISRNRNSRMNKEPCFFRAMLVVHKLLPPELLAMWGLVHSNLTCSRKLQVL

SEQ ID NO: 919180 - protein, 256 aa, Homo sapiens
MEGNNCSSLPFRSGGRGLTDQVLPWLPPLASRSHQRTVASGQGRGRHLVGLMLQLLVFSSGERTGPYTQVLRAVGGSQTPKARGNELSGPKPSLKHWVHSAPETPFHGKRDVGKELRSSRGDGLDISVDPAAIKAGEDVEARNSAFLFWPLKEADTQDSREPRREKPRRKKRPAKQPLQQAAPSDSDGSSHGISSHGSCQGTHPEPRTAHLHFPAAGRLGLSSHAIIATPPPRAALPCTLQATHSSKGLRSVPETL

SEQ ID NO: 919181 - protein, 256 aa, Homo sapiens; identical to SEQ ID NO: 919180

SEQ ID NO: 919182 - protein, 155 aa, Homo sapiens
MSTIGSFEGFQAVSLKQEGDDQPSETDHLSMEEEDPMPRQISRQSSVTESTLYPNPYHQPYISRKYFATRPGAIETAMEDLKGHVAETSGETIQGFWLLTNTPRQGKAKTTTMRTQKQKSQLPQQQPQNKKTKENKQTCRPRKNGSIKPAPRRTS

SEQ ID NO: 919183 - protein, 155 aa, Homo sapiens; identical to SEQ ID NO: 919182

SEQ ID NO: 919184 - protein, 114 aa, Homo sapiens
NPFMGVEDRNLSVCGGAESSMMKRLESYPPQTGGTELLVPKGFVNLALGERERLHSACSARCGTADAREAGDWSCFMEAVSLSPELTGLRHLAKVPPAEECQQLGVLKDSRLCL

SEQ ID NO: 919185 - protein, 157 aa, Homo sapiens
MSTIGSFEGFQAVSLKQEGDDQPSETDHLSMEEEDPMPRQISRQSSVTESTLYPNPYHQPYISRKYFATRPGAIETAMEDLKGHVAETSGETIQGFWLLTKTDPLSQHQGEHLDTLWNFKKYDMMAIKWLFSRMYLRCLCLQWLKRQEETASSLHTR

SEQ ID NO: 919186 - protein, 138 aa, Homo sapiens
MMVFTPGLRPLLSTISKAERELPTPSDLLPTNMETVASVVVADESTEPGLAAGKLVKEVLENMEKGGCQRMGKDRRELGTQNLNSVSLGYVLWKTPMSYPSKIKWTGDKMDLYLGRKNGARDRNLKVINFCTGYHGIR

SEQ ID NO: 919187 - protein, 181 aa, Homo sapiens [sequence omitted]

SEQ ID NO: 919188 - protein, 303 aa, Homo sapiens
MSVHQIRKHAVLPPIICRSDKEFLESVQRYIITETERLGCSEEGPADEYYIIYRNVFDKVIEHITAYKSILTSIKKEYDAFIETIKKDRRTTFCLHGKLKGLAAEPTALVYYRKRTIQLEAKMRIIESNSSKIQSQIDHIKQCRAEYDTKEVKYCTFSKDPSKPIPGMTLQESMNLDALTKYMKHLEDKYAEIKQAMLIKYVPAQRKADLDEEMIVLLKRRDVAENLNKKLQFCHQRLQIISQALSSWVKSDMSSPFQDFVEQIQKTKYLQGDQGIVEELMEDDPRRAKEAEIMLHYIERQIF

SEQ ID NO: 919189 - protein, 390 aa, Homo sapiens
LLDTVPGAAPTRPRPLSPSFRETLGPPLEVAGRRDRRRDRRSEARGAAMEPVSTGAEAGMEGAGGDPYRRPARRTQWLLSALAHHYGLDRGVENEIVVLATGLDQYLQEVFHHLDCRGAGRLPRADFRALCAVLGLRAEGATTAGQAAGDGNSRDVTPGDAAAELATDGDSDTDEEARLALRAEPPELTFRQFHARLCGYFGTRAGPRLPRGALSEHIETQIRLRRPRRRRRPPCAPGPDSGPDCERVARLEEENSSLRELVEDLRAALQSSDARCLALQVGLWKSQASTHEMGHGGPEAAVRELRQAQGALAAAEARAGRLRRGQAEVRRRAEEARQVVLRSLHRVRELEALAQQVPGLQRWVRRLEAELQRYSVAQRLSGKGRTHSPA

SEQ ID NO: 919190 - protein, 138 aa, Homo sapiens
MRTESCALKVESAYTCCFYVTKRLIPGGRLWKMKRLDLEPRAPAKGPEFHNKLYSRVAGVGEIFVVIWSNAETMTTRGQTFYITPLERRNPSLGFFNWGKTREVVYPVNGWARIKIGFYITPKSTLFSLRTLLAVSYL

SEQ ID NO: 919191 - protein, 138 aa, Homo sapiens; identical to SEQ ID NO: 919190

SEQ ID NO: 919192 - protein, 677 aa, Homo sapiens
MCSQALRVSSQLVSAGEPTSTSLSGGAGQVRGQGSAGIAFILSHDCQHPFVPDHVSDSTVSARISDNSLAPVADFSYPAESSSCLDNSAAKHKLQVKPRNQRSSKMRRLSSRAQSESLSDLTCTPEEEENEEKPLLEVSPEERPSSGQQDVAPDRGPEPGPPAPLPPPGGARARRARLQHSSALTASVEEGGVPGEDPSSRPATPELAEPESAPTLRVEPPSPPEGPPNPGPDGGKQDGEAPPAGPCAPATDKAEEVVCAPEDVASPFPTAIPEGDTTPPETDPAATSEAPSARDGPERSVPKEAEPTPPVLPDEEKGPPGPAPEPEREAETEPERGAGTEPERIGTEPSTAPAPSPPAPKSCLKHRPAAASEGPAASPPLAAAESPPVEPGPGSLDAEAAAPERPKAERAEAPPAGAERAAPERKAERGGAELRGAKKFSVSSCRARPRPGVSRPLERASGRLPLARSGPVWRSEAALDDLQGLPEPQHAKPGPRKLAERGPQDSGDRAASPAGPRKSPQEAAAAPGTREPCPAAQEPAPSEDRNPFPVKLRSTSLSLKYRDGASQEVKGVKRYSAEVRLERSLTVLPKEEKCPLGTAPALRGTRAPSDQGKGKARPPEPLSSKPPLPRKPLLQSFTLPHQPAPPDAGPGEREPRKEPRTAEKRPLRRGAAAQNAV

SEQ ID NO: 919193 - protein, 828 aa, Homo sapiens
MCSQALRVSSQLVSAGEPTSTSLSGGAGQVRGQGSAGIAFILSHDCQHPFVPDHVSDSTVSARISDNSLAPVADFSYPAESSSCLDNSAAKHKLQVKPRNQRSSKMRRLSSRAQSESLSDLTCTPEEEENEEKPLLEVSPEERPSSGQQDVAPDRGPEPGPPAPLPPPGGARARRARLQHSSALTASVEEGGVPGEDPSSRPATPELAEPESAPTLRVEPPSPPEGPPNPGPDGGKQDGEAPPAGPCAPATDKAEEVVCAPEDVASPFPTAIPEGDTTPPETDPAATSEAPSARDGPERSVPKEAEPTPPVLPDEEKGPPGPAPEPEREAETEPERGAGTEPERIGTEPSTAPAPSPPAPKSCLKHRPAAASEGPAASPPLAAAESPPVEPGPGSLDAEAAAPERPKAERAEAPPAGAERAAPERKAERGGAELRGAKKFSVSSCRARPRPGVSRPLERASGRLPLARSGPVWRSEAALDDLQGLPEPQHAKPGPRKLAERGPQDSGDRAASPAGPRKSPQEAAAAPGTREPCPAAQEPAPSEDRNPFPVKLRSTSLSLKYRDGASQEVKGVKRYSAEVRLERSLTVLPKEEKCPLGTAPALRGTRAPSDQGKGKARPPEPLSSKPPLPRKPLLQSFTLPHQPAPPDAGPGEREPRKEPRTAEKRPLRRGAEKSLPPAATGPGADGQPAPPWITVTRQKRRGTLDQPPNQEDKPGARTLKSEPGKQAKVPERGQEPVKQADFVRSKSFLITPVKPAVDRKQGAKLNFKEGLQRGISLSHQNLAQSAVMMEKELHQLKRASYASTDQPSWMELARKKSQAWSDMPQIIK

SEQ ID NO: 919194 - protein, 716 aa, Homo sapiens
MCSQALRVSSQLVSAGEPTSTSLSGGAGQVRGQGSAGIAFILSHDCQHPFVPDHVSDSTVSARISDNSLAPVADFSYPAESSSCLDNSAAKHKLQVKPRNQRSSKMRRLSSRAQSESLSDLTCTPEEEENEEKPLLEVSPEERPSSGQQDVAPDRGPEPGPPAPLPPPGGARARRARLQHSSALTASVEEGGVPGEDPSSRPATPELAEPESAPTLRVEPPSPPEGPPNPGPDGGKQDGEAPPAGPCAPATDKAEEVVCAPEDVASPFPTAIPEGDTTPPETDPAATSEAPSARDGPERSVPKEAEPTPPVLPDEEKGPPGPAPEPEREAETEPERGAGTEPERIGTEPSTAPAPSPPAPKSCLKHRPAAASEGPAASPPLAAAESPPVEPGPGSLDAEAAAPERPKAERAEAPPAGAERAAPERKAERGGAELRGAKKFSVSSCRARPRPGVSRPLERASGRLPLARSGPVWRSEAALDDLQGLPEPQHAKPGPRKLAERGPQDSGDRAASPAGPRKSPQEAAAAPGTREPCPAAQEPAPSEDRNPFPVKLRSTSLSLKYRDGASQEVKGVKRYSAEVRLERSLTVLPKEEKCPLGTAPALRGTRAPSDQGKGKARPPEPLSSKPPLPRKPLLQSFTLPHQPAPPDAGPGEREPRKEPRTAEKRPLRRGAGKSPPRVREGQGLGRSTSTGTSCWTLAKCSWYKLCCRGIGRSQNS

SEQ ID NO: 919195 - protein, 152 aa, Homo sapiens
NPPGGMNNSRRAALRAVTLTTKVCSFTPEPVRPRTHQKEETPNTSEHQKEQTPDMPPLRTVTLTARVCGFVLEVSKYCGLGLQMNHSIESKGNEITLLFMSGIHVSGRGFLASYSVIDKQGTQTDSSRKQLDCIPAWATEQDSEKERGRKKE

SEQ ID NO: 919196 - protein, 182 aa, Homo sapiens [sequence omitted]

SEQ ID NO: 919197 - protein, 423 aa, Homo sapiens
MDPCTGGNGCVHICQSENGTARCACHAGYQLPEDKNICEDINECAEGLSYCGHCCVNSMGSFTCACQTGFELGADRKQCYSNWQQSQPRLYLSLSDFFLLFPVHDYTLPDLDECENGEACCAQLCINYLGGYKCRCQEGFQITSNGCECDGKFLRFNNCEEGYRIGNDRKTYPSLDDDELEEEEEEGEVVRFPGLLFKSPPQQLHYVATFLPPTYKDEEDEEEEEKDIHRELTALHNFVCLDHIFGHNCSLSCKDCMNGGKCQEGKSECSCPAGCRVILCNENCLEDAYGAGCTSECQCVEENTLECSAKNGSCTCKSGYQGNRCQKDGLWGPEGWFSSAPCENGGQCNKKTGNCDCTPDYTRKSCTILRCISLTNLALSRRSSPMKYQQNVSSHREVRQRQQCSSDRPFKKLLCKFSFKIGM

SEQ ID NO: 919198 - protein, 164 aa, Homo sapiens
HPTLVDARLLRLHPVLLIQQECMFPITSHDHWLSRWLGTLAGRPAPPQAPVPLDGAPRGTLRTQRTQRLPSSKFPADPGHPLKEGARGCHKAHLITPSKDSQQTSSAWDLPTTKPGWEVGGSEGRWRGRVPEQGKDNQLFPFLVSEAKKPEGLVVVLALGLLTL

SEQ ID NO: 919199 - protein, 164 aa, Homo sapiens; identical to SEQ ID NO: 919198

SEQ ID NO: 919200 - protein, 206 aa, Homo sapiens
MKRVHGHTGMSVQLLLPRAFTSRPAWKSLLRVSFPFYGNFNRRGPKRQTVKMEFWNWIINQPPGNEDIIPRSKWSTDTTWRAVAAKVKTFTRAEVVMGYRHFWLFVTILAWVIDPAHQKKEEDPIPINVTHQEEDPIPINVTHQEEDPIPINVTHQEEDPIPINVTHQEEDPIPINVTHQEEDPIPINVTHQEEDLIPINVTHQEL

SEQ ID NO: 919201 - protein, 232 aa, Homo sapiens
MVATCLQVVGFVTSFVGWIGVIVTTSTNDWVVTCGYTIPTCRKLDELGSKGLWADCVMATGLYHCKPLVDILILPAPSAQPLSNSRPGLSGLPGLGNVTLIPARAQGHLRCPRYPRPCCGRVRLRGCGDAGSRSAPLGWIGTSGRSSEGGLHWGDTERAAEGRSPPPLQRYVQACRALMIAASVLGLPAILLLLTVLPCIRMGQEPGVAKYRRAQLAGVLLILLDASFISTF

SEQ ID NO: 919202 - protein, 232 aa, Homo sapiens; identical to SEQ ID NO: 919201

SEQ ID NO: 919203 - protein, 173 aa, Homo sapiens
MEFLRSHPVRVLLTGPSGHPYLCTHTVVHEYYMYLNYPWHGGLQFLPSEGPFNLGPQPPPRPLPQCPQAARHFNYSWHGGLKVLPGEGSPHWDLQSLLLVELIPGRIQISVSLRAPAGVAAGPSWEVPPSEEEWIGDPLKEAVWPHFGRAAVLRGGSLLPSVGLGSQKPNRLE

SEQ ID NO: 919204 - protein, 35 aa, Homo sapiens
MEVSTSCPVWVFSTQASSHPPLCEASDGYLSVEFC

SEQ ID NO: 919205 - protein, 793 aa, Homo sapiens [sequence omitted]

SEQ ID NO: 919206 - protein, 524 aa, Homo sapiens
IFDNCQNTLFLKKDIWNCLKNYLPSIIIFLKILHWKLKKQKISNIMNIYSKRLQCDFLFQFLNSLDAKEIYLEVIHNLPDFELLSANTLEDRLAHHRWLLFFHFGKNENSNDPELKKLKTLLKNDHIQVGRFDCSSAPDICSNLYVFQPSLAVFKGQGTKEYEIHHGKKILYDILAFAKESVNSHVTTLGPQNFPANDKEPWLVDFFAPWCPPCRALLPELRRASNLLYGQLKFGTLDCTVHEGLCNMYNIQAYPTTVVFNQSNIHEYEGHHSAEQILEFIEDLMNPSVVSLTPTTFNELVTQRKHNEVWMVDFYSPWCHPCQVLMPEWKRMARTLTGLINVGSIDCQQYHSFCAQENVQRYPEIRFFPPKSNKAYQYHSYNGWNRDAYSLRIWGLGFLPQVSTDLTPQTFSEKVLQGKNHWVIDFYAPWCGPCQNFAPEFELLARMIKGKVKAGKVDCQAYAQTCQKAGIRAYPTVKFYFYERAKRNFQEEQINTRDAKAIAALISEKLETLRNQGKRNKDEL

SEQ ID NO: 919207 - protein, 793 aa, Homo sapiens [sequence omitted]

SEQ ID NO: 919208 - protein, 793 aa, Homo sapiens [sequence omitted]

SEQ ID NO: 919209 - protein, 793 aa, Homo sapiens [sequence omitted]

SEQ ID NO: 919210 - protein, 304 aa, Homo sapiens
HKEDLMLFVNSLKFGTLDCTVHEGLCNMYNIQAYPTTVVFNQSNIHEYEGHHSAEQILEFIEDLMNPSVVSLTPTTFNELVTQRKHNEVWMVDFYSPWCHPCQVLMPEWKRMARTLTGLINVGSIDCQQYHSFCAQENVQRYPEIRFFPPKSNKAYQYHSYNGWNRDAYSLRIWGLGFLPQVSTDLTPQTFSEKVLQGKNHWVIDFYAPWCGPCQNFAPEFELLARMIKGKVKAGKVDCQAYAQTCQKAGIRAYPTVKFYFYERAKRNFQEEQINTRDAKAIAALISEKLETLRNQGKRNKDEL

SEQ ID NO: 919211 - protein, 793 aa, Homo sapiens [sequence omitted]

SEQ ID NO: 919212 - protein, 300 aa, Homo sapiens
MGVWLNKDDYIRDLKRIILCFLIVYMAILVGTDQDFYSLLGVSKTASSREIRQAFKKLALKLHPDKNPNNPNAHGDFLKINRAYEVLKDEDLRKKYDKYGEKGLEDNQGGQYESWNYYRYDFGIYDDDPEIITLERREFDAAVNSGELWFVNFYSPGCSHCHDLAPTWRDFAKEVDGLLRIGAVNCGDDRMLCRMKGVNSYPSLFIFRSGMAPVKYHGDRSKESLVSFAMQHVRSTVTELWTGNFVNSIQTAFAAGIGWLITFCSKGGDCLTSQTRLRLSGMLVSINHFVKLYHHVKKHI

SEQ ID NO: 919213 - protein, 332 aa, Homo sapiens
MGVWLNKDDYIRDLKRIILCFLIVYMAILVGTDQDFYSLLGVSKTASSREIRQAFKKLALKLHPDKNPNNPNAHGDFLKINRAYEVLKDEDLRKKYDKYGEKGLEDNQGGQYESWNYYRYDFGIYDDDPEIITLERREFDAAVNSGELWFVNFYSPGCSHCHDLAPTWRDFAKEVDGLLRIGAVNCGDDRMLCRMKGVNSYPSLFIFRSGMAPVKYHGDRSKESLVSFAMQHVRSTVTELWTGNFVNSIQTAFAAGIGWLITFCSKGGDCLTSQTRLRLSGMLDGLVNVGWMDCATQDNLCKSLDITTSTTAYFPPGATLNNKEKNSILLLH

SEQ ID NO: 919214 - protein, 793 aa, Homo sapiens [sequence omitted]

SEQ ID NO: 919215 - protein, 793 aa, Homo sapiens [sequence omitted]

SEQ ID NO: 919216 - protein, 483 aa, Homo sapiens
MGVWLNKDDYIRDLKRIILCFLIVYMAILVGTDQDFYSLLGVSKTASSREIRQAFKKLALKLHPDKNPNNPNAHGDFLKINRAYEVLKDEDLRKKYDKYGEKGLEDNQGGQYESWNYYRYDFGIYDDDPEIITLERREFDAAVNSGELWFVNFYSPGCSHCHDLAPTWRDFAKEVDGLLRIGAVNCGDDRMLCRMKGVNSYPSLFIFRSGMAPVKYHGDRSKESLVSFAMQHVRSTVTELWTGNFVNSIQTAFAAGIGWLITFCSKGGDCLTSQTRLRLSGMLDGLVNVGWMDCATQDNLCKSLDITTSTTAYFPPGATLNNKEKNSILFLNSLDAKEIYLEVIHNLPDFELLSANTLEDRLAHHRWLLFFHFGKNENSNDPELKKLKTLLKNDHIQVGRFDCSSAPDICSNLYVFQPSLAVFKGQGTKEYEIHHGKKILYDILAFAKESVNSHVTTLGPLVSTMSSFTTRVTKSIKSSLWSA

SEQ ID NO: 919217 - protein, 559 aa, Homo sapiens
IDGVFMSTGNFVNSIQTAFAAGIGWLITFCSKGGDCLTSQTRLRLSGMLDGLVNVGWMDCATQDNLCKSLDITTSTTAYFPPGATLNNKEKNSILFLNSLDAKEIYLEVIHNLPDFELLSANTLEDRLAHHRWLLFFHFGKNENSNDPELKKLKTLLKNDHIQVGRFDCSSAPDICSNLYVFQPSLAVFKGQGTKEYEIHHGKKILYDILAFAKESVNSHVTTLGPQNFPANDKEPWLVDFFAPWCPPCRALLPELRRASNLLYGQLKFGTLDCTVHEGLCNMYNIQAYPTTVVFNQSNIHEYEGHHSAEQILEFIEDLMNPSVVSLTPTTFNELVTQRKHNEVWMVDFYSPWCHPCQVLMPEWKRMARTLTGLINVGSIDCQQYHSFCAQENVQRYPEIRFFPPKSNKAYQYHSYNGWNRDAYSLRIWGLGFLPQVSTDLTPQTFSEKVLQGKNHWVIDFYAPWCGPCQNFAPEFELLARMIKGKVKAGKVDCQAYAQTCQKAGIRAYPTVKFYFYERAKRNFQEEQINTRDAKAIAALISEKLETLRNQGKRNKDEL

SEQ ID NO: 919218 - protein, 322 aa, Homo sapiens
MSFWVSIVSPYTARKNSLRVSKYNPARAELKFGTLDCTVHEGLCNMYNIQAYPTTVVFNQSNIHEYEGHHSAEQILEFIEDLMNPSVVSLTPTTFNELVTQRKHNEVWMVDFYSPWCHPCQVLMPEWKRMARTLTGLINVGSIDCQQYHSFCAQENVQRYPEIRFFPPKSNKAYQYHSYNGWNRDAYSLRIWGLGFLPQVSTDLTPQTFSEKVLQGKNHWVIDFYAPWCGPCQNFAPEFELLARMIKGKVKAGKVDCQAYAQTCQKAGIRAYPTVKFYFYERAKRNFQEEQINTRDAKAIAALISEKLETLRNQGKRNKDEL

SEQ ID NO: 919219 - protein, 518 aa, Homo sapiens
MPLKHYLLLLVGCQAWGAGLAYHGCPSECTCSRASQVECTGARIVAVPTPLPWNAMSLQILNTHITELNESPFLNISALIALRIEKNELSRITPGAFRNLGSLRYLSLANNKLQVLPIGLFQGLDSLESLLLSSNQLLQIQPAHFSQCSNLKELQLHGNHLEYIPDGAFDHLVGLTKLNLGKNSLTHISPRVFQHLGNLQVLRLYENRLTDIPMGTFDGLVNLQELALQQNQIGLLSPGLFHNNHNLQRLYLSNNHISQLPPSIFMQLPQLNRLTLFGNSLKELSLGIFGPMPNLRELWLYDNHISSLPDNVFSNLRQLQVLILSRNQISFISPGAFNGLTELRELSLHTNALQDLDGNVFRMLANLQNISLQNNRLRQLPGNIFANVNGLMAIQLQNNQLENLPLGIFDHLGKLCELRLYDNPWRCDSDILPLRNWLLLNQPRLGTDTVPVCFSPANVRGQSLIIINVNVAVPSVHVPEGLTAFSVPGPEPGAGVQSCLQRHHSKTAVPRAQSGGCN

SEQ ID NO: 919220 - protein, 179 aa, Homo sapiens
WKFRLKWVPYRMSSCTACGSPGQHLNLLAAVISVRRVPLTGRMAGGSLQRFGDQHPDPLPRSEQPTTDFSVAGSVIRLSSNTSSQGKPFLAPCGGSYRHCPETTSQESRYVQVGAGLSQTLADTAYVVQPKCKHASSGHAPQGGGPVSKPRAAKRRGMPCATHGLTLLTVPVVSKCTHV

SEQ ID NO: 919221 - protein, 303 aa, Homo sapiens
TLESCYLNSSGKKKGLFLIMGSLGYVFISSMKTSKLVPVEWGVAEKIPDDFGTGDLLNGFDKNADSDMNSKIQTEVVSDGDEELVGNWSKGDSYYVLAKRLEAFCPCPRDLWNFELERDDLGYLAEEISKQKSIQEVTWVLLKAFHFKSGAVRRGPPSSRPQNGRSTDSLPCAPGKAADNQCQPIKAVKREALPCKATGAELPKTMGTPSCISVTWIWNIGIKEKARNEAEMGYVPLTNEGSSLICEVSAKLAERHPQSGNQAEEKTHMPTSPAKEPLRATAQRMSEPGHPRTGLPILQETPN

SEQ ID NO: 919222 - protein, 243 aa, Homo sapiens
MLFWESEFRALLPDPQVELKDHQGSGGSARWCLPDEPSRQVILEALAEFERSTCIRFVTYQDQRDFISIIPMYGCFSSVGRSGGMQVVSLAPTCLQKGRGIVLHELMHVLGFWHEHTRADRDRYIRVNWNEILPGEPGHTQDRLVPGRGQHGLGPSRLVPMGFEINFIKSQSSNMLTPYDYSSVMHYGRLAFSRRGLPTITPLWAPSVHIGQRWNLSASDITRVLKLYGCSPSGPRPRGRGNH

SEQ ID NO: 919223 - protein, 198 aa, Homo sapiens
MGYMTKDNLAIVTQWCEGSSLYKHLHVQETKFQMFQLIDIARQTAQGMDYLHAKNIIHRDMKSNKVIRMQDNNPFSFQSDVYSYGIVLYELMTGELPYSHINNRDQIIFMVGRGYASPDLSKLYKNCPKAMKRLVADCVKKVKEERPLFPQILSSIELLQHSLPKINRSASEPSLHRAAHTEDINACTLTTSPRLPVF

SEQ ID NO: 919224 - protein, 219 aa, Homo sapiens
SLTGGGTDPRHCAWLVCMQGVVSNTLGGQISVVISKGIITTGSTMVEHNYYVSAYRILYSDDGQKWTVYREPGVEQDKDVRNNFLPPIIARFIRVNPTQWQQKIAMKMELLGCQFIPKGRPPKLTQPPPPRNSNDLKNTTAPPKIAKDVALAAVLVPVLVMVLTTLILILVCAWHWRNRNVVEITDECGFMTRSKGADTINMLWKIGRMRMIIKTAAAY

SEQ ID NO: 919225 - protein, 251 aa, Homo sapiens
MCDIEEATNQLLDVNLHENQKSVQVTESDLGSESELLVTIGATVPTGFEQTAADEVREKLGSSCKISRDRGKIYFVISVESLAQVHCLRSVDNLFVVVQEFQDYQFKQTKEEVLKDFEDLAGKLPWSNPLEVWKIDASFKKKSKRKKIDQNSSEEKINTGQEVKIDQRTCSKEEFTSHAFRILISIDSSVQIQASKEDVSPFIGDWIRASCKDDNCMKAPPEEHEPHSGERTETHATRTDTNMAKPNRGCT

SEQ ID NO: 919226 - protein, 118 aa, Homo sapiens
MCDIEEATNQLLDVNLHENQKSVQVTESDLGSESELLVTIGATVPTGFEQTAADEVREKLGSSCKISRDRGKIYFVISVESLAQVHCLRSVDNLFVVVQEFQDYQFKQTKVSYPKHGG

SEQ ID NO: 919227 - protein, 151 aa, Homo sapiens
MVIWFGSAFPSKSHLESIIPTCQGRDQVEIWVTHGGNFRHAVLVIPQNGRSTDSLHCMPGKAADTQHQPMKVAGRGAVPCKATGVELPKAMGAHLLPQCNLDATPAMWNCESIKSLRLYKLPSLRYFFIAVRKWANTPILPSFNRNFDTFT

SEQ ID NO: 919228 - protein, 151 aa, Homo sapiens; identical to SEQ ID NO: 919227

SEQ ID NO: 919229 - protein, 179 aa, Homo sapiens
ASSCWIAAHALLLYLRCAQKPRQDQSALCAACCLLTSLCDTVGALLARQLTIQVFTGAYLAAIDLVNFMFILFPVCGSKFKSNSDREARERKRRRQLRASVFALALPLSLGPCWALWVAVPKASATIRGPQRRLLASLLQENTEILGYLLGSVAAFGSWASRIPPLSRICRGKTFPSIH

SEQ ID NO: 919230 - protein, 239 aa, Homo sapiens
GTSGTSGTKCGQYAGRDAVPYSDRQGLGRPRAQPPAPLRPGCWRLLYLRCAQKPRQDQSALCAACCLLTSLCDTVGALLARQLTIQVFTGAYLAAIDLVNFMFILFPVCGSKFKSNSDREARERKRRRQLRASVFALALPLSLGPCWALWVAVPKASATIRGPQRRLLASLLQENTEILGYLLGSVAAFGSWASRIPPLSRIGVLRTAGASRGKPVCSSPFPIANEKQALRKKPLRLNP

SEQ ID NO: 919231 - protein, 235 aa, Homo sapiens
MAHPKCGQYAGRDAVPYSDRQGLGRPRAQPPAPLRPGCWRLLYLRCAQKPRQDQSALCAACCLLTSLCDTVGALLARQLTIQVFTGAYLAAIDLVNFMFILFPVCGSKFKSNSDREARERKRRRQLRASVFALALPLSLGPCWALWVAVPKASATIRGPQRRLLASLLQENTEILGYLLGSVAAFGSWASRIPPLSRIGVLRTAGASRGKPVCSSPFPIANEKQALRKKPLRLNP

SEQ ID NO: 919232 - protein, 358 aa, Homo sapiens
LQLGLTGRAWAFGGALAVVGGQWAMLGAVEGPRWKQAEDIRDIYDFRDVLGTGAFSEVILAEDKRTQKLVAIKCIAKEALEGKEGSMENEIAVLHKIKHPNIVALDDIYESGGHLYLFMQLVSGGELFDRIVEKGFYTERDASRLIFQVLDAVKYLHDLGIVHRDLKPENLLYYSLDEDSKIMISDFGLSKMEDPGSVLSTACGTPGYPLKSWPRSPTARLWIAGPEVSSPTSSKDFIRHLMEKDPEKRFTCEQALQHPWIAGDTALDKNIHQSVSEQIKKNFAKSKWKQAFNATAVVRHMRKLQLGTSQEGQGQTASHGELLTPVAGGPPTGCCCRDCSVEPGTPFAGRLWGQPGPL

SEQ ID NO: 919233 - protein, 405 aa, Homo sapiens
LQLGLTGRAWAFGGALAVVGGQWAMLGAVEGPRWKQAEDIRDIYDFRDVLGTGAFSEVILAEDKRTQKLVAIKCIAKEALEGKEGSMENEIAVLHKIKHPNIVALDDIYESGGHLYLFMQLVSGGELFDRIVEKGFYTERDASRLIFQVLDAVKYLHDLGIVHRDLKVGLKGVCLVLPGIFGLLESFLDFLMTAMKPQWLLGIHYFSEGAWSGRRFYQPLTISDCPFSSLLPFKPENLLYYSLDEDSKIMISDFGLSKMEDPGSVLSTACGTPGYPLKSWPRSPTARLWIAGPEVSSPTSSKDFIRHLMEKDPEKRFTCEQALQHPWIAGDTALDKNIHQSVSEQIMISDFGLSKMEDPGSVLSTACGTLGGRQLAVAVETAAWSRAQNCPPHCPTSSRALDLGS

SEQ ID NO: 919234 - protein, 425 aa, Homo sapiens
LQLGLTGRAWAFGGALAVVGGQWAMLGAVEGPRWKQAEDIRDIYDFRDVLGTGAFSEVILAEDKRTQKLVAIKCIAKEALEGKEGSMENEIAVLHKIKHPNIVALDDIYESGGHLYLFMQLVSGGELFDRIVEKGFYTERDASRLIFQVLDAVKYLHDLGIVHRDLKVGLKGVCLVLPGIFGLLESFLDFLMTAMKPQWLLGIHYFSEGAWSGRRFYQPLTISDCPFSSLLPFKPENLLYYSLDEDSKIMISDFGLSKMEDPGSVLSTACGTPGYPLKSWPRSPTARLWIAGPEVSSPTSSKDFIRHLMEKDPEKRFTCEQALQHPWIAGDTALDKNIHQSVSEQIKKNFAKSKWKQAFNATAVVRHMRKLQLGTSQEGQGQTASHGELLTPVAGGPPTGCCCRDCSVEPGTPFAGRLWGQPGPL

SEQ ID NO: 919235 - protein, 617 aa, Homo sapiens
SCQDWVLPCKAASSFLAQGQPLLLPYKPSGSTKMYYVPQLRQIPPSPDSKSDTTVESSHSGSNDAIAPDFPAQVLGTRDDDLSATVNIKHKEGIYSKRVVTKASLPVGEKPLQNENADASVQVLITGDENLSDKKQQEIHSTRAVTEAAQAKEKESLQKDTADSSAAAAAEHSAQVGDPEMKNLPDTKAITQKEEIHRKKTVPEEAWPNNKESLQINIEESECHSEFENTTRSVFRSAKFYIHHPVHLPSDQDICHESLGKSVFMRHSWKDFFQHHPDKHREHMCLPLPYQNMDKTKTDYTRIKSLSINVNLGNKEVMDTTKSQVRDYPKHNGQISDPQRDQKVTPEQTTQHTVSLNELWNKYRERQRQQRQPELGDRKELSLVDRLDRLAKILQNPITHSLQVSESTHDDSRGERSVKEWSGRQQQRNKLQKKKRFKSLEKSHKNTGELKKSKVLSHHRAGRSNQIKIEQIKFDKYILSKQPGFNYISNTSSDCRPSEESELLTDTTTNILSGTTSTVESDILTQTDREVALHERSSSVSTIDTARLIQAFGHERVCLSPRRIKLYSSITNQQRRYLEKRSKHSKKVLNTGHPLVTSEHTRRRHIQVHGYRFHLAM

SEQ ID NO: 919236 - protein, 192 aa, Homo sapiens
MTLMVPDTLQVLGKLLWGLNMKMHAKQLSWGLGSVNIATTLIQVTLPSCSGESGPLGNRVSSEDALSKACNIRAASSTGTCHLADTSCPSDWFLCCKAEIKNQNKFCNELKLVRVGAETRIQDFLALEHKFEAAFFTCRSQACISHLFIRPASLITSCNQQTDHNTDSTKEVQRNSVNWGYHRGLQTPNLQQ

SEQ ID NO: 919237 - protein, 153 aa, Homo sapiens [sequence omitted]

SEQ ID NO: 919238 - protein, 151 aa, Homo sapiens
ISQYSLLCQISCYDMNKKYNYLPFSESIMYLSFHILYLNNTHSLMRKQQGTLSVGPYLLGPHRLPSHQALSRLAERVELGASEAASTFATRGCCRTVPGAASAPRGTGAFSTGRVSGAVTQNPQTQSSQTEELMLKRLNKNIQSMKFLLQK

SEQ ID NO: 919239 - protein, 273 aa, Homo sapiens
AGSCFLLVLSMRIFRPWRLRCPALHLPSLSVFSLRWKLPSLTTDETMCKSVTTDEWKKVFYEKMEEAKPADSWDLIIDPNLKHNVLSPGWKQYLELHASGRFHCSWCWHTWQSPYVVILFHMFLDRAQRAGSVRMRVFKQLCYECGTARLDESSMLEENIEGLVDNLITSLREQCYGERGGQYRIHVASRQDNRRHRGEFCEACQEGIVHWKPSEKLLEEEATTYTFSRAPSPTKSQDQTGSGWNFCSIPWCLFWATVLLLIIYLQFSFRSSV

SEQ ID NO: 919240 - protein, 268 aa, Homo sapiens
ATSSDFLLGNMPSKSTDSVGKIRGKPLPLLLFFEALFITSHAFPCPVDAALTLEGIKCGLSEKRLDLVTNWVTQERLTFSEEAGDVICDYGEQDTYNKAKCLALAQIIYSECGLHKKAILCLCKQGQTHRVMEYIQQLKDFTTDDLLQLLMSCPQVELIQCLTKELNEKQPSLSFGLAILHLFSADMKKVGIKLLQEINKGGIDAVESLMINDSFCSIEKWQEVANICSQNGFDKLSNDITSILRSQAAVTEISEEDDAVNLMEHVFW

SEQ ID NO: 919241 - protein, 202 aa, Homo sapiens
PASRFYHQERLTFSEEAGDVICDYGEQDTYNKAKCLALAQIIYSECGLHKKAILCLCKQGQTHRVMEYIQQLKDFTTDDLLQLLMSCPQVELIQCLTKELNEKQPSLSFGLAILHLFSADMKKVGIKLLQEINKGGIDAVESLMINDSFCSIEKWQEVANICSQNGFDKLSNDITSILRSQAAVTEISEEDDAVNLMEHVFW

SEQ ID NO: 919242 - protein, 268 aa, Homo sapiens; identical to SEQ ID NO: 919240

SEQ ID NO: 919243 - protein, 234 aa, Homo sapiens
MPPHPGEEPAQGPPAPAPGLPTTGSGGWRPCAGQGSEGRECPPVAKARNYRAPILDQSKNRLENILAFTGTVRRKASSRQGRGIRLHLAGLSEAGLGMSQASSGLVLAPGAPSAGYRRLVNRGLWHSIWVSDSITSGEESKGGEKTLEPASPGGGVGWGTSFLASAPTRRLGWVGWRLQERAVAKEWCLLPQSVHFRGWRGKKIKKEGGGREQLFLAEKGEISEGGSYHVLEAS

SEQ ID NO: 919244 - protein, 194 aa, Homo sapiens
MLLACDHLPRSLASTPTAPTTPATPDNASQEELMITLVTGLASVTSRTSMGIIIVGGVIWKTIGWKLLSVSLTMYGALYLYERLSWTTHAKERAFKQQFVNYATEKLRMIVSSTSANCSHQVKQQIATTFARLCQQVDITQKQLEEEIARLPKEIDQLEKIQNNSKLLRNKAVQLENELENFTKQFLPSSNEES

SEQ ID NO: 919245 - protein, 493 aa, Homo sapiens
TVNQLAHALHMDKDLKAGCLVRVFCPKAKCALLRDDLVLVDSPGTDVTTELDSWIDKFCLDADVFVLVANSESTLMNTEKHFFHKVNERLSKPNIFILNNRWDASASEPEYMEDVRRQHMERCLHFLVEELKVVNALEAQNRIFFVSAKEVLSARKQKAQGMPESGVALAEGFHARLQEFQNFEQIFEECISQSAVKTKFEQHTIRAKQILATVKNIMDSVNLAAEDKRHYSVEEREDQIDRLDFIRNQMNLLTLDVKKKIKEVTEEVPNKVSCAMTDEICRLSVLVDEFCSEFHPNPDVLKIYKSLPRSLASTPTAPTTPATPDNASQEELMITLVTGLASVTSRTSMGIIIVGGVIWKTIGWKLLSVSLTMYGALYLYERLSWTTHAKERAFKQQFVNYATEKLRMIVSSTSANCSHQVKQQIATTFARLCQQVDITQKQLEEEIARLPKEIDQLEKIQNNSKLLRNKAVQLENELENFTKQFLPSSNEES

SEQ ID NO: 919246 - protein, 184 aa, Homo sapiens
MTQQEEFWPLHRKLRARGATKGVFSAPSQPDPSVFQGRAALVGCPTATCYSHPHWQLQPPGIPHPPQQTDSKGTNCPQEPDWPSLPSLSLPLRVNPFLNPTPKLCVPAPQVQQCLTGQTPKNTVQPGGHIFISLDRQVGQAHPELRPEGAGGRRKLPWGGAEAAPQSNTAQAPAQGGRRHQPCA

SEQ ID NO: 919247 - protein, 154 aa, Homo sapiens
RRLHATCERKRPVVKVLGGWGQNFPGANAALNRRRLPMHFFSHLQPRILRAVPRQPFEAVLEQKAAIVLISQQGKVQTLPLQFERFFFYGGGGRDCNLILKVNFEDLEWSPSLSCRSNHRCPNACISNFGWLLVKKRLQKAVNAGSGSECDGQG

SEQ ID NO: 919248 - protein, 161 aa, Homo sapiens
MKPQSLQRAHEPRENSVGITRGWTREAQDWEMRQAPSEGADLARLGKRGPARQVAQDVRGGRYEGVTASVAFSVEPKNKTSVIIFQSVPTWCQETRFTNGVNTALAVMGLHGRGQIKGTQKEEEKEEEFNNSHHQKTEREEDRMSALRKSWYLISGMLLMI

SEQ ID NO: 919249 - protein, 147 aa, Homo sapiens
SKVLGMLANTDLWVMVLDFSRLFQWLLDKTGFRLHLAVPAARSAENLRAAQGWALMKESDAAHRKQASAEQREPQEKQTGLPAFELVSSNQMEPGTVTKERVKVKATHGAEGPGGRLMRSKAGSFGTGQKGEPRVRGEGRAARISDG

SEQ ID NO: 919250 - protein, 639 aa, Homo sapiens
RLGVGFMWEERKKLGEMLSGLIEEKCKLLEKFSLIPKEYEGYEVQSSLEDASFEKAAAEARSLEATCEKLNRSNSELEDEILCLEIELKEEKSKHSPQDELMADISKRIQSLEDESKSLKSQIAEAKIICKILPMTEERRAIAIKDALSENSQLQESQKQLLREAEVWKEQVTELNKQKITFEDSKAAVLEEDTTDDDNLELEVNSQSENGAYLDDPPKGALKKLIHAANLNVSLKALEGERNHIIIQLSEVDKTKEELTEHIKNLQTQQASLQSENIYFEMEEKISHVTEELETYRKLAKDLEEELERTVHFYQKQVISYEKKGHNNWLAARTAERNLNDLRKENAHNKQKLTETEFKSELLEKDPNALDVSNTTFGRERSPYGPSPLGQPSSETRAFLSPQTLLEDPLRLSPVLPGGGGSPSSPGNPLDHQITNKRGEPSCDRSTDAHRAPSDTGSLSSPWEQDRRMMFPPPGQSYPDSALPPQREDRFYSNSDRLSGPAELRSFNMPCLDKMDGSMPSEMESTRNDAKDDPGHLNVPDSSLPAENEATGPGFIPPPLAAISGPLFPVDTRGLFTRRGPPFPQPPPGTMFGASRGYFLSRDFPGPPHAPFAMRNIYPQRGLPPYFHPRPGFYPNPTF

SEQ ID NO: 919251 - protein, 139 aa, Homo sapiens
MLNRHMKMCSTSLIIKEMQLQTTMRYHQLCNSEFEKIQITMEILAKHSPVGAEWGRAETTQDFSDGCLWPLTTYWGLFIQGSRGEKEHVSDHLVSWSSYRPFSGSLTLLTQSGPSLCSFLNKYERCCCQPKCYNHFTGN

SEQ ID NO: 919252 - protein, 642 aa, Homo sapiens
MRQKQVPPEPAGMRHPVAGSAVLMLAGTFRVKDALSEAQNQGGEVLGGPPLGEPAQELTSQRRRRLVEEFMLLANMAVAHKIHRAFPEQALLRRHPPPQTRMLSDLVEFCDQMGLPVDFSSAGALNKSLTQTFGDDKYSLARKEVLTNMCSRPMQAVALALTPSPESSGTAGQTASGAVAPAGTGYALVPRDSRWEDGRCLLEQRPTGSLASACVSSRQRLQPLVQQNRRRPPPLPPPHCPPRPPPPPPSTTSSFSSSAVASSSSSSSSSSSSSSAVASSSSSSSSSAVCPHIAADGEAVGGASLPGLAGQLWACQALTHPVPQMALYFCSGLLQDPAQFRHYALNVPLYTHFTSPIRRFADVLVHRLLAAALEAAWSPQPALDTAGRRALTSKGRFLLPWELGAWGYRERLDMAPDTLQKQADHCNDRRMASKRVQELSTSLFFAVLVKEPRAVPGGAMAAALSLQESGPLESEAMVMGILKQAFDVLVLRYGVQKRIYCNALALRSHHFQKVGKKPELTLVWEPEDMEQEPAQQGILPGGGPHYRQASRGFQRPKEGPGVLLQGWRQSCASTSGPAILVPSRLGSAQVITIFSLVEVVLQAESTALKYSAILKRPGTQGHLGPEKEEEESDGEPEDSSTS

SEQ ID NO: 919253 - protein, 258 aa, Homo sapiens
SFHEVFLPTALACTAAESLSSTSAMGHLHHSPVLEIGGQVISHTERYVTLFASIILKCDYTTSAQLQDVVVTWRFKSFCKDPIFDYYSASYQAALSLGQDPSNDCNDNQREVRIVAQRRGQNEPVLGVDYRQRKITIQNRADLMINEVMWWDHGVYYCTKRAPGDTSGDPDKEVKLIVLRKCYWSFLFSHPHCRNTFTHRKKKKKPEISKPKLADSDLHHPGSPPPPAADWSVLVPVLSSVLLLLYPLSLLSCPLLLS

SEQ ID NO: 919254 - protein, 143 aa, Homo sapiens
MALQGILCTQGSFTSAVIRIIYDLHSHAIPPPSATPILKWVPQNQIWRLQFTCQLYINKVLPGENGKGMRGTEQKWGKSQAQSTENRFSYTPHRNKALFPGHIPWAAFREALHTQGCSQGTEGLDLPAVVAGTRANPWPLVNT

SEQ ID NO: 919255 - protein, 184 aa, Homo sapiens
MCRPLYKLSGHHMLSQRLPVACFLGAPDQMPWTVPEAFGFSECEWVEPSSGAPSLLLLLLSLALPNTHTRANAHMHRPPRGCCSPLQCQEHTGPWTEQTAFPGPLSWQLRGPQSLTGVSGLTIRLLKKDNSQQAHTEKAFHAAQSPAQQPGVRSKCAEWVVELTGPAGLLWLAEPLWLSPWVAG

SEQ ID NO: 919256 - protein, 159 aa, Homo sapiens
MLHVLASLPLLLLLVTSASTHAWSRPLWYQVGLDLQPWGCQPKSVEGCRGGLSCPGYWLGPGASRIYPVAAVMITTTMLMICRKILQGRRRSQATKGEHPQVTTEPCGPWKRRAPISDHTLLRGVLHMLDALLVHIEGHLRHLATQRQIQIKGTSTQSG

SEQ ID NO: 919257 - protein, 211 aa, Homo sapiens
CHISTRLILTTWLMKQESLIQEGKQEFTRIVKDTPDPEENAGKQPPQLGERVGDAVKDRHREKLQTFSQTWDGEQDTIFNPGTYEASHSLVTQQHGSVGISVLGQRLEHLLWSGVGASIARIVESTSAVGLELCFPPLQAWGRRRAAKLHFLLGSNTCSQGQLGDLELIHLCHCWVPHSALLILWYDRAASAPLPGRNPDIWSTCLPGPAD

SEQ ID NO: 919258 - protein, 483 aa, Homo sapiens
PTVPGNLDQSGTRQEMEEPPQEALAEPLKHESPAAPSSAGHTKGQEEDDQKNQAERKADNHTAHRIADQTALRVPSQAESSIFSQATNGVAEQNGHSTPGQAGRRASNPADVSDLRADDQVNQTPSEQTKGKASSQANNVQHEQSDGQVSGLTEERTAEQTERRLPTQAERRTSGQIDGRLAMPSDQRGSRQTDHRMAGQSERRASEQMDRRMSGEAERRTSEQITHRLSKLSERRPSVQIDSGSSVPSDQSPSVQIDSGSSVPSDQRPSVQIDRRMSGKVRRRSSEKTDYRLAGLADPGTSEQTDLRLYGLVDHKTSVKTHHQVYGQATELAEHQAIDQAHSNADQPPVDNAHYTESDQTDHLADRQANHKDQLSYYETRGQSEDRIFPQLGNSKEDKEADYRVQPCKFEDSQVDLNSKPSVEMETQNATTIPPYNPVDARFTSNFQAKDQALFPRLPSISSKLNYTSSQEKTQAIVTKSVY

SEQ ID NO: 919259 - protein, 164 aa, Homo sapiens
KEELSRMEKRGVKEENWGSEVPLLLSDTEGKVQKAEEIRKMIFPCSSQQNNREDYLLRVEGLRALKKLIKFERVIEGNERRADQSQVQELTDKATRRARLRFGAMSLLLHESAGCVPKTPKVQSRSCCSPHRKPITETRVFPEKKALIRYCSWEDGTSVSNPSP

SEQ ID NO: 919260 - protein, 403 aa, Homo sapiens
MGNLSCCIQGDSKKPSQRRVKRQPYSTTKVTSGSTFNENTRRYAVHTNQCRRPHGSRVKKKRYPQEAPHEDTVHDITNEDATHDIANEDTVHDIANEAADKGIANEDAAHGIASEDAAHGIASEDAAHGIASEDAAQGIASEDAAQGIAREDAAQGIAKEDAAQGIAKEGAAQGIAKEDAAHGIANEDSAHGIASEDAAHGIASEDAVQGIAKEDAAQGIANEDAAQGIAKEDAAQGIAKEDAAQGIANEGAAQGIAKEDAAQGIANEDAAQGIANEDAAHGIASEDAAHGIASEDAVQGIAKEDAAQGIANEDAAQGIANEDAAQGIAKEDAAHGIANELYTTSLTRTPYKPSLTSTLYTTSLMRALYKTSPMRALYTTLLMAPTRHANVDAVHDIANEDSV

SEQ ID NO: 919261 - protein, 182 aa, Homo sapiens
MSQMLRKRFWEEPKDLPLAAMLRLTISPPFLLVVGHLKLDLPNHHGTCQECRLFSCVNSSLYNTDHSILAVRTQEGVWIPVKLSGPWEASPSVHIITEILQKILRCSQCFIATLILIIMGLIAVTATAAAAGVALHFTVQTADYVNNWQKNSTLLWNSQTNMDQKLANQINYLQQTVMWLGD

SEQ ID NO: 919262 - protein, 232 aa, Homo sapiens
MKESSPLSSRKICDKSHFQAIHSESSDTFSDQSPTLVGGALLDQNKPQTEMQFVNEEDLETLGAAAPLLPMIEELKPPSASVVQTANKTDSPSRKRGHTMVDDGPGLWTLVVYGHVVLPTIFQWEKRRLWPPARGLGTYKCDLNPLFLQQHHGISPSKPPHPQRGDPSGLAKHASDNGARSANQSPQSVGSSGVDSGVESTSDGLRDLPSIAISLCGGLSDHREITKENTCE

SEQ ID NO: 919263 - protein, 937 aa, Homo sapiens
MSRVQTMNYVGQLAGQVFVTVKELYKGLNPATLSGCIDIIVIRQPNGNLQCSPFHVRFGKMGVLRSREKVVDIEINGESVDLHMKLGDNGEAFFVQETDNDQEVIPMHLATSPILSEGASRMECQLKRGSVDRMRGLDPSTPAQVIAPSETPSSSSVVKKRRKRRRKSQLDSLKRDDNMNTSEDEDMFPIEMSSDEAMELLESSRTLPNDIPPFQDDIPEENLSLAVIYPQSASYPNSDREWSPTPSPSGSRPSTPKSDSELVSKSTERTGQKNPEMLWLWGELPQAAKSSSPHKMKESSPLSSRKICDKSHFQAIHSESSDTFSDQSPTLVGGALLDQNKPQTEMQFVNEEDLETLGAAAPLLPMIEELKPPSASVVQTANKTDSPSRKRDKRSRHLGADGVYLDDLTDMDPEVAALYFPKNAEMQPSAALRVAACQSITGWRCRTLNWDSPQPVSAAFPPSSGDPSGLAKHASDNGARSANQSPQSVGSSGVDSGVESTSDGLRDLPSIAISLCGGLSDHREITKDAFLEQAVSYQQFVDNPAIIDDPNLVVKIGSKYYNWTTAAPLLLAMQAFQKPLPKATVESIMRDKMPKKGGRWWFSWRGRNTTIKEESKPEQCLAGKAHSTGEQPPQLSLATRVKHESSSSDEERAAAKPSNAGHLPLLPNVSYKKTLRLTSEQLKSLKLKNGPNDVVFSVTTQYQGTCRCEGTIYLWNWDDKVIISDIDGTITRSDTLGHILPTLGKDWTHQGIAKLYHKVSQNGYKFLYCSARAIGMADMTRGYLHWVNERGTVLPQGPLLLSPSSLFSALHREVIEKKPEKFKVQCLTDIKNLFFPNTEPFYAAFGNRPADVYSYKQVGVSLNRIFTVNPKGELVQEHAKTNISSYVRLCEVVDHVFPLLKRSHSSDFPCSDTFSNFTFWREPLPPFENQDIHSASA

SEQ ID NO: 919264 - protein, 948 aa, Homo sapiens
MNYVGQLAGQVFVTVKELYKGLNPATLSGCIDIIVIRQPNGNLQCSPFHVRFGKMGVLRSREKVVDIEINGESVDLHMKLGDNGEAFFVQETDNDQEVIPMHLATSPILSEGASRMECQLKRGSVDRMRGLDPSTPAQVIAPSETPSSSSVVKKRRKRRRKSQLDSLKRDDNMNTSEDEDMFPIEMSSDEAMELLESSRTLPNDIPPFQDDIPEENLSLAVIYPQSASYPNSDREWSPTPSPSGSRPSTPKSDSELVSKSTERTGQKNPEMLWLWGELPQAAKSSSPHKMKESSPLSSRKICDKSHFQAIHSESSDTFSDQSPTLVGGALLDQNKPQTEMQFVNEEDLETLGAAAPLLPMIEELKPPSASVVQTANKTDSPSRKRDKRSRHLGADGVYLDDLTDMDPEVAALYFPKNKAFNVSFLVVVALINICAEMQPSAALRVAACQSITGWRCRTLNWDSPQPVSAAFPPSSGDPSGLAKHASDNGARSANQSPQSVGSSGVDSGVESTSDGLRDLPSIAISLCGGLSDHREITKDAFLEQAVSYQQFVDNPAIIDDPNLVVKIGSKYYNWTTAAPLLLAMQAFQKPLPKATVESIMRDKMPKKGGRWWFSWRGRNTTIKEESKPEQCLAGKAHSTGEQPPQLSLATRVKHESSSSDEERAAAKPSNAGHLPLLPNVSYKKTLRLTSEQLKSLKLKNGPNDVVFSVTTQYQGTCRCEGTIYLWNWDDKVIISDIDGTITRSDTLGHILPTLGKDWTHQGIAKLYHKVSQNGYKFLYCSARAIGMADMTRGYLHWVNERGTVLPQGPLLLSPSSLFSALHREVIEKKPEKFKVQCLTDIKNLFFPNTEPFYAAFGNRPADVYSYKQVGVSLNRIFTVNPKGELVQEHAKTNISSYVRLCEVVDHVFPLLKRSHSSDFPCSDTFSNFTFWREPLPPFENQDIHSASA

SEQ ID NO: 919265 - protein, 890 aa, Homo sapiens
MNYVGQLAGQVFVTVKELYKGLNPATLSGCIDIIVIRQPNGNLQCSPFHVRFGKMGVLRSREKVVDIEINGESVDLHMKLGDNGEAFFVQETDNDQEVIPMHLATSPILSEGASRMECQLKRGSVDRMRGLDPSTPAQVIAPSETPSSSSVVKKRRKRRRKSQLDSLKRDDNMNTSEDEDMFPIEMSSDEAMELLESSRTLPNDIPPFQDDIPEENLSLAVIYPQSASYPNSDREWSPTPSPSGSRPSTPKSDSELVSKSTERTGQKNPEMLWLWGELPQAAKSSSPHKMKESSPLSSRKICDKSHFQAIHSESSDTFSDQSPTLVGGALLDQNKPQTEMQFVNEEDLETLGAAAPLLPMIEELKPPSASVVQTANKTDSPSRKRDKRSRHLGADGVYLDDLTDMDPEVAALYFPKNGDPSGLAKHASDNGARSANQSPQSVGSSGVDSGVESTSDGLRDLPSIAISLCGGLSDHREITKDAFLEQAVSYQQFVDNPAIIDDPNLVVKIGSKYYNWTTAAPLLLAMQAFQKPLPKATVESIMRDKMPKKGGRWWFSWRGRNTTIKEESKPEQCLAGKAHSTGEQPPQLSLATRVKHESSSSDEERAAAKPSNAGHLPLLPNVSYKKTLRLTSEQLKSLKLKNGPNDVVFSVTTQYQGTCRCEGTIYLWNWDDKVIISDIDGTITRSDTLGHILPTLGKDWTHQGIAKLYHKVSQNGYKFLYCSARAIGMADMTRGYLHWVNERGTVLPQGPLLLSPSSLFSALHREVIEKKPEKFKVQCLTDIKNLFFPNTEPFYAAFGNRPADVYSYKQVGVSLNRIFTVNPKGELVQEHAKTNISSYVRLCEVVDHVFPLLKRSHSSDFPCSDTFSNFTFWREPLPPFENQDIHSASA

SEQ ID NO: 919266 - protein, 896 aa, Homo sapiens
MSRVQTMNYVGQLAGQVFVTVKELYKGLNPATLSGCIDIIVIRQPNGNLQCSPFHVRFGKMGVLRSREKVVDIEINGESVDLHMKLGDNGEAFFVQETDNDQEVIPMHLATSPILSEGASRMECQLKRGSVDRMRGLDPSTPAQVIAPSETPSSSSVVKKRRKRRRKSQLDSLKRDDNMNTSEDEDMFPIEMSSDEAMELLESSRTLPNDIPPFQDDIPEENLSLAVIYPQSASYPNSDREWSPTPSPSGSRPSTPKSDSELVSKSTERTGQKNPEMLWLWGELPQAAKSSSPHKMKESSPLSSRKICDKSHFQAIHSESSDTFSDQSPTLVGGALLDQNKPQTEMQFVNEEDLETLGAAAPLLPMIEELKPPSASVVQTANKTDSPSRKRDKRSRHLGADGVYLDDLTDMDPEVAALYFPKNGDPSGLAKHASDNGARSANQSPQSVGSSGVDSGVESTSDGLRDLPSIAISLCGGLSDHREITKDAFLEQAVSYQQFVDNPAIIDDPNLVVKIGSKYYNWTTAAPLLLAMQAFQKPLPKATVESIMRDKMPKKGGRWWFSWRGRNTTIKEESKPEQCLAGKAHSTGEQPPQLSLATRVKHESSSSDEERAAAKPSNAGHLPLLPNVSYKKTLRLTSEQLKSLKLKNGPNDVVFSVTTQYQGTCRCEGTIYLWNWDDKVIISDIDGTITRSDTLGHILPTLGKDWTHQGIAKLYHKVSQNGYKFLYCSARAIGMADMTRGYLHWVNERGTVLPQGPLLLSPSSLFSALHREVIEKKPEKFKVQCLTDIKNLFFPNTEPFYAAFGNRPADVYSYKQVGVSLNRIFTVNPKGELVQEHAKTNISSYVRLCEVVDHVFPLLKRSHSSDFPCSDTFSNFTFWREPLPPFENQDIHSASA

SEQ ID NO: 919267 - protein, 512 aa, Homo sapiens [sequence omitted]

SEQ ID NO: 919268 - protein, 896 aa, Homo sapiens; identical to SEQ ID NO: 919266

SEQ ID NO: 919269 - protein, 246 aa, Homo sapiens
PEDADSLNLEYPPRTSAGNAGHLPLLPNVSYKKTLRLTSEQLKSLKLKNGPNDVVFSVTTQYQGTCRCEGTIYLWNWDDKVIISDIDGTITRSDTLGHILPTLGKDWTHQGIAKLYHKVSQEVIEKKPEKFKVQCLTDIKNLFFPNTEPFYAAFGNRPADVYSYKQVGVSLNRIFTVNPKGELVQEHAKTNISSYVRLCEVVDHVFPLLKRSHSSDFPCSDTFSNFTFWREPLPPFENQDIHSASA

SEQ ID NO: 919270 - protein, 423 aa, Homo sapiens
MSRVQTMNYVGQLAGQVFVTVKELYKGLNPATLSGCIDIIVIRQPNGNLQCSPFHVRFGKMGVLRSREKVVDIEINGESVDLHMKLGDNGEAFFVQETDNDQEVIPMHLATSPILSEGASRMECQLKRGSVDRMRGLDPSTPAQVIAPSETPSSSSVVKKRRKRRRKSQLDSLKRDDNMNTSEDEDMFPIEMSSDEAMELLESSRTLPNDIPPFQDDIPEENLSLAVIYPQSASYPNSDREWSPTPSPSGSRPSTPKSDSELVSKSTERTGQKNPEMLWLWGELPQAAKSSSPHKMKESSPLSSRKICDKSHFQAIHSESSDTFSDQSPTLVGGALLDQNKPQTEMQFVNEEDLETLGAAAPLLPMIEELKPPSASVVQTANKTDSPSRKRDKRSRHLGADGVYLDDLTDMDPEVAALYFPKK

SEQ ID NO: 919271 - protein, 423 aa, Homo sapiens; identical to SEQ ID NO: 919270

SEQ ID NO: 919272 - protein, 618 aa, Homo sapiens
MNYVGQLAGQVFVTVKELYKGLNPATLSGCIDIIVIRQPNGNLQCSPFHVRFGKMGVLRSREKVVDIEINGESVDLHMKLGDNGEAFFVQETDNDQEVIPMHLATSPILSEGASRMECQLKRGSVDRMRGLDPSTPAQVIAPSETPSSSSVVKKRRKRRRKSQLDSLKRDDNMNTSEDEDMFPIEMSSDEAMELLESSRTLPNDIPPFQDDIPEENLSLAVIYPQSASYPNSDREWSPTPSPSGSRPSTPKSDSELVSKSTERTGQKNPEMLWLWGELPQAAKSSSPHKMKESSPLSSRKICDKSHFQAIHSESSDTFSDQSPTLVGGALLDQNKPQTEMQFVNEEDLETLGAAAPLLPMIEELKPPSASVVQTANKTDSPSRKRDKRSRHLGADGVYLDDLTDMDPEVAALYFPKNGDPSGLAKHASDNGARSANQSPQSVGSSGVDSGVESTSDGLRDLPSIAISLCGGLSDHREITKDAFLEQAVSYQQFVDNPAIIDDPNLVVKIGSKYYNWTTAAPLLLAMQAFQKPLPKATVESIMRDKMPKKGGRWWFSWRGRNTTIKEESKPEQCLAGKAHSTGEQPPQLSLATSAYNLQQASMQLAARTPEAGVPGFNS

SEQ ID NO: 919273 - protein, 910 aa, Homo sapiens
RRAGCLQYKGGHARRRSVQTMNYVGQLAGQVFVTVKELYKGLNPATLSGCIDIIVIRQPNGNLQCSPFHVRFGKMGVLRSREKVVDIEINGESVDLHMKLGDNGEAFFVQETDNDQEVIPMHLATSPILSEGASRMECQLKRGSVDRMRGLDPSTPAQVIAPSETPSSSSVVKKRRKRRRKSQLDSLKRDDNMNTSEDEDMFPIEMSSDEAMELLESSRTLPNDIPPFQDDIPEENLSLAVIYPQSASYPNSDREWSPTPSPSGSRPSTPKSDSELVSKSTERTGQKNPEMLWLWGELPQAAKSSSPHKMKESSPLSSRKICDKSHFQAIHSESSDTFSDQSPTLVGGALLDQNKPQTEMQFVNEEDLETLGAAAPLLPMIEELKPPSASVVQTANKTDSPSRKRDKRSRHLGADGVYLDDLTDMDPEVAALYFPKNGDPSGLAKHASDNGARSANQSPQSVGSSGVDSGVESTSDGLRDLPSIAISLCGGLSDHREITKDAFLEQAVSYQQFVDNPAIIDDPNLVVKIGSKYYNWTTAAPLLLAMQAFQKPLPKATVESIMRDKMPKKGGRWWFSWRGRNTTIKEESKPEQCLAGKAHSTGEQPPQLSLATRVKHESSSSDEERAAAKPSNAGHLPLLPNVSYKKTLRLTSEQLKSLKLKNGPNDVVFSVTTQYQGTCRCEGTIYLWNWDDKVIISDIDGTITRSDTLGHILPTLGKDWTHQGIAKLYHKVSQNGYKFLYCSARAIGMADMTRGYLHWVNERGTVLPQGPLLLSPSSLFSALHREVIEKKPEKFKVQCLTDIKNLFFPNTEPFYAAFGNRPADVYSYKQVGVSLNRIFTVNPKGELVQEHAKTNISSYVRLCEVVDHVFPLLKRSHSSDFPCSDTFSNFTFWREPLPPFENQDIHSASA

SEQ ID NO: 919274 - protein, 896 aa, Homo sapiens; identical to SEQ ID NO: 919266

SEQ ID NO: 919275 - protein, 890 aa, Homo sapiens; identical to SEQ ID NO: 919265

SEQ ID NO: 919276 - protein, 878 aa, Homo sapiens
MSRVQTMNYVGQLAGQVFVTVKELYKGLNPATLSGCIDIIVIRQPNGNLQCSPFHVRFGKMGVLRSREKVVDIEINGESVDLHMKLGDNGEAFFVQETDNDQEVIPMHLATSPILSEGASRMECQLKRGSVDRMRGLDPSTPAQVIAPSETPSSSSVVKKRRKRRRKSQLDSLKRDDNMNTSEDEDMFPIEMSSDEAMELLESSRTLPNDIPPFQDDIPEENLSLAVIYPQSASYPNSDREWSPTPSPSGSRPSTPKSDSELVSKSTERTGQKNPEMLWLWGELPQAAKSSSPHKMKESSPLSSRKICDKSHFQAIHSESSDTFSDQSPTLVGGALLDQNKPQTEMQFVNEEDLETLGAAAPLLPMIEELKPPSASVVQTANKTDSPSRKRDKRSRHLGADGVYLDDLTDMDPEVAALYFPKNGDPSGLAKHASDNGARSANQSPQSVGSSGVDSGVESTSDGLRDLPSIAISLCGGLSDHREITKDAFLEQAVSYQQFVDNPAIIDDPNLVVKIGSKYYNWTTAAPLLLAMQAFQKPLPKATVESIMRDKMPKESKPEQCLAGKAHSTGEQPPQLSLATRVKHESSSSDEERAAAKPSNAGHLPLLPNVSYKKTLRLTSEQLKSLKLKNGPNDVVFSVTTQYQGTCRCEGTIYLWNWDDKVIISDIDGTITRSDTLGHILPTLGKDWTHQGIAKLYHKVSQNGYKFLYCSARAIGMADMTRGYLHWVNERGTVLPQGPLLLSPSSLFSALHREVIEKKPEKFKVQCLTDIKNLFFPNTEPFYAAFGNRPADVYSYKQVGVSLNRIFTVNPKGELVQEHAKTNISSYVRLCEVVDHVFPLLKRSHSSDFPCSDTFSNFTFWREPLPPFENQDIHSASA

SEQ ID NO: 919277 - protein, 735 aa, Homo sapiens
MAEIISSSAFLLCRDDNMNTSEDEDMFPIEMSSDEAMELLESSRTLPNDIPPFQDDIPEENLSLAVIYPQSASYPNSDREWSPTPSPSGSRPSTPKSDSELVSKSTERTGQKNPEMLWLWGELPQAAKSSSPHKMKESSPLSSRKICDKSHFQAIHSESSDTFSDQSPTLVGGALLDQNKPQTEMQFVNEEDLETLGAAAPLLPMIEELKPPSASVVQTANKTDSPSRKRDKRSRHLGADGVYLDDLTDMDPEVAALYFPKNGDPSGLAKHASDNGARSANQSPQSVGSSGVDSGVESTSDGLRDLPSIAISLCGGLSDHREITKDAFLEQAVSYQQFVDNPAIIDDPNLVVKIGSKYYNWTTAAPLLLAMQAFQKPLPKATVESIMRDKMPKKGGRWWFSWRGRNTTIKEESKPEQCLAGKAHSTGEQPPQLSLATRVKHESSSSDEERAAAKPSNAGHLPLLPNVSYKKTLRLTSEQLKSLKLKNGPNDVVFSVTTQYQGTCRCEGTIYLWNWDDKVIISDIDGTITRSDTLGHILPTLGKDWTHQGIAKLYHKVSQNGYKFLYCSARAIGMADMTRGYLHWVNERGTVLPQGPLLLSPSSLFSALHREVIEKKPEKFKVQCLTDIKNLFFPNTEPFYAAFGNRPADVYSYKQVGVSLNRIFTVNPKGELVQEHAKTNISSYVRLCEVVDHVFPLLKRSHSSDFPCSDTFSNFTFWREPLPPFENQDIHSASA

SEQ ID NO: 919278 - protein, 896 aa, Homo sapiens; identical to SEQ ID NO: 919266

SEQ ID NO: 919279 - protein, 896 aa, Homo sapiens; identical to SEQ ID NO: 919266

SEQ ID NO: 919280 - protein, 803 aa, Homo sapiens
MNYVGQLAGQVFVTVKELYKGLNPATLSGCIDIIVIRQPNGNLQCSPFHVRFGKMGVLRSREKVVDIEINGESVDLHMKLGDNGEAFFVQETDNDQEVIPMHLATSPILSEGASRMECQLKRGSVDRMRGLDPSTPAQVIAPSETPSSSSVVKKRRKRRRKSQLDSLKRDDNMNTSEDEDMFPIEMSSDEAMELLESSRTLPNDIPPFQDDIPEENLSLAVIYPQSASYPNSDREWSPTPSPSGSRPSTPKSDSELVSKSTERTGQKNPEMLWLWGELPQAAKSSSPHKMKESSPLSSRKICDKSHFQAIHSESSDTFSDQSPTLVGGALLDQNKPQTEMQFVNEEDLETLGAAAPLLPMIEELKPPSASVVQTANKTDSPSRKRDKRSRHLGADGVYLDDLTDMDPEVAALYFPKNGDPSGLAKHASDNGARSANQSPQSVGSSGVDSGVESTSDGLRDLPSIAISLCGGLSDHREITKDAFLEQAVSYQQFVDNPAIIDDPNLVVKIGSKYYNWTTAAPLLLAMQAFQKPLPKATVESIMRDKMPKKGGRWWFSWRGRNTTIKEESKPEQCLAGKAHSTGEQPPQLSLATRVKHESSSSDEERAAAKPSNAGHLPLLPNVSYKKTLRLTSEQLKSLKLKNGPNDVVFSVTTQYQGTCRCEGTIYLWNWDDKVIISDIDGTITRSDTLGHILPTLGKDWTHQGIAKLYHKVSHAEHEIRNISCAAQDPEDLSTFAYITKDLKSNHHYCHVFTAFDVILAYEIILILAQAFEVAYQLALQARIRGTLLHSFQKALKTTASNPI

SEQ ID NO: 919281 - protein, 136 aa, Homo sapiens
PASAHTLHMNSEGSMAKLTISTCVPAAMPHHLTSAHPPPDLRWWYKNQIAQHFAPKELKERGFHCVYVFSFTSHFCSLPSGNAVDICHQQLFGDFNVPSSQDPKGDFRHGESKTPGAQKNGVSRHQANTEEIRAKF

SEQ ID NO: 919282 - protein, 627 aa, Homo sapiens
RRAAPRASISESAGSGQPRAEGLGAGAAGPLRAMAAPVKGNRKQSTEGDALDPPASPKPAGKQNGIQNPISLEDSPEAGGEREEEQEREEEQAFLVSLYKFMKERHTPIERVPHLGFKQINLWKIYKAVEKLGAYELVTGRRLWKNVYDELGGSPGSTSAATCTRRHYERLVLPYVRHLKGEDDKPLPTSKPRKQYKMAKENRGDDGATERPKKAKEERRMDQMMPGKTKADAADPAPLPSQEPPRNSTEQQGLASGSSVSFVGASGCPEAYKRLLSSFYCKGTHGIMSPLAKKKLLAQVSKVEALQCQEEGCRHGAEPQASPAVHLPESPQSPKGLTENSRHRLTPQEGLQAPGGSLREEAQAGPCPAAPIFKGCFYTHPTEVLKPVSQHPRDFFSRLKDGVLLGPPGKEGLSVKEPQLVWGGDANRPSAFHKGGSRKGILYPKPKACWVSPMAKVPAESPTLPPTFPSSPGLGSKRSLEEEGAAHSGKRLRAVSPFLKEADAKKCGAKPAGSGLVSCLLGPALGPVPPEAYRGTMLHCPLNFTGTPGPLKGQAALPFSPLVIPAFPAHFLATAGPSPMAAGLMHFPPTSFDSALRHRLCPASSAWHAPPVTTYAAPHFFHLNTKL

SEQ ID NO: 919283 - protein, 627 aa, Homo sapiens; identical to SEQ ID NO: 919282

SEQ ID NO: 919284 - protein, 542 aa, Homo sapiens
MALGERIGWPLLEPQSSCQTAVLRVPARAAGAARTPPPGGARRPRPHEVPLQVTGRRLWKNVYDELGGSPGSTSAATCTRRHYERLVLPYVRHLKGEDDKPLPTSKPRKQYKMAKENRGDDGATERPKKAKEERRMDQMMPGKTKADAADPAPLPSQEPPRNSTEQQGLASGSSVSFVGASGCPEAYKRLLSSFYCKGTHGIMSPLAKKKLLAQVSKVEALQCQEEGCRHGAEPQASPAVHLPESPQSPKGLTENSRHRLTPQEGLQAPGGSLREEAQAGPCPAAPIFKGCFYTHPTEVLKPVSQHPRDFFSRLKDGVLLGPPGKEGLSVKEPQLVWGGDANRPSAFHKGGSRKGILYPKPKACWVSPMAKVPAESPTLPPTFPSSPGLGSKRSLEEEGAAHSGKRLRAVSPFLKEADAKKCGAKPAGSGLVSCLLGPALGPVPPEAYRGTMLHCPLNFTGTPGPLKGQAALPFSPLVIPAFPAHFLATAGPSPMAAGLMHFPPTSFDSALRHRLCPASSAWHAPPVTTYAAPHFFHLNTKL

SEQ ID NO: 919285 - protein, 430 aa, Homo sapiens
MAKENRGDDGATERPKKAKEERRMDQMMPGKTKADAADPAPLPSQEPPRNSTEQQGLASGSSVSFVGASGCPEAYKRLLSSFYCKGTHGIMSPLAKKKLLAQVSKVEALQCQEEGCRHGAEPQASPAVHLPESPQSPKGLTENSRHRLTPQEGLQAPGGSLREEAQAGPCPAAPIFKGCFYTHPTEVLKPVSQHPRDFFSRLKDGVLLGPPGKEGLSVKEPQLVWGGDANRPSAFHKGGSRKGILYPKPKACWVSPMAKVPAESPTLPPTFPSSPGLGSKRSLEEEGAAHSGKRLRAVSPFLKEADAKKCGAKPAGSGLVSCLLGPALGPVPPEAYRGTMLHCPLNFTGTPGPLKGQAALPFSPLVIPAFPAHFLATAGPSPMAAGLMHFPPTSFDSALRHRLCPASSAWHAPPVTTYAAPHFFHLNTKL

SEQ ID NO: 919286 - protein, 622 aa, Homo sapiens
  misc_feature (5)..(5): Xaa can be any naturally occurring amino acid
  misc_feature (7)..(7): Xaa can be any naturally occurring amino acid
  misc_feature (14)..(14): Xaa can be any naturally occurring amino acid
MADTXLXTQRVVFXNTAVSDSDDSARQVRAARDSRHAACQGQSSQEVSLTTASPTAAADGIRTHLAGGDSPEAGGEREEEQEREEEQAFLVSLYKFMKERHTPIERVPHLGFKQINLWKIYKAVEKLGAYELVTGRRLWKNVYDELGGSPGSTSAATCTRRHYERLVLPYVRHLKGEDDKPLPTSKPRKQYKMAKENRGDDGATERPKKAKEERRMDQMMPGKTKADAADPAPLPSQEPPRNSTEQQGLASGSSVSFVGASGCPEAYKRLLSSFYCKGTHGIMSPLAKKKLLAQVSKVEALQCQEEGCRHGAEPQASPAVHLPESPQSPKGLTENSRHRLTPQEGLQAPGGSLREEAQAGPCPAAPIFKGCFYTHPTEVLKPVSQHPRDFFSRLKDGVLLGPPGKEGLSVKEPQLVWGGDANRPSAFHKGGSRKGILYPKPKACWVSPMAKVPAESPTLPPTFPSSPGLGSKRSLEEEGAAHSGKRLRAVSPFLKEADAKKCGAKPAGSGLVSCLLGPALGPVPPEAYRGTMLHCPLNFTGTPGPLKGQAALPFSPLVIPAFPAHFLATAGPSPMAAGLMHFPPTSFDSALRHRLCPASSAWHAPPVTTYAAPHFFHLNTKL

SEQ ID NO: 919287 - protein, 541 aa, Homo sapiens
RRAAPRASISESAGSGQPRAEGLGAGAAGPLRAMAAPVKGNRKQSTEGDALDPPASPKPAGKQNGIQNPISLEDSPEAGGEREEEQEREEEQAFLVSLYKFMKERHTPIERVPHLGFKQINLWKIYKAVEKLGAYELVTGRRLWKNVYDELGGSPGSTSAATCTRRHYERLVLPYVRHLKGEDDKPLPTSKPRKQYKMAKENRGDDGATERPKKAKEERRMDQMMPGKTKADAADPAPLPSQEPPRNSTEQQGLASGSSVSFVGASGCPEAYKRLLSSFYCKGTHGIMSPLAKKKLLAQVSKVEALQCQEEGCRHGAEPQASPAVHLPESPQSPKGLTENSRHRLTPQEGLQAPGGSLREEAQAGPCPAAPIFKGCFYTHPTEVLKPVSQHPRDFFSRLKDGVLLGPPGKEGLSVKEPQLVWGGDANRPSAFHKGGSRKGILYPKPKACWVSPMAKVPAESPTLPPTFPSSPGLGSKRSLEEEGAAHSGKRLRAVSPFLKEADAKKCGANLQGPAWSPAFWAQPWGLCPQRPTGAPCCTAR

SEQ ID NO: 919288 - protein, 200 aa, Homo sapiens
MDIPEPAAPVKGNRKQSTEGDALDPPASPKPAGKQNGIQNPISLEDSPEAGGEREEEQEREEEQAFLVSLYKFMKERHTPIERVPHLGFKQINLWKIYKAVEKLGAYELVRKAPPSPCQTAYPWGEPAALSLPLDRGRARIPSPTPASLICLARTTSHNLCSAPLLPPQHQAVGQPMVLCTLWSRQGPTTGRYCCQGALN

SEQ ID NO: 919289 - protein, 88 aa, Homo sapiens
MMPGKTKADAADPAPLPSQEPPRNSTEQQGLASGSSVSFVGASGCPEAYKRLLSSFYCKGTHGIMSPLAKKKLLAQVSKVEALQCQEE

SEQ ID NO: 919290 - protein, 430 aa, Homo sapiens; identical to SEQ ID NO: 919285

SEQ ID NO: 919291 - protein, 542 aa, Homo sapiens; identical to SEQ ID NO: 919284

SEQ ID NO: 919292 - protein, 754 aa, Homo sapiens
RRAAPRASISESAGSGQPRAEGLGAGAAGPLRAMAAPVKGNRKQSTEGDALDPPASPKPAGKQNGIQNPISLEDSPEAGGEREEEQEREEEQAFLVSLYKFMKERHTPIERVPHLGFKQINLWKIYKAVEKLGAYELVRKAPPSPCQTAYPWGEPAALSLPLDRGRARIPSPTPASLPPCLPRWYSAAQSSFSAFPICSARPVLGKLLGPAVHGPRRENRLAAAGAAEQLPNCSPSSPCEGGRSCKDPAARGRPPARPHEVPLQVTGRRLWKNVYDELGGSPGSTSAATCTRRHYERLVLPYVRHLKGEDDKPLPTSKPRKQYKMAKENRGDDGATERPKKAKEERRMDQMMPGKTKADAADPAPLPSQEPPRNSTEQQGLASGSSVSFVGASGCPEAYKRLLSSFYCKGTHGIMSPLAKKKLLAQVSKVEALQCQEEGCRHGAEPQASPAVHLPESPQSPKGLTENSRHRLTPQEGLQAPGGSLREEAQAGPCPAAPIFKGCFYTHPTEVLKPVSQHPRDFFSRLKDGVLLGPPGKEGLSVKEPQLVWGGDANRPSAFHKGGSRKGILYPKPKACWVSPMAKVPAESPTLPPTFPSSPGLGSKRSLEEEGAAHSGKRLRAVSPFLKEADAKKCGAKPAGSGLVSCLLGPALGPVPPEAYRGTMLHCPLNFTGTPGPLKGQAALPFSPLVIPAFPAHFLATAGPSPMAAGLMHFPPTSFDSALRHRLCPASSAWHAPPVTTYAAPHFFHLNTKL

SEQ ID NO: 919293 - protein, 470 aa, Homo sapiens
RRAAPRASISESAGSGQPRAEGLGAGAAGPLRAMAAPVKGNRKQSTEGDALDPPASPKPAGKQNGIQNPISLEDSPEAGGEREEEQEREEEQAFLVSLYKFMKERHTPIERVPHLGFKQINLWKIYKAVEKLGAYELVTGRRLWKNVYDELGGSPGSTSAATCTRRHYERLVLPYVRHLKGEDDKPLPTSKPRKQYKMAKENRGDDGATERPKKAKEERRMDQMMPGKTKADAADPAPLPSQEPPRNSTEQQGLASGSSVSFVGASGCPEAYKRLLSSFYCKGTHGIMSPLAKKKLLAQVSKVEALQCQEEGCRHGAEPQASPAVHLPESPQSPKGLTENSRHRLTPQEGLQAPGGSLREEAQAGPCPAAPIFKGCFYTHPTEVLKPVSQHPRDFFSRLKDGVLLGPPGKEGLSVKEPQLVWGGDANRPSAFHKGGSRKGILYPKPKACWVSPMAKVPAESPTAPAHLPQ

SEQ ID NO: 919294 - protein, 501 aa, Homo sapiens
MGVQIQKLLQDFFNGKELNKSISPNEAVAYGAAVQAAILSGNKSENAQDLLLFRQTFTTYSDRQPDVLIQVYEGEHVMTKDSNLLGKFQLTGIPLALQGVPHIEVTFDIDANGIFSVSAVHKKLALSLECVKIDIPGEGNLGGSLSSKGMEADERSWRNENGEKSSMNMEIGHPHEGKDDLGDKRVIMGTKFPMELGIRVGLGKEDSRCGESPVVSNKCEGRMAPPETKFPLSKGLEMGLERQNISRTVMQRGSLGVDSVSASQGTKPSLLPGRMGLENESLLAGYTHERIIQPPLGRVCGSSQAAGSRRAPLASGPEGVEELVGKPAFVMEPRQEMEKESTCVLMKPNTEIKLPVEVDIGLTQAEGPDETKNTEPQMGLVIEPPQCQFAQQHEQRKEAGNIESGVEPPDRIRPIYSGKFFDRTPCWPSSVSYLFFQQRLVVAIVPEYSAKDVVNPPKSYEEVFKEGNEGHDLYVVSHNDYYAGKCPPMQNGPEDMGLSDL

SEQ ID NO: 919295 - protein, 501 aa, Homo sapiens; identical to SEQ ID NO: 919294

SEQ ID NO: 919296 - protein, 150 aa, Homo sapiens
MCGTAGGKRGAAVQQRHWHICMPEKEWVDKNCPYIWSLGNSHPEAHSFPEQKINKEDGQLRAEHGSSSTPILFHPEQLPVGICLTITTLTKPFNEQKAITLKTRPSPSVLLNDDEHTACRLNLEEQGQSHWDLESKLGQLLLFPPPSKLP

SEQ ID NO: 919297 - protein, 840 aa, Homo sapiens
MPQMGLGQELSHIFLLSAVGGGFYGGISLGALSMTSYISVERDFHNKRSLGDAVSAAGKEALPSWLHWDSQSHTLEGLPLDTDKGVHYISVSATRLGANGSHIPQTSSVFSIEVYPEDHSELQSVRTASPDPGEVVSSACAADEPVTVLTVILDADLTKMTPKQRIDLLHRMRSFSEVELHNMKLVPVVNNRLFDMSAFMAGPGNAKKNSVPDIHGVEAPAREGAMSAQLGYPVVGWHIANKKPPLPKRVRRQIHATPTPVTAIGPPTTAIQEPPSRIVPTPTSPAIAPPTKTMAPPVRDPVPGKPTVTIRTRGAIIQTPTLGPIQPTRVSEAGTTVPGQIRPTMTIPGYVEPTAVATPPTTTTKKPRVSTPKPATPSTDSTTTTTRRPTKKPRTPRPVPRVTTKVSITRLETASPPTRIRTTTSGVPRGGEPNQRPELKNHIDRVDAWVGTYFEVKIPSDTFYDHEDTTTDKLKLTLKLREQQLVGEKSWVQFNSNSQLMYGLPDSSHVGKHEYFMHATDKGGLSAVDAFEIHVHRRPQGDRAPARFKAKFVGDPALVLNDIHKKIALVKKLAFAFGDRNCSTITLQNITRGSIVVEWTNNTLPLEPCPKEQIAGLSRRIAEDDGKPRPAFSNALEPDFKATSITVTGSGSCRHLQFIPVVPPRRVPSEAPPTEVPDRDPEKSSEDDVYLHTVIPAVVVAAILLIAGIIAMICYRKKRKGKLTLEDQATFIKKGVPIIFADELDDSKPPPSSSMPLILQEEKAPLPPPEYPNQSVPETTPLNQDTMGEYTPLRDEDPNAPPYQPPPPFTAPMEGKGSRPKNMTPYRQCRAAPWLSAFCL

SEQ ID NO: 919298 - protein, 149 aa, Homo sapiens
ALFPTMAVPRKPAAGSLSRGSAGCSFSGLLGWCTCPCLQNGPLCMAGICDWGRKPSSPMSVTLGQLSVSCLSSSAHLQSVSRFSLAGLAFRSSSGRHSCPRIYSWSGPDWTQSPKGSPRELREKCLIVTWSQNNISHNAIVPYTTHFMY

SEQ ID NO: 919299 - protein, 202 aa, Homo sapiens
MGSIIIHQCHTVQAGFTEASVESVPALLSSLVLNGLSTAVMQKQGCWNGDRSPSADCHWLYDSGECGGFNAGRNMELLGSEGRPVGLVSEVDMDRKQLERQGAEVTQKVDFPPQMSLTMDWDMNGSRAPFQSPQRGGTFARASLSCVLWMLGYEGGMWYFRGYNDDQELIPLFTEGLCTYISKAKQIARNTEMEKPNAAGRR

SEQ ID NO: 919300 - protein, 147 aa, Homo sapiens
MGGCMHSTQDKSLHLEGDPNPSAAPTSTCAPRKMPKRISISKQLASVKALRKCSDLEKAIATTALIFRNSSDSDGKLEKAIAKDLLQTQFRNFAEGQETKPKYREILSELDEHTENKLDFEDFMILLLSITVMSDLLQNIRNVKIMK

SEQ ID NO: 919301 - protein, 664 aa, Homo sapiens
MTALYAFHSVLGSKEILFAHLSRVLALRYSWSSCKFTTKLSGRYRDFPCIAYPYRAKISHQSGHVGHEVHDLVAVAKFIAIPRNDLDKVVVEGNASPNIEGGRVRVAVEVGGDSLVLSVAQDALEGALRCLLHHLLDVIIFGRFFQMAGQVNDRHLGSGDTEGHATNEAWKDFHGSLLRFYENGELCDVTLKVELVARACCEYMKLHFHPSNCLAVRAFAESHNRIDLMDMADQYACDHFTEVVECEDFVSVSPQHLHKLLSSSDLNIENEKQVYNAAIKWLLANPQHHSKWLDETLAQVRLPLLPVDFLMGVVAKEQIVKQNLKCRDLLDEARNYHLHLSSRAVPDFEYSIRTTPRKHTAGVLFCVGGRGGSGDPFRSIECYSINKNSWFFGPEMNSRRRHVGVISVEGKVYAVGGHDGNEHLGSMEMFDPLTNKWMMKASMNTKRRGIALASLGGPIYAIGGLDDNTCFNDVERYDIESDQWSTVAPMNTPRGGVGSVALVNHVYAVGGNDGMASLSSVERYDPHLDKWIEVKEMGQRRAGNGVSKLHGCLYVVGGFDDNSPLSSVERYDPRSNKWDYVAALTTPRGGVGIATVMGKIFAVGGHNGNAYLNTVEAFDPVLNRWELVGSVSHCRAGAGVAVCSCLTSQIRDVGHGSNNVVDCM

SEQ ID NO: 919302 - protein, 539 aa, Homo sapiens
MSSKQARNHITKGKRQQQHQQIKNRSSISDGDGEDSFIFEANEAWKDFHGSLLRFYENGELCDVTLKVELVARACCEYMKLHFHPSNCLAVRAFAESHNRIDLMDMADQYACDHFTEVVECEDFVSVSPQHLHKLLSSSDLNIENEKQVYNAAIKWLLANPQHHSKWLDETLAQVRLPLLPVDFLMGVVAKEQIVKQNLKCRDLLDEARNYHLHLSSRAVPDFEYSIRTTPRKHTAGVLFCVGGRGGSGDPFRSIECYSINKNSWFFGPEMNSRRRHVGVISVEGKVYAVGGHDGNEHLGSMEMFDPLTNKWMMKASMNTKRRGIALASLGGPIYAIGGLDDNTCFNDVERYDIESDQWSTVAPMNTPRGGVGSVALVNHVYAVGGNDGMASLSSVERYDPHLDKWIEVKEMGQRRAGNGVSKLHGCLYVVGGFDDNSPLSSVERYDPRSNKWDYVAALTTPRGGVGIATVMGKIFAVGGHNGNAYLNTVEAFDPVLNRWELVGSVSHCRAGAGVAVCSCLTSQIRDVGHGSNNVVDCM

SEQ ID NO: 919303 - protein, 539 aa, Homo sapiens; identical to SEQ ID NO: 919302

SEQ ID NO: 919304 - protein, 132 aa, Homo sapiens
MASDSMSSKQARNHITKGKRQQQHQQIKNRSSISDGDGEDSFIFEANEAWKDFHGSLLRFYENGELCDVTLKVGSKLISCHKLVLACVIPYFRAMFLSEMAEAKQTLIEIRDFDGDAIEDLVKFVYSSRLTL

SEQ ID NO: 919305 - protein, 269 aa, Homo sapiens [sequence omitted]

SEQ ID NO: 919306 - protein, 270 aa, Homo sapiens
MSQEKDFHKHEHTGNQHYQFPGLCWYCEVIFETWKYYDRVHLSKWRRQLWPGGVVASSRSCVSQSDTAEKHIRQGSFHYLTLPLFLWVPLMRGQCLLVAPQGNLSGRGFCVSIVSSSPGDSSGSQGPGHVRGTSVARQCAQRRGPGAWFVYRFGGFSIAPAFWDCFPKTLLQSTVVKNLLSEGRTDYTGLKEANTLKAECAELPCRCQGEEKAEEPQRKLHCHDVILWTESSILLLCKCCSLTWGQARKNAASPLWSDTDCMDHQQTHFM

SEQ ID NO: 919307 - protein, 122 aa, Homo sapiens
SALRNCMDELRVPMLLSFSDTFIPESLLRQSSLRRCLRMGQVAKSQHFPLITYCKDQQFAIPGHRQHAFGLQWPIITPATDYSCLLLGPPTSSSVTKPKAVLRALCKITWQYLLKLNTHIRI

SEQ ID NO: 919308 - protein, 180 aa, Homo sapiens
HLLHGHWAVKDLDTEKYFHLVLPTDELAEPKKSHRQSHRKKVLPEIYLTRLLSTKGTLQKFLDDLFKAILSIREDKPPLAVKYFFDFLEEQAEKRGISDPDTLHIWKTNSLPLRFWVNILKNPQFVFDIDKTDHIDACLSVIAQAFIDACSISDLQLGKDSPTTSSSTPWSKCRDPLERH

SEQ ID NO: 919309 - protein, 91 aa, Homo sapiens
PDLPLQLPAALFVFCTKSRRAERYWQKTLLQMEEMESQIREEIRKGFAELQTDMTDLTKELNRSQGIPFLEYKHFVTRTFFPKVSPSLSLP

SEQ ID NO: 919310 - protein, 1984 aa, Homo sapiens
GLRGEAEPGPGAGAGGGWRGQEAPRGPGPPPASRPLRAPGSRPALVPCNSRAAQPAHARMALRAAGGAPFERPGAAASPPPFQTPPRCPVPLLLLLLLGAARAGALEIQRRFPSPTPTNNFALDGAAGTVYLAAVNRLYQLSGANLSLEAEAAVGPVPDSPLCHAPQLPQASCEHPRRLTDNYNKILQLDPGQGLVVVCGSIYQGFCQLRRRGNISAVAVRFPPAAPPAEPVTVFPSMLNVAANHPNASTVGLVLPPAAGAGGSRLLVGATYTGYGSSFFPRNRSLEDHRFENTPEIAIRSLDTRGDLAKLFTFDLNPSDDNILKIKQGAKEQHKLGFVSAFLHPSDPPPGAQSYAYLALNSEARAGDKESQARSLLARICLPHGAGGDAKKLTESYIQLGLQCAGGAGRGDLYSRLVSVFPARERLFAVFERPQGSPAARAAPAALCAFRFADVRAAIRAARTACFVEPAPDVVAVLDSVVQGTGPACERKLNIQLQPEQLDCGAAHLQHPLSILQPLKATPVFRAPGLTSVAVASVNNYTAVFLGTVNGRLLKINLNESMQVVSRRVVTVAYGEPVHHVMQFDPADSGYLYLMTSHQMARVKVAACNVHSTCGDCVGAADAYCGWCALETRCTLQQDCTNSSQQHFWTSASEGPSRCPAMTVLPSEIDVRQEYPGMILQISGSLPSLSGMEMACDYGNNIRTVARVPGPAFGHQIAYCNLLPRDQFPPFPPNQDHVTVEMSVRVNGRNIVKANFTIYDCSRTAQVYPHTACTSCLSAQWPCFWCSQQHSCVSNQSRCEASPNPTSPQDCPRTLLSPLAPVPTGGSQNILVPLANTAFFQGAALECSFGLEEIFEAVWVNESVVRCDQVVLHTTRKSQVFPLSLQLKGRPARFLDSPEPMTVMVYNCAMGSPDCSQCLGREDLGHLCVWSDGCRLRGPLQPMAGTCPAPEIRAIEPLSGPLDGGTLLTIRGRNLGRRLSDVAHGVWIGGVACEPLPDRYTVSEEIVCVTGPAPGPLSGVVTVNASKEGKSRDRFSYVLPLVHSLEPTMGPKAGGTRITIHGNDLHVGSELQVLVNDTDPCTELMRTDTSIACTMPEGALPAPVPVCVRFERRGCVHGNLTFWYMQNPVITAISPRRSPVSGGRTITVAGERFHMVQNVSMAVHHIGREPTLCKVLNSTLITCPSPGALSNASAPVDFFINGRAYADEVAVAEELLDPEEAQRGSRFRLDYLPNPQFSTAKREKWIKHHPGEPLTLVIHKEQDSLGLQSHEYRVKIGQVSCDIQIVSDRIIHCSVNESLGAAVGQLPITIQVGNFNQTIATLQLGGSETAIIVSIVICSVLLLLSVVALFVFCTKSRRAERYWQKTLLQMEEMESQIREEIRKGFAELQTDMTDLTKELNRSQGIPFLEYKHFVTRTFFPKCSSLYEERYVLPSQTLNSQGSSQAQETHPLLGEWKIPESCRPNMEEGISLFSSLLNNKHFLIVFVHALEQQKDFAVRDRCSLASLLTIALHGKLEYYTSIMKELLVDLIDASAAKNPKLMLRRTESVVEKMLTNWMSICMYSCLRETVGEPFFLLLCAIKQQINKGSIDAITGKARYTLNEEWLLRENIEAKPRNLNVSFQGCGMDSLSVRAMDTDTLTQVKEKILEAFCKNVPYSQWPRAEDVDLEWFASSTQSYILRDLDDTSVVEDGRKKLNTLAHYKIPEGASLAMSLIDKKDNTLGRVKDLDTEKYFHLVLPTDELAEPKKSHRQSHRKKVLPEIYLTRLLSTKGTLQKFLDDLFKAILSIREDKPPLAVKYFFDFLEEQAEKRGISDPDTLHIWKTNSLPLRFWVNILKNPQFVFDIDKTDHIDACLSVIAQAFIDACSISDLQLGKDSPTNKLLYAKEIPEYRKIVQRYYKQIQDMTPLSEQEMNAHLAEESRKYQNEFNTNVAMAEIYKYAKRYRPQIMAALEANPTARRTQLQHKFEQVVALMEDNIYECYSEA

SEQ ID NO: 919311 - protein, 1984 aa, Homo sapiens; identical to SEQ ID NO: 919310

SEQ ID NO: 919312 - protein, 1942 aa, Homo sapiens
GLRGEAEPGPGAGAGGGWRGQEAPRGPGPPPASRPLRAPGSRPALVPCNSRAAQPAHARMALRAAGGAPFERPGAAASPPPFQTPPRCPVPLLLLLLLGAARAGALEIQRRFPSPTPTNNFALDGAAGTVYLAAVNRLYQLSGANLSLEAEAAVGPVPDSPLCHAPQLPQASCEHPRRLTDNYNKILQLDPGQGLVVVCGSIYQGFCQLRRRGNISAVAVRFPPAAPPAEPVTVFPSMLNVAANHPNASTVGLVLPPAAGAGGSRLLVGATYTGYGSSFFPRNRSLEDHRFENTPEIAIRSLDTRGDLAKLFTFDLNPSDDNILKIKQGAKEQHKLGFVSAFLHPSDPPPGAQSYAYLALNSEARAGDKESQARSLLARICLPHGAGGDAKKLTESYIQLGLQCAGGAGRGDLYSRLVSVFPARERLFAVFERPQGSPAARAAPAALCAFRFADVRAAIRAARTACFVEPAPDVVAVLDSVVQGTGPACERKLNIQLQPEQLDCGAAHLQHPLSILQPLKATPVFRAPGLTSVAVASVNNYTAVFLGTVNGRLLKINLNESMQVVSRRVVTVAYGEPVHHVMQFDPADSGYLYLMTSHQMARVKVAACNVHSTCGDCVGAADAYCGWCALETRQQHFWTSASEGPSRCPAMTVLPSEIDVRQEYPGMILQISGSLPSLSGMEMACDYGNNIRTVARVPGPAFGHQIAYCNLLPRDQFPPFPPNQDHVTVEMSVRVNGRNIVKANFTIYDCSRTAQVYPHTACTSCLSAQWPCFWCSQQHSCVSNQSRCEASPNPTSPQDCPRTLLSPLAPVPTGGSQNILVPLANTAFFQGAALECSFGLEEIFEAVWVNESVVRCDQVVLHTTRKSQVFPLSLQLKGRPARFLDSPEPMTVMVYNCAMGSPDCSQCLGREDLGHLCVWSDGCRLRGPLQPMAGTCPAPEIRAIEPLSGPLDGGTLLTIRGRNLGRRLSDVAHGVWIGGVACEPLPDRYTVSEEIVCVTGPAPGPLSGVVTVNASKEGKSRDRFSYVLPLVHSLEPTMGPKAGGTRITIHGNDLHVGSELQVLVNDTDPCTELMRTDTSIACTMPEGALPAPVPVCVRFERRGCVHGNLTFWYMQNPVITAISPRRSPVSGGRTITVAGERFHMVQNVSMAVHHIGREPTLCKVLNSTLITCPSPGALSNASAPVDFFINGRAYADEVAVAEELLDPEEAQRGSRFRLDYLPNPQFSTAKREKWIKHHPGEPLTLVIHKEQDSLGLQSHEYRVKIGQIQVGNFNQTIATLQLGGSETAIIVSIVICSVLLLLSVVALFVFCTKSRRAERYWQKTLLQMEEMESQIREEIRKGFAELQTDMTDLTKELNRSQGIPFLEYKHFVTRTFFPKCSSLYEERYVLPSQTLNSQGSSQAQETHPLLGEWKIPESCRPNMEEGISLFSSLLNNKHFLIVFVHALEQQKDFAVRDRCSLASLLTIALHGKLEYYTSIMKELLVDLIDASAAKNPKLMLRRTESVVEKMLTNWMSICMYSCLRETVGEPFFLLLCAIKQQINKGSIDAITGKARYTLNEEWLLRENIEAKPRNLNVSFQGCGMDSLSVRAMDTDTLTQVKEKILEAFCKNVPYSQWPRAEDVDLEWFASSTQSYILRDLDDTSVVEDGRKKLNTLAHYKIPEGASLAMSLIDKKDNTLGRVKDLDTEKYFHLVLPTDELAEPKKSHRQSHRKKVLPEIYLTRLLSTKGTLQKFLDDLFKAILSIREDKPPLAVKYFFDFLEEQAEKRGISDPDTLHIWKTNSLPLRFWVNILKNPQFVFDIDKTDHIDACLSVIAQAFIDACSISDLQLGKDSPTNKLLYAKEIPEYRKIVQRYYKQIQDMTPLSEQEMNAHLAEESRKYQNEFNTNVAMAEIYKYAKRYRPQIMAALEANPTARRTQLQHKFEQVVALMEDNIYECYSEA

SEQ ID NO: 919313 - protein, 1303 aa, Homo sapiens
MVEQRPSLSGMEMACDYGNNIRTVARVPGPAFGHQIAYCNLLPRDQFPPFPPNQDHVTVEMSVRVNGRNIVKANFTIYDCSRTAQVYPHTACTSCLSAQWPCFWCSQQHSCVSNQSRCEASPNPTSPQDCPRTLLSPLAPVPTGGSQNILVPLANTAFFQGAALECSFGLEEIFEAVWVNESVVRCDQVVLHTTRKSQVFPLSLQLKGRPARFLDSPEPMTVMVYNCAMGSPDCSQCLGREDLGHLCVWSDGCRLRGPLQPMAGTCPAPEIRAIEPLSGPLDGGTLLTIRGRNLGRRLSDVAHGVWIGGVACEPLPDRYTVSEEIVCVTGPAPGPLSGVVTVNASKEGKSRDRFSYVLPLVHSLEPTMGPKAGGTRITIHGNDLHVGSELQVLVNDTDPCTELMRTDTSIACTMPEGALPAPVPVCVRFERRGCVHGNLTFWYMQNPVITAISPRRSPVSGGRTITVAGERFHMVQNVSMAVHHIGREPTLCKVLNSTLITCPSPGALSNASAPVDFFINGRAYADEVAVAEELLDPEEAQRGSRFRLDYLPNPQFSTAKREKWIKHHPGEPLTLVIHKEQDSLGLQSHEYRVKIGQVSCDIQIVSDRIIHCSVNESLGAAVGQLPITIQVGNFNQTIATLQLGGSETAIIVSIVICSVLLLLSVVALFVFCTKSRRAERYWQKTLLQMEEMESQIREEIRKGFAELQTDMTDLTKELNRSQGIPFLEYKHFVTRTFFPKCSSLYEERYVLPSQTLNSQGSSQAQETHPLLGEWKIPESCRPNMEEGISLFSSLLNNKHFLIVFVHALEQQKDFAVRDRCSLASLLTIALHGKLEYYTSIMKELLVDLIDASAAKNPKLMLRRTESVVEKMLTNWMSICMYSCLRETVGEPFFLLLCAIKQQINKGSIDAITGKARYTLNEEWLLRENIEAKPRNLNVSFQGCGMDSLSVRAMDTDTLTQVKEKILEAFCKNVPYSQWPRAEDVDLEWFASSTQSYILRDLDDTSVVEDGRKKLNTLAHYKIPEGASLAMSLIDKKDNTLGRVKDLDTEKYFHLVLPTDELAEPKKSHRQSHRKKVLPEIYLTRLLSTKGTLQKFLDDLFKAILSIREDKPPLAVKYFFDFLEEQAEKRGISDPDTLHIWKTNSLPLRFWVNILKNPQFVFDIDKTDHIDACLSVIAQAFIDACSISDLQLGKDSPTNKLLYAKEIPEYRKIVQRYYKQIQDMTPLSEQEMNAHLAEESRKYQNEFNTNVAMAEIYKYAKRYRPQIMAALEANPTARRTQLQHKFEQVVALMEDNIYECYSEA

SEQ ID NO: 919314 - protein, 383 aa, Homo sapiens
LRLVGGRVLNGRGRNLNVSFQGCGMDSLSVRAMDTDTLTQVKEKILEAFCKNVPYSQWPRAEDVDLEWFASSTQSYILRDLDDTSVVEDGRKKLNTLAHYKIPEGASLAMSLIDKKDNTLGRVKDLDTEKYFHLVLPTDELAEPKKSHRQSHRKKVLPEIYLTRLLSTKGTLQKFLDDLFKAILSIREDKPPLAVKYFFDFLEEQAEKRGISDPDTLHIWKTNSLPLRFWVNILKNPQFVFDIDKTDHIDACLSVIAQAFIDACSISDLQLGKDSPTNKLLYAKEIPEYRKIVQRYYKQIQDMTPLSEQEMNAHLAEESRKYQNEFNTNVAMAEIYKYAKRYRPQIMAALEANPTARRTQLQHKFEQVVALMEDNIYECYSEA

SEQ ID NO: 919315 - protein, 268 aa, Homo sapiens
SLHPGSLLKDLDTEKYFHLVLPTDELAEPKKSHRQSHRKKVLPEIYLTRLLSTKGTLQKFLDDLFKAILSIREDKPPLAVKYFFDFLEEQAEKRGISDPDTLHIWKTNSLPLRFWVNILKNPQFVFDIDKTDHIDACLSVIAQAFIDACSISDLQLGKDSPTNKLLYAKEIPEYRKIVQRYYKQIQDMTPLSEQEMNAHLAEESRKYQNEFNTNVAMAEIYKYAKRYRPQIMAALEANPTARRTQLQHKFEQVVALMEDNIYECYSEA

SEQ ID NO: 919316 - protein, 199 aa, Homo sapiens
LACSGLLACSGLLLAQFLEEQAEKRGISDPDTLHIWKTNSLPLRFWVNILKNPQFVFDIDKTDHIDACLSVIAQAFIDACSISDLQLGKDSPTNKLLYAKEIPEYRKIVQRYYKQIQDMTPLSEQEMNAHLAEESRKYQNEFNTNVAMAEIYKYAKRYRPQIMAALEANPTARRTQLQHKFEQVVALMEDNIYECYSEA

SEQ ID NO: 919317 - protein, 200 aa, Homo sapiens
LVTRLQPQALEGQSQLSPPQLSLDCFLPHPTLTVFVTLPHSLPLRFWVNILKNPQFVFDIDKTDHIDACLSVIAQAFIDACSISDLQLGKDSPTNKLLYAKEIPEYRKIVQRYYKQIQDMTPLSEQEMNAHLAEESRKYQNEFNTNVAMAEIYKYAKRYRPQIMAALEANPTARRTQLQHKFEQVVALMEDNIYECYSEA

SEQ ID NO: 919318 - protein, 143 aa, Homo sapiens [sequence omitted]

SEQ ID NO: 919319 - protein, 1870 aa, Homo sapiens
GLRGEAEPGPGAGAGGGWRGQEAPRGPGPPPASRPLRAPGSRPALVPCNSRAAQPAHARMALRAAGGAPFERPGAAASPPPFQTPPRCPVPLLLLLLLGAARAGALEIQRRFPSPTPTNNFALDGAAGTVYLAAVNRLYQLSGANLSLEAEAAVGPVPDSPLCHAPQLPQASCEHPRRLTDNYNKILQLDPGQGLVVVCGSIYQGFCQLRRRGNISAVAVRFPPAAPPAEPVTVFPSMLNVAANHPNASTVGLVLPPAAGAGGSRLLVGATYTGYGSSFFPRNRSLEDHRFENTPEIAIRSLDTRGDLAKLFTFDLNPSDDNILKIKQGAKEQHKLGFVSAFLHPSDPPPGAQSYAYLALNSEARAGDKESQARSLLARICLPHGAGGDAKKLTESYIQLGLQCAGGAGRGDLYSRLVSVFPARERLFAVFERPQGSPAARAAPAALCAFRFADVRAAIRAARTACFVEPAPDVVAVLDSVVQGTGPACERKLNIQLQPEQLDCGAAHLQHPLSILQPLKATPVFRAPGLTSVAVASVNNYTAVFLGTVNGRLLKINLNESMQVVSRRVVTVAYGEPVHHVMQFDPADSGYLYLMTSHQMARVKVAACNVHSTCGDCVGAADAYCGWCALETRQQHFWTSASEGPSRCPAMTVLPSEIDVRQEYPGMILQISGSLPSLSGMEMACDYGNNIRTVARVPGPAFGHQIAYCNLLPRDQFPPFPPNQDHVTVEMSVRVNGRNIVKANFTIYDCSRTAQVYPHTACTSCLSAQWPCFWCSQQHSCVSNQSRCEASPNPTSPQDCPRTLLSPLAPVPTGGSQNILVPLANTAFFQGAALECSFGLEEIFEAVWVNESVVRCDQVVLHTTRKSQVFPLSLQLKGRPARFLDSPEPMTVMVYNCAMGSPDCSQCLGREDLGHLCVWSDGCRLRGPLQPMAGTCPAPEIRAIEPLSGPLDGGTLLTIRGRNLGRRLSDVAHGVWIGGVACEPLPDRYTVSEEIVCVTGPAPGPLSGVVTVNASKEGKSRDRFSYVLPLVHSLEPTMGPKAGGTRITIHGNDLHVGSELQVLVNDTDPCTELMRTDTSIACTMPEGALPAPVPVCVRFERRGCVHGNLTFWYMQNPVITAISPRRSPVSGGRTITVAGERFHMVQNVSMAVHHIGREPTLCKVLNSTLITCPSPGALSNASAPVDFFINGRAYADEVAVAEELLDPEEAQRGSRFRLDYLPNPQFSTAKREKWIKHHPGEPLTLVIHKEQDSLGLQSHEYRVKIGQVSCDIQIVSDRIIHCSVNESLGAAVGQLPITIQVGNFNQTIATLQLGGSETAIIVSIVICSVLLLLSVVALFVFCTKSRRAERYWQKTLLQMEEMESQIREEIRKGFAELQTDMTDLTKELNRSQGIPFLEYKHFVTRTFFPKCSSLYEERYVLPSQTLNSQGSSQAQETHPLLGEWKIPESCRPNMEEGISLFSSLLNNKHFLIVFVHALEQQKDFAVRDRCSLASLLTIALHGKLEYYTSIMKELLVDLIDASAAKNPKLMLRRTESVVEKMLTNWMSICMYSCLRETVGEPFFLLLCAIKQQINKGSIDAITGKARYTLNEEWLLRENIEAKPRNLNVSFQGCGMDSLSVRAMDTDTLTQVKEKILEAFCKNVPYSQWPRAEDVDLEWFASSTQSYILRDLDDTSVVEDGRKKLNTLAHYKIPEGASLAMSLIDKKDNTLGRVKDLDTEKYFHLVLPTDELAEPKKSHRQSHRKKVLPEIYLTRLLSTKGTLQKFLDDLFKAILSIREDKPPLAVKYFFDFLEEQAEKRGISDPDTLHIWKTNRWRVGGPCGLHCATGAPVAGGSESSLLASPAWGQALLCHFPAVCSRMSDLASLCFSF

SEQ ID NO: 919320 - protein, 1357 aa, Homo sapiens
GLRGEAEPGPGAGAGGGWRGQEAPRGPGPPPASRPLRAPGSRPALVPCNSRAAQPAHARMALRAAGGAPFERPGAAASPPPFQTPPRCPVPLLLLLLLGAARAGALEIQRRFPSPTPTNNFALDGAAGTVYLAAVNRLYQLSGANLSLEAEAAVGPVPDSPLCHAPQLPQASCEHPRRLTDNYNKILQLDPGQGLVVVCGSIYQGFCQLRRRGNISAVAVRFPPAAPPAEPVTVFPSMLNVAANHPNASTVGLVLPPAAGAGGSRLLVGATYTGYGSSFFPRNRSLEDHRFENTPEIAIRSLDTRGDLAKLFTFDLNPSDDNILKIKQGAKEQHKLGFVSAFLHPSDPPPGAQSYAYLALNSEARAGDKESQARSLLARICLPHGAGGDAKKLTESYIQLGLQCAGGAGRGDLYSRLVSVFPARERLFAVFERPQGSPAARAAPAALCAFRFADVRAAIRAARTACFVEPAPDVVAVLDSVVQGTGPACERKLNIQLQPEQLDCGAAHLQHPLSILQPLKATPVFRAPGLTSVAVASVNNYTAVFLGTVNGRLLKINLNESMQVVSRRVVTVAYGEPVHHVMQFDPADSGYLYLMTSHQMARVKVAACNVHSTCGDCVGAADAYCGWCALETRQQHFWTSASEGPSRCPAMTVLPSEIDVRQEYPGMILQISGSLPSLSGMEMACDYGNNIRTVARVPGPAFGHQIAYCNLLPRDQFPPFPPNQDHVTVEMSVRVNGRNIVKANFTIYDCSRTAQVYPHTACTSCLSAQWPCFWCSQQHSCVSNQSRCEASPNPTSPQDCPRTLLSPLAPVPTGGSQNILVPLANTAFFQGAALECSFGLEEIFEAVWVNESVVRCDQVVLHTTRKSQVFPLSLQLKGRPARFLDSPEPMTVMVYNCAMGSPDCSQCLGREDLGHLCVWSDGCRLRGPLQPMAGTCPAPEIRAIEPLSGPLDGGTLLTIRGRNLGRRLSDVAHGVWIGGVACEPLPDRYTVSEEIVCVTGPAPGPLSGVVTVNASKEGKSRDRFSYVLPLVHSLEPTMGPKAGGTRITIHGNDLHVGSELQVLVNDTDPCTELMRTDTSIACTMPEGALPAPVPVCVRFERRGCVHGNLTFWYMQNPVITAISPRRSPVSGGRTITVAGERFHMVQNVSMAVHHIGREPTLCKVLNSTLITCPSPGALSNASAPVDFFINGRAYADEVAVAEELLDPEEAQRGSRFRLDYLPNPQFSTAKREKWIKHHPGEPLTLVIHKEQDSLGLQSHEYRVKIGQVSCDIQIVSDRIIHCSVNESLGAAVGQLPITIQVGNFNQTIATLQLGGSETAIIVSIVICSVLLLLSVVGKEPHPQDTLEGRLATLPQPL

SEQ ID NO: 919321 - protein, 1418 aa, Homo sapiens
GLRGEAEPGPGAGAGGGWRGQEAPRGPGPPPASRPLRAPGSRPALVPCNSRAAQPAHARMALRAAGGAPFERPGAAASPPPFQTPPRCPVPLLLLLLLGAARAGALEIQRRFPSPTPTNNFALDGAAGTVYLAAVNRLYQLSGANLSLEAEAAVGPVPDSPLCHAPQLPQASCEHPRRLTDNYNKILQLDPGQGLVVVCGSIYQGFCQLRRRGNISAVAVRFPPAAPPAEPVTVFPSMLNVAANHPNASTVGLVLPPAAGAGGSRLLVGATYTGYGSSFFPRNRSLEDHRFENTPEIAIRSLDTRGDLAKLFTFDLNPSDDNILKIKQGAKEQHKLGFVSAFLHPSDPPPGAQSYAYLALNSEARAGDKESQARSLLARICLPHGAGGDAKKLTESYIQLGLQCAGGAGRGDLYSRLVSVFPARERLFAVFERPQGSPAARAAPAALCAFRFADVRAAIRAARTACFVEPAPDVVAVLDSVVQGTGPACERKLNIQLQPEQLDCGAAHLQHPLSILQPLKATPVFRAPGLTSVAVASVNNYTAVFLGTVNGRLLKINLNESMQVVSRRVVTVAYGEPVHHVMQFDPADSGYLYLMTSHQMARVKVAACNVHSTCGDCVGAADAYCGWCALETRQQHFWTSASEGPSRCPAMTVLPSEIDVRQEYPGMILQISGSLPSLSGMEMACDYGNNIRTVARVPGPAFGHQIAYCNLLPRDQFPPFPPNQDHVTVEMSVRVNGRNIVKANFTIYDCSRTAQVYPHTACTSCLSAQWPCFWCSQQHSCVSNQSRCEASPNPTSPQDCPRTLLSPLAPVPTGGSQNILVPLANTAFFQGAALECSFGLEEIFEAVWVNESVVRCDQVVLHTTRKSQVFPLSLQLKGRPARFLDSPEPMTVMVYNCAMGSPDCSQCLGREDLGHLCVWSDGCRLRGPLQPMAGTCPAPEIRAIEPLSGPLDGGTLLTIRGRNLGRRLSDVAHGVWIGGVACEPLPDRYTVSEEIVCVTGPAPGPLSGVVTVNASKEGKSRDRFSYVLPLVHSLEPTMGPKAGGTRITIHGNDLHVGSELQVLVNDTDPCTELMRTDTSIACTMPEGALPAPVPVCVRFERRGCVHGNLTFWYMQNPVITAISPRRSPVSGGRTITVAGERFHMVQNVSMAVHHIGREPTLCKVLNSTLITCPSPGALSNASAPVDFFINGRAYADEVAVAEELLDPEEAQRGSRFRLDYLPNPQFSTAKREKWIKHHPGEPLTLVIHKEQDSLGLQSHEYRVKIGQVSCDIQIVSDRIIHCSVNESLGAAVGQLPITIQVGNFNQTIATLQLGGSETAIIVSIVICSVLLLLSVVALFVFCTKSRRAERYWQKTLLQMEEMESQIREEIRKGFAELQTDMTDLTKELNRSQGIPFLEYKHFVTRTFFPKVSPSLSLP

SEQ ID NO: 919322 - protein, 94 aa, Homo sapiens
MGHAGPSQPTQPVLGLAQSPWGLEGGSWDSGIFFIIKALRTNLKKNGTRGGPVPQFALIVRCIYNLTGRRFYNLLDWEKPWALPQTLNGFAEKY

SEQ ID NO: 919323 - protein, 73 aa, Homo sapiens
RFWVNILKNPQFVFDIDKTDHIDACLSVIAQAFIDACSISDLQLGKVSCSQDQARPMHRARVGCRPWVASSTL

SEQ ID NO: 919324 - protein, 48 aa, Homo sapiens
MAWNGAIPEPGSRVAVGAKDRWLTTAPPLRIVCVTGPAPGPLSGVVTV

SEQ ID NO: 919325 - protein, 135 aa, Homo sapiens
DEAALRPWDPQLLGPKGAVDTCLPLTRCSLASLLTIALHGKLEYYTSIMKELLVDLIDASAAKNPKLMLRRTESVVEKMLTNWMSICMYSCLRVRLPGDRQSPGGGRGRDSAAVTPRPPRPSLAPSGQLCQEGVL

SEQ ID NO: 919326 - protein, 72 aa, Homo sapiens
VSCDIQIVSDRIIHCSVNESLGAAVGQLPITVSGWGAGAGQTWPHPWPICQASAPHPAPEFTERFHAQQLSP

SEQ ID NO: 919327 - protein, 2009 aa, Homo sapiens
GLRGEAEPGPGAGAGGGWRGQEAPRGPGPPPASRPLRAPGSRPALVPCNSRAAQPAHARMALRAAGGAPFERPGAAASPPPFQTPPRCPVPLLLLLLLGAARAGALEIQRRFPSPTPTNNFALDGAAGTVYLAAVNRLYQLSGANLSLEAEAAVGPVPDSPLCHAPQLPQASCEHPRRLTDNYNKILQLDPGQGLVVVCGSIYQGFCQLRRRGNISAVAVRFPPAAPPAEPVTVFPSMLNVAANHPNASTVGLVLPPAAGAGGSRLLVGATYTGYGSSFFPRNRSLEDHRFENTPEIAIRSLDTRGDLAKLFTFDLNPSDDNILKIKQGAKEQHKLGFVSAFLHPSDPPPGAQSYAYLALNSEARAGDKESQARSLLARICLPHGAGGDAKKLTESYIQLGLQCAGGAGRGDLYSRLVSVFPARERLFAVFERPQGSPAARAAPAALCAFRFADVRAAIRAARTACFVEPAPDVVAVLDSVVQGTGPACERKLNIQLQPEQLDCGAAHLQHPLSILQPLKATPVFRAPGLTSVAVASVNNYTAVFLGTVNGRLLKINLNESMQVVSRRVVTVAYGEPVHHVMQFDPADSGYLYLMTSHQMARVKVAACNVHSTCGDCVGAADAYCGWCALETRQQHFWTSASEGPSRCPAMTVLPSEIDVRQEYPGMILQISGSLPSLSGMEMACDYGNNIRTVARVPGPAFGHQIAYCNLLPRDQFPPFPPNQDHVTVEMSVRVNGRNIVKANFTIYDCSRTAQVYPHTACTSCLSAQWPCFWCSQQHSCVSNQSRCEASPNPTSPQDCPRTLLSPLAPVPTGGSQNILVPLANTAFFQGAALECSFGLEEIFEAVWVNESVVRCDQVVLHTTRKSQVFPLSLQLKGRPARFLDSPEPMTVMVYNCAMGSPDCSQCLGREDLGHLCVWSDGCRLRGPLQPMAGTCPAPEIRAIEPLSGPLDGGTLLTIRGRNLGRRLSDVAHGVWIGGVACEPLPDRYTVSEEIVCVTGPAPGPLSGVVTVNASKEGKSRDRFSYVLPLVHSLEPTMGPKAGGTRITIHGNDLHVGSELQVLVNDTDPCTELMRTDTSIACTMPEGALPAPVPVCVRFERRGCVHGNLTFWYMQNPVITAISPRRSPVSGGRTITVAGERFHMVQNVSMAVHHIGREPTLCKVLNSTLITCPSPGALSNASAPVDFFINGRAYADEVAVAEELLDPEEAQRGSRFRLDYLPNPQFSTAKREKWIKHHPGEPLTLVIHKEQDSLGLQSHEYRVKIGQVSCDIQIVSDRIIHCSVNESLGAAVGQLPITIQVGNFNQTIATLQLGGSETAIIVSIVICSVLLLLSVVALFVFCTKSRRAERYWQKTLLQMEEMESQIREEIRKGFAELQTDMTDLTKELNRSQGIPFLEYKHFVTRTFFPKCSSLYEERYVLPSQTLNSQGSSQAQETHPLLGEWKIPESCRPNMEEGISLFSSLLNNKHFLIVFVHALEQQKDFAVRDRCSLASLLTIALHGKLEYYTSIMKELLVDLIDASAAKNPKLMLRRTESVVEKMLTNWMSICMYSCLRETVGEPFFLLLCAIKQQINKGSIDAITGKARYTLNEEWLLRENIEAKPRNLNVSFQGCGMDSLSVRAMDTDTLTQVKEKILEAFCKNVPYSQWPRAEDVDLEWFASSTQSYILRDLDDTSVVEDGRKKLNTLAHYKIPEGASLAMSLIDKKDNTLGRVKDLDTEKYFHLVLPTDELAEPKKSHRQSHRKKVLPEIYLTRLLSTKGTLQKFLDDLFKAILSIREDKPPLAVKYFFDFLEEQAEKRGISDPDTLHIWKTNSLPLRFWVNILKNPQFVFDIDKTDHIDACLSVIAQAFIDACSISDLQLGKDSPTNKLLYAKEIPEYRKIVQRYYKQIQDMTPLSEQEMNAHLAEESRKYQNEFNTNVAMAEIYKYAKRYRPQIMAALEANPTARRTQLQHKFEQVVALMEDNIYECYTSALWLDTLDDEALMGSPAFLGPLGASVFLDKCAEWLEG

SEQ ID NO: 919328 - protein, 1984 aa, Homo sapiens; identical to SEQ ID NO: 919310

SEQ ID NO: 919329 - protein, 554 aa, Homo sapiens
ILRLGQAGWYSAEEAQETYPLLGEWKIPESCRPNMEEGISLFSSLLNNKHFLIVFVHALEQQKDFAVRDRCSLASLLTIALHGKLEYYTSIMKELLVDLIDASAAKNPKLMLRRTESVVEKMLTNWMSICMYSCLRETVGEPFFLLLCAIKQQINKGSIDAITGKARYTLNEEWLLRENIEAKPRNLNVSFQGCGMDSLSVRAMDTDTLTQVKEKILEAFCKNVPYSQWPRAEDVDLEWFASSTQSYILRDLDDTSVVEDGRKKLNTLAHYKIPEGASLAMSLIDKKDNTLGRVKDLDTEKYFHLVLPTDELAEPKKSHRQSHRKKVLPEIYLTRLLSTKGTLQKFLDDLFKAILSIREDKPPLAVKYFFDFLEEQAEKRGISDPDTLHIWKTNSLPLRFWVNILKNPQFVFDIDKTDHIDACLSVIAQAFIDACSISDLQLGKDSPTNKLLYAKEIPEYRKIVQRYYKQIQDMTPLSEQEMNAHLAEESRKYQNEFNTNVAMAEIYKYAKRYRPQIMAALEANPTARRTQLQHKFEQVVALMEDNIYECYSEA

SEQ ID NO: 919330 - protein, 1973 aa, Homo sapiens
GLRGEAEPGPGAGAGGGWRGQEAPRGPGPPPASRPLRAPGSRPALVPCNSRAAQPAHARMALRAAGGAPFERPGAAASPPPFQTPPRCPVPLLLLLLLGAARAGALEIQRRFPSPTPTNNFALDGAAGTVYLAAVNRLYQLSGANLSLEAEAAVGPVPDSPLCHAPQLPQASCEHPRRLTDNYNKILQLDPGQGLVVVCGSIYQGFCQLRRRGNISAVAVRFPPAAPPAEPVTVFPSMLNVAANHPNASTVGLVLPPAAGAGGSRLLVGATYTGYGSSFFPRNRSLEDHRFENTPEIAIRSLDTRGDLAKLFTFDLNPSDDNILKIKQGAKEQHKLGFVSAFLHPSDPPPGAQSYAYLALNSEARAGDKESQARSLLARICLPHGAGGDAKKLTESYIQLGLQCAGGAGRGDLYSRLVSVFPARERLFAVFERPQGSPAARAAPAALCAFRFADVRAAIRAARTACFVEPAPDVVAVLDSVVQGTGPACERKLNIQLQPEQLDCGAAHLQHPLSILQPLKATPVFRAPGLTSVAVASVNNYTAVFLGTVNGRLLKINLNESMQVVSRRVVTVAYGEPVHHVMQFDPADSGYLYLMTSHQMARVKVAACNVHSTCGDCVGAADAYCGWCALETRQQHFWTSASEGPSRCPAMTVLPSEIDVRQEYPGMILQISGSLPSLSGMEMACDYGNNIRTVARVPGPAFGHQIAYCNLLPRDQFPPFPPNQDHVTVEMSVRVNGRNIVKANFTIYDCSRTAQVYPHTACTSCLSAQWPCFWCSQQHSCVSNQSRCEASPNPTSPQDCPRTLLSPLAPVPTGGSQNILVPLANTAFFQGAALECSFGLEEIFEAVWVNESVVRCDQVVLHTTRKSQVFPLSLQLKGRPARFLDSPEPMTVMVYNCAMGSPDCSQCLGREDLGHLCVWSDGCRLRGPLQPMAGTCPAPEIRAIEPLSGPLDGGTLLTIRGRNLGRRLSDVAHGVWIGGVACEPLPDRYTVSEEIVCVTGPAPGPLSGVVTVNASKEGKSRDRFSYVLPLVHSLEPTMGPKAGGTRITIHGNDLHVGSELQVLVNDTDPCTELMRTDTSIACTMPEGALPAPVPVCVRFERRGCVHGNLTFWYMQNPVITAISPRRSPVSGGRTITVAGERFHMVQNVSMAVHHIGREPTLCKVLNSTLITCPSPGALSNASAPVDFFINGRAYADEVAVAEELLDPEEAQRGSRFRLDYLPNPQFSTAKREKWIKHHPGEPLTLVIHKEQDSLGLQSHEYRVKIGQVSCDIQIVSDRIIHCSVNESLGAAVGQLPITIQVGNFNQTIATLQLGGSETAIIVSIVICSVLLLLSVVALFVFCTKSRRAERYWQKTLLQMEEMESQIREEIRKGFAELQTDMTDLTKELNRSQGIPFLEYKHFVTRTFFPKCSSLYEERYVLPSQTLNSQGSSQAQETHPLLGEWKIPESCRPNMEEGISLFSSLLNNKHFLIVFVHALEQQKDFAVRDRCSLASLLTIALHGKLEYYTSIMKELLVDLIDASAAKNPKLMLRRTESVVEKMLTNWMSICMYSCLRETVGEPFFLLLCAIKQQINKGSIDAITGKARYTLNEEWLLRENIEAKPRNLNVSFQGCGMDSLSVRAMDTDTLTQVKEKILEAFCKNVPYSQWPRAEDVDLEWFASSTQSYILRDLDDTSVVEDGRKKLNTLAHYKIPEGASLAMSLIDKKDNTLGRVKDLDTEKYFHLVLPTDELAEPKKSHRQSHRKKVLPEIYLTRLLSTKGTLQKFLDDLFKAILSIREDKPPLAVKYFFDFLEEQAEKRGISDPDTLHIWKTNSLPLRFWVNILKNPQFVFDIDKTDHIDACLSVIAQAFIDACSISDLQLGKDSPTNKLLYAKEIPEYRKIVQRYYKQIQDMTPLSEQEMNAHLAEESRKYQNEFNTNVAMAEIYKYAKRYRPQIMAALEANPTARRTQLQHKFEQVVALMEDNIYECYSEA

SEQ ID NO: 919331 - protein, 788 aa, Homo sapiens
MPTLEDQQLADEVAVAEELLDPEEAQRGSRFRLDYLPNPQFSTAKREKWIKHHPGEPLTLVIHKEQDSLGLQSHEYRVKIGQVSCDIQIVSDRIIHCSVNESLGAAVGQLPITIQVGNFNQTIATLQLGGSETAIIVSIVICSVLLLLSVVALFVFCTKSRRAERYWQKTLLQMEEMESQIREEIRKGFAELQTDMTDLTKELNRSQGIPFLEYKHFVTRTFFPKCSSLYEERYVLPSQTLNSQGSSQAQETHPLLGEWKIPESCRPNMEEGISLFSSLLNNKHFLIVFVHALEQQKDFAVRDRCSLASLLTIALHGKLEYYTSIMKELLVDLIDASAAKNPKLMLRRTESVVEKMLTNWMSICMYSCLRETVGEPFFLLLCAIKQQINKGSIDAITGKARYTLNEEWLLRENIEAKPRNLNVSFQGCGMDSLSVRAMDTDTLTQVKEKILEAFCKNVPYSQWPRAEDVDLEWFASSTQSYILRDLDDTSVVEDGRKKLNTLAHYKIPEGASLAMSLIDKKDNTLGRVKDLDTEKYFHLVLPTDELAEPKKSHRQSHRKKVLPEIYLTRLLSTKGTLQKFLDDLFKAILSIREDKPPLAVKYFFDFLEEQAEKRGISDPDTLHIWKTNSLPLRFWVNILKNPQFVFDIDKTDHIDACLSVIAQAFIDACSISDLQLGKDSPTNKLLYAKEIPEYRKIVQRYYKQIQDMTPLSEQEMNAHLAEESRKYQNEFNTNVAMAEIYKYAKRYRPQIMAALEANPTARRTQLQHKFEQVVALMEDNIYECYSEA

SEQ ID NO: 919332 - protein, 1984 aa, Homo sapiens; identical to SEQ ID NO: 919310

SEQ ID NO: 919333 - protein, 1973 aa, Homo sapiens; identical to SEQ ID NO: 919330

SEQ ID NO: 919334 - protein, 107 aa, Homo sapiens
  misc_feature (12)..(12): Xaa can be any naturally occurring amino acid
SLSLEHKIKAVXYRKIVQRYYKQIQDMTPLSEQEMNAHLAEESRKYQNEFNTNVAMAEIYKYAKRYRPQIMAALEANPTARRTQLQHKFEQVVALMEDNIYECYSEA

SEQ ID NO: 919335 - protein, 1887 aa, Homo sapiens
GLRGEAEPGPGAGAGGGWRGQEAPRGPGPPPASRPLRAPGSRPALVPCNSRAAQPAHARMALRAAGGAPFERPGAAASPPPFQTPPRCPVPLLLLLLLGAARAGALEIQRRFPSPTPTNNFALDGAAGTVYLAAVNRLYQLSGANLSLEAEAAVGPVPDSPLCHAPQLPQASCEHPRRLTDNYNKILQLDPGQGLVVVCGSIYQGFCQLRRRGNISAVAVRFPPAAPPAEPVTVFPSMLNVAANHPNASTVGLVLPPAAGAGGSRLLVGATYTGYGSSFFPRNRSLEDHRFENTPEIAIRSLDTRGDLAKLFTFDLNPSDDNILKIKQGAKEQHKLGFVSAFLHPSDPPPGAQSYAYLALNSEARAGDKESQARSLLARICLPHGAGGDAKKLTESYIQLGLQCAGGAGRGDLYSRLVSVFPARERLFAVFERPQGSPAARAAPAALCAFRFADVRAAIRAARTACFVEPAPDVVAVLDSVVQGTGPACERKLNIQLQPEQLDCGAAHLQHPLSILQPLKATPVFRAPGLTSVAVASVNNYTAVFLGTVNGRLLKINLNESMQVVSRRVVTVAYGEPVHHVMQFDPADSGYLYLMTSHQMARVKVAACNVHSTCGDCVGAADAYCGWCALETRQQHFWTSASEGPSRCPAMTVLPSEIDVRQEYPGMILQISGSLPSLSGMEMACDYGNNIRTVARVPGPAFGHQIAYCNLLPRDQFPPFPPNQDHVTVEMSVRVNGRNIVKANFTIYDCSRTAQVYPHTACTSCLSAQWPCFWCSQQHSCVSNQSRCEASPNPTSPQDCPRTLLSPLAPVPTGGSQNILVPLANTAFFQGAALECSFGLEEIFEAVWVNESVVRCDQVVLHTTRKSQVFPLSLQLKGRPARFLDSPEPMTVMVYNCAMGSPDCSQCLGREDLGHLCVWSDGCRLRGPLQPMAGTCPAPEIRAIEPLSGPLDGGTLLTIRGRNLGRRLSDVAHGVWIGGVACEPLPDRYTVSEEIVCVTGPAPGPLSGVVTVNASKEGKSRDRFSYVLPLVHSLEPTMGPKAGGTRITIHGNDLHVGSELQVLVNDTDPCTELMRTDTSIACTMPEGALPAPVPVCVRFERRGCVHGNLTFWYMQNPVITAISPRRSPVSGGRTITVAGERFHMVQNVSMAVHHIGREPTLCKVLNSTLITCPSPGALSNASAPVDFFINGRAYADEVAVAEELLDPEEAQRGSRFRLDYLPNPQFSTAKREKWIKHHPGEPLTLVIHKEQDSLGLQSHEYRVKIGQVSCDIQIVSDRIIHCSVNESLGAAVGQLPITIQVGNFNQTIATLQLGGSETAIIVSIVICSVLLLLSVVALFVFCTKSRRAERYWQKTLLQMEEMESQIREEIRKGFAELQTDMTDLTKELNRSQGIPFLEYKHFVTRTFFPKCSSLYEERYVLPSQTLNSQGSSQAQETHPLLGEWKIPESCRPNMEEGISLFSSLLNNKHFLIVFVHALEQQKDFAVRDRCSLASLLTIALHGKLEYYTSIMKELLVDLIDASAAKNPKLMLRRTESVVEKMLTNWMSICMYSCLRETVGEPFFLLLCAIKQQINKGSIDAITGKARYTLNEEWLLRENIEAKPRNLNVSFQGCGMDSLSVRAMDTDTLTQVKEKILEAFCKNVPYSQWPRAEDVDLEWFASSTQSYILRDLDDTSVVEDGRKKLNTLAHYKIPEGASLAMSLIDKKDNTLGRVKDLDTEKYFHLVLPTDELAEPKKSHRQSHRKKVLPEIYLTRLLSTKGTLQKFLDDLFKAILSIREDKPPLAVKYFFDFLEEQAEKRGISDPDTLHIWKTNSLPLRFWVNILKNPQFVFDIDKTDHIDACLSVIAQAFIDACSISDLQLGKDSPTNKLLYAKEIPEYRKIVQHWK

SEQ ID NO: 919336 - protein, 1717 aa, Homo sapiens
GLRGEAEPGPGAGAGGGWRGQEAPRGPGPPPASRPLRAPGSRPALVPCNSRAAQPAHARMALRAAGGAPFERPGAAASPPPFQTPPRCPVPLLLLLLLGAARAGALEIQRRFPSPTPTNNFALDGAAGTVYLAAVNRLYQLSGANLSLEAEAAVGPVPDSPLCHAPQLPQASCEHPRRLTDNYNKILQLDPGQGLVVVCGSIYQGFCQLRRRGNISAVAVRFPPAAPPAEPVTVFPSMLNVAANHPNASTVGLVLPPAAGAGGSRLLVGATYTGYGSSFFPRNRSLEDHRFENTPEIAIRSLDTRGDLAKLFTFDLNPSDDNILKIKQGAKEQHKLGFVSAFLHPSDPPPGAQSYAYLALNSEARAGDKESQARSLLARICLPHGAGGDAKKLTESYIQLGLQCAGGAGRGDLYSRLVSVFPARERLFAVFERPQGSPAARAAPAALCAFRFADVRAAIRAARTACFVEPAPDVVAVLDSVVQGTGPACERKLNIQLQPEQLDCGAAHLQHPLSILQPLKATPVFRAPGLTSVAVASVNNYTAVFLGTVNGRLLKINLNESMQVVSRRVVTVAYGEPVHHVMQFDPADSGYLYLMTSHQMARVKVAACNVHSTCGDCVGAADAYCGWCALETRQQHFWTSASEGPSRCPAMTVLPSEIDVRQEYPGMILQISGSLPSLSGMEMACDYGNNIRTVARVPGPAFGHQIAYCNLLPRDQFPPFPPNQDHVTVEMSVRVNGRNIVKANFTIYDCSRTAQVYPHTACTSCLSAQWPCFWCSQQHSCVSNQSRCEASPNPTSPQDCPRTLLSPLAPVPTGGSQNILVPLANTAFFQGAALECSFGLEEIFEAVWVNESVVRCDQVVLHTTRKSQVFPLSLQLKGRPARFLDSPEPMTVMVYNCAMGSPDCSQCLGREDLGHLCVWSDGCRLRGPLQPMAGTCPAPEIRAIEPLSGPLDGGTLLTIRGRNLGRRLSDVAHGVWIGGVACEPLPDRYTVSEEIVCVTGPAPGPLSGVVTVNASKEGKSRDRFSYVLPLVHSLEPTMGPKAGGTRITIHGNDLHVGSELQVLVNDTDPCTELMRTDTSIACTMPEGALPAPVPVCVRFERRGCVHGNLTFWYMQNPVITAISPRRSPVSGGRTITVAGERFHMVQNVSMAVHHIGREPTLCKVLNSTLITCPSPGALSNASAPVDFFINGRAYADEVAVAEELLDPEEAQRGSRFRLDYLPNPQFSTAKREKWIKHHPGEPLTLVIHKEQDSLGLQSHEYRVKIGQVSCDIQIVSDRIIHCSVNESLGAAVGQLPITIQVGNFNQTIATLQLGGSETAIIVSIVICSVLLLLSVVALFVFCTKSRRAERYWQKTLLQMEEMESQIREEIRKGFAELQTDMTDLTKELNRSQGIPFLEYKHFVTRTFFPKCSSLYEERYVLPSQTLNSQGSSQAQETHPLLGEWKIPESCRPNMEEGISLFSSLLNNKHFLIVFVHALEQQKDFAVRDRCSLASLLTIALHGKLEYYTSIMKELLVDLIDASAAKNPKLMLRRTESVVEKMLTNWMSICMYSCLRETVGEPFFLLLCAIKQQINKGSIDAITGKARYTLNEEWLLRENIEAKPRNLNVSFQGCGMDSLSVRAMDTDTLTQVKEKILEAFCKNVPYSQWPRAEDVDLEWFASSTQSYILRDLDDTSVVEDGRKKLNTLAHYKIPEGASLAMSLIDKKDNTLGRVQAGD

SEQ ID NO: 919337 - protein, 1326 aa, Homo sapiens
GLRGEAEPGPGAGAGGGWRGQEAPRGPGPPPASRPLRAPGSRPALVPCNSRAAQPAHARMALRAAGGAPFERPGAAASPPPFQTPPRCPVPLLLLLLLGAARAGALEIQRRFPSPTPTNNFALDGAAGTVYLAAVNRLYQLSGANLSLEAEAAVGPVPDSPLCHAPQLPQASCEHPRRLTDNYNKILQLDPGQGLVVVCGSIYQGFCQLRRRGNISAVAVRFPPAAPPAEPVTVFPSMLNVAANHPNASTVGLVLPPAAGAGGSRLLVGATYTGYGSSFFPRNRSLEDHRFENTPEIAIRSLDTRGDLAKLFTFDLNPSDDNILKIKQGAKEQHKLGFVSAFLHPSDPPPGAQSYAYLALNSEARAGDKESQARSLLARICLPHGAGGDAKKLTESYIQLGLQCAGGAGRGDLYSRLVSVFPARERLFAVFERPQGSPAARAAPAALCAFRFADVRAAIRAARTACFVEPAPDVVAVLDSVVQGTGPACERKLNIQLQPEQLDCGAAHLQHPLSILQPLKATPVFRAPGLTSVAVASVNNYTAVFLGTVNGRLLKINLNESMQVVSRRVVTVAYGEPVHHVMQFDPADSGYLYLMTSHQMARVKVAACNVHSTCGDCVGAADAYCGWCALETRQQHFWTSASEGPSRCPAMTVLPSEIDVRQEYPGMILQISGSLPSLSGMEMACDYGNNIRTVARVPGPAFGHQIAYCNLLPRDQFPPFPPNQDHVTVEMSVRVNGRNIVKANFTIYDCSRTAQVYPHTACTSCLSAQWPCFWCSQQHSCVSNQSRCEASPNPTSPQDCPRTLLSPLAPVPTGGSQNILVPLANTAFFQGAALECSFGLEEIFEAVWVNESVVRCDQVVLHTTRKSQVFPLSLQLKGRPARFLDSPEPMTVMVYNCAMGSPDCSQCLGREDLGHLCVWSDGCRLRGPLQPMAGTCPAPEIRAIEPLSGPLDGGTLLTIRGRNLGRRLSDVAHGVWIGGVACEPLPDRYTVSEEIVCVTGPAPGPLSGVVTVNASKEGKSRDRFSYVLPLVHSLEPTMGPKAGGTRITIHGNDLHVGSELQVLVNDTDPCTELMRTDTSIACTMPEGALPAPVPVCVRFERRGCVHGNLTFWYMQNPVITAISPRRSPVSGGRTITVAGERFHMVQNVSMAVHHIGREPTLCKVLNSTLITCPSPGALSNASAPVDFFINGRAYADEVAVAEELLDPEEAQRGSRFRLDYLPNPQFSTAKREKWIKHHPGEPLTLVIHKEQDSLGLQSHEYRVKIGQIQVGNFNQTIATLQLGGSETAIIVSIVICSVLLLLSVVGKEPHPQDTLEGRLATLPQPL

SEQ ID NO: 919338 - protein, 186 aa, Homo sapiens
GSLCHQLPSPSPAEGHLALPHLMAKDQIAQAGRTRNRKKKLAESFQTYINREEQLALSAYYLTSTKTTSFFILTKSLDWVTAFPLYEETEELTKEGAGSPAPSSSLVHHDDCLEVDFDRQEDVCALLEETVKGSLTLHSVMASFYELNGSLIYSNNILPDMSIVLYNSFIPFGEVLPNPSIKQLKW

SEQ ID NO: 919339 - protein, 154 aa, Homo sapiens
MKLLLLAVEGEEAATDGEGGNQAPTPAGPLPCPHRCSTIRPGMRPGCLLVPCVRVPICNTPQSHSQWVVESPLCAADCARLFHGTCKGSAHHGPPVCADCMAERIDETLKSPMKAQTRSRGGSQLQQLPCPPTHSAPTAEFLRAGCQAMCMQHM

SEQ ID NO: 919340 - protein, 158 aa, Homo sapiens
CTCTRLLMRLSIFSHFCGPFQRYCLYGLGQDPEEFPGLLDRDSCSLHLLSTKQINSLPLLQASWSWEWSDKNTSIATTLRTALGFSQNLLQPLPDYCLCLLNALRLYNHQVAKPARLISFPRAWASPEVPTGGQGLESKTLDVYLMLHCTAAELTFKP

SEQ ID NO: 919341 - protein, 158 aa, Homo sapiens; identical to SEQ ID NO: 919340

SEQ ID NO: 919342 - protein, 918 aa, Homo sapiens
MDMYKIFIDNMVDSSKSSIYYFKLCYSKFCLISSLGKTKYFKSFRCFQDLGFIIKLLNANNFYMTPCGNLEDIQDVSEGVSMPFFDQYLTELTVYCVIISLFEREPEGANSLFEGPGVSRLYSRKSHSFLSQLAFQRYFKYSYYQILSTSARNYLNFPICSLKTSCRLFFKFACGVQIFLCTTLNLFEVVETFLGDPGFSQNVTDKKAKFITGQGRFFWKVTCRKMKAKGLIRDRNCFLTYELVVKKISECFFMSITLQGHPGTCLFIIFLQSMYLEMTLMDGRKWTSSKFSIIDKYFLQNSFNNLAPPSIRHRNFYFLTFSRTLCYQILIPAKTCKRVGSNCFNVHSLITNEIEQFNNNKKKGKPYMANRKNELLMFDENSGVPTVHNNLLNISKEQKKRFETLPTQKIIKFEVMNNLNAMFDHYALYACIKISHVPYKYVQLLCINFKKIRQLKSSHYKSTAPNGHSTNTAPLLKILDDICTLNNEDRPAGIIGLSVTMQCLSYYLVLYYRLVEDKVNMLNGLGWDTTWKKGKDIDFNYDSMYLTNGIIFYNNRSGVVVIYVTPTIRHYATDFCIQLTLNNMKLGALAPHTVENPHAIFESLKLNCYYPTVDLKPSDSINSGLTYFICYIYYILYSYNKRERERERERERERERERERERFEFGERKAMVTFTIYPKKKLLKDKCENVVTCKGLNLASPMSASGSEWKVRMQTTLKEITFQECNVTAQLVHEKAWLEDILFLFVCYRILNGKLNMIREEVIPHIFCILWERITKEAEEVCSGGTMTKHQTESSHVWGDEQRHHFSKHLIILSQYLEAKIILKKNNRKRNTGYTDEKMGFPIFVEGPTSFAMNLQKFQERRLKRKVTGILRTVRYSEETLICKLVEMPVICWELKTLCIQERSLAAVHCCFINQYYI

SEQ ID NO: 919343 - protein, 922 aa, Homo sapiens
MDMYKIFIDNMVDSSKSSIYYFKLCYSKFCLISSLGKTKYFKSFRCFQDLGFIIKLLNANNFYMTPCGNLEDIQDVSEGVSMPFFDQYLTELTVYCVIISLFEREPEGANSLFEGPGVSRLYSRKSHSFLSQLAFQRYFKYSYYQILSTSARNYLNFPICSLKTSCRLFFKFACGVQIFLCTTLNLFEVVETFLGDPGFSQNVTDKKAKFITGQGRFFWKVTCRKMKAKGLIRDRNCFLTYELVVKKISECFFMSITLQGHPGTCLFIIFLQSMYLEMTLMDGRKWTSSKFSIIDKYFLQNSFNNLAPPSIRHRNFYFLTFSRTLCYQILIPAKTCKRVGSNCFNVHSLITNEIEQFNNNKKKGKPYMANRKNELLMFDENSGVPTVHNNLLNISKEQKKRFETLPTQKIIKFEVMNNLNAMFDHYALYACIKISHVPYKYVQLLCINFKKIRQLKSSHYKSTAPNGHSTNTAPLLKILDDICTLNNEDRPAGIIGLSVTMQCLSYYLVLYYRLVEDKVNMLNGLGWDTTWKKGKDIDFNYDSMYLTNGIIFYNNRSGVVVIYVTPTIRHYATDFCIQLTLNNMKLGALAPHTVENPHAIFESLKLNCYYPTVDLKPYCIAEIVDYTYFICYIYYILYSYNKRERERERERERERERERERERFEFGERKAMVTFTIYPKKKLLKDKCENVVTCKGLNLASPMSASGSEWKVRMQTTLKEITFQECNVTAQLVHEKAWLEDILFLFVCYRILNGKLNMIREEVIPHIFCILWERITKEAEEVCSGGTMTKHQTESSHVWGDEQRHHFSKHLIILSQYLEAKIILKKNNRKRNTGYTDEKMGLAELKPLHHSEAGFGITSSYSKQSPLAEPLMSHLLNGYIFFLILPPLNLSISKDLWHPGIMISREKAEKEGDWNIKNCEIF

SEQ ID NO: 919344 - protein, 938 aa, Homo sapiens
MDMYKIFIDNMVDSSKSSIYYFKLCYSKFCLISSLGKTKYFKSFRCFQDLGFIIKLLNANNFYMTPCGNLEDIQDVSEGVSMPFFDQYLTELTVYCVIISLFEREPEGANSLFEGPGVSRLYSRKSHSFLSQLAFQRYFKYSYYQILSTSARNYLNFPICSLKTSCRLFFKFACGVQIFLCTTLNLFEVVETFLGDPGFSQNVTDKKAKFITGQGRFFWKVTCRKMKAKGLIRDRNCFLTYELVVKKISECFFMSITLQGHPGTCLFIIFLQSMYLEMTLMDGRKWTSSKFSIIDKYFLQNSFNNLAPPSIRHRNFYFLTFSRTLCYQILIPAKTCKRVGSNCFNVHSLITNEIEQFNNNKKKGKPYMANRKNELLMFDENSGVPTVHNNLLNISKEQKKRFETLPTQKIIKFEVMNNLNAMFDHYALYACIKISHVPYKYVQLLCINFKKIRQLKSSHYKSTAPNGHSTNTAPLLKILDDICTLNNEDRPAGIIGLSVTMQCLSYYLVLYYRLVEDKVNMLNGLGWDTTWKKGKDIDFNYDSMYLTNGIIFYNNRSGVVVIYVTPTIRHYATDFCIQLTLNNMKLGALAPHTVENPHAIFESLKLNCYYPTVDLKPSDSINSGLTYFICYIYYILYSYNKRERERERERERERERERERERFEFGERKAMVTFTIYPKKKLLKDKCENVVTCKGLNLASPMSASGSEWKVRMQTTLKEITFQECNVTAQLVHEKAWLEDILFLFVCYRILNGKLNMIREEVIPHIFCILWERITKEAEEVCSGGTMTKHQTESSHVWGDEQRHHFSKHLIILSQYLEAKIILKKNNRKRNTGYTDEKMGLAELKPLHHSEAGFGITSSYSKQSPLAEPLMSHLLNGFQERRLKRKVTGILRTVRYSEETLICKLVEMPVICWELKTLCIQERSLAAVHCCFINQYYI

SEQ ID NO: 919345 - protein, 555 aa, Homo sapiens
MNVDAEASMAVISLLFLAVMYVVHHPLMVSDRMDLDTLARSRQLEKRMSEEMRLLEMEFEERKRAAEQRQKAENFWTGDTSSDQLVLGKKDMGWPFQADGQEGPLGWMLGNLWNTGLFCLFLVFELLRQNMQHEPAFDSSSEEEEEEVRVVPVTSYNWLTDFPSQEALDSFYKHYVQNAIRDLPCTCEFVESFVDDLIEACRVLSRQEAHPQLEDCLGIGAAFEKWGTLHETQKFDILVPIVPPQGTMFVLEMRDPALGRRCGCVLVESECVCKREKLLGDVLCLVHHHRDPSAVLGKCSSSIKAALCTGFHLDVCKTVQWFRNMMGNAWALVAHKYDFKLSLPPSTTSCKLRLDYRSGRFLSIHLVLGVQREDTLVYLVSQAPDQEQLTSVDWPESFVACEHLFLKLVGRFAPENTCHLKCLQIILSLRQHQSLPHGASRPILTSYHFKTALMHLLLRLPLTDWAHNMLSQRLQDILWFLGRGLQQRSLHHFLIGNNFLPLTIPIPKTFRNAEPVNLFQHLVLNPKAHSQAVEEFQNLLTQVKTLPHAPLAAAP

SEQ ID NO: 919346 - protein, 589 aa, Homo sapiens
PGQRKGVTQAGSGLSGYKREPLGSAGHIWCPWLTEESDAEASMAVISLLFLAVMYVVHHPLMVSDRMDLDTLARSRQLEKRMSEEMRLLEMEFEERKRAAEQRQKAENFWTGDTSSDQLVLGKKDMGWPFQADGQEGPLGWMLGNLWNTGLFCLFLVFELLRQNMQHEPAFDSSSEEEEEEVRVVPVTSYNWLTDFPSQEALDSFYKHYVQNAIRDLPCTCEFVESFVDDLIEACRVLSRQEAHPQLEDCLGIGAAFEKWGTLHETQKFDILVPIVPPQGTMFVLEMRDPALGRRCGCVLVESECVCKREKLLGDVLCLVHHHRDPSAVLGKCSSSIKAALCTGFHLDVCKTVQWFRNMMGNAWALVAHKYDFKLSLPPSTTSCKLRLDYRSGRFLSIHLVLGVQREDTLVYLVSQAPDQEQLTSVDWPESFVACEHLFLKLVGRFAPENTCHLKCLQIILSLRQHQSLPHGASRPILTSYHFKTALMHLLLRLPLTDWAHNMLSQRLQDILWFLGRGLQQRSLHHFLIGNNFLPLTIPIPKTFRNAEPVNLFQHLVLNPKAHSQAVEEFQNLLTQVKTLPHAPLAAAP

SEQ ID NO: 919347 - protein, 563 aa, Homo sapiens
MTTDSYSPTSPDAEASMAVISLLFLAVMYVVHHPLMVSDRMDLDTLARSRQLEKRMSEEMRLLEMEFEERKRAAEQRQKAENFWTGDTSSDQLVLGKKDMGWPFQADGQEGPLGWMLGNLWNTGLFCLFLVFELLRQNMQHEPAFDSSSEEEEEEVRVVPVTSYNWLTDFPSQEALDSFYKHYVQNAIRDLPCTCEFVESFVDDLIEACRVLSRQEAHPQLEDCLGIGAAFEKWGTLHETQKFDILVPIVPPQGTMFVLEMRDPALGRRCGCVLVESECVCKREKLLGDVLCLVHHHRDPSAVLGKCSSSIKAALCTGFHLDVCKTVQWFRNMMGNAWALVAHKYDFKLSLPPSTTSCKLRLDYRSGRFLSIHLVLGVQREDTLVYLVSQAPDQEQLTSVDWPESFVACEHLFLKLVGRFAPENTCHLKCLQIILSLRQHQSLPHGASRPILTSYHFKTALMHLLLRLPLTDWAHNMLSQRLQDILWFLGRGLQQRSLHHFLIGNNFLPLTIPIPKTFRNAEPVNLFQHLVLNPKAHSQAVEEFQNLLTQVKTLPHAPLAAAP

SEQ ID NO: 919348 - protein, 154 aa, Homo sapiens
MLHSLQQQPDLEQRRQESGQPLTECSQEKEMVLPGTAPPSIHRQWLEVRSTRLTTGLSPVKYKSQFSYQRELNLDLYEDQRSQLYQEAISINIHRTVCEQLAGRSQRWLQGTDKKCHITSALHGTEKYLWKNMDFDDSQLKSDSEELDFVGEKH

SEQ ID NO: 919349 - protein, 748 aa, Homo sapiens
SSARRWESRAEPGLSSGSRRPGQRRPGGARAPHRTIRLGVERSRSPTRSPGPTRHRRFLSTHGDQETLKEFGVSGAGKSRPTPRSFLGVRLPHCHSQHSPPHRDPASSPASLGVFFWELDRVPGRGRRLCGGVCSRLTCGGFSAPRTPGEARRTRLERVTPIPAPGPRLATSLMGNQLDRITHLNYSELPTGDPSGIEKDELRVGVAYFFSDDEEDLDERGQPDKFGVKAPPGCTPCPESPSRHHHHLLHQLVLNETQFSAFRGQECIFSKVSGGPQGADLSVYAVTALPALCEPGDLLELLWLQPAPEPPAPAPHWAVYVGGGQIIHLHQGEIRQDSLYEAGAANVGRVVNSWYRYRPLVAELVVQNACGHLGLKSEEICWTNSESFAAWCRFGKREFKAGGEVPAGTQPPQQQYYLKVHLGENKVHTARFHSLEDLIREKRRIDASGRLRVLQELADLVDDKESRLGAAGPSASPAPRSLPFPAPGLRSQRFSTSAPPRHARPPPVARARAAPPHPQASGRKSQELPQGRKGAAASAWLTATAVVTVLGDPACAFPLRCKPGTGKGLGEKGHGLPRESMASDCGPTRKQPSSQKGPSPPRACAHRPVGGENWSLQGTVQLLCGCVPRSQDFQEIEPVPCALGNNSPRQHFGIPGYPEAARDFSSSPAPGLLTLCSRLRAKPDSVCLRFFPPWEANATPTRLCLRVSLAGRREAGPVPGGRWRCEFGEDSRPRPRQGARSFTWCLGT

SEQ ID NO: 919350 - protein, 133 aa, Homo sapiens
CSSHIPSVLSKTSLNQNPKQVFPRSDTSMQTPHLIDATCLFMCTAIYNHLVTNTLLSSGLVISAFTVSTAIGDMALAITKTLFQDIGTGKCFVMKMPKAIATKAKIDKWDLIKELLEEPRWPNRNSSGLQLPA

SEQ ID NO: 919351 - protein, 141 aa, Homo sapiens
MGFPLDPLEEAVCPFTELKRCARSSTALFRAGRQEHLSQLKLYPQPPLPPGALSEGDGSFIYKPLTGTAAFLSEMPFPERRNLEKKGVGPSVHFLVKSSFSKGTCLHLEGGKLHDLQGRSPLAYVQVFMLSSENHLVPCFY

SEQ ID NO: 919352 - protein, 141 aa, Homo sapiens; identical to SEQ ID NO: 919351

SEQ ID NO: 919353 - protein, 97 aa, Homo sapiens
MRRLRHREVRGPVLGHTATGGPQNGTSGCTTAPQQRPPPGTQGMLEQYLNRGGQKSHGLCWLLCFVSQGQNQDVISAELWCRIHVQAHWGCWQNSAV

SEQ ID NO: 919354 - protein, 135 aa, Homo sapiens
MECRGKLVASSSGMSVPPSAGAHSTLHCGDRCPLVCMLLIASGGEDPISFVFTSANFTWCYHDSPSCSQVKDKFASPSTMIDLGCRGKFFYVPDVLSLEQLSLKWLTPPPPLLKKVFQFCNDHYLQTLELSSSDR

SEQ ID NO: 919355 - protein, 133 aa, Homo sapiens
ASDMREMPVVWCPRRTVTVRSSCLRWSKLRPVSQLQKLRVRMVEEAWMFEEGGKSVKQPPRSVAVHSLEWTGKNGEGFQGSNESPLSCRGRVGGELESSGDGVLPSWSAMARSWLTATSAFLVQVILLPQPPE

SEQ ID NO: 919356 - protein, 135 aa, Homo sapiens
MWPLSQMVSCKHGTSWVLSKHLSNRFLKDSSIRCFQADEIAWIDFAGLERTSTMGPSVTHPSREKCNCQRDRIHVSSSQHVSSLQAHSAESQVQIKMVLGLLLPGRLPDGSWICRVCPHLWASAQCRDGIQELNG

SEQ ID NO: 919357 - protein, 847 aa, Homo sapiens
MLDGNSGLSSEKISQKALEPCGVTKQQREPHCGSESKDRKLYKFLLLENVVHHFKYPCVLDLKMGTRQHGDDASAEKAARQMRKCEQSTSATLGVRVCGMQVYQLDTGHYLCRNKYYGRGLSIEGFRNALYQYLHNGLDLRRDLFEPILSKLRGLKAVLERQASYRFYSSSLLVIYDGKECRAESCLDRRSEMRLKHLDMVLPEVASSCGPSTSPSNTSPEAGPSSQPKVDVRMIDFAHSTFKGFRDDPTVHDGPDRGYVFGLENLISIMEQMRDENHPAYSGAHWLRLSQRCAPTFRRRRPCHVRGSRLARGGRVTARAGSGLSSGPAAVYPVSRSVLWRPWIRRQGDRADEVEPESVRRVVGGYGTRLRPLTLSTPKPLVDFCNKPILLHQVEALAAAGVDHVILAVSYMSQVLEKEMKAQEQRLGIRISMSHEEEPLGTAGPLALARDLLSETADPFFVLNSDVICDFPFQAMVQFHRHHGQEGSILVTKVEEPSKYGVVVCEADTGRIHRFVEKPQVFVSNKINAGMYILSPAVLQRIQLQPTSIEKEVFPIMAKEGQLYAMELQGFWMDIGQPKDFLTGMCLFLQSLRQKQPERLCSGPGIVGNVLVDPSARIGQNCSIGPNVSLGPGVVVEDGVCIRRCTVLRDARIRSHSWLESCIVGWRCRVGQWVSLWAGLGGERGGECACLPDKAYPLLEVRMENVTVLGEDVIVNDELYLNGASVLPHKSIGESVPEPRIIMEGMQWGWPSPGFPISKGSAGLTHQKTLDLSLFVWGALGEAEAVGHLPSHVDIIWQDPCWAHPTNPTPSRRARARAVWNNNLMLTVALTESQAQAQLGPWLGSHQ

SEQ ID NO: 919358 - protein, 179 aa, Homo sapiens
RCKQGRSGGNSQGPLRLWLLCGRPENEWGRGKLMAKEEVREMLLRRTLWGIADLQMEGQPLEAESGPWLTAGKAGWKNECLPPKGGDERGGDQCAPQHLTRCKRRCTSVMGLYVTKGVQPSEEFENPSLHWKMEQKVDFKGPCPQKTPEWHENAPHRQSTQLLCFEVSHTSHSLLLPMD

SEQ ID NO: 919359 - protein, 241 aa, Homo sapiens
AVHALWRLCGAAALAGVGSWCEALMATMLEGRCQTQPRSSPSGREASLWSSGFGMKLEAVTPFLGKYRPFVGRCCQTCTPKSWESLFHRSITDLGFCNVILVKEENTRFRGWLVRRLCYFLWSLEQHIPPCQDVPQKIMESTGVQNLLSGRVPGGTGEGQVPDLVKKEVQRILGHIQAPPRPFLVRLFSWALLRFLNCLFLNVQLHKGQMKMVQKAAQAVRPALHWVGDGGSRRAEAGPSP

SEQ ID NO: 919360 - protein, 461 aa, Homo sapiens
MLEGRCQTQPRSSPSGREASLWSSGFGMKLEAVTPFLGKYRPFVGRCCQTCTPKSWESLFHRSITDLGFCNVILVKEENTRFRGWLVRRLCYFLWSLEQHIPPCQDVPQKIMESTGVQNLLSGRVPGGTGEGQVPDLVKKEVQRILGHIQAPPRPFLVRLFSWALLRFLNCLFLNVQLHKGQMKMVQKAAQAGLPLVLLSTHKTLLDGILLPFMLLSQGLGVLRVAWDSRACSPALRLCPMSHRALLRKLGGLFLPPEASLSLDSSEGLLARAVVQAVIEQLLVSGQPLLIFLEEPPGALGPRLSALGQAWVGFVVQAVQVGIVPDALLVPVAVTYDLASAPLGLWTGALAVLRSLWSRWGCSHRICSRVHLAQPFSLQLCLLPVGCVQVSWWARAGHLRAFSWAGIHRQCQKLLGRQTDPGAATAAHRAGPMVGAQERGVSGGKASSPSAPAYVSPIYTH

SEQ ID NO: 919361 - protein, 171 aa, Homo sapiens
MSPTHISQYPIRLPPLGGALRSSLAGGRRDREALQALSSIYTVCRSRAGSAGHGAWRQANAKAREEKGTGESQAPQLQLHSPRCPQGLCGSGGEKTSLVTPPASGRARTGSPRLGYSRASPRPPAGPTALALPTAPLGPALPEIFVRSRAASARPTAGLRRLALSGSWRRY

SEQ ID NO: 919362 - protein, 149 aa, Homo sapiens
MQIHVNYGKIIFLHSPCLGMFPSDICFGFIRRDRDAVFYIFALPELSTVTYGRNAIKKEISEAVFHGEQVYANLPPKAKEDERPKKEADKSNFLEKKYLTEIYEQKHVLGSHKTRWWIPALKGVTLKGLVPFFAPSAFRMDESRSSGWS

SEQ ID NO: 919363 - protein, 184 aa, Homo sapiens
PPHVGCGSMCESFAASSFSSVQKPSSLLRPETQSHSCSGLEGLRRQSEQREMPHSTYASVSDSIGKGAVTGSEDTNPSGVLSNSLISHALHNWLLLRDEPLADEAWEAQQVCSLGMWDILQWMQGGTMPLAFSGKNKGEVYLPTYLPLPVFHWSKLVPLGINSFTFPSLYHMTAPTTWDPKPQT

SEQ ID NO: 919364 - protein, 149 aa, Homo sapiens
MSFMVSQTQVLPVKGVQVLGALNKELDKTHKQSKKRKKQQKQRCIENENTLHRVGAGRASSSRAQLQNFLGFKYPLEVSIGYLVLKNTCRLTPGVLCNRCMLEIAMVKELYDVSLHYNLQTVSSAKWVSCDGDHNFSRCVLMIKGSITI

SEQ ID NO: 919365 - protein, 152 aa, Homo sapiens
MHWWQGLAAGKYMMVRAAASGKGWSKCSACVAVRARCMCMRSFGGWGWHHAHMQLQGLAVGTHAEVGAALAGKNIFLNLYWRGRETEEMGREVTGMRRKWLDQKGPIQPAMRTVSEEDHCERHCQASKGFWRVRSVSSHPGTLLVAFPIGAQ

SEQ ID NO: 919366 - protein, 152 aa, Homo sapiens; identical to SEQ ID NO: 919365

SEQ ID NO: 919367 - protein, 169 aa, Homo sapiens
MVMGNWLIHELHRGLDSLLSPIGKAKMSGTRLGRPDSRKYVAAHAADLGEKMLQLPGDLHEYGAERALLHHGLCAGSVKWLRLLIQDWPVRWKTFDGSPGLYPLDASSVFPQVMTIKKVLSNLKKKANAPGWMCSKDLERNSWRVALSSYDTSQLLVENQERKLGNHDD

SEQ ID NO: 919368 - protein, 468 aa, Homo sapiens
MTKAWWEAVGAQGSALAVPCLEGSLHPPDSAASCRSQPQGPEEDGLESPWEKLFQNHLAARGWDLNPDPGPQDDDSTASTGVPPAPHWAPPLENREQPDLSENPSSNLGGSVAPGKLLPVGPQSPPLRWASQSLPCEDGLHPGFSVTLYTAISPPHVLLLAWLSDLPLCIPSALLPRGVVTVVSLRQTVGSHSTSTGLVMVRQTPVQIQDQGLISSASIYAPIKWGQQHSCLMAFIRTGWQMFNTQKVLNPHNAQSSSALGFSLLLVAPVIGDVVIKHLLSVQGAPASQPTQAVVAWRWQPGNVGGGPRGGPAPLRLLLDRGLSVELPGSFHGPRPMTGRLRMPPIIQLTEHKGAMRGLGRPGAPSEHTGLRVPTPAHESPEHRGQGPAQSRERASFTCRNENHFLQPHGDTEMRGTTLGAGFEGQGRPSLLGPETRPGRSPPPPEEAEREHFRGQEGPLECEGWQSL

SEQ ID NO: 919369 - protein, 161 aa, Homo sapiens
MPFSRTEDGKIYQRAFGGQSLKFGKGRQAHRCCCVADRTGHSILHTSYGRSLRYDTSCFVEYFALDLLIENRECRGVIALCIEDGSIHHIRAKNTVVATGVRNFLWALAVYTSFLFTNWSFGPSAVPGIELLLGSPVRSIQPCWYTRDRRPTFSPFKGGMP

SEQ ID NO: 919370 - protein, 150 aa, Homo sapiens
MEEDNWRWHFYDTVKGSDWLGDQDAIHYVTEQAPTAMVELENYGMPFSRTEDGKIYQRAFGGQSLKFGKGRQAHRCCCVADRTGHSILHTSYGRSLRYDTSCFVEYFALDLLIENRECRGVIALCIEDGSIHHIRAKNTVVATGVKKLFF

SEQ ID NO: 919371 - protein, 150 aa, Homo sapiens; identical to SEQ ID NO: 919370

SEQ ID NO: 919372 - protein, 106 aa, Homo sapiens
MPFSRTEDGKIYQRAFGGQSLKFGKGRQAHRCCCVADRTGHSILHTSYGRSLRYDTSCFVEYFALDLLIENRECRGVIALCIEDGSIHHIRAKNTVVATGVKKLFF

SEQ ID NO: 919373 - protein, 150 aa, Homo sapiens; identical to SEQ ID NO: 919370

SEQ ID NO: 919374 - protein, 150 aa, Homo sapiens; identical to SEQ ID NO: 919370

SEQ ID NO: 919375 - protein, 209 aa, Homo sapiens
MPLGRFVNTIMWRDSWSTFSVPDTLAGGFGPGRQSWGSCLWLVRSGWCFQVGINAALGNMEEDNWRWHFYDTVKGSDWLGDQDAIHYVTEQAPTAMVELENYGMPFSRTEDGKIYQRAFGGQSLKFGKGRQAHRCCCVADRTGHSILHTSYGRSLRYDTSCFVEYFALDLLIENRECRGVIALCIEDGSIHHIRAKNTVVATGVKKLFF

SEQ ID NO: 919376 - protein, 150 aa, Homo sapiens; identical to SEQ ID NO: 919370

SEQ ID NO: 919377 - protein, 115 aa, Homo sapiens
MPLGRFVNTIMWRDSWSTFSVPDTLGNKHITGSLSLTAPVSPSWSSLCLHHTDEETEAKGWNHWVSLGGVVIWNLSGLAAPLLRSALTGSHHVSSWLSLNPPAGGFGPGRQSWGS

SEQ ID NO: 919378 - protein, 205 aa, Homo sapiens
MPLGRFVNTIMWRDSWSTFSVPDTLAGGFGPGRQSWGSCLWLVRSGWCFQVGINAALGNMEEDNWRWHFYDTVKGSDWLGDQDAIHYVTEQAPTAMVEVMGGRLWVLSWSVSSTRVLEKISHLGCDPMVCGPHSGTRLRVELHAATGQCGVPLRVSLRYDTSCFVEYFALDLLIENRECRGVIALCIEDGSIHHIRAKNTVVATG

SEQ ID NO: 919379 - protein, 150 aa, Homo sapiens; identical to SEQ ID NO: 919370

SEQ ID NO: 919380 - protein, 150 aa, Homo sapiens; identical to SEQ ID NO: 919370

SEQ ID NO: 919381 - protein, 150 aa, Homo sapiens; identical to SEQ ID NO: 919370

SEQ ID NO: 919382 - protein, 106 aa, Homo sapiens; identical to SEQ ID NO: 919372

SEQ ID NO: 919383 - protein, 150 aa, Homo sapiens; identical to SEQ ID NO: 919370

SEQ ID NO: 919384 - protein, 150 aa, Homo sapiens; identical to SEQ ID NO: 919370

SEQ ID NO: 919385 - protein, 319 aa, Homo sapiens
MDPQNQHGSGSSLVVIQQPSLDSRQRLDYEREIQPTAILSLDQIKAIRGSNEYTEGPSVVKRPAPRTAPRQEKHERTHEIIPINVNNNYEHRHTSHLGHAVLPSNARGPILSRSTSTGSAASSGSNSSASSEQGLLGRSPPTRPVPGHRSERAIRTQPKQLIVDDLKGSLKEDLTQHKFICEQCGKCKCGECTAPRTLPSCLACNRQCLCSAESMVEYGTCMCLVKGIFYHCSNDDEGDSYSDNPCSCSQSHCCSRYLCMGAMSLFLPCLLCYPPAKGCLKLCRRCYDWIHRPGCRCKNSNTVYCKLESCPSRGQGKPS

SEQ ID NO: 919386 - protein, 319 aa, Homo sapiens; identical to SEQ ID NO: 919385

SEQ ID NO: 919387 - protein, 319 aa, Homo sapiens; identical to SEQ ID NO: 919385

SEQ ID NO: 919388 - protein, 319 aa, Homo sapiens; identical to SEQ ID NO: 919385

SEQ ID NO: 919389 - protein, 319 aa, Homo sapiens; identical to SEQ ID NO: 919385

SEQ ID NO: 919390 - protein, 319 aa, Homo sapiens; identical to SEQ ID NO: 919385

SEQ ID NO: 919391 - protein, 63 aa, Homo sapiens
MRHVHAAARTRTWAGSHGLAPGHRFGLGFQMHARFPLIARTRDHYTWIPKEKDPNLTLFTPPR

SEQ ID NO: 919392 - protein, 319 aa, Homo sapiens; identical to SEQ ID NO: 919385

SEQ ID NO: 919393 - protein, 319 aa, Homo sapiens; identical to SEQ ID NO: 919385

SEQ ID NO: 919394 - protein, 641 aa, Homo sapiens
MLVVKGVCFKAHKNVLAAFSQYFRSLFQNSSSQKNDVFHLDVKNVSGIGQILDFMYTSHLDLNQDNIQVMLDTAQCLQVQNVLSLCHTFLKSATVVQPPGMPCNSTLSLQSTLTPDATCVISENYPPHLLQECSADAQQNKTLDESHPHASPSVNRHHSAGEISKQAPDTSDGSCTELPFKQPNYYYKLINFYSKQYHKHAAGPSQERVVEQPFAFSTSTDLTTVESQPCAVSHSECILESPEHLPSNFLAQPVNDSAPHPESDATCQQPVKQMRLKKAIHLKKLNFLKSQKYAEQVSEPKSDDGLTKRLESASKNTLEKASSQSAEEKESEEVVSCENFNCISETERPEDPAALEDQSQTLQSQRQYACELCGKPFKHPSNLELHKRSHTEQVTCRLTYDGILVKNHTSARSVERGKCFGGSGDLRRHVRTHTGEKPYTCEICNKCFTRSAVLRRHKKMHCKAGDESPDVLEELSQAIETSDLEKSQSSDSFSQDTSVTLMPVSVKLPVHPVENSVAEFDSHSGGSYCKLRSMIQPHGVSDQEKLSLDPGKLAKPQMQQTQPQAYAYSDVDTPAGGEPLQADGMAMIRSSLAALDNHGGDPLGSRASSTTYRNSEGQFFSSMTLWGLAMKTLQNENELDQ

SEQ ID NO: 919395 - protein, 314 aa, Homo sapiens
EFSNYILGLQPLATSSVTLLFTQEKNHTCVTSVVEEFSNFSNLKEHKKTHTADKVFTCDECGKSFNMQRKLVKHRIRHTGERPYSCSACGKCFGGSGDLRRHVRTHTGEKPYTCEICNKCFTRSAVLRRHKKMHCKAGDESPDVLEELSQAIETSDLEKSQSSDSFSQDTSVTLMPVSVKLPVHPVENSVAEFDSHSGGSYCKLRSMIQPHGVSDQEKLSLDPGKLAKPQMQQTQPQAYAYSDVDTPAGGEPLQADGMAMIRSSLAALDNHGGDPLGSRASSTTYRNSEGQFFSSMTLWGLAMKTLQNENELDQ

SEQ ID NO: 919396 - protein, 174 aa, Homo sapiens
LIPPRPIRMVSHPSCFCPAAAARTSSESASACLPLGAALFGAPSGEGDGGSSLSFVLPFPPTSAPLAAPVTFHPSLGRPSKAAPVVNNFGWQPHIKPGPEIIVPGTMAEQPNNEVAIVLSDIPRCPGKGGGAAGLAMPSPPGVEFFRSHMVVPLSEAAPRTCALQWLHFPGTAC

SEQ ID NO: 919397 - protein, 174 aa, Homo sapiens; identical to SEQ ID NO: 919396

SEQ ID NO: 919398 - protein, 152 aa, Homo sapiens
MDEAGNHHSQQTIARTENQTPHVLTHRWELTNENTWTQEGEHHTPPGPVSPVAAARGSQDWNIQNGISLETDQKLESSSGSYLQKYHLQHWGSNLSTVFEEDKHPKNGKDLKKIFHDNLSGPYLNSLKEFKCGTGGEKKSHYGLQLHLLPKR

SEQ ID NO: 919399 - protein, 152 aa, Homo sapiens
NNFLRVKPLGLRCSAMAAPQTNPDAERMYKFFVWFVSLVGLTEKNDIRTKTCGRVSYINIWGQEHSGRGKSNPQSPDLEGGQGGLIHRALEDEVRKVGTARQWQITGEKGSQWMQGRTVHQWDILKNCEEFWHYYDWGGGNVSGQATFMLKE

SEQ ID NO: 919400 - protein, 163 aa, Homo sapiens
MPKCHLLDHTPKLQHKKYFASILSSKTRDKKSASNKNLAQSLGLGICAQLNQAKLAAMTGIEFGIWLGTKIIKFQQEGKTQSKENKNHNKAIQGVKDKIASIKRNLIGLTELNNAKQEFHNAITSINSRINQADKRISELKDWLTEIRQSDKNKGSEQQSGGK

SEQ ID NO: 919401 - protein, 161 aa, Homo sapiens
GSLITMLEQASASPSFHSLSYFLKVQILGNEFRQSSLIHMPNPCLPGDPDEYEPTLEATVPPGLRDIHTHIHKPSSSVTALIAGSFSPTLTKEAKARETRPPGKDPALLQEGERTESGCTFTQKHNDHLTEDRVIRDTLRRWWVASRTAASRASASAGSSS

SEQ ID NO: 919402 - protein, 286 aa, Homo sapiens
MFVSDLRLEWNSHGGVPPGGPSHSSLPVGRRHPPVLRMVLEALQAGEQRRGTSVAAIKLYILHKYPTVDVLRFKYLLKQALATGMRRGLLARPLNSKARGATGSFKDQAAKQGEEPEGRQVSDAVCWQLRGEVSSQAQEENPAQEDGPRDGSQESGWAKGKGPKKPSEAKEDPPNVGKVKKAAKRPAKVQKPPPKPGAATEKARKQGGAAKDTRAQSGEARKVPPKPDKAMRAPSSAGGLSRKAKAKGSRSSQGSCVTCRGWCGDGGLDSHWSGGGEPALERGFLI

SEQ ID NO: 919403 - protein, 209 aa, Homo sapiens
IRKISLDQLGCRASAGALLDLCGFSSNMADSENQGPAEPSQAAAAAEAAAEEVMAEGGAQGGDCDSAAGDPDSAAGQMAEEPQTPAENAPKPKNDFIESLPNSVKCRVLALKKLQKRCDKIEAKFDKEFQALEKKYNDIYKPLLAKIQELTGEMEGCAWTLEGEEEEEEEYEDDEEEGEDEEEEEAAAEAAAGAKHDDAHAEMPDDAKK

SEQ ID NO: 919404 - protein, 180 aa, Homo sapiens
GTSDKNDSVSNTATEIKDEQKSGTVSSQKQPALKDTSDKNDSVSNTATEIKDEQKSGTVLPAVEQCLNRSLYRPDAVAQPVTEDEFALESEIISKLYIPKRKIISPRSIEDVLPPVEEAVDRCLYLLDRFAQAVTKDKFALESENISEPYFTNRRTISQQSAEKLDAACGIAKTDCTFSQ

SEQ ID NO: 919405 - protein, 745 aa, Homo sapiens
MDDKEPKRWPTLRDRLCSDGFLFPQYPIKPYHLKGIHRAVFYRDLEELKFVLLTRYDINKRDRKERTALHLACATGQPEMVHLLVSRRCELNLCDREDRTPLIKAVQLRQEACATLLLQNGADPNITDVFGRTALHYAVYNEDTSMIEKLLSYGANIEECSEDEYPPLFLAVSQRKVKMVEFLLKKKANINAVDYLGRSALIHAVTLGEKDIVILLLQHNIDVFSRDVYGKLAEDYASEAKNRVIFELIYEYERKKHEELSINSNPVSSQKQPALKATSGKEDSISNIATEIKDGQKSGTVSSQKQPALKDTSDKNDSVSNTATEIKDEQKSGTVLPAVEQCLNRSLYRPDAVAQPVTEDEFALESEIISKLYIPKRKIISPRSIEDVLPPVEEAVDRCLYLLDRFAQAVTKDKFALESENISEPYFTNRRTISQQSAEKLSSQKQPAEKATSDDKDSVSNIATEIKEGPISGTVSSQKQPAEKVIFKKKVSLLNIATRITGGGKSGTVSSQKQPPSKATSDKTDSALNIATEIKDGLQCGTVSSQKQPALKATTDEEDSVSNIATEIKDGEKSGTVSSQKQPALKATTDEEDSVLNIATEIKDGEKSETVSSQKQPALKATTDEEDSVSIIATEIKDGEKSGTVSSRKKPALKATSDEKDSFSNITREKKDGEISRTVSSQKPPALKATSDEEDSVLSIAREEKDGEKSRTVYFCHLLVPRDKVEAIKASTNTGRRTEVDANTV

SEQ ID NO: 919406 - protein, 290 aa, Homo sapiens
MDDKEPKRWPTLRDRLCSDGFLFPQYPIKPYHLKGIHRAVFYRDLEELKFVLLTRYDINKRDRKERTALHLACATGQPEMVHLLVSRRCELNLCDREDRTPLIKAVQLRQEACATLLLQNGADPNITDVFGRTALHYAVYNEDTSMIEKLLSYGANIEECSEDEYPPLFLAVSQRKVKMVEFLLKKKANINAVDYLGRSALIHAVTLGEKDIVILLLQHNIDVFSRDVYGKLAEDYASEAKNRVVFSETTSLEGYKWQGRFYLEYSHRNKGWTKIWDSVFSETTGLEGYK

SEQ ID NO: 919407 - protein, 163 aa, Homo sapiens
RAASRARVGSETAAQLRGGRGFMDRKNKVTYTKQKIPKKQALGQGFGIGLELIEGSNSTEVANLDRKVRGTIKGALTVKSVLVSAEVRNINSPELLAACPEHRQNRLHRPEKALSKELQVLEVGSVLNRHQNGNLFPCCGKDVRPVADSARFRLPIFLHQLSQ

SEQ ID NO: 919408 - protein, 162 aa, Homo sapiens
MLKTGPKAKPTNHQFIHSANICHTLTKRNGKNHCVLCKVLINGKKDFGLFTQMRMTFGAEDQGQRDCFKRPVPCPHPHSVKRSTYNLRSSDQPAQGTSHQFQIRWILALLPRLESSGAICKLRLLGSRHSPASASPAAGTTGARHHARLIFGIFSRDGVSPC

SEQ ID NO: 919409 - protein, 185 aa, Homo sapiens
EAVAVARRRELALVTSSARRLPTPLAGTWGPGAGVGTELSSEVQDSGQPGGGSQGHATCREEPESKREDAGLFTQMRMTFGAEDQGQRDCFKRPVPCPHPHSVKRSTYNLRSSDQPAQGTSHQFQIRWILALLPRLESSGAICKLRLLGSRHSPASASPAAGTTGARHHARLIFGIFSRDGVSPC

SEQ ID NO: 919410 - protein, 135 aa, Homo sapiens
MKQGVPSETQVFPTSVGDGRERIRERRVPGKQEAAGEYAAINSSAICSSPTLRLRYLLKPALCWAMCQMLGIKCWIFFIYFNQNHVSQQTEGRTDMIIKLSSVNPDVKCKTVLLFVLNALFWKISLFLLKMCYLC

SEQ ID NO: 919411 - protein, 151 aa, Homo sapiens
  misc_feature (22)..(22): Xaa can be any naturally occurring amino acid
MDQKDSRALALGPGAAMTHCSXPSHFAKLPLRPPPNNLDSAFREPRLRALCWGLKGFIPFLESQQARTTPSQSSGLHALHPILPLKGREGRMCLGTLRPTNDSALMEQPSVWGKVLEVHSFRKPLTSLYHALSEKLRIRKEQDPQETLMSG

SEQ ID NO: 919412 - protein, 151 aa, Homo sapiens; identical to SEQ ID NO: 919411
  misc_feature (22)..(22): Xaa can be any naturally occurring amino acid

SEQ ID NO: 919413 - protein, 158 aa, Homo sapiens
TASSVQQQSSGGDLMAYDRRGRPGDRYDGMVGFSADETWDSAIDTWSPSEWQMAYEPQGGSGYDYSYAGGRGSYGDLGGPIITTQVTIPKDLAGSIIGKGGLQIKQIRHESGASIKIDEPLEGLEDWIITIRETQDQIQNAQYLLQNSVKQCADVEGV

SEQ ID NO: 919414 - protein, 404 aa, Homo sapiens
FKRSRNTDEMVELRILLQTKNAGAVIGKGGKNIKALRTDYNASVSVPDSSGPEHILSISAGIDTIGEILKKIIPTLEEGLQFPSPTATSQLPLESVAVECLSYQHYKGSDFDCELRLLIHQSLAGGIIGVEGAKIKELRENTQTTIKLFQECCPYSTDKRRAQPYDPNFYDETYDYGGFTIMFDDRCGRPVGFPMRGRGGFDRMPPGQGGRPMPPSRRDYDDMSPRQGPPPPPPGQGGEGGSRARNLPLPPPPPPRGGDLMAYDRRGRPGDRYDGMVGFSADETWDSAIDTWSPSEWQMAYEPQGGSGYDYSYAGGRGSYGDLGGPIITTQVTIPKDLAGSIIGKGGLQIKQIRHESGASIKIDEPLEGLEDWIITIRETQDQIQNAQYLLQNSVKQCADVEGV

SEQ ID NO: 919415 - protein, 108 aa, Homo sapiens [sequence omitted]

SEQ ID NO: 919416 - protein, 135 aa, Homo sapiens
MVPNVEASLNVSDCGHLGSLKATKASPVVASFCYCEAPSESTLSYCSSSEARPSGMLGYEPGFLSCSHFHHPRDTSYSKPSFPAIPFPTPKHGKDNADIPPGPVGTTDFVVINTFRLTQQEHFCGDKVKSRMTIG

SEQ ID NO: 919417 - protein, 108 aa, Homo sapiens [sequence omitted]

SEQ ID NO: 919418 - protein, 362 aa, Homo sapiens
MDSPEVTFTLAYLVFAVCFVFTPNEFHAAGLTVQNLLSGWLGSEDAAFVPFHLRRTAATLLCHSLLPLGYYVGMCLAASEKRLHALSQAPEAWRLFLLLAVTLPSIACILIYYWSRDRWACHPLARTLALYALPQSGWQAVASSVNTEFRRIDKFATGAPGARVIVTDTWVMKVTTYRVHVAQQQDVHLTVTESRQHELSPDSNLPVQLLTIRVASTNPAVQAFDIWLNSTEYGELCEKLRAPIRRAAHVVIHQSLGDLFLETFASLVEVNPAYSVPSSQELEACIGCMQTRASVKLVKTCQEAATGECQQCYCRPMWCLTCMGKWFASRQDPLRPDTWLASRVPCPTCRARFCILDVCTVR

SEQ ID NO: 919419 - protein, 401 aa, Homo sapiens
MDSPEVTFTLAYLVFAVCFVFTPNEFHAAGLTVQNLLSGWLGSEDAAFVPFHLRRTAATLLCHSLLPLGYYVGMCLAASEKRLHALSQAPEAWRLFLLLAVTLPSIACILIYYWSRDRWACHPLARTLALYALPQSGWQAVASSVNTEFRRIDKFATGAPGARVIVTDTWVMKVTTYRVHVAQQQDVHLTVTESRQHELSPDSNLPVQLLTIRVASTNPAVQAFDIWAISPGWSWCDSCPVTPWGVASIFRSLCPAEGPSSSPPCRLNSTEYGELCEKLRAPIRRAAHVVIHQSLGDLFLETFASLVEVNPAYSVPSSQELEACIGCMQTRASVKLVKTCQEAATGECQQCYCRPMWCLTCMGKWFASRQDPLRPDTWLASRVPCPTCRARFCILDVCTVR

SEQ ID NO: 919420 - protein, 358 aa, Homo sapiens
WLGRGWVLNRPRVCFVFTPNEFHAAGLTVQNLLSGWLGSEDAAFVPFHLRRTAATLLCHSLLPLGYYVGMCLAASEKRLHALSQAPEAWRLFLLLAVTLPSIACILIYYWSRDRWACHPLARTLALYALPQSGWQAVASSVNTEFRRIDKFATGAPGARVIVTDTWVMKVTTYRVHVAQQQDVHLTVTESRQHELSPDSNLPVQLLTIRVASTNPAVQAFDIWLNSTEYGELCEKLRAPIRRAAHVVIHQSLGDLFLETFASLVEVNPAYSVPSSQELEACIGCMQTRASVKLVKTCQEAATGECQQCYCRPMWCLTCMGKWFASRQDPLRPDTWLASRVPCPTCRARFCILDVCTVR

SEQ ID NO: 919421 - protein, 362 aa, Homo sapiens; identical to SEQ ID NO: 919418

SEQ ID NO: 919422 - protein, 362 aa, Homo sapiens; identical to SEQ ID NO: 919418

SEQ ID NO: 919423 - protein, 232 aa, Homo sapiens
MDSPEVTFTLAYLVFAVCFVFTPNEFHAAGLTVQNLLSGWLGSEDAAFVPFHLRRTAATLLCHSLLPLGYYVGMCLAASEKRLHALSQAPEAWRLFLLLAVTLPSIACILIYYWSRDRWACHPLARTLALYALPQSGWQAVASSVNTEFRRIDKFATGAPGARVIVTDTWVMKVTTYRVHVAQQQDVHLTVTESRQHELSPDSNLPVQLLTIRVASTNPAVQAFDIWSWRPA

SEQ ID NO: 919424 - protein, 295 aa, Homo sapiens
MDSPEVTFTLAYLVFAVCFVFTPNEFHAAGLTVQNLLSGWLGSEDAAFVPFHLRRTAATLLCHSLLPLGYYVGMCLAASEKRLHALSQAPEAWRLFLLLAVTLPSIACILIYYWSRDRWACHPLARTLALYALPQSGWQAVASSVNTEFRRIDKFATGAPGARVIVTDTWVMKVTTYRVHVAQQQDVHLTVTESRQHELSPDSNLPVQLLTIRVASTNPAVQAFDIWLNSTEYGELCEKLRAPIRRAAHVVIHQSLGDLFLETFASLVEVNPAYSVPSSQELEACIGCMQTRASA

SEQ ID NO: 919425 - protein, 55 aa, Homo sapiens
MQTRASVKLVKTCQEAATGECQQCYCRPMWCLTCMGKWFASRQDPLRPDTWLASR

SEQ ID NO: 919426 - protein, 328 aa, Homo sapiens
MCLAASEKRLHALSQAPEAWRLFLLLAVTLPSIACILIYYWSRDRWACHPLARTLALYALPQSGWQAVASSVNTEFRRIDKFATGAPGARVIVTDTWVMKVTTYRVHVAQQQDVHLTVTESRQHELSPDSNLPVQLLTIRVASTNPAVQAFDIWAISPGWSWCDSCPVTPWGVASIFRSLCPAEGPSSSPPCRLNSTEYGELCEKLRAPIRRAAHVVIHQSLGDLFLETFASLVEVNPAYSVPSSQELEACIGCMQTRASVKLVKTCQEAATGECQQCYCRPMWCLTCMGKWFASRQDPLRPDTWLASRVPCPTCRARFCILDVCTVR

SEQ ID NO: 919427 - protein, 232 aa, Homo sapiens; identical to SEQ ID NO: 919423

SEQ ID NO: 919428 - protein, 289 aa, Homo sapiens
MCLAASEKRLHALSQAPEAWRLFLLLAVTLPSIACILIYYWSRDRWACHPLARTLALYALPQSGWQAVASSVNTEFRRIDKFATGAPGARVIVTDTWVMKVTTYRVHVAQQQDVHLTVTESRQHELSPDSNLPVQLLTIRVASTNPAVQAFDIWLNSTEYGELCEKLRAPIRRAAHVVIHQSLGDLFLETFASLVEVNPAYSVPSSQELEACIGCMQTRASVKLVKTCQEAATGECQQCYCRPMWCLTCMGKWFASRQDPLRPDTWLASRVPCPTCRARFCILDVCTVR

SEQ ID NO: 919429 - protein, 362 aa, Homo sapiens; identical to SEQ ID NO: 919418

SEQ ID NO: 919430 - protein, 362 aa, Homo sapiens; identical to SEQ ID NO: 919418

SEQ ID NO: 919431 - protein, 143 aa, Homo sapiens [sequence omitted]

SEQ ID NO: 919432 - protein, 386 aa, Homo sapiens
EAADPAQQPAPGTGPAAELYSGTMQVTLKTLQPQTLTCKIDIDPEETVKALKEKTESEKGKVASLVAGQTLIYAGKILNDDTALKEYKIDEKNFVVVMVTEPKAVSTPALATTQQSAPASTTAVTSSTTTTVAQAPTPVPALAPPFTPAFITPVSVTVSSEPATASATKQEKPAEKPAETPVATSLTSTHSTSGDSSWSNLFEDATSALVMGQSYDNMVTEIMSMGYEREQVIAAPRASSNNPDRAVEYLLMGIPGDKVRLWLTPTKQLVLGLLSLQQWLQLQQLRQQQLQQPGFPRVACKNYLYIFTEFTLQQVLEWHLRLPIHKNCFCKTINNLHGTNFKDPFSDLIFIDHLTASSDIFNEIRPNSLKLADAKNLQMGERRLCL

SEQ ID NO: 919433 - protein, 124 aa, Homo sapiens
ALLPPLASRLPGLVWNPRHVLWRLWQGRQRASEGVLQPPHPPEAFPAHPGLHPLAGGPRTTPASSLHELVKHEENRLVFEDSEELAAQLQSQELGRAARTPPAQDARGWALPAVMTTSGWKAES

SEQ ID NO: 919434 - protein, 239 aa, Homo sapiens
MGATAGWAVTVYDKPASFFKEAPLDLQHRLFMKLGSTHSPFRARSEPEDPDTERSAFTERDSGSGLVTRLHERPALLVSSTSWTEFEQLTLDGQNLPSLVCVITGKGPLREYYSRLIHQKHFQHIQVCIPWLEGRGLPPLLGSVDLDVCLDTSSSGLDLPMKVVDMFRCCLPACAVNFKCLHELVKHEENRLVFEDSEELAAQLQSQELGRAARTPPAQDARGWALPAVMTTSGWKAES

SEQ ID NO: 919435 - protein, 564 aa, Homo sapiens
MPTTCCSGTTVFLTALQDTMQREELVKNATPPAEPARAEDLSPAPHVTPTSCCPTLAPAAPPASLGTILMTIMFASSQWSIEVGVDDHFLDLQQKTSLFKKVIEPPHSCNTHCGSCDSQASCTSCRDPNKVLLFGECQYESCAPQYYLDFSTNTCKGDNVKCQVPFSLLSSSWNSRGLHTLNGSAQQQESKAADRVLINELLGLRVDRKEDNLMQTFFLECDWSCSACSGPLKTDCLQCMDGYVLQDGACVEQCLSSFYQDSGLCKNCDSYCLQCQGPHECTRCKGPFLLLEAQCVQECGKGYFADHAKHKCTACPQGCLQCSHRDRCHLCDHGFFLKSGLCVYNCVPGFSVHTSNETCSGKIHTPSLHVNGSLILPIGSIKPLDFSLLNVQDQEGRVEDLLFHVVSTPTNGQLVLSRNGKEVQLDKAGRFSWKDVNEKKAPYVLRNEVLHISRGERATITTQMLDIRDDDNPQDVVIEIIDPPLHGQLLQTLQSPATPIYQFQLDELSRGLLHYAHDGSDSTSDVAVLQANDGHSFHNILFQVKTVPQVKNKQYKQIAGDGGV

SEQ ID NO: 919436 - protein, 197 aa, Homo sapiens
PKLLASRPPEKDVKMSSSCSGEFPSGFSMVPTDSPPGGDACQLQRQGTEYVIFQREIKLLGLRKLNKIQDNTEKEFRMLSDKFNQEIEIIKKEGEILELKNSTDILKNASGSFNNRIGQAKERIGELEDSLFENTQSDETKENKFSKSSRCVSLFFTYIKAKTYINMKEKTFSDKQKLRDNTRPVLQEMLKEVRKES

SEQ ID NO: 919437 - protein, 132 aa, Homo sapiens
ILSVMLDMMNWCNQIISEFDFILRIFLANVQPGPLRKLHKYNLWCSQLPCILPIGLTVILRSLTKYPALPLGLYDTNFDLRNSIIWETQDISGSGKLPQGINRFNGGRMDPRASNVLHRQGKNLPVGRSWIP

SEQ ID NO: 919438 - protein, 272 aa, Homo sapiens
AAIRRGTRRRATIMPGHLQEGFGCVVTNRFDQLFDDESDPFEVLKAAENKKKEAGRGGVGGPGAKSAAQAAAQTNSNAAGKQLRKESQKDRKNPLPRSVGVVDKKEETQPPVALKKEGIRRVGRRPDQQLQVDRPIIDRPIRGRGGLGRGRGGRGRGMGRGDGFDSRGKREFDRHSGSDRSSFSHYSGLKHEDKRGGSGSHNWGTVKDELTDLDQSNVTDETPEGEEHHPVADTENKENDVEEVKEEGPKEMTLDEWKAIQNKDRAKVEFNI

SEQ ID NO: 919439 - protein, 186 aa, Homo sapiens
MPAIYWINLVYTTSAFSKFYEQSVVADVSSNNKGGLLVHFWIVFVMPRAKGHIFCEDCVAAILKDSIQTSIINRTSVGSLQGLAVDMDSVVLNAGLRSDYSSTIGSDKGCSQYFYAEHLSLHYPLEISAASGRLMCHFKLVAIVGYLIRLSIKSIQIEADNCVTDSLTIYDSLLPIRSSILYRYDA

SEQ ID NO: 919440 - protein, 129 aa, Homo sapiens
MPAIYWINLVYTTSAFSKFYEQSVVADVSSNNKGGLLVHFWIVFVMPRAKGHIFCEDCVAAILKDSIQTSIINRTSVGSLQGLAVDMDSVVLNAGLRSDYSSTIGSGKFFHVVPPPPMLILFLAVIFIF

SEQ ID NO: 919441 - protein, 541 aa, Homo sapiens
GRCLLGGCLCFLKKKSPPDPRPARRWSERLSPDGALAPEGGRLQWPAGRWGQRAVGVGEPPAGEGAPPAPALESPVSPPCPRAALLAQPRALRAILKVTLGWGAGGARRAKPGQKMTEAALVEGQVKLRDGKKVAGAAERVARGRVSGAGGGRRGAGVATRVTEARGSNASLPKIAAAVTPPGNPRAPCGPGPPGAPGSADCLLMLVYKDKSERIKGLRERSSLTLEDICGLEPGLPYEGLVHTLAIVCLSQAIMLGFDSHEAMCAWDARIRYALGEGAGVFFLSSAEGEQISFLFDCIVRGISPTKGPFGCGRFYQTQSPPGPSTVEERVAQEALETLQLEKRLSLLSHAGRPGSGGDDRSLSSSSSEASHLDVSANNRLTAWPEQSSSSASTSQEGPRPAAAQAAGEAMVGASRHPPSRCVRGVQEVGRQSSSDSGIALAATPLTPAASRPTRAQPGRVAGQDELGSLLSLPAAGAPEPACAPACPGQSSTRCPPPCGPTMTHHAAFAWLLETTAPPHRAAPTTVRPGTQAARQQEPLP

SEQ ID NO: 919442 - protein, 885 aa, Homo sapiens
CDQFRTLPLKRCEVSWVMLMLLVWNMIFAVRLYTSPHCNWEEEIWRAVEDATSDEEDSVLNIAREKKDGEKSRTVSSRKKAALKATSDEKDSVLNIARGKKHGEKTRRVSSHKQPALKATSDKENSVPNMATETKDEQISGTVSSQKQPALKATSDKKDSVSNIPTEIKDGQQSGTVSSQKQLAWKATSVKKDSVSNIATEIKDGQIRGTVSSQRQPALKATGDEKDSVSNIAREIKDGEKSGTVSPQKQSAQKVIFKKKVSLLNIATRITGGWKSGTEYPENLPTLKATIENKNSVLNTATKMKDVQTSTPEQDLEMASEGEQKRLEEYENNQPQVKNQIHSRDDLDDIIQSSQTVSEDGDSLCCNCKNVILLIDQHEMKCKDCVHLLKIKKTFCLCKRLTELKDNHCEQLRVKIRKLKNKASVLQKRLSEKEEIKSQLKHETLELEKELCSLRFAIQQEKKKRRNVEELHQKVREKLRITEEQYRIEADVTKPIKPALKSAEVELKTGGNNSNQVSETDEKEDLLHENRLMQDEIARLRLEKDTIKNQNLEKKYLKDFEIVKRKHEDLQKALKRNEETLAETIACYSGQLAALTDENTTLRSKLEKQRESGQRLETEMQSYRCRLNAALCDHDQSHSSKRDQELAFQGTVDKCCHLQENLNSHVLILSLQLSKAESKFRVLETELHYTGEALKEKALVFEHVQSELKQKQSQMKDIEKMYKSGYNTMEKCIEKQERFCQLKKQNMLLQQQLDDARNKADNQEKAILNIQARCDARVENLQAECRKHRLLLEEDNKMLVNELNHSKEKKCQYEKEKAEREVAVRQLQQKQDDVLNKRSATKALLDASSRHCIYLENGMQDSRKKLDQMRSQVCMQLCTPTTVNL

SEQ ID NO: 919443 - protein, 574 aa, Homo sapiens
MRLGPSDGLEGEQKRLEEYENNQPQVKNQIHSRDDLDDIIQSSQTVSEDGDSLCCNCKNVILLIDQHEMKCKDCVHLLKIKKTFCLCKRLTELKDNHCEQLRVKIRKLKNKASVLQKRLSEKEEIKSQLKHETLELEKELCSLRFAIQQEKKKRRNVEELHQKVREKLRITEEQYRIEADVTKPIKPALKSAEVELKTGGNNSNQVSETDEKEDLLHENRLMQDEIARLRLEKDTIKNQNLEKKYLKDFEIVKRKHEDLQKALKRNEETLAETIACYSGQLAALTDENTTLRSKLEKQRESGQRLETEMQSYRCRLNAALCDHDQSHSSKRDQELAFQGTVDKCCHLQENLNSHVLILSLQLSKAESKFRVLETELHYTGEALKEKALVFEHVQSELKQKQSQMKDIEKMYKSGYNTMEKCIEKQERFCQLKKQNMLLQQQLDDARNKADNQEKAILNIQARCDARVENLQAECRKHRLLLEEDNKMLVNELNHSKEKKCQYEKEKAEREVAVRQLQQKQDDVLNKRSATKALLDASSRHCIYLENGMQDSRKKLDQMRSQVCMQLCTPTTVNL

SEQ ID NO: 919444 - protein, 353 aa, Homo sapiens
MQDEIARLRLEKDTIKNQNLEKKYLKDFEIVKRKHEDLQKALKRNEETLAETIACYSGQLAALTDENTTLRSKLEKQRESGQRLETEMQSYRCRLNAALCDHDQSHSSKRDQELAFQGTVDKCCHLQENLNSHVLILSLQLSKAESKFRVLETELHYTGEALKEKALVFEHVQSELKQKQSQMKDIEKMYKSGYNTMEKCIEKQERFCQLKKQNMLLQQQLDDARNKADNQEKAILNIQARCDARVENLQAECRKHRLLLEEDNKMLVNELNHSKEKKCQYEKEKAEREVAVRQLQQKQDDVLNKRSATKALLDASSRHCIYLENGMQDSRKKLDQMRSQVCMQLCTPTTVNL

SEQ ID NO: 919445 - protein, 157 aa, Homo sapiens
NIRPIPTPAEQDLEMASEGEQKRLEEYENNQPQVKNQIHSRDDLDDIIQSSQTVSEDGDSLCCNCKNVILLIDQHEMKCKDCVHLLKIKKTFCLCKRLTELKDNHCEQLRVKIRKLKNKASVLQKRLSEKEEIKSQLKHETLELEKELCSLRYDLVL

SEQ ID NO: 919446 - protein, 582 aa, Homo sapiens
NIRPIPTPAEQDLEMASEGEQKRLEEYENNQPQVKNQIHSRDDLDDIIQSSQTVSEDGDSLCCNCKNVILLIDQHEMKCKDCVHLLKIKKTFCLCKRLTELKDNHCEQLRVKIRKLKNKASVLQKRLSEKEEIKSQLKHETLELEKELCSLRFAIQQEKKKRRNVEELHQKVREKLRITEEQYRIEADVTKPIKPALKSAEVELKTGGNNSNQVSETDEKEDLLHENRLMQDEIARLRLEKDTIKNQNLEKKYLKDFEIVKRKHEDLQKALKRNEETLAETIACYSGQLAALTDENTTLRSKLEKQRESGQRLETEMQSYRCRLNAALCDHDQSHSSKRDQELAFQGTVDKCCHLQENLNSHVLILSLQLSKAESKFRVLETELHYTGEALKEKALVFEHVQSELKQKQSQMKDIEKMYKSGYNTMEKCIEKQERFCQLKKQNMLLQQQLDDARNKADNQEKAILNIQARCDARVENLQAECRKHRLLLEEDNKMLVNELNHSKEKKCQYEKEKAEREVAVRQLQQKQDDVLNKRSATKALLDASSRHCIYLENGMQDSRKKLDQMRSQVCMQLCTPTTVNL

SEQ ID NO: 919447 - protein, 155 aa, Homo sapiens
MSKSLPNKKKMLKQKFLNEIDHQCLWVVGKDLDQKEEMSESCKNQNGVTCVKTLTNRAGEGHELEDKTRLKNSYCRLGSPRSKTSENLVSGEGPLPNSCTVSFGYNILWLKGGSPDLVFLQLNSLTMMGDSDTSSGMIFSQEACNLESSHKECAT

SEQ ID NO: 919448 - protein, 369 aa, Homo sapiens
METAMCVCCPCCTWQRCCPQLCSCLCCKFIFTSERNCTCFPCPYKDERNCQFCHCTCSESPNCHWCCCSWANDPNCKCCCTASSNLNCYYYESRCCRNTIITFHKGRLRSIHTSSKTALRTGSSDTQVDEVKSIPANSHLVNHLNCPMCSRLRLHSFMLPCNHSLCEKCLRQLQKHAEVTENFFILICPVCDRSHCMPYSNKMQLPENYLHGRLTKRYMQEHGYLKWRFDRSSGPILCQVCRNRRIAYKRCITCRLNLCNDCLKAFHSDVAMQDHVFVDTSAEEQDEKICIHHPSSRIIEYCRNDNKLLCTFCKFSFHNGHDTISLIDACSERAASLFSAIAKFKAGPPLFHSFSLTSSSGTHGEDGVG

SEQ ID NO: 919449 - protein, 345 aa, Homo sapiens
GFLKLRSILQEKEKIIMEQIENLEVSRQKEIEKYVYVTTMKVNEMDGLIAYSKEALKETGQVAFLQSAKILVDQIEDGIQTTYRPDPQLRLHSINYVPLDFVELSSAIHELFPTGPKKVRSSGDSLPSPYPVHSETMIARKVTFSTHSLGNQHIYQRSSSMLSFSNTDKKAKVGLEACGRAQSATPAKPTDGLYTYWSAGADSQSVQNSSSFHNWYSFNDGSVKTPGPIVIYQTLVYPRAAKVYWTCPAEDVDSFEMEFYEVITSPPNNVQMELCGQIRDIMQQNLELHNLTPNTEYVFKVRAINDNGPGQWSDICKVVTPDGHGKNRAKWGLLKNIQSALQKHF

SEQ ID NO: 919450 - protein, 102 aa, Homo sapiens; identical to SEQ ID NO: 812804

SEQ ID NO: 919451 - protein, 230 aa, Homo sapiens
RSNLHQASASGLPPCLWASSAHRRRLPRSPLGLALTLLLLLTPGLALGLGFLAAQFASPRLPAGRAFPSHVACLGKFHFASDAPGRDALERRPRPEAVRLATPLRWRPSHAPKGSSTPYPWPLKNCGKQERAQQVSLYFRCIVSSRFRRLTLLLCSRERRERAQGLKHGGRRRPAQSRRPALEASIEHTVDGAEEGGPALVVEGDDDACVGKCLQERLLLAVWVLKRSSK

SEQ ID NO: 919452 - protein, 193 aa, Homo sapiens
RSNLHQASASGLPPCLWASSAHRRRLPRSPLGLALTLLLLLTPGLALGLGFLAAQFASPRLPAGRAFPSHVACLGKFHFASDAPGRDALERRPRPEAVRLATPLRWRPSHAPKGSSTPYPWPLKNCGKQERAQQVSLYFRCIVSSRFRRLTLLLCSRERRERAQGLKHGGRRRPATNYQHCRGAPGSYQAQPR

SEQ ID NO: 919453 - protein, 102 aa, Homo sapiens; identical to SEQ ID NO: 812804

SEQ ID NO: 919454 - protein, 219 aa, Homo sapiens
RSNLHQASASGLPPCLWASSAHRRRLPRSPLGLALTLLLLLTPGLALGLGFLAAQFASPRLPAGRAFPSHVACLGKFHFASDAPGRDALERRPRPEAVRLATPLRWRPSHAPKGSSTPYPWPLKNCGKQERAQQVSLYFRCIVSSRFRRLTLLLCSRERRERAQGLKHGGRRRPAAQYSMVYMCHIVLIQSIIDAHLGWFQVFAIVNSAAINIHMYVSL

SEQ ID NO: 919455 - protein, 74 aa, Homo sapiens
MADDVDQQQTTNTVEEPLDLIRLSLDERIYVKMRNDRELRGRLHAYDQHLNMILGDVEETVTTIEIDGSVALGT

SEQ ID NO: 919456 - protein, 105 aa, Homo sapiens
FDNFTIRHTQQQTTNTVEEPLDLIRLSLDERIYVKMRNDRELRGRLHAYDQHLNMILGDVEETVTTIEIDEETYEEIYKSTKRNIPMLFVRGDGVVLVAPPLRVG

SEQ ID NO: 919457 - protein, 762 aa, Homo sapiens
MTEIKLKGNSRETKENEIQDLLRAKRELESKLQRLQAQGIQVFDPGESDSDDNCTDVTAAGTQCEYWTGGALGSEPSIGSMIQLQQSFRGPEFAHSSIDVEGPFANVNRDDWDIAVASLLQVTPLFSHSLWSNTVRCYLIYTDETQPEMDLFLKDYSPKLKRMCETMGYFFHAVYFPIDVENQYLTVRKWEIEKSSLVILFIHLTLPSLLLEDCEEAFLKNPEGKPRLIFHRLEDGKVSSDSVQQLIDQVSNLNKTSKAKIIDHSGDPAEGVYKTYICVEKIIKQDILGFENTDLETKDLGSEDSIPEEDDFGDVLWDIHDEQEQMETFQQASNSAHELGFEKYYQRLNDLVAAPAPIPPLLVSGGPGSGKSLLLSKWIQLQQKNSPNTLILSHFVGRPMSTSSESSLIIKRLTLKLMQHSWSVSALTLDPAKLLEEFPRWLEKLSARHQGSIIIVIDSIDQVQCFQCQDTLSLYRLVLHSIRESMANDVDKELMKQEDIEYCLLSFDSQDRVTWRSADELPWLFQQQGSKQKLHDCLLNLFVSQNLYKRGHFAELLSYWQFVGKDKSAMATEYFDSLKQYEKNCEGEDNMSCLADLYETLGRFLKDLGLLSQAIVPLQRSLEIRETALDPDHPRVAQSLHQLASVYVQWKKFGNAEQLYKQALEISENAYGADHPYTARELEALATLYQKQNKYEQAEHFRKKSFKIHQKAIKKKGNLYGFALLRRRALQLEELTLGKDTPDNARTLNELGVLYYLQNNLE

SEQ ID NO: 919458 - protein, 990 aa, Homo sapiens
WREQQHLNMTEIKLKGNSRETKENEIQDLLRAKRELESKLQRLQAQGIQVFDPGESDSDDNCTDVTAAGTQCEYWTGGALGSEPSIGSMIQLQQSFRGPEFAHSSIDVEGPFANVNRDDWDIAVASLLQVTPLFSHSLWSNTVRCYLIYTDETQPEMDLFLKDYSPKLKRMCETMGYFFHAVYFPIDVENQYLTVRKWEIEKSSLVILFIHLTLPSLLLEDCEEAFLKNPEGKPRLIFHRLEDGKVSSDSVQQLIDQVSNLNKTSKAKIIDHSGDPAEGVYKTYICVEKIIKQDILGFENTDLETKDLGSEDSIPEEDDFGDVLWDIHDEQEQMETFQQASNSAHELGFEKYYQRLNDLVAAPAPIPPLLVSGGPGSGKSLLLSKWIQLQQKNSPNTLILSHFVGRPMSTSSESSLIIKRLTLKLMQHSWSVSALTLDPAKLLEEFPRWLEKLSARHQGSIIIVIDSIDQVQCFQCQDTLSLYRLVLHSIRESMANDVDKELMKQEDIEYCLLSFDSQDRVTWRSADELPWLFQQQGSKQKLHDCLLNLFVSQNLYKRGHFAELLSYWQFVGKDKSAMATEYFDSLKQYEKNCEGEDNMSCLADLYETLGRFLKDLGLLSQAIVPLQRSLEIRETALDPDHPRVAQSLHQLASVYVQWKKFGNAEQLYKQALEISENAYGADHPYTARELEALATLYQKQNKYEQAEHFRKKSFKIHQKAIKKKGNLYGFALLRRRALQLEELTLGKDTPDNARTLNELGVLYYLQNNLETADQFLKRSLEMRERVLGPDHPDCAQSLNNLAALCNEKKQYDKAEELYERALDIRRRALAPDHPSLAYTVKHLAILYKKMGKLDKAVPLYELAVEIRQKSFGPKHPSVATALVNLAVLYSQMKKHVEALPLYERALKIYEDSLGRMHPRVGETLKNLAVLSYEGGDFEKAAELYKRAMEIKEAETSLLGGKAPSRHSSSGDTFSLKTAHSPNVFLQQGQR

SEQ ID NO: 919459 - protein, 271 aa, Homo sapiens
MYYAVSQARVNAVPGTMLRPQRPGDLQLGASLYELVGYRQPPSSSSSSTSSTSSTSSSSTTAPLLPKAAREKPEAPAEPPGPGPGSGAHPGGSARPDAKEEQQQQLRRKINSRERKRMQDLNLAMDALREVILPYSAAHCQGAPGRKLSKIATLLLARNYILLLGSSLQELRRALGEGAGPAAPRLLLAGLPLLAAAPGSVLLAPGAVGPPDALRPAKYLSLALDEPPCGQFALPGGGAGGPGLCTCAVCKFPHLVPASLGLAAVQAQFSK

SEQ ID NO: 919460 - protein, 271 aa, Homo sapiens; identical to SEQ ID NO: 919459

SEQ ID NO: 919461 - protein, 271 aa, Homo sapiens; identical to SEQ ID NO: 919459

SEQ ID NO: 919462 - protein, 271 aa, Homo sapiens; identical to SEQ ID NO: 919459

SEQ ID NO: 919463 - protein, 213 aa, Homo sapiens [sequence omitted]

SEQ ID NO: 919464 - protein, 197 aa, Homo sapiens
MGKGDPKKPRGKMSSYAFFVQTSEFSKKCSERWKTMSAKEKGKFEDMAKADKARYEREMKTYIPPKGETKKKFKDPNAPKRLPSAFFLFCSEYRPKIKGEHPGLSIGDVAKKLGEMWNNTAADDKQPYEKKAAKLKEKYEKDIAAYRAKGKPDAAKKGVVKAEKSKKKKEEEEDEEDEEDEEEEEDEEDEEEDDDDE

SEQ ID NO: 919465 - protein, 213 aa, Homo sapiens [sequence omitted]

SEQ ID NO: 919466 - protein, 162 aa, Homo sapiens
MSAKEKGKFEDMAKADKARYEREMKTYIPPKGETKKKFKDPNAPKRLPSAFFLFCSEYRPKIKGEHPGLSIGDVAKKLGEMWNNTAADDKQPYEKKAAKLKEKYEKDIAAYRAKGKPDAAKKGVVKAEKSKKKKEEEEDEEDEEDEEEEEDEEDEEEDDDDE

SEQ ID NO: 919467 - protein, 1171 aa, Homo sapiens
KAYIVKDVQQYILHRLDQEEALRQHLTKETAEMLNQLHIKSSGCFLYLERVLDGVVENFIMLREIRDIPGTLNGLYLWLCQRLFVRKQFAKVQPILNVILAACRPLTITELYHAVWTKNMSLTLEDFQRKLDILSKLLVDGLGNTKILFHYSFAEWLLDVKHCTQKYLCNAAEGHRMLAMSYTCQAKNLTPLEAQEFALHLINSNLQLETAELALWMIWNGTPVRDSLSTLIPKEQEVLQLLVKAGAHVNSEDDRTSCIVRQALEREDSIRTLLDNGASVNQCDSNGRTLLANAAYSGSLDVVNLLVSRGADLEIEDAHGHTPLTLAARQGHTKVVNCLIGCGANINHTDQDGWTALRSAAWGGHTEVVSALLYAGVKVDCADADSRTALRAAAWGGHEDIVLNLLQHGAEVNKADNEGRTALIAAAYMGHREIVEHLLDHGAEVNHEDVDGRTALSVAALCVPASKGHASVVSLLIDRGAEVDHCDKDGMTPLLVAAYEGHVDVVDLLLEGGADVDHTDNNGRTPLLAAASMGHASVVNTLLFWGAAVDSIDSEGRTVLSIASAQGNVEVVRTLLDRGLDENHRDDAGWTPLHMAAFEGHRLICEALIEQGARTNEIDNDGRIPFILASQEGHYDCVQILLENKSNIDQRGYDGRNALRVAALEGHRDIVELLFSHGADVNCKDADGRPTLYILALENQLTMAEYFLENGANVEASDAEGRTALHVSCWQGHMEMVQVLIAYHADVNAADNEKRSALQSAAWQGHVKVVQLLIEHGAVVDHTCNQGATALCIAAQEGHIDVVQVLLEHGADPNHADQFGRTAMRVAAKNGHSQIIKLLEKYGASSLNGCSPSPVHTMEQKPLQSLSSKVQSLTIKSNSSGSTGGGDMQPSLRGLPNGPTHAFSSPSESPDSTVDRQKSSLSNNSLKSSKNSSLRTTSSTATAQTVPIDSFHNLSFTEQIQQHSLPRSRSRQSIVSPSSTTQSLGQSHNSPSSEFEWSQVKPSLKSTKASKGGKSENSAKSGSAGKKAKQSNSSQPKVLEYEMTQFDRRGPIAKSGTAAPPKQMPAESQCKIMIPSAQQEIGRSQQQFLIHQQSGEQKKRNGIMTNPNYHLQSNQVFLGRVSVPRTMQDRGHQEVLEGYPSSETELSLKQALKLQIEGSDPSFNYKKETPL

SEQ ID NO: 919468 - protein, 216 aa, Homo sapiens
KVQSEKRRESYRERTPRVMLKDVDEAGSHHSQQSYTGTENQTPHVLTRTTCLIALLSDKDLTVANVGDSRGVLCDKDGNAIPLSHDHKPYQLKERKRIKRAGGFISFNGSWRVQGILAMSRSLGDYPLKNLNVVIPDPDILTFDLDKLQPEFMILASDGLWDAFSNEEAVRFIKERLDEPHFGAKSIVLQSFYRGCPDNITVMVVKFRNSSKTEEQ

SEQ ID NO: 919469 - protein, 141 aa, Homo sapiens
LTPVAGLMCHFLKAFNMFAGLATGAKQIVLEIFKAGVQVSPVLPLALGRSASLLEPGTQQPSCPATPFLSFLSMQESTCKTNNGLGVVSPLHHQFKKNLTPVQEPGNHALPNNGYRGCKEEADSKPTEVFIEEREVNSPWS

SEQ ID NO: 919470 - protein, 141 aa, Homo sapiens; identical to SEQ ID NO: 919469

SEQ ID NO: 919471 - protein, 128 aa, Homo sapiens
MRAENCRVGAWEPWKPWPGIFHRTPGAPEATPSFSESGCRHFCPEQRPVPLTGPEVGGMGVPEGGYDPSQPPCPHLRKQGHNTCLANVVRTSGEDERAYIPKPTRLKMHTRDTASGCPDDMCQGGHTF

SEQ ID NO: 919472 - protein, 128 aa, Homo sapiens; identical to SEQ ID NO: 919471

SEQ ID NO: 919473 - protein, 128 aa, Homo sapiens; identical to SEQ ID NO: 919471

SEQ ID NO: 919474 - protein, 185 aa, Homo sapiens
MKSQKNMELTLLSQKVDFCSHFDTILRCNLHPTHAASTAPPRFFPPRPRRVPGPGERLKIAGDSTFNRIPRWWEEDAVDTGVPRVTLGLVGPPRRVPRELDGSLRAAFYAERRGLERTTPRRLGSPRPAAEVHSARPATLKPVPRTTPWRRWRLLRHHAGVGAYAIARPRVLARYWLAVKQWEES

SEQ ID NO: 919475 - protein, 185 aa, Homo sapiens; identical to SEQ ID NO: 919474

SEQ ID NO: 919476 - protein, 185 aa, Homo sapiens; identical to SEQ ID NO: 919474

SEQ ID NO: 919477 - protein, 226 aa, Homo sapiens
YQRRVAITAGEAEKKKPVFEKSFVSLQMDFKIEHTWDGFPVKHEPVFIRLNPGDRGVMMDISAPFFRDPPAPLGEPGKPFNELWDYEVVEAFFLNDITEQYLEVELCPHGQHLVLLLSGRRNVWKQELPLSFRVSRGETKWEGKAYLPWSYFPPNVTKFNSFAIHGSKDKRSYEALYPVPQHELQQGQKPDFHCLEYFKSFNFNTLLGEEWKQPESDLWLIEKCDI

SEQ ID NO: 919478 - protein, 183 aa, Homo sapiens
MDFKIEHTWDGFPVKHEPVFIRLNPGDRGVMMDISAPFFRDPPAPLGEPGKPFNELWDYEVVEAFFLNDITEQYLEVELCPHGQHLVLLLSGRRNVWKQELPLSFRVSRGETKWEGKAYLPWSYFPPNVTKFNSFAIHGSKDKRSYEALYPVPQHELQQGQKPDFAWRRVETTGIRPVANREM

SEQ ID NO: 919479 - protein, 141 aa, Homo sapiens
SWVEPKAEPSPVTSAEKKKPVFEKSFVSLQMDFKIEHTWDGFPVKHEPVFIRLNPGDRGVMMDISAPFFRDPPAPLGEPGKPFNELWDYEVVEAFFLNDITEQYLEVELCPKNFLYRSECPEERQNGKAKLISLGVIFHQM

SEQ ID NO: 919480 - protein, 229 aa, Homo sapiens
SWVEPKAEPSPVTSAEKKKPVFEKSFVSLQMDFKIEHTWDGFPVKHEPVFIRLNPGDRGVMMDISAPFFRDPPAPLGEPGKPFNELWDYEVVEAFFLNDITEQYLEVELCPHGQHLVLLLSGRRNVWKQELPLSFRVSRGETKWEGKAYLPWSYFPPNVTKFNSFAIHGSKDKRSYEALYPVPQHELQQGQKPDFHCLEYFKSFNFNTLLGEEWKQPESDLWLIEKCDI

SEQ ID NO: 919481 - protein, 199 aa, Homo sapiens
MDFKIEHTWDGFPVKHEPVFIRLNPGDRGVMMDISAPFFRDPPAPLGEPGKPFNELWDYEVVEAFFLNDITEQYLEVELCPHGQHLVLLLSGRRNVWKQELPLSFRVSRGETKWEGKAYLPWSYFPPNVTKFNSFAIHGSKDKRSYEALYPVPQHELQQGQKPDFHCLEYFKSFNFNTLLGEEWKQPESDLWLIEKCDI

SEQ ID NO: 919482 - protein, 208 aa, Homo sapiens [sequence omitted]

SEQ ID NO: 919483 - protein, 199 aa, Homo sapiens
SLQTKHLMSNTNEIVTGIPQGNGDASTHGCVHTHTQRKCVLYNLQIKRIPYWVRYSHRPPGNLQPFKHYVVIHVPIKNHLQVPQDIDFPSNSQTPILQVCWSLLEVHSRPCLPGYQQQWLQNSKDCCLLLPLEASSEGGTCQMPAGAFLYEVSVNPCWCQVTPLLMTWGRASRITAVEPLGIKDSCKIITIVANCNRQK

SEQ ID NO: 919484 - protein, 441 aa, Homo sapiens
KRQFMSSHSLSPGLKAQLCLQQVKYLGLILARGIRALSKEQTQPILAYPCPKTLKQLWGFLGITGFCRLWIPGYSEIARPFYTLIKETQRANTHLVQWEPGAETAFKILKQALVQAPALSLPTGQNFSLYVTERAGIALGVLTQTCGTTSQPVAYLRTSAQLAELVALTRALELGKGKSINVYTDSKYAYLILYAHAAIWKEGEFLTFGGNSIKYHKEIMELLHTVQKLEEVAVLHCQSHQKGEREKAEGNRWADAEAKIAARWNLPLEITMEGPLVWSNPNQEVKPQYSLTKREWGLSWGPSFLPSGWLMTEEGKVLIPEASQWKMLKTLHQTFHMDIENTHQMAKSLFTGPNLLRTIRQGVKACEVCQRNNPLVHRGEAGAASFFPWQRPWCNSPRAPLTIPINVGASICHWSIEGQAWWSSSAHLCPLKPGLNRKLMA

SEQ ID NO: 919485 - protein, 519 aa, Homo sapiens
MEEHSYIQKELDLQNGSLEEDSVVHSVENDSQNMMESLSPKKYSSSLRFKANGDYSGSYLTLSQPVPAKRSPSPLGTSVRSSPSLAKIQGSKQFSYDGTDKNIPMKPPTPLLNTTSSLSGYPLGRADFDHYTGRDSERALRLSEKPPYSKYSSRHKSHDNVYSLGGLEGRKASGSLLAMWNGSSLSDAGPPPISRSGAASMPSSPKQARKMSIQDSLALQPKLTRHKELASENINLRTRKYSSSSLSHMGAYSRSLPRLYRATENQLTPLSLPPRNSLGNSKRTKLGEKDLPHSVIDNDNYLNFSSLSSGALPYKTSASEGNPYVSSTLSVPASPRVARKMLLASTSSCASDDFDQASYVGTNPSHSLLAGESDRVFATRRNFSCGSVEFDEADLESLRQASGTPQPALRERKSSISSISGRDDLMDYHRRQREERLREQEMERLVIFISTVIDLTVSLTSIYRAALEMDSRICGNIGYSCSLATAAIFLFSPAILLLPISLLIGLFGYLEGLQELMLI

SEQ ID NO: 919486 - protein, 130 aa, Homo sapiens
ESEGKLNVSKVKKADQARPLTRYLPVRKEDFDLRSHVETAGHNIDTCYHVSITEKTCRGFLIKMGGKIKTWKKRWFVFDRNKRTFSYYADNHRYWGGSGATMLSQPLNKWFFDHLTTPNKNSNSYLLFSL

SEQ ID NO: 919487 - protein, 1251 aa, Homo sapiens
MEEHSYIQKELDLQNGSLEEDSVVHSVENDSQNMMESLSPKKYSSSLRFKANGDYSGSYLTLSQPVPAKRSPSPLGTSVRSSPSLAKIQGSKQFSYDGTDKNIPMKPPTPLLNTTSSLSGYPLGRADFDHYTGRDSERALRLSEKPPYSKYSSRHKSHDNVYSLGGLEGRKASGSLLAMWNGSSLSDAGPPPISRSGAASMPSSPKQARKMSIQDSLALQPKLTRHKELASENINLRTRKYSSSSLSHMGAYSRSLPRLYRATENQLTPLSLPPRNSLGNSKRTKLGEKDLPHSVIDNDNYLNFSSLSSGALPYKTSASEGNPYVSSTLSVPASPRVARKMLLASTSSCASDDFDQASYVGTNPSHSLLAGESDRVFATRRNFSCGSVEFDEADLESLRQASGTPQPALRERKSSISSISGRDDLMDYHRRQREERLREQEMERLERQRLETILSLCAEYTKPDSRLSTGTTVEDVQKINKELEKLQLSDEESVFEEALMSPDTRYRCHRKDSLPDADLASCGSLSQSSASFFTPRSTRNDELLSDLTRTPPPPSSTFPKASSESSYLSILPKTPEGISEEQRSQELAAMEETRIVILNNLEELKQKIKDINDQMDESFRELDMECALLDGEQKSETTELMKEKEILDHLNRKIAELEKNIVGEKTKEKVKLDAEREKLERLQELYSEQKTQLDNCPESMREQLQQQLKRDADLLDVESKHFEDLEFQQLEHESRLDEEKENLTQQLLREVAEYQRNIVSRKEKISALKKQANHIVQQAQREQDHFVKEKNNLIMMLQREKENLCNLEKKYSSLSGGKGFPVNPNTLKEGYISVNEINEPCGNSTNLSPSTQFPADADAVATEPATAVLASQPQSTLEVWKKGKNSIKKAIYLSDTLPRKKTTSSISPHFSSATMGRSITPKAHLPLGQSNSCGSVLPPSLAAMAKDSESRRMLRGYNHQQMSEGHRQKSEFYNRTASESNVYLNSFHYPDHSYKDQAFDTLSLDSSDSMETSISACSPDNISSASTSNIARIEEMERLLKQAHAEKTRLLESREREMEAKKRALEEEKRRREILEKRLQEETSQRQKLIEKEVKIRERQRAQARPLTRYLPVRKEDFDLRSHVETAGHNIDTCYHVSITEKTCRGFLIKMGGKIKTWKKRWFVFDRNKRTFSYYADKHETKLKGVIYFQAIEEVYYDHLKNANKSPNPLLTFSVKTHDRIYYMVAPSPEAMRIWMDVIVTGAEGYTHFLL

SEQ ID NO: 919488 - protein, 882 aa, Homo sapiens
MEEHSYIQKELDLQNGSLEEDSVVHSVENDSQNMMESLSPKKYSSSLRFKANGDYSGSYLTLSQPVPAKRSPSPLGTSVRSSPSLAKIQGSKQFSYDGTDKNIPMKPPTPLLNTTSSLSGYPLGRADFDHYTGRDSERALRLSEKPPYSKYSSRHKSHDNVYSLGGLEGRKASGSLLAMWNGSSLSDAGPPPISRSGAASMPSSPKQARKMSIQDSLALQPKLTRHKELASENINLRTRKYSSSSLSHMGAYSRSLPRLYRATENQLTPLSLPPRNSLGNSKRTKLGEKDLPHSVIDNDNYLNFSSLSSGALPYKTSASEGNPYVSSTLSVPASPRVARKMLLASTSSCASDDFDQASYVGTNPSHSLLAGESDRVFATRRNFSCGSVEFDEADLESLRQASGTPQPALRERKSSISSISGRDDLMDYHRRQREERLREQEMERLERQRLETILSLCAEYTKPDSRLSTGTTVEDVQKINKELEKLQLSDEESVFEEALMSPDTRYRCHRKDSLPDADLASCGSLSQSSASFFTPRSTRNDELLSDLTRTPPPPSSTFPKASSESSYLSILPKTPEGISEEQRSQELAAMEETRIVILNNLEELKQKIKDINDQMDESFRELDMECALLDGEQKSETTELMKEKEILDHLNRKIAELEKNIVGEKTKDADLLDVESKHFEDLEFQQLEHESRLDEEKENLTQQLLREVAEYQRNIVSRKEKISALKKQANHIVQQAQREQDHFVKEKNNLIMMLQREKENLCNLEKKYSSLSGGKGFPVNPNTLKEGYISVNEINEPCGNSTNLSPSTQFPADADAVATEPATAVLASQPQSKEVCRHDVSFIHCFSSCQKLTHGQLKMRSTRTCMTNVYLFGQRGRVRLSL

SEQ ID NO: 919489 - protein, 1199 aa, Homo sapiens
TTTTKFAAASTHSVVHSVENDSQNMMESLSPKKYSSSLRFKANGDYSGSYLTLSQPVPAKRSPSPLGTSVRSSPSLAKIQGSKQFSYDGTDKNIPMKPPTPLLNTTSSLSGYPLGRADFDHYTGRDSERALRLSEKPPYSKYSSRHKSHDNVYSLGGLEGRKASGSLLAMWNGSSLSDAGPPPISRSGAASMPSSPKQARKMSIQDSLALQPKLTRHKELASENINLRTRKYSSSSLSHMGAYSRSLPRLYRATENQLTPLSLPPRNSLGNSKRTKLGEKDLPHSVIDNDNYLNFSSLSSGALPYKTSASEGNPYVSSTLSVPASPRVARKMLLASTSSCASDDFDQASYVGTNPSHSLLAGESDRVFATRRNFSCGSVEFDEADLESLRQASGTPQPALRERKSSISSISGRDDLMDYHRRQREERLREQEMERLERQRLETILSLCAEYTKPDSRLSTGTTVEDVQKINKELEKLQLSDEESVFEEALMSPDTRYRCHRKDSLPDADLASCGSLSQSSASFFTPRSTRNDELLSDLTRTPPPPSSTFPKASSESSYLSILPKTPEGISEEQRSQELAAMEETRIVILNNLEELKQKIKDINDQMDESFRELDMECALLDGEQKSETTELMKEKEILDHLNRKIAELEKNIVGEKTKDADLLDVESKHFEDLEFQQLEHESRLDEEKENLTQQLLREVAEYQRNIVSRKEKISALKKQANHIVQQAQREQDHFVKEKNNLIMMLQREKENLCNLEKKYSSLSGGKGFPVNPNTLKEGYISVNEINEPCGNSTNLSPSTQFPADADAVATEPATAVLASQPQSTLEVWKKGKNSIKKAIYLSDTLPRKKTTSSISPHFSSATMGRSITPKAHLPLGQSNSCGSVLPPSLAAMAKDSESRRMLRGYNHQQMSEGHRQKSEFYNRTASESNVYLNSFHYPDHSYKDQAFDTLSLDSSDSMETSISACSPDNISSASTSNIARIEEMERLLKQAHAEKTRLLESREREMEAKKRALEEEKRRREILEKRLQEETSQRQKLIEKEVKIRERQRAQARPLTRYLPVRKEDFDLRSHVETAGHNIDTCYHVSITEKTCRGFLIKMGGKIKTWKKRWFVFDRNKRTFSYYADKHETKLKGVIYFQAIEEVYYDHLKNANKSPNPLLTFSVKTHDRIYYMVAPSPEAMRIWMDVIVTGAEGYTHFLL

SEQ ID NO: 919490 - protein, 678 aa, Homo sapiens
PTRPPHASQRSQELAAMEETRIVILNNLEELKQKIKDINDQMDESFRELDMECALLDGEQKSETTELMKEKEILDHLNRKIAELEKNIVGEKTKEKVKLDAEREKLERLQELYSEQKTQLDNCPESMREQLQQQLKRDADLLDVESKHFEDLEFQQLEHESRLDEEKENLTQQLLREVAEYQRNIVSRKEKISALKKQANHIVQQAQREQDHFVKEKNNLIMMLQREKENLCNLEKKYSSLSGGKGFPVNPNTLKEGYISVNEINEPCGNSTNLSPSTQFPADADAVATEPATAVLASQPQSTLEVWKKGKNSIKKAIYLSDTLPRKKTTSSISPHFSSATMGRSITPKAHLPLGQSNSCGSVLPPSLAAMAKDSESRRMLRGYNHQQMSEGHRQKSEFYNRTASESNVYLNSFHYPDHSYKDQAFDTLSLDSSDSMETSISACSPDNISSASTSNIARIEEMERLLKQAHAEKTRLLESREREMEAKKRALEEEKRRREILEKRLQEETSQRQKLIEKEVKIRERQRAQARPLTRYLPVRKEDFDLRSHVETAGHNIDTCYHVSITEKTCRGFLIKMGGKIKTWKKRWFVFDRNKRTFSYYADKHETKLKGVIYFQAIEEVYYDHLKNANKSPNPLLTFSVKTHDRIYYMVAPSPEAMRIWMDVIVTGAEGYTHFLL

SEQ ID NO: 919491 - protein, 1208 aa, Homo sapiens
MEEHSYIQKELDLQNGSLEEDSVVHSVENDSQNMMESLSPKKYSSSLRFKANGDYSGSYLTLSQPVPAKRSPSPLGTSVRSSPSLAKIQGSKQFSYDGTDKNIPMKPPTPLLNTTSSLSGYPLGRADFDHYTGRDSERALRLSEKPPYSKYSSRHKSHDNVYSLGGLEGRKASGSLLAMWNGSSLSDAGPPPISRSGAASMPSSPKQARKMSIQDSLALQPKLTRHKELASENINLRTRKYSSSSLSHMGAYSRSLPRLYRATENQLTPLSLPPRNSLGNSKRTKLGEKDLPHSVIDNDNYLNFSSLSSGALPYKTSASEGNPYVSSTLSVPASPRVARKMLLASTSSCASDDFDQASYVGTNPSHSLLAGESDRVFATRRNFSCGSVEFDEADLESLRQASGTPQPALRERKSSISSISGRDDLMDYHRRQREERLREQEMERLERQRLETILSLCAEYTKPDSRLSTGTTVEDVQKINKELEKLQLSDEESVFEEALMSPDTRYRCHRKDSLPDADLASCGSLSQSSASFFTPRSTRNDELLSDLTRTPPPPSSTFPKASSESSYLSILPKTPEGISEEQRSQELAAMEETRIVILNNLEELKQKIKDINDQMDESFRELDMECALLDGEQKSETTELMKEKEILDHLNRKIAELEKNIVGEKTKDADLLDVESKHFEDLEFQQLEHESRLDEEKENLTQQLLREVAEYQRNIVSRKEKISALKKQANHIVQQAQREQDHFVKEKNNLIMMLQREKENLCNLEKKYSSLSGGKGFPVNPNTLKEGYISVNEINEPCGNSTNLSPSTQFPADADAVATEPATAVLASQPQSTLEVWKKGKNSIKKAIYLSDTLPRKKTTSSISPHFSSATMGRSITPKAHLPLGQSNSCGSVLPPSLAAMAKDSESRRMLRGYNHQQMSEGHRQKSEFYNRTASESNVYLNSFHYPDHSYKDQAFDTLSLDSSDSMETSISACSPDNISSASTSNIARIEEMERLLKQAHAEKTRLLESREREMEAKKRALEEEKRRREILEKRLQEETSQRQKLIEKEVKIRERQRAQARPLTRYLPVRKEDFDLRSHVETAGHNIDTCYHVSITEKTCRGFLIKMGGKIKTWKKRWFVFDRNKRTFSYYADKHETKLKGVIYFQAIEEVYYDHLKNANKSPNPLLTFSVKTHDRIYYMVAPSPEAMRIWMDVIVTGAEGYTHFLL

SEQ ID NO: 919492 - protein, 849 aa, Homo sapiens
MEEHSYIQKELDLQNGSLEEDSVVHSVENDSQNMMESLSPKKYSSSLRFKANGDYSGSYLTLSQPVPAKRSPSPLGTSVRSSPSLAKIQGSKQFSYDGTDKNIPMKPPTPLLNTTSSLSGYPLGRADFDHYTGRDSERALRLSEKPPYSKYSSRHKSHDNVYSLGGLEGRKASGSLLAMWNGSSLSDAGPPPISRSGAASMPSSPKQARKMSIQDSLALQPKLTRHKELASENINLRTRKYSSSSLSHMGAYSRSLPRLYRATENQLTPLSLPPRNSLGNSKRTKLGEKDLPHSVIDNDNYLNFSSLSSGALPYKTSASEGNPYVSSTLSVPASPRVARKMLLASTSSCASDDFDQASYVGTNPSHSLLAGESDRVFATRRNFSCGSVEFDEADLESLRQASGTPQPALRERKSSISSISGRDDLMDYHRRQREERLREQEMERLERQRLETILSLCAEYTKPDSRLSTGTTVEDVQKINKELEKLQLSDEESVFEEALMSPDTRYRCHRKDSLPDADLASCGSLSQSSASFFTPRSTRNDELLSDLTRTPPPPSSTFPKASSESSYLSILPKTPEGISEEQRSQELAAMEETRIVILNNLEELKQKIKDINDQMDESFRELDMECALLDGEQKSETTELMKEKEILDHLNRKIAELEKNIVGEKTKDADLLDVESKHFEDLEFQQLEHESRLDEEKENLTQQLLREVAEYQRNIVSRKEKISALKKQANHIVQQAQREQDHFVKEKNNLIMMLQREKENLCNLEKKYSSLSGGKGFPVNPNTLKEGYISVNEINEPCGNSTNLSPSTQFPADADAVATEPATAVLASQPQSTLEVWKKGKNSIKKASI

SEQ ID NO: 919493 - protein, 626 aa, Homo sapiens
MEEHSYIQKELDLQNGSLEEDSVVHSVENDSQNMMESLSPKKYSSSLRFKANGDYSGSYLTLSQPVPAKRSPSPLGTSVRSSPSLAKIQGSKQFSYDGTDKNIPMKPPTPLLNTTSSLSGYPLGRADFDHYTGRDSERALRLSEKPPYSKYSSRHKSHDNVYSLGGLEGRKASGSLLAMWNGSSLSDAGPPPISRSGAASMPSSPKQARKMSIQDSLALQPKLTRHKELASENINLRTRKYSSSSLSHMGAYSRSLPRLYRATENQLTPLSLPPRNSLGNSKRTKLGEKDLPHSVIDNDNYLNFSSLSSGALPYKTSASEGNPYVSSTLSVPASPRVARKMLLASTSSCASDDFDQASYVGTNPSHSLLAGESDRVFATRRNFSCGSVEFDEADLESLRQASGTPQPALRERKSSISSISGRDDLMDYHRRQREERLREQEMERLERQRLETILSLCAEYTKPDSRLSTGTTVEDVQKINKELEKLQLSDEESVFEEALMSPDTRYRCHRKDSLPDADLASCGSLSQSSASFFTPRSTRNDELLSDLTRTPPPPSSTFPKASSESSYLSILPKTPEGISEEQRSQELAAMEETRIVILNNLEELKQKIKDINDQMDESFRENCIVL

SEQ ID NO: 919494 - protein, 947 aa, Homo sapiens
MLLLNPDSSKIMEEHSYIQKELDLQNGSLEEDSVVHSVENDSQNMMESLSPKKYSSSLRFKANGDYSGSYLTLSQPVPAKRSPSPLGTSVRSSPSLAKIQGSKQFSYDGTDKNIPMKPPTPLLNTTSSLSGYPLGRADFDHYTGRDSERALRLSEKPPYSKYSSRHKSHDNVYSLGGLEGRKASGSLLAMWNGSSLSDAGPPPISRSGAASMPSSPKQARKMSIQDSLALQPKLTRHKELASENINLRTRKYSSSSLSHMGAYSRSLPRLYRATENQLTPLSLPPRNSLGNSKRTKLGEKDLPHSVIDNDNYLNFSSLSSGALPYKTSASEGNPYVSSTLSVPASPRVARKMLLASTSSCASDDFDQASYVGTNPSHSLLAGESDRVFATRRNFSCGSVEFDEADLESLRQASGTPQPALRERKSSISSISGRDDLMDYHRRQREERLREQEMERLERQRLETILSLCAEYTKPDSRLSTGTTVEDVQKINKELEKLQLSDEESVFEEALMSPDTRYRCHRKDSLPDADLASCGSLSQSSASFFTPRSTRNDELLSDLTRTPPPPSSTFPKASSESSYLSILPKLDMECALLDGEQKSETTELMKEKEILDHLNRKIAELEKNIVGEKTKDADLLDVESKHFEDLEFQQLEHESRLDEEKENLTQQLLREVAEYQRNIVSRKGYISVNEINEPCGNSTNLSPSTQFPADADAVATEPATAVLASQPQTPWPEFMATSVDPLPLNDTPPPLPAKKHRRQQQQQEQQNCPEGEKVLTCFVHWLFCHPHGDHHNNFWYVVEWNVNLCDLMPAQALPQVLPTCLRGSLWQEKRQAHLPLGQSNSCGSVLPPSLAAMAKDSESRRMLRAIREQAIAVTQGKASNLKCQVTEHQGKEKTSWPGTVAHACNPSTLGGRGRQITRSRDQDNPGQHGETPSLLKIQKLAEYGGALL

SEQ ID NO: 919495 - protein, 1208 aa, Homo sapiens; identical to SEQ ID NO: 919491

SEQ ID NO: 919496 - protein, 1235 aa, Homo sapiens
MEEEDTKREVPKEDGVGDVQHFDSSKIMEEHSYIQKELDLQNGSLEEDSVVHSVENDSQNMMESLSPKKYSSSLRFKANGDYSGSYLTLSQPVPAKRSPSPLGTSVRSSPSLAKIQGSKQFSYDGTDKNIPMKPPTPLLNTTSSLSGYPLGRADFDHYTGRDSERALRLSEKPPYSKYSSRHKSHDNVYSLGGLEGRKASGSLLAMWNGSSLSDAGPPPISRSGAASMPSSPKQARKMSIQDSLALQPKLTRHKELASENINLRTRKYSSSSLSHMGAYSRSLPRLYRATENQLTPLSLPPRNSLGNSKRTKLGEKDLPHSVIDNDNYLNFSSLSSGALPYKTSASEGNPYVSSTLSVPASPRVARKMLLASTSSCASDDFDQASYVGTNPSHSLLAGESDRVFATRRNFSCGSVEFDEADLESLRQASGTPQPALRERKSSISSISGRDDLMDYHRRQREERLREQEMERLERQRLETILSLCAEYTKPDSRLSTGTTVEDVQKINKELEKLQLSDEESVFEEALMSPDTRYRCHRKDSLPDADLASCGSLSQSSASFFTPRSTRNDELLSDLTRTPPPPSSTFPKASSESSYLSILPKTPEGISEEQRSQELAAMEETRIVILNNLEELKQKIKDINDQMDESFRELDMECALLDGEQKSETTELMKEKEILDHLNRKIAELEKNIVGEKTKDADLLDVESKHFEDLEFQQLEHESRLDEEKENLTQQLLREVAEYQRNIVSRKEKISALKKQANHIVQQAQREQDHFVKEKNNLIMMLQREKENLCNLEKKYSSLSGGKGFPVNPNTLKEGYISVNEINEPCGNSTNLSPSTQFPADADAVATEPATAVLASQPQSTLEVWKKGKNSIKKAIYLSDTLPRKKTTSSISPHFSSATMGRSITPKAHLPLGQSNSCGSVLPPSLAAMAKDSESRRMLRGYNHQQMSEGHRQKSEFYNRTASESNVYLNSFHYPDHSYKDQAFDTLSLDSSDSMETSISACSPDNISSASTSNIARIEEMERLLKQAHAEKTRLLESREREMEAKKRALEEEKRRREILEKRLQEETSQRQKLIEKEVKIRERQRAQARPLTRYLPVRKEDFDLRSHVETAGHNIDTCYHVSITEKTCRGFLIKMGGKIKTWKKRWFVFDRNKRTFSYYADKHETKLKGVIYFQAIEEVYYDHLKNANKSPNPLLTFSVKTHDRIYYMVAPSPEAMRIWMDVIVTGAEGYTHFLL

SEQ ID NO: 919497 - protein, 1175 aa, Homo sapiens
MEEHSYIQKELDLQNGSLEEDSVVHSVENDSQNMMESLSPKKYSSSLRFKANGDYSGSYLTLSQPVPAKRSPSPLGTSVRSSPSLAKIQGSKQFSYDGTDKNIPMKPPTPLLNTTSSLSGYPLGRADFDHYTGRDSERALRLSEKPPYSKYSSRHKSHDNVYSLGGLEGRKASGSLLAMWNGSSLSDAGPPPISRSGAASMPSSPKQARKMSIQDSLALQPKLTRHKELASENINLRTRKYSSSSLSHMGAYSRSLPRLYRATENQLTPLSLPPRNSLGNSKRTKLGEKDLPHSVIDNDNYLNFSSLSSGALPYKTSASEGNPYVSSTLSVPASPRVARKMLLASTSSCASDDFDQASYVGTNPSHSLLAGESDRVFATRRNFSCGSVEFDEADLESLRQASGTPQPALRERKSSISSISGRDDLMDYHRRQREERLREQEMERLERQRLETILSLCAEYTKPDSRLSTGTTVEDVQKINKELEKLQLSDEESVFEEALMSPDTRYRCHRKDSLPDADLASCGSLSQSSASFFTPRSTRNDELLSDLTRTPPPPSSTFPKASSESSYLSILPKTPEGISEEQRSQELAAMEETRIVILNNLEELKQKIKDINDQMDESFRELDMECALLDGEQKSETTELMKEKEILDHLNRKIAELEKNIVGEKTKDADLLDVESKHFEDLEFQQLEHESRLDEEKENLTQQLLREVAEYQRNIVSRKEKISALKKQANHIVQQAQREQDHFVKEKNNLIMMLQREKENLCNLEKKYSSLSGGKGFPVNPNTLKEGYISVNEINEPCGNSTNLSPSTQFPADADAVATEPATAVLASQPQSTLEVWKKGKNSIKKAIYLSDTLPRKKTTSSISPHFSSATMGRSITPKAHLPLGQSNSCGSVLPPSLAAMAKDSESRRMLRGYNHQQMSEGHRQKSEFYNRTASESNVYLNSFHYPDHSYKDQAFDTLSLDSSDSMETSISACSPDNISSASTSNIARIEEMERLLKQAHAEKTRLLESREREMEAKKRALEEEKRRREILEKRLQEETSQRQKLIEKEVKIRERQRAQARPLTRYLPVRKEDFDLRSHVETAGHNIDTCYHVSITEKTCRGFLIKMGGKIKTWKKRWFVFDRNKRTFSYYADKHETKLKGVIYFQAIEEVYYDHLKNANKVNISFLNSYNLNA

SEQ ID NO: 919498 - protein, 426 aa, Homo sapiens
MATSVDPLPLNDTPPPLPAKKHRRQQQQQEQQNCPEGEKVLTCFVHWLFCHPHGDHHNNFWYVVEWNVNLCDLMPAQALPQVLPTCLRGSLWQEKRQAHLPLGQSNSCGSVLPPSLAAMAKDSESRRMLRGYNHQQMSEGHRQKSEFYNRTASESNVYLNSFHYPDHSYKDQAFDTLSLDSSDSMETSISACSPDNISSASTSNIARIEEMERLLKQAHAEKTRLLESREREMEAKKRALEEEKRRREILEKRLQEETSQRQKLIEKEVKIRERQRAQARPLTRYLPVRKEDFDLRSHVETAGHNIDTCYHVSITEKTCRGFLIKMGGKIKTWKKRWFVFDRNKRTFSYYADKHETKLKGVIYFQAIEEVYYDHLKNANKSPNPLLTFSVKTHDRIYYMVAPSPEAMRIWMDVIVTGAEGYTHFLL

SEQ ID NO: 919499 - protein, 798 aa, Homo sapiens
MEEHSYIQKELDLQNGSLEEDSVVHSVENDSQNMMESLSPKKYSSSLRFKANGDYSGSYLTLSQPVPAKRSPSPLGTSVRSSPSLAKIQGSKQFSYDGTDKNIPMKPPTPLLNTTSSLSGYPLGRADFDHYTGRDSERALRLSEKPPYSKYSSRHKSHDNVYSLGGLEGRKASGSLLAMWNGSSLSDAGPPPISRSGAASMPSSPKQARKMSIQDSLALQPKLTRHKELASENINLRTRKYSSSSLSHMGAYSRSLPRLYRATENQLTPLSLPPRNSLGNSKRTKLGEKDLPHSVIDNDNYLNFSSLSSGALPYKTSASEGNPYVSSTLSVPASPRVARKMLLASTSSCASDDFDQASYVGTNPSHSLLAGESDRVFATRRNFSCGSVEFDEADLESLRQASGTPQPALRERKSSISSISGRDDLMDYHRRQREERLREQEMERLERQRLETILSLCAEYTKPDSRLSTGTTVEDVQKINKELEKLQLSDEESVFEEALMSPDTRYRCHRKDSLPDADLASCGSLSQSSASFFTPRSTRNDELLSDLTRTPPPPSSTFPKASSESSYLSILPKTPEGISEEQRSQELAAMEETRIVILNNLEELKQKIKDINDQMDESFRELDMECALLDGEQKSETTELMKEKEILDHLNRKIAELEKNIVGEKTKDADLLDVESKHFEDLEFQQLEHESRLDEEKENLTQQLLREVAEYQRNIVSRKEKISALKKQANHIVQQAQREQDHFVKEKNNLIMMLQREKENLCNLEKKYSSLSGGKGFPVNPNTLKEVSYDFTCRFMLP

SEQ ID NO: 919500 - protein, 482 aa, Homo sapiens
MEEHSYIQKELDLQNGSLEEDSVVHSVENDSQNMMESLSPKKYSSSLRFKANGDYSGSYLTLSQPVPAKRSPSPLGTSVRSSPSLAKIQGSKQFSYDGTDKNIPMKPPTPLLNTTSSLSGYPLGRADFDHYTGRDSERALRLSEKPPYSKYSSRHKSHDNVYSLGGLEGRKASGSLLAMWNGSSLSDAGPPPISRSGAASMPSSPKQARKMSIQDSLALQPKLTRHKELASENINLRTRKYSSSSLSHMGAYSRSLPRLYRATENQLTPLSLPPRNSLGNSKRTKLGEKDLPHSVIDNDNYLNFSSLSSGALPYKTSASEGNPYVSSTLSVPASPRVARKMLLASTSSCASDDFDQASYVGTNPSHSLLAGESDRVFATRRNFSCGSVEFDEADLESLRQASGTPQPALRERKSSISSISGRDDLMDYHRRQREERLREQEMERLERQRLETILSLCAEYTKPDSRLSTGTTVEDVQKINKD

SEQ ID NO: 919501 - protein, 138 aa, Homo sapiens
CTRSSRPALPDPGNEGLSTRASGCGGCTGSPSSASPPALRSISRRASAAFPWGRARDLQPAMPEPPTPSVGSCAARASSRSAIPCSTAPSPINHPRAEECGRTARDWQAAPSAAPLRDPLGEANWAPESGGDVENLYV

SEQ ID NO: 919502 - protein, 169 aa, Homo sapiens
KNHMEVITHTLKEQFHISHHSTLHNVTSKGHTFYLIIRSTENLCLTGPANLCHAGSLPYLFNAALPSSPPDPNPLYPQEIGTVVLTNGIAESTESSLIPFLPSPPHGTTAGQTNGDYRPCVRHTPAAAQASELTLPPDVPVTLDFFLQLRHIWLSSPGHLFPWSGALFP

SEQ ID NO: 919503 - protein, 169 aa, Homo sapiens; identical to SEQ ID NO: 919502

SEQ ID NO: 919504 - protein, 157 aa, Homo sapiens
SPHLLICFWSLGFRVYMGTGWRGMASQKATFGAHNACSHLRPRVSRLEGWDFAGEPPSSTQYFPVFCPYQNYLLSSTTEIRVFPSSFPDLSLWQVFLSPEVLFSLPSQMAKGTSPHQLTFEESSQLMDTNPSAANSHTNVHHMHIQDYEALYDMELY

SEQ ID NO: 919505 - protein, 600 aa, Homo sapiens
MRALDDMDHEGRDTLAREELRQGLSELPAIHDLHQGILEELEERLSNWESQQKVADVFLAREQGFDHHATHILQFDRYLGLLSENCLHSPRLAAAVREFEQSVQGGSQTAKHRLLRVVQRLFQYQVLLTDYLNNLCPDSAEYDNTQGALSLISKVTDRANDSMEQGENLQKLVHIEHSVRGQGDLLQPGREFLKEGTLMKVTGKNRRPRHLFLMNDVLLYTYPQKDGKYRLKNTLAVANMKVSRPVMEKVPYALKIETSESCLMLSARLQVRKSKVKALTDSVSAHARSSCAERDEWYGCLSRALPEDYKAQALAAFHHSVEIRERLGVSLGERPPTLVPVTHVMMCMNCGCDFSLTLRRHHCHACGKIVCRNCSRNKYPLKYLKDRMAKVCDGCFGELKKRGRAVPGLMRVTERPVSMSFPLSSPRFSGSAFSSVFQSINPSTFKKQKKVPSALTEYPSRLHRSRGLFILKEPNSCVGPSMSSPHPRGPNPAQVAASGEGSAISGYLSRCKRGKRHWKKLWFVIKGKVLYTYMASEDKVALESMPLLGFTIAPEKEEGSSEVGPIFHLYHKKTLFYSFKAEDTNSAQRWIEAMEDASVL

SEQ ID NO: 919506 - protein, 100 aa, Homo sapiens
ELTPEGKTSLRKTGKRHWKKLWFVIKGKVLYTYMASEDKVALESMPLLGFTIAPEKEEGSSEVGPIFHLYHKKTLFYSFKAEDTNSAQRWIEAMEDASVL

SEQ ID NO: 919507 - protein, 100 aa, Homo sapiens; identical to SEQ ID NO: 919506

SEQ ID NO: 919508 - protein, 563 aa, Homo sapiens
MRALDDMDHEGRDTLAREELRQGLSELPAIHDLHQGILEELEERLSNWESQQKVADVFLAREQGFDHHATHILQFDRYLGLLSENCLHSPRLAAAVREFEQSVQGGSQTAKHRLLRVVQRLFQYQVLLTDYLNNLCPDSAEYDNTQGALSLISKVTDRANDSMEQGENLQKLVHIEHSVRGQGDLLQPGREFLKEGTLMKVTGKNRRPRHLFLMNDVLLYTYPQKDGKYRLKNTLAVANMKVSRPVMEKVPYALKIETSESCLMLSARLQVRKSKVKALTDSVSAHARSSCAERDEWYGCLSRALPEDYKAQALAAFHHSVEIRERLGVSLGERPPTLVPVTHVMMCMNCGCDFSLTLRRHHCHACGKIVCRNCSRNKYPLKYLKDRMAKVCDGCFGELKKRGRAVPGLMRVTERPVSMSFPLSSPRFSGSAFSSVFQSINPSTFKKQKKVPSALTEVAASGEGSAISGYLSRCKRGKRHWKKLWFVIKGKVLYTYMASEDKVALESMPLLGFTIAPEKEEGSSEVGPIFHLYHKKTLFYSFKAEDTNSAQRWIEAMEDASVL

SEQ ID NO: 919509 - protein, 100 aa, Homo sapiens; identical to SEQ ID NO: 919506

SEQ ID NO: 919510 - protein, 326 aa, Homo sapiens
LFSRMLVYWYQFNVVVHFHSVDKDIPETGKKKRFNWTYSSTWLGRPCGESWQMAKDTSYMVAARENEEDAKAEIPDKTIRSHETCPLPQEYLEGSEEDRKMWESLELPRDLLNGFDTNADSGMNNKFQVEVVSDEDEELFGKWNKDDSCYALAIRLGAFCPCPRDLWNFELERDNSGYLTEEISKQQRVQEEAEHKHLENSQPDNVVEKKNPFSGEKFKSAAEICGSMEEKCEAGAPTQSPHWALPSGAVRRRPPSSRPENGRSTDNLHHVPGKATDTQHQPVKATKTGTVLCKTIGVELQKAVEAYLLHQRDLDIHQLPKLFASA

SEQ ID NO: 919511 - protein, 137 aa, Homo sapiens
THMHKKHTERKHTDRKHTQRKYTENTVTHTHRKHTKTRTHVAGDEHNIVLCFTKDGPCQQLWATFRGQVKWTVLHAPTPSAGMLCKRRHSAKRSAARLMLKSMCTYFSRPLIRSSQATQRNVGLLKIEVQRLSPVTE

SEQ ID NO: 919512 - protein, 150 aa, Homo sapiens
MCRLVTYVYMCHAGALHPLTRHLALVLLNENELKAYLGDIVGLVLNHLSKVNITIRNVANGIKGPIMLLGSFLFAANLSKSSPILALTCFYHFVHCEVWGKTNENNDQNVYACLCVCVCLYVCVYICIPLCVCVCVCVYTSVCACTIGSE

SEQ ID NO: 919513 - protein, 372 aa, Homo sapiens
TATPLSPARAPEAHSMQFPDANARGRLSAVSDETSKRSPQEFVAIGSGSWITNSWLWPKRRKQENLQNRSSPLLPGQKAIIQSGTALSSWAVNYQPAKYTRILADKVGCNMLDTTDMVECLKNKNYKELIQQTITPATYHIAFGPVIDGDVIPDDPQILMEQGEFLNYDIMLGVNQGEGLKFVDGIVDNEDGVTPNDFDFSVSNFVDNLYGYPEGKDTLRETIKFMYTDWADKENPETRRKTLVALFTDHQWVAPAVATADLHAQYGSPTYFYAFYHHCQSEMKPSWADSAHGDEVPYVFGIPMIGPTELFSCNFSKNDVMLSAVVMTYWTNFAKTGFGLRMATRRRTEEGPTVVGDARLSLKGSFLHEEMI

SEQ ID NO: 919514 - protein, 330 aa, Homo sapiens
LDPCLQIMSPVYFHVNISDPNQPVPQDTKFIHTKPNRFEEVAWSKYNPKDQLYLHIGLKPRVRDHYRATKVSFWLELVPHLHNLNEIFQYVSTTTKVPPPDMTSFPYGTRRSPAKIWPTTKRPAITPANNPKHSKDPHKTGPEDTTVLIETKRDYSTELSVTIAVGASLLFLNILAFAALYYKKDKRRHETHRHPSPQRNTTNDITHIQNEEIMSLQMKQLEHDHECESLQAHDTLRLTCPPDYTLTLRRSPDDIPFMTPNTITMIPNTLMGMQPLHTFKTFSGGQNICGYSVRKTQFSLQKNNNSRSDDGDDDDGGDDEDEDEDEDIDQ

SEQ ID NO: 919515 - protein, 190 aa, Homo sapiens
MEASYYLPYFFPEKIKSQISASGSRPKVIEGQQSHQSGKKYKSEIGDGKEQLESVKKKKPMRETGTHICTASNISNAVGHEKKMMSFATRLNANLVQDLEKMKEEIHVGDKLEYAENKSKEKIWEPAATVYKNHSISEIANRNPVKRVGKEEPSVEKSGFGENSSQWWLLSRAWRLPWFTSMSRALTATH

SEQ ID NO: 919516 - protein, 945 aa, Homo sapiens
RQECMAPPGDVLPCFGSPSVGCTHCPTSPNEMNQCVCRSCGASSDPLPFTEFVRYISTTALCNEVERMLERHERFKPEMFAELLQAANTTDDYRKCPSNCGQKIKIRRVLMNCPEIVTIGLVWDSEHSDLTEAVVRNLATHLYLPGLFYRVTDENAKNSELNLVGMICYTSQHYCAFAFHTKSSKWVFFDDANVKEIGTRWKDVVSKCIRCHFQPLLLFYANPDGTAVSTEDALRQVISWSHYKSVAENMGCEKPVIHKSDNLKENGFGDQAKQRENQKFPTDNISSSNRSHSHTGVGKGPAKLSHIDQREKIKDISRECALKAIEQKNLLSSQRKDLEKGQRKDLGRHRDLVDEDLSHFQSGSPPAPNGFKQHGNPHLYHSQGKGSYKHDRVVPQSRASAQIISSSKSQILAPGEKITGKVKSDNGTGYDTDSSQDSRDRGNSCDSSSKSRNRGWKPMRETLNVDSIFSESEKRQHSPRHKPNISNKPKSSKDPSFSNWPKENPKQKGLMTIYEDEMKQEIGSRSSLESNGKGAEKNKGLVEGKVHGDNWQMQRTESGYESSDHISNGSTNLDSPVIDGNGTVMDISGVKETVCFSDQITTSNLNKERGDCTSLQSQHHLEGFRKELRNLEAGYKSHEFHPESHLQIKNHLIKRSHVHEDNGKLFPSSSLQIPKDHNAREHIHQSDEQKLEKPNECKFSEWLNIENSERTGLPFHVDNSASGKRVNSNEPSSLWSSHLRTVGLKPETAPLIQQQNIMDQCYFENSLSTECIIRSASRSDGCQMPKLFCQNLPPPLPPKKYAITSVPQSEKSESTPDVKLTEVFKATSHLPKHSLSTASEPSLEVSTHMNDERHKETFQVRECFGNTPNCPSSSSTNDFQANSGAIDAFCQPELDSISTCPNETVSLTTYFSVDSCMTDTYRLKYHQRPKLSFPESSGFCNNSLS

SEQ ID NO: 919517 - protein, 207 aa, Homo sapiens
VAHLSDEPETAPLIQQQNIMDQCYFENSLSTECIIRSASRSDGCQMPKLFCQNLPPPLPPKKYAITSVPQSEKSESTPDVKLTEVFKATSHLPKHSLSTASEPSLEVSTHMNDERHKETFQVRECFGNTPNCPSSSSTNDFQANSGAIDAFCQPELDSISTCPNETVSLTTYFSVDSCMTDTYRLKYHQRPKLSFPESSGFCNNSLS

SEQ ID NO: 919518 - protein, 597 aa, Homo sapiens
RQECMAPPGDVLPCFGSPSVGCTHCPTSPNEMNQCVCRSCGASSDPLPFTEFVRYISTTALCNEVERMLERHERFKPEMFAELLQAANTTDDYRKCPSNCGQKIKIRRVLMNCPEIVTIGLVWDSEHSDLTEAVVRNLATHLYLPGLFYRVTDENAKNSELNLVGMICYTSQHYCAFAFHTKSSKWVFFDDANVKEIGTRWKDVVSKCIRCHFQPLLLFYANPDGTAVSTEDALRQVISWSHYKSVAENMGCEKPVIHKSDNLKENGFGDQAKQRENQKFPTDNISSSNRSHSHTGVGKGPAKLSHIDQREKIKDISRECALKAIEQKNLLSSQRKDLEKGQRKDLGRHRDLVDEDLSHFQSGSPPAPNGFKQHGNPHLYHSQGKGSYKHDRVVPQSRASAQIISSSKSQILAPGEKITGKVKSDNGTGYDTDSSQDSRDRGNSCDSSSKSRNRGWKPMRETLNVDSIFSESEKRQHSPRHKPNISNKPKSSKDPSFSNWPKENPKQKGLMTIYEDEMKQEIGSRSSLESNGKGAEKNKGLVEGKVHGDNWQMQRTESGYESSDHISNGSTNLDSPVIDGNGTVMDISGVKETVCFR

SEQ ID NO: 919519 - protein, 945 aa, Homo sapiens; identical to SEQ ID NO: 919516

SEQ ID NO: 919520 - protein, 945 aa, Homo sapiens; identical to SEQ ID NO: 919516

SEQ ID NO: 919521 - protein, 533 aa, Homo sapiens
  misc_feature (3)..(4): Xaa can be any naturally occurring amino acid
PNXXLAGGKVKSDNGTGYDTDSSQDSRDRGNSCDSSSKSRNRGWKPMRETLNVDSIFSESEKRQHSPRHKPNISNKPKSSKDPSFSNWPKENPKQKGLMTIYEDEMKQEIGSRSSLESNGKGAEKNKGLVEGKVHGDNWQMQRTESGYESSDHISNGSTNLDSPVIDGNGTVMDISGVKETVCFSDQITTSNLNKERGDCTSLQSQHHLEGFRKELRNLEAGYKSHEFHPESHLQIKNHLIKRSHVHEDNGKLFPSSSLQIPKDHNAREHIHQSDEQKLEKPNECKFSEWLNIENSERTGLPFHVDNSASGKRVNSNEPSSLWSSHLRTVGLKPETAPLIQQQNIMDQCYFENSLSTECIIRSASRSDGCQMPKLFCQNLPPPLPPKKYAITSVPQSEKSESTPDVKLTEVFKATSHLPKHSLSTASEPSLEVSTHMNDERHKETFQVRECFGNTPNCPSSSSTNDFQANSGAIDAFCQPELDSISTCPNETVSLTTYFSVDSCMTDTYRLKYHQRPKLSFPESSGFCNNSLS

SEQ ID NO: 919522 - protein, 945 aa, Homo sapiens; identical to SEQ ID NO: 919516

SEQ ID NO: 919523 - protein, 481 aa, Homo sapiens
RQECMAPPGDVLPCFGSPSVGCTHCPTSPNEMNQCVCRSCGASSDPLPFTEFVRYISTTALCNEVERMLERHERFKPEMFAELLQAANTTDDYRKCPSNCGQKIKIRRVLMNCPEIVTIGLVWDSEHSDLTEAVVRNLATHLYLPGLFYRVTDENAKNSELNLVGMICYTSQHYCAFAFHTKSSKWVFFDDANVKEIGTRWKDVVSKCIRCHFQPLLLFYANPDGTAVSTEDALRQVISWSHYKSVAENMGCEKPVIHKSDNLKENGFGDQAKQRENQKFPTDNISSSNRSHSHTGVGKGPAKLSHIDQREKIKDISRECALKAIEQKNLLSSQRKDLEKGQRKDLGRHRDLVDEDLSHFQSGSPPAPNGFKQHGNPHLYHSQGKGSYKHDRVVPQSRASAQIISSSKSQILAPGEKITGKVKSDNGTGYDTDSSQDSRDRGNSCDSSSKSRNRGWKPMRETLTTLWKCKVVCYVRITGIL

SEQ ID NO: 919524 - protein, 138 aa, Homo sapiens
MSAALLSKEQNLCLEEVKVKEEKSVQNSISFLPAEAMMIFKVEIAEIPLHPVKMQQEGTTYEECALAKHYVCQQLDPGLPSLWNKEMSKETDEDVYKFKQALTGTRTTYTATNTINNTNNNQLGRGIHHIMLNEKMLK

SEQ ID NO: 919525 - protein, 138 aa, Homo sapiens; identical to SEQ ID NO: 919524

SEQ ID NO: 919526 - protein, 587 aa, Homo sapiens
MNEENIDGTNGCSKVRTGIQNEAALLALMEKTGYNMVQENGQRKFGGPPPGWEGPPPPRGCEVFVGKIPRDMYEDELVPVFERAGKIYEFRLMMEFSGENRGYAFVMYTTKEEAQLAIRILNNYEIRPGKFIGVCVSLDNCRLFIGAIPKEKKKEEILDEMKKVTEGVVDVIVYPSATDKTKNRGFAFVEYESHRAAAMARRKLIPGTFQLWGHTIQVDWADPEKEVDEETMQRVKVLYVRNLMISTTEETIKAEFNKFKPGAVERVKKLRDYAFVHFFNREDAVAAMSVMNGKCIDGASIEVTLAKPVNKENTWRQHLNGQISPNSENLIVFANKEESHPKTLGKLPTLPARLNGQHSPSPPEVERCTYPFYPGTKLTPISMYSLKSNHFNSAVMHLDYYCNKNNWAPPEYYLYSTTSQDGKVLLVYKIVIPAIANGSQSYFMPDKLCTTLEDAKELAAQFTLLHLGPISVEYAKPEVLSMDSNTEILMVLDYLCTDYGIPIMNWVLFDHEIHKVEHVQQHCYKVEYGDSLEASSCHTTITWPVISWNAPKISWLREKSLEPSILRIMEVTKNKSLYTSYTNYIEK

SEQ ID NO: 919527 - protein, 147 aa, Homo sapiens
VLKDENWMERRYSAKVEEQGSEQRETTQPKGSVISCHAQPSSIQSMQTDAYPELSQTPGGKLPFKVLMSRVSFCLPGWSAMAQSWLTAASTSWAQAILPPQPPEQLGLQSSNSLQYTYSFLGRSSCADRLQREGNCFTFIFLGHFQI

SEQ ID NO: 919528 - protein, 354 aa, Homo sapiens
MRLTSRPGSGLSRAPEQHPKPYFPGGTTAEQLLRCHTVSPGTDSRARVCTVHAQDCRMMSCMSPVLAPLLSARGFLGDPLRRVWGLNSCADKHYLLELGDPSAQGGKSGAGRSAAEAIPAVPRPWLTTRNWVAKPGGPRSLKQPRQANLDHIPGVPLGLCAGLLQTEVAGLWAPRPPLPRRIRELEGSPRFGEVAVRAHGLEAALCWHWATLPPPPSAAQELHPREGVAAAPAATDETLPYFSIRDFSPQTPEAPVLGPRDKAESRSSALAIPPLWPAGIRGQPGHGHRRTLGDSGDGPRLCSSPLLSATIALIGAHGRGPSSPCCQPSPSAGDQCSWGGERDILKDGRNQQCV

SEQ ID NO: 919529 - protein, 354 aa, Homo sapiens; identical to SEQ ID NO: 919528

SEQ ID NO: 919530 - protein, 943 aa, Homo sapiens
LYNNGESVSSFPTFSCMRLGQTLPSLRIWGMEFTKTTCRSQAKDYQSTDASDRAQIPFLSQARESSQLTAPNEWRASVYLNDSLNKCSNGRLPCVDRGLDEGPRSIPKCSESETDEDYIVVPRVPLREDEPKDEGSVGNKALVSPESSAEEEEEREEGGEACGLEGTGAVQPHRECSLEDSGPWAGEGVFQSDLLLPHIHGEDQEPPDTPGEAEEDDEEGCASTDPAGADEGSGPDRPTEDMGQDAEDTSEEPPEKEELAGVQEAETATDCPEVLEEGCEEATGVTGGEQVDLSEPPDHEKKTNQEVAAATLEDHAQDESAEESCQIVPFENDCMEDFVTSLTGSPYEFFPTESTSFCSESCSPLSESAKGLESEQAPKLGLRAEENPMVGALCGQCGSLQGGAAEGPAAPDVVVVLEEEALDDALANPYVMGVGLPGQAAPGEGGQAASDALGGYGSKEELNCEAEGGLVPADRKNTSTRVRPHSGKVAGYVPETVPEETGPEAGSSAPGIGGAAEEVGKTLLSLEGKPLEASRALPAKPRAFTLYPRSFSVEGREIPVSVYQEPEGSGLDDHRIKRKEDNLSLSCVIGSSGSFSQRNHLPSSGTSTPSSMVDIPPPFDLACITKKPITKSSPSLLIESDSPDKYKKKKSSFKRFLALTFKKKTENKLHVDVNVSSSRSSSESSYHGPSRILEVDRRSLSNSPQLKSRTGKLRASESPSSLIFYRDGKRKGVPFSRTVSRVESFEDRSRPPFLPLPLTKPRSISFPSADTSDYENIPAMNSDYENIQIPPRRPARAGAFTKLFEDQSRALSTANENDGYVDMSSFNAFESKQQSADQDAERYLTFYFLSCSAAVTVQEAAWVWGTDGLAFQPQALFLTSCVDLGAYTEPYKVCPISSAAPKEDLTSDEEQRSSEEEDSASRDPSVTHKVGHPTVSSSVKWKS

SEQ ID NO: 919531 - protein, 153 aa, Homo sapiens
ASLLLMQTPTASLNFSSENGFLFSTASSGCKFSEVLCPIHSELLESHWNSHKKNVMSEWRDSSFDTRNQIIGEYRQIYCRIYVSLACPANRTKKIYNHPVNIAPLSTYNQYATVIYIFFPMRKEVGEVVVKEESKERSQRGSHSVKIVSSKAV

SEQ ID NO: 919532 - protein, 162 aa, Homo sapiens
EQARALRTASMLSPLTPSHQLNTLRDCSPCHMEQENSSANYQPLSEFLTCKIFEQASLTSLSGNHLSLCLVCDCLRIPCTWCSLHIRSGSILIQTFLRYIPLAEDSCIHRNAAASSTDDTFTNSFPPHCVLLTSVLQRREVKNTSFMVSQNQFIIPILLTYF

SEQ ID NO: 919533 - protein, 136 aa, Homo sapiens
CLRQLWLGEPFASPTGTSVHGWTRPDLAGSGLAGGGPGGISRDRTGPTPRAPEACVPTGPGGGTMMPGETHSAAPGTAADLSRCQGCASLQQNLNEYVEALITLKQKIINTDNLLTEYQKKCDDILLLAFSVEFWN

SEQ ID NO: 919534 - protein, 516 aa, Homo sapiens
MSGARSKLALFLCGCYVVALGAHTGEESVADHHEAEYYVAAVYEHPSILSLNPLALISRQEALELMNQNLDIYEQQDVQIIVFPEDGIHGFNFTRTSIYPFLDFMPSPQVVRWNPCLEPHRFNDTEVLQRLSCMAIRGDMFLVANLGTKEPCHSSDPRCPKDGRYQFNTNVVFSNNGTLVDRYRKHNLYFEAAFDVPLKVDLITFDTPFAGRFGIFTCFDILFFDPAIRVLRDYKVKHVVYPTAWMNQLPLLAAIEIQKAFAVAFGINVLAANVHHPVLGMTGSGIHTPLESFWYHDMENPKSHLIIAQVAKNPVGLIGAENATGETDPSHSKFLKILSGDPYCEKDAQEVHCDEATKWNVNAPPTFHSEMMYDNFTLVPVWGKEGYLHVCSNGLCCYLLYERPTLSKELYALGVFDGLHTVHGTYYIQVCALVRCGGLGFDTCGQEITEATGIFEFHLWGNFSTSYIFPLFLTSGMTLEVPDQLGWENDHYFLRKSRLSSGLVTAALYGRLYERD

SEQ ID NO: 919535 - protein, 446 aa, Homo sapiens
MTAAQKDVQIIVFPEDGIHGFNFTRTSIYPFLDFMPSPQVVRWNPCLEPHRFNDTEVLQRLSCMAIRGDMFLVANLGTKEPCHSSDPRCPKDGRYQFNTNVVFSNNGTLVDRYRKHNLYFEAAFDVPLKVDLITFDTPFAGRFGIFTCFDILFFDPAIRVLRDYKVKHVVYPTAWMNQLPLLAAIEIQKAFAVAFGINVLAANVHHPVLGMTGSGIHTPLESFWYHDMENPKSHLIIAQVAKNPVGLIGAENATGETDPSHSKFLKILSGDPYCEKDAQEVHCDEATKWNVNAPPTFHSEMMYDNFTLVPVWGKEGYLHVCSNGLCCYLLYERPTLSKELYALGVFDGLHTVHGTYYIQVCALVRCGGLGFDTCGQEITEATGIFEFHLWGNFSTSYIFPLFLTSGMTLEVPDQLGWENDHYFLRKSRLSSGLVTAALYGRLYERD

SEQ ID NO: 919536 - protein, 554 aa, Homo sapiens
SWSVFGAVKGEWRMRHIQGGRRAKSRFVVCIMSGARSKLALFLCGCYVVALGAHTGEESVADHHEAEYYVAAVYEHPSILSLNPLALISRQEALELMNQNLDIYEQQVMTAAQKDVQIIVFPEDGIHGFNFTRTSIYPFLDFMPSPQVVRWNPCLEPHRFNDTEVLQRLSCMAIRGDMFLVANLGTKEPCHSSDPRCPKDGRYQFNTNVVFSNNGTLVDRYRKHNLYFEAAFDVPLKVDLITFDTPFAGRFGIFTCFDILFFDPAIRVLRDYKVKHVVYPTAWMNQLPLLAAIEIQKAFAVAFGINVLAANVHHPVLGMTGSGIHTPLESFWYHDMENPKSHLIIAQVAKNPVGLIGAENATGETDPSHSKFLKILSGDPYCEKDAQEVHCDEATKWNVNAPPTFHSEMMYDNFTLVPVWGKEGYLHVCSNGLCCYLLYERPTLSKELYALGVFDGLHTVHGTYYIQVCALVRCGGLGFDTCGQEITEATGIFEFHLWGNFSTSYIFPLFLTSGMTLEVPDQLGWENDHYFLRKSRLSSGLVTAALYGRLYERD

SEQ ID NO: 919537 - protein, 171 aa, Homo sapiens
KVLHFGLSMLFQNPLFMTVLSISDGTKEKLCVLLLSAHSARFLLQGLQPSSCFDRDDATKWKELLDTHFLNRFFPVIPARKMMGTVLRRSNHGNSSLNEVEVSLSYISRGVESVSLGLIWCHMLLDTHSFSTLASLVSWHPAHQQQQEERRIQEERTRSWARKYFSKGMIT

SEQ ID NO: 919538 - protein, 352 aa, Homo sapiens
MAPFCFPARSLQEFATVLRNLEDERIRMIENASEVLITPLEKFRKEQIGAAKEAKKKYDKETEKYCGILEKHLNLSSKKKESQLQEADSQVDLVRQHFYEVSLEYVFKVQEVQERKMFEFVEPLLAFLQGLFTFYHHGYELAKDFGDFKTQLTISIQNTRNRFEGTRSEVESLMKKMKENPLEHKTISPYTMEGYLYVQEKQGSPGREGKGIFMRWVAASLGTLPGILFSQRLLYFPFSPMSFSEEVIAARCPAVLPSTGSPAPPAGPERQRIKMQGPGLEEIWCWVATCPVIDGELFSPWLLQCERPGVITMQALSEEDRRLWMEAMDGREPEQVEGVCRHHSYSAEDWKS

SEQ ID NO: 919539 - protein, 396 aa, Homo sapiens
HVYITELIKDGKSLISALKNLSSAKRKFADSLNEFKFQCIGDAETDDEMCIARSLQEFATVLRNLEDERIRMIENASEVLITPLEKFRKEQIGAAKEAKKKYDKETEKYCGILEKHLNLSSKKKESQLQEADSQVDLVRQHFYEVSLEYVFKVQEVQERKMFEFVEPLLAFLQGLFTFYHHGYELAKDFGDFKTQLTISIQNTRNRFEGTRSEVESLMKKMKENPLEHKTISPYTMEGYLYVQEKQGSPGREGKGIFMRWVAASLGTLPGILFSQRLLYFPFSPMSFSEEVIAARCPAVLPSTGSPAPPAGPERQRIKMQGPGLEEIWCWVATCPVIDGELFSPWLLQCERPGVITMQALSEEDRRLWMEAMDGREPEQVEGVCRHHSYSAEDWKS

SEQ ID NO: 919540 - protein, 218 aa, Homo sapiens
QSFKYMTDVVYPLGMGVYTLVLGSRALGNVQDTIQTYLTHKEPGKCDYFLKEKAIDYVNPEMAQMLKLSDKYFTCYNQAHEVKPECKTCGSHGYVLNKGVMRCDLHSKNRRSCEEEASGGSESRREPTCGCLSNSRRTWAAGSGVGEKQVDLEVLLQVERKGEFCKMLWGPLSSAAEAQLFLWLLLEQPVDQDVAHATPYIRSPFSDALSQLFACTHL

SEQ ID NO: 919541 - protein, 186 aa, Homo sapiens
MGEGRFSSLSLLIQMLISSGSTFSDLLRSNASQLSRSAVGVDGGLRVAWKKPENGSLDLREERDEVCPGRSAGGSRSQSTGRMSAEGAGDSSVAMWGTLGPSAGNLEARKDIGWKGPLVLQSNSLEGSRRLWLRPPPEACFICGMKPVRCGETALGVRVGHAQGERCLLPLDVIDLRQHCEQNMEG

SEQ ID NO: 919542 - protein, 146 aa, Homo sapiens
MSLSFYVNYVLLHLSIKGALESPRIGSQLKEPAQVSILGLTGYNRAEGMEEKEDLSLLSVLPKVVCLTPGGKPEIIQLESDEAAGGCCHKQYLDHQGLPGYSNSISTYVEALFYQDIKCFREKELYPSQTEKFHNDSSKNYIQVKL

SEQ ID NO: 919543 - protein, 806 aa, Homo sapiens
GLYMSEHRSCVLFRFVLQSCVSHLKTSTEDEEPTEEYENVGNAASKWPKVEDPMPESKVGDTCVWDSKVENQQKKPVENRMKEDKSSIREAISKAKSTANIKTEQEGEASEKSLHLSPQHITHQTMPIGQRGSEQGKRVENINGTSYPSLQQKTNAVKKLHKCDECGKSFKYNSRLVQHKIMHTGEKRYECDDCGGTFRSSSSLRVHKRIHTGEKPYKCEECGKAYMSYSSLINHKSTHSGEKNCKCDECGKSFNYSSVLDQHKRIHTGEKPYECGECGKAFRNSSGLRVHKRIHTGEKPYECDICGKTFSNSSGLRVHKRIHTGEKPYECDECGKAFITCRTLLNHKSIHFGDKPYKCDECEKSFNYSSLLIQHKVIHTGEKPYECDECGKAFRNSSGLIVHKRIHTGEKPYKCDVCGKAFSYSSGLAVHKSIHPGKKAHECKECGKSFSYNSLLLQHRTIHTGERPYVCDVCGKTFRNNAGLKVHRRLHTGEKPYKCDVCGKAYISRSSLKNHKGIHLGEKPYKCSYCEKSFNYSSALEQHKRIHTREKPFGCDECGKAFRNNSGLKVHKRIHTGERPYKCEECGKAYISLSSLINHKSVHPGEKPFKCDECEKAFITYRTLTNHKKVHLGEKPYKCDVCEKSFNYTSLLSQHRRVHTREKPYECDRCEKVFRNNSSLKVHKRIHTGERPYECDVCGKAYISHSSLINHKSTHPGRTPHTCDECGKAFFSSRTLISHKRVHLGEKPFKCVECGKSFSYSSLLSQHKRIHTGEKPYVCDRCGKAFRNSSGLTVHKRIHTVSDELP

SEQ ID NO: 919544 - protein, 1645 aa, Homo sapiens
FSYPQSPSVNQLYEMAYVLRRERGHGEKYGNIRIPGEVEASEFEMILDAAIEAKLETKLLEEWYCRDENSVPAAYYLRPKSEMLRSNRNAMQPSTNAENEKTWQEISDEIKKIFKAAVKLLHEKGKMKHSQAKRYLFSAIEDEFDFALGKQTPAFLKKCVCYIRKIANIERFVKIPEMGKYMDITGTEPRIIRDPEAQEKLIKLRDEFIPTIVASSNLRVYTSVTHCDMKLGYSQEIENHYIEGLGKQFYEDMIDIIQATIQQNFDTETDTLYDEILQHSSLCKTYASFYEYKCESLNIVHNYILPSKAGHINPLIIYGGPCTGKTLLLAEVAKKAYGWLHEDTGPESDPVVIVRFLGTTDMSSDLRTLLLSVCEQLAVNYRCLVQSYPKKIHDLCDLFINLLNESSLQRPLVIIFDALEQLSENDDARKLWWLPAHLPRFVRIVLSTLPNKHGILQKLRCLIHEEDNYIELIPRDRKMCSQVLKHQLLRVKRKVTSGQQIYVNNALSKCTLPMFVNLTFREVRHWRSHKDVDESSLSVTVHESIEQLFWSLEKKCGQKLVSRALGYITMAKMGLSEMELEDVLALDNSVMSELKENTRPSNPLRVPYLYIARLKEGLSGYLIERHVKNVTLLVWANRHLQLIAQKLYLQDDNDLREMHTILADYFLGVWSGGRRKAFCLEDPYLNGCLDLENRSLLEEEKHFMEQASFDRQAPDQPWVFQCNPLEPDIFFVNHRKMSELLYHLTRCGKTDDLLYGIIMNFSWLYTMIKIGQFDKVLSDIELAYNYSQEKELKFLANTLRSIKNKVTAFPGSLSAELQQRLLPVVSSLPKLRHLLLECDKDGPKYCSIVPLHSSMDVTYSPERLPLSSSHLHVTEILPTCNPSTVLTALENGSISTWDVETRQLLRQITTAQSVILGMKLTSDEKYLVVATTNNTLLIYDNVNSCLLSEVEIKGTKHGSSATYINGFTLSANHALAWLEASKDVTVIDLLYGWPLYQFHCWYEVTCVQCSLDGLYAFCGQYLNTTTIFHLGSGEKLCTVTSEFSGGFVKFLLILDTAQEMVMVDSEGSLSVWNTEDISSPQLTDDFDCRREDSEVVSIELSEDQSAVLICKALSIELLDTGLWKVAEKFRAKHNERFISAVLSKNGDCIIATMENTSAVFFWRRDTGQCMASLQEISGSIVKLVKSSHHNMLLSLSTSGVLSIWDIDIITAMSNIDKTGKPIQSLLLPARGEIIYSLDGSDCVHKWNFSSGFIEAVFKHEGIVEHCVLTSTGDIMVTSDDKSSQYVWHTSSGENLFRINGQRISQLLITHNDQFVVSLCEENASRVWRLATGHRVCNILTTLQNAFITSANTFVVGMTKSKVLAVSLWTGSITKKFCCEDGTTIVNFKLIPDCPDIIVFITSAETVNIWSLTDEVICRRVQLPNNFLKNLEDFEISPNGKLGIIARGDENINVLDLYSGKLRVVHASGIIWRQRLSRDGRYLVYICFRNGEEEDENGAIFSLIVMRLADGKNIGACSLYKTPTFLALSQRHLNIIVGFDDGSIGIYTVVDRVDAALKIKIATSNSRQIFNNATHTSRPKCNSYCFKISVDCLWRESTEVFARDSPITVSDSTESNEATPSKKHNSCYERVCSALEARGHSYAPDN

SEQ ID NO: 919545 - protein, 140 aa, Homo sapiens
MDCKSPKRANICPHLPGGGLFSTPPSQAAWRTLLTALCFPGPTCTGPMREGPRAVYNPPRAHRNSSDNCVMKHLLCAGDKNGTRRHALPSPLEGSFQPGRQIPPPQTPSTDPQTLPLSFRSLLRCHQLCAASLPPSLKLP

SEQ ID NO: 919546 - protein, 140 aa, Homo sapiens
MFGQPESDLQKGEPRAPPAQEDLAVRVKVCSCEEKALPGLLQECLLLNEVLCQPYSCLRHKKGVWGKLQGPEPIEQVILSHPSHSRTLPLVTQKLFISFSFKSPLVSREEGEMETCVRQGGENQTGPCAYLKMRKCFMKQ

SEQ ID NO: 919547 - protein, 173 aa, Homo sapiens
GFSVSATWGMEPVQKGPGSRSFHCVWKSFHLSGIGCGFCVQSGIGKQLLCSELTVFVRPGPDGRYVSHQSVSVYSTRGDPLLGHLSNELGKKACHPRSTDGAPDHVLPSTRESLASNTSSIVESNRRQNPALSPAHGGAGPAFNFRASAEPPTNEAEKLQKPSNCLQASVTSV

SEQ ID NO: 919548 - protein, 863 aa, Homo sapiens
MKKTRSTTLRRAWPSSDFSDRASDRMRSRSEKDYRLHKRFPAAFAPQASRGYMTSGDVSPISMSPISQSQFIPLGEILCLAISAMNSARKPVTQEALMEHLTTCFPGVPTPSQEILRHTLNTLVRERKIYPTPDGYFIVTPQTYFITPSLIRTNSKWYHLDERIPDRSQCTSPQPGTITPSASGCVRERTLPRNHCDSCHCCREDVHSTHAPTLQRKSAKDCKDPYCPPSLCQVPPTEKSKSTVNFSYKTETLSKPKDSEKQSKKFGLKLFRLSFKKDKTKQLANFSAQFPPEEWPLRDEDTPATIPREVEMEIIRRINPDLTVENVMRHTALMKKLEEEKAQRSKAGSSAHHSGRSKKSRTHRKSHGKSRSHSKTRVSKGDPSDGSHLDIPAEREYDFCDPLTRVPREGCFIIEHKGDNFIMHSNTNVLESHFPMTPEWDVSGELAKRRTEMPFPEPSRGSSHSKVHRSHSHTQDRRSRNERSNKAKERSRSMDNSKGPLGASSLGTPEDLAEGCSQDDQTPSQSYIDDSTLRPAQTVSLQRAHISSTSYKEVCIPEIVSGSKEPSSACSLLEPGKPPESLPSYGELNSCPTKTATDDYFQCNTSSETVLTAPSPLGKNKEDHDTLTLAEGVKKLSPSDRQVPHSSREPVGHKEESPKGPGGGPAASGGVAEGIANGRLVQHHGAEPSSLDKRKEIFSKDTLFKPLHSTLSVNSYHKSSLSLLKSHPKTPADTLPGRCEKLEPSLGTSAAQAMPASQRQQESGGNQEASFDYYNVSDDDDSEEGANKNTEEEKNREDVGTMQWLLEREKERDLQRKFEKNLTLLAPKETDSSSNQRATHSARLDSMDSSSITVDSGFNSPRN

SEQ ID NO: 919549 - protein, 85 aa, Homo sapiens
RPPSGFHIRCLGDVSPISMSPISQSQFIPLGEILCLAISAMNSARKPVTQEALMEHLTTCFPVLGRAWLPTHQALLKVTVVRTPL

SEQ ID NO: 919550 - protein, 926 aa, Homo sapiens
MKKTRSTTLRRAWPSSDFSDRASDRMRSRSEKDYRLHKRFPAAFAPQASRGYMTSGDVSPISMSPISQSQFIPLGEILCLAISAMNSARKPVTQEALMEHLTTCFPGVPTPSQEILRHTLNTLVRERKIYPTPDGYFIVTPQTYFITPSLIRTNSKWYHLDERIPDRSQCTSPQPGTITPSASGCVRERTLPRNHCDSCHCCREDVHSTHAPTLQRKSAKDCKDPYCPPSLCQVPPTEKSKSTVNFSYKTETLSKPKDSEKQSKKFGLKLFRLSFKKDKTKQLANFSAQFPPEEWPLRDEDTPATIPREVEMEIIRRINPDLTVENVMRHTALMKKLEEEKAQRSKAGSSAHHSGRSKKSRTHRKSHGKSRSHSKTRVSKGDPSDGSHLDIPAEREYDFCDPLTRVPREGCFIIEHKGDNFIMHSNTNVLESHFPMTPEWDVSGELAKRRTEMPFPEPSRGSSHSKVHRSHSHTQDRRSRNERSNKAKERSRSMDNSKGPLGASSLGTPEDLAEGCSQDDQTPSQSYIDDSTLRPAQTVSLQRAHISSTSYKEVCIPEIVSGSKEPSSACSLLEPGKPPESLPSYGELNSCPTKTATDDYFQCNTSSETVLTAPSPLGKNKEDHDTLTLAEGVKKLSPSDRQVPHSSREPVGHKEESPKGPGGGPAASGGVAEGIANGRLVQHHGAEPSSLDKRKEIFSKDTLFKPLHSTLSVNSYHKSSLSLLKSHPKTPADTLPGRCEKLEPSLGTSAAQAMPASQRQQESGGNQEASFDYYNVSDDDDSEEGANKNTEEEKNREDVGTMQWLLEREKERDLQRKFEKNLTLLAPKETDSSSNQRATHSARLDSMDSSSITVDSGFNSPRTRESLASNTSSIVESNRRQNPALSPAHGGAGPAFNFRASAEPPTNEAEKLQKPSNCLQASVTSV

SEQ ID NO: 919551 - protein, 144 aa, Homo sapiens
MTIFACTCQLNNLGACLNAIGLDGRSNQPQHSLKPKPIPEQGLTLFNSLKPERGEEAEEKKLEASRDNDPSDGSEQSKLKTFWKGLTILDVIKNIYDFWEEFNKLPQQFQSSTATTLISQQLTTLRQDPPSAKSSGLIEGSDDC

SEQ ID NO: 919552 - protein, 242 aa, Homo sapiens [sequence omitted]

SEQ ID NO: 919553 - protein, 121 aa, Homo sapiens
PLTQPLFHLPGTLVQSMVKNLEKQLEAPAKKPAGGVSLFFMPNAGPQRAATPGRKPQVGCRMLRVYSGILYRTSSEFGGPGVKVGEGPASVILCPSGTLWVTSLCPCAHGEMASLEYLYPS

SEQ ID NO: 919554 - protein, 139 aa, Homo sapiens
MLPVQALLPNRRFSWQKNWHMLGSAGCAPEPALPHWQMGILEIALPHPPQASYHPNRWAHVKEFKGEPVVEENNFIEMAVLRLRDCSRRAGLPYRLCQEQQLRHSSQLKKDTSHIGLGPHLLHCDFILTNYIYNNLISK

SEQ ID NO: 919555 - protein, 148 aa, Homo sapiens
MVHFMCQLGWAIGCRSDLVPVCVKFYWNTVMPISLHIVHCCFLATMAGLRSRGRHIWPPKYNKLTLALCRRFAIPCSAASLHTPTKAAAQVKARLDLTPATVNKWEKNKHLSMNPIAQEKGKDVVGVAPDTHILLERTFLSLPLYARL

SEQ ID NO: 919556 - protein, 108 aa, Homo sapiens
LENGACCHSLSHTDPRDVSGGWGGASELLPVPNADTAQSRVPTMFSAGCNPLYSTSLQIQSLSLRKVEGIHKVPKAVDTEEDSPEEGGTLLSFLGVQCRNRFAALLLV

SEQ ID NO: 919557 - protein, 150 aa, Homo sapiens
ESASPVSMREARAAAVVTSGLRPVLARAVNRKVSGGRDSRRVHQEEETSDRSPGRQRGIPASGVRGQCAGESPQKWRSWDVEDRSACVSVGCSLHRWLGSRREQNPAGSGAAWVWASVSLQSWQKVTGEPALHMAGSRKKSEKWGGAIHF

SEQ ID NO: 919558 - protein, 150 aa, Homo sapiens; identical to SEQ ID NO: 919557

SEQ ID NO: 919559 - protein, 150 aa, Homo sapiens; identical to SEQ ID NO: 919557

SEQ ID NO: 919560 - protein, 148 aa, Homo sapiens
MADTPPPARLPRRAISDCCASTSLLQLPFTRKGKSPDPLHFQGQSLAISHNSVREKELTETFEMKKVLLLITAILAVAVGFPVSQDQEREKRSISDSDELASGFFVFPYPYPFRPLPPIPFPRFPWFRRNFPIPIPESAPTTPLPSEK

SEQ ID NO: 919561 - protein, 104 aa, Homo sapiens
  misc_feature (8)..(8): Xaa can be any naturally occurring amino acid
MGDRYVVXRQLISPAPRFGMKKVLLLITAILAVAVGFPVSQDQEREKRSISDSDELASGFFVFPYPYPFRPLPPIPFPRFPWFRRNFPIPIPESAPTTPLPSEK

SEQ ID NO: 919562 - protein, 148 aa, Homo sapiens; identical to SEQ ID NO: 919560

SEQ ID NO: 919563 - protein, 104 aa, Homo sapiens; identical to SEQ ID NO: 919561
  misc_feature (8)..(8): Xaa can be any naturally occurring amino acid

SEQ ID NO: 919564 - protein, 159 aa, Homo sapiens
VLMWYPHWVETMYIMSVSLLGNLIENSCQTCLEFFPSGGFVVLLASRVKLQTFPLSVTALKGSRLELFVPPGGFVVSLALRVKLQTFAGQQECRACQARTHPEFTLACEPQGPPRTQGQSVLTILPPNQTPPLLLTTTFFLPHSANQRPCEHWEAVKME

SEQ ID NO: 919565 - protein, 327 aa, Homo sapiens
MRCGKHHSEGVFQSRGGCNQPFSTACLGECAPGRVTCGRAAVCAKKYNNTEYPQQYRISTAKQNIHSKTTIQNIHSNTEYPQQYRISTAKQQYRIPTAIQNIHSKTTIQNIHNNTEYPQQYRIPTAIQNIHSKTTIQNTHSNTEYPQQYRISTAIQNIHSNTEYPQQNNNTEYPQQYRISTAIQNIHSNTEYPQQYRISTAIQNTHSNTTMQNIHSNAEYAQQNNNTEYPQQYRISTAIQNTHSNTEYPQQNNNTEYPQQYRIPTAIQNTHSNTTTQNIHSNAEYAQQNNNTEYPQQYRNKSNLAHPLRSIYLITMTTYFIILLPNT

SEQ ID NO: 919566 - protein, 131 aa, Homo sapiens
MSPVSRVEIDVLQNSLLDDLAPGSGKSEPRPRFTVLPQILGMLQEAELQGPSGFRPQTPGSLQSHHESCSVAQAGVQWCDLGSLQRLPPRFKRFSHLSLLNRWDYRHPPPRPDNICIFSRDGVSTYSPGWP

SEQ ID NO: 919567 - protein, 172 aa, Homo sapiens
QWFEALQALMPFLHNVNGLYNLSGPSAAGLLEFAGGPLQTLFAWVSPVEAAERKDCCLFLPLEASSQRGTHQIPAGALLYEAAGCQERLSLLKLHPQPPLPRGALSRGDGSFIYRPLTGAAAFLSEMPCSKAGQEPKELQTQPRSSHWKIVVTMVPIGCLIFLPMDARLQGH

SEQ ID NO: 919568 - protein, 461 aa, Homo sapiens
TCCGGFGQDRGQGQSGLCPIITQEARCGLLSVRSLLTLLWARGRGSSLHLEPPRLPAHSWPWLSSLCGAASPCCALVAVALLSIWSRLTSLRTRGRGSPLCVELLHLAVCSWPPVTYQKLHCEGAEEAVMPPPGYDAPEARGAAADGPRALGTWEVDLQVEAPQAQRPGNGARCSAENCSPWEDCAGVHQVGVKGEGRLVWECGGGHAGVAPGRNEESSRGEEGGCQHREKLSFFMCVPSSGNANRHSLTGSPLGSFLWNWAHSYHTLQHSCSLVFSKLTENFCPHQNLHTDVYSSFIHNYRNSEAAKMPLSQRGDDGASRVASEKSLGHETGALRTGTQCKDALTRDRNSNASTVSCQPPELPQTNFWGLSHQPVNNGNGKEIFGCQGFSGEAVSRPSTEGFEGGETVPSDSSHPGDAAVNKPTMLPVIEKSSTYGHEHRSTQCLMMLCSESGVSVSSCY

SEQ ID NO: 919569 - protein, 470 aa, Homo sapiens
TCCGGFGQDRGQGQSGLCPIITQEARCGLLSVRSLLTLLWARGRGSSLHLEPPRLPAHSWPWLSSLCGAASPCCALVAVALLSIWSRLTSLRTRGRGSPLCVELLHLAVCSWPPVTYQKLHCEGAEEAVMPPPGYDAPEARGAAADGPRALGTWEVDLQVEAPQAQRPGNGARCSAENCSPWEDCAGVHQVGVKGEGRLVWECGGGHAGVAPGRNEESSRGEEGGCQHREKLSFFMCVPSSGNANRHSLTGSPLGSFLWNWAHSYHTLQHSCSLVFSKLTENFCPHQNLHTDVYSSFIHNYRNSEAAKMPLSQRGDDGASRVASEKSLGHETGALRTGTQCKDALTRDRNSNASTVSCQPPELPQTNFWGLSHQPVNNGNGKEIFGCQGFSGEAVSRPSTEGFEGGETVPSDSSHPGDAAVNKPTMLPVIEKSSTYGHEHRSTQCLMMPKAGSSGGVLLGAGSSMPVVDP

SEQ ID NO: 919570 - protein, 183 aa, Homo sapiens
SRAGGPRQPPPPPAPPPGTMLPSQEASKLYHEHYMRNSRAIGVLWAIFTICFAIINVVVFIQPYWVGDSVSTPKPGYFGLFHYCVGSGLAGRELTCRGSFTDFSTIPSSAFKAAAFFVLLSMVLILGCITCFSLFFFCNTATVYKICAWMQLLAGRGGGGRNSQNKRQGRGSFLPGPLPEGVG

SEQ ID NO: 919571 - protein, 293 aa, Homo sapiens
MFISLWEFFYGHFFRFWMKWLLRQMTGKCELQRIFDTYVGAQRTHRIENSLTYSKNKVLQKATHVVQSEVDKYVDDIMKEKNINPEKDASFKICMKMCLLQITGYKQLYLDVESVRKRPYDSDNLQHEELLMKLWNLLMPTKKLNARISKQWAEIGFQGDDPKTDFRGMGILGLINLVYFSENYTSEAHQILSRSNHPKLGYSYAIVGINLTEMAYSLLKSEALKFHLYNLVPGIPTMEHFHQFYCYLVYEFDKFWFEEEPESIMYFNLYREKFHEKIKGLLLDCNVALTLKV

SEQ ID NO: 919572 - protein, 178 aa, Homo sapiens
MFISLWEFFYGHFFRFWMKWLLRQMTGKCELQRIFDTYVGAQRTHRIENSLTYSKNKVLQKATHVVQSEVDKYVDDIMKEKNINPEKDASFKICMKMCLLQITGYKQLYLDVESVRKRPYDSDNLQHEELLMKLWNLLMPTKKLNARISKQWAEIGFQGDDPKTDFRGMGILGLINLV

SEQ ID NO: 919573 - protein, 293 aa, Homo sapiens; identical to SEQ ID NO: 919571

SEQ ID NO: 919574 - protein, 112 aa, Homo sapiens
VPSFPLPAVCSGETEAAPAPPSSSAPVRWLLFLFLLPRMPRCGCTESARAREPRGVLREPGGAWAGGSLCEPCPPIRGRRARGVGAETPRALGCSGAATRASPLLGSSALLS

SEQ ID NO: 919575 - protein, 137 aa, Homo sapiens
MQQQIINTSPLYSLLTFIGSIVCDFSFNPSSNAGLALCTYKALYIPNSMESHLADGSGEKWVATGYRNEADQYELMWKDLSHTVKPTNQDVKDNVLGHIFPEADLERKGMKTVYPRKHWEERGTEDRERRRPAKVCY

SEQ ID NO: 919576 - protein, 146 aa, Homo sapiens
MKDSAMIATSGDVTASTAMTRDELGHCPAAPWEDQLLCQHSSVSSFVKHKHHHLSGSEAHGKPTLQEDPAIPKVPISLTELGVPKGTRGFRPWTPDMFQDSFTLCQTCKPCLGFFPTLSFFPTHVFTNSGLSTPYWVGATICPFYR

SEQ ID NO: 919577 - protein, 148 aa, Homo sapiens
LFIIIVYHNFKQFIMMLVSSNLGEQESTRSFLVLTSWKQDPLNTGMPTHMPPIDRHSGLSQSNISFRTDRLQSTYWHPAGITCDTLVIAAASWTCSRCASLERHLPKTVKQLYTYETGLALSPEQKSLSNVSSTDSTFGHEEQGSNKE

SEQ ID NO: 919578 - protein, 181 aa, Homo sapiens
MCLSPVMVTFAFRERPLLSAEQCEITSFLPSMKVVSCWSPPLPQMTNATLAHSAKALRSFQRARVILHPLGFSGNEATGPSVHEFSGYIPQEQILVTEARVDYQCNGPSPLMIAAFFGGAGVAKLPSLILSSFLVLPRGCWVHLSLCQTDRLRHARTEGGVGVGGRIKLGKASLVFVDYQN

SEQ ID NO: 919579 - protein, 225 aa, Homo sapiens
NHGSWSCSIRPQGHTPNYGSWSCSILPQGHTPELSLLVLLTPGPAQSLPSVTHWNCGSWSCSIPSQCHIRESWLLVLLNPSPGSHTKLWLLVLLSPSPGSHTGIMAPGPGSIPPQDHTAEFLQGPSLLGCITEYHRPDSYKEQKHISHSSGWWKSESRMPALLGAGQGEFLSSYPAIPGDALPPTAAQSAFSWGCKAAVTRKIHLDGQQQREEEAGQTRRETMRF

SEQ ID NO: 919580 - protein, 139 aa, Homo sapiens
MGHLPSPRCPDTWTMGRGTPPSPWTRPEYPFPSASCTQYGSLHQVASMSHRLTLGCACLIQQEKPTGLKGMQKPKYKASAPATHNCHIPIETFTFISWRGVSLTSFLEPLFMEHFQLPDTGDKKKKEHSTFNLTHSSWS

SEQ ID NO: 919581 - protein, 150 aa, Homo sapiens
MISYSDMVMGKGFMTKTLKAMATKAKIDKWDLIKLKSFCTAKETISKVNRQPTEWEKSFAIYSFDKGLIIRIYKELKEIYKKKTNNPIKKDKDVVGNHHSQQTNTRTENQTPLQVLTLKWELNNENTWTQGGEHHTLGPVGVGGLGEGWY

SEQ ID NO: 919582 - protein, 374 aa, Homo sapiens
MVMKAPSPPMATGRTGLLGPHAPGPAEGEYLIGVASAPTPIPHSLKCAILGKCGPPQSAPPCAGPSHGGKFCEGSTRTLKLCNSQKCPRDSVDFRAAQCAEHNSRRFRGRHYKWKPYTQVEDQDLCKLYCIAEGFDFFFSLSNKVKDGTPCSEDSRNVCIDGICERVGCDNVLGSDAVEDVCGVCNGNNSACTIHRGLYTKHHHTNQYYHMVTIPSGARSIRIYEMNVSTSYISVRNALRRYYLNGHWTVDWPGRYKFSGTTFDYRRSYNEPENLIATGPTNETLIVELLFQGRNPGVAWEYSMPRLGTEKQPPAQPSYTWAIVRSECSVSCGGEFKGLRGAVMEFMNGKKTAGKFPPPLASFQKHYFASKEDG

SEQ ID NO: 919583 - protein, 130 aa, Homo sapiens
MPLCTLALEICLSPAGRACWKCQGVKVTRNSPQLIMRKSLWINIQAPCLQTLTIMRFPSCGCCISHFLSKLGKELLKDAPVDHLGTKHISFCTQCRIATLLFYDALVTPIDLIMVRVSYKSRLYTDMFPS

SEQ ID NO: 919584 - protein, 149 aa, Homo sapiens
YVHKVFGMVQGTLPLSHFTQSLELPVSVSVIAFGIWFLNRWFPFLLLSLDGELIGDCKFFSTDYYAGNVEGISYTGFTNEKLKLRVKIRFAQVITYRKIADQKFRSGRVNYKTHVLEPLRSSYKESQLHSSMNDHKMGLPQLTVKTKLQ

SEQ ID NO: 919585 - protein, 156 aa, Homo sapiens
MCTGRWVQCVLTRGQPPSRFSPAQVSVDGLWKYVSGVLSLWVWTRQLSLLRGRVQLLEEYGGREGDSTVMESDLNHVHGAVYFGNYLLYISNSIDTRPTAQTPYGNKTPNYKQHLRPRQQLNTHRPRDSNDCSSSTCRRWLTPFHSCDYSFDWTRG

SEQ ID NO: 919586 - protein, 72 aa, Homo sapiens
PSLPVAAKLMSPRQVGFTARPGSSRVENELGASPEAPAQLQRLPASLAAAKAGRSPGDRESRPARFRPRLRL

SEQ ID NO: 919587 - protein, 371 aa, Homo sapiens
MPSFHSCISAFSADSSAEAIAQAKDLLSQEDLKAAMSAVSMGSRECGLVVSLASGVKPQTFAVSVTVLKAARLELFIPPRGLVVSLASGVKLQTFASQVVCFDRVLIDSGAQLASPSGSRTRAAGGAACQCHAVRSHSSALGWSMGLGAVEQGVVLVGEARAAQEPMEWVGGSGMAGCMSRALPHGKAAKAWREIEHSAGGPALLGDLVHPLQPLARVPSPSLPCASRAGRLLRVQARQTHAHPELQLAPKRARSPGSRSRLSLHTSLQAEGASCGLGQHRKGLPQCSGGLKGSSSAAKVGAQAEEALRASEGCEDCQHAVTSQLSLPHGVATLVSVKLFLYKNAMVFLCAVVRKNPLGRYKSSFRHLFPE

SEQ ID NO: 919588 - protein, 371 aa, Homo sapiens; identical to SEQ ID NO: 919587

SEQ ID NO: 919589 - protein, 137 aa, Homo sapiens
MFPQGPANSTHNRETLNPYQKRNASRKMSYGVFDNLGLRLRYCQGRRSRARERTRNCSRLKENNETINIPGTRKNMVLGLLEKLEWDYRIGRHDHCLQGPDQSRAHRSCSPWTVLKMVIPWWESFRVPLLGCHIIDK

SEQ ID NO: 919590 - protein, 175 aa, Homo sapiens
SRLQKMGNKKICKGCVDLLKENYKSLFKEISGKQMEKHSIFINRKNQYCENAKTILSKKNKAGGIKLPDFKLYYKVTITISAWYWYQNRHIDQLNRPESSETTPHLSNNRIFDKLDKNNQWGKGLLSSKWCWGNRLAICRKLKVDPFLTPYTKNNSRWVKDLNLKPKTIKTLEEK

SEQ ID NO: 919591 - protein, 125 aa, Homo sapiens
MCISNRFSDDDDDDDDDDNAGPGPVFENHYSKYFMQKEQPIEVMGPQTDEQEASGQDSQGSLGLGNHVLTSIEANKDHVCMSALCQEGSCGSHQHIERRENVVILHPFYCKEIGADVAGQFTTCL

SEQ ID NO: 919592 - protein, 158 aa, Homo sapiens
MCPSSPVFTWPSPCACLHMAVFLQGHRLYEATYRDLAFTLCEVGAVEDTEQKRGKADTTPTTPPQGSRAHYITVIAVKGSWQCGAIIENQEVGMNLIQTVTSEGVSEEPGLEAIVYTIAIHIPLARTQCHGPSLSARLLDPGGADDLGGIKTCLCTMN

SEQ ID NO: 919593 - protein, 117 aa, Homo sapiens
CYMRVSCKDLEKYIIRQKSCPVRTKPYTRMHRKNTLELDKKEKSMGLKLTTHEYGAATPKEDLRHLFPSKCSGSAHSVAPSPAGLLASSLIPGSYPCAIGSGERFQFRLTYFRMGLC

SEQ ID NO: 919594 - protein, 163 aa, Homo sapiens
RLYLRKLLKDLQYEGNNSEAIAMKLPIMAESKGGARCPTWWEQKRERRIPQELAHYHENSSRDGANPFMRNCPHDPTPNKASPPTQGITIPHEIWWGHRSKPPYYDCFHQRILKRKVKAVTIHCLIANKIFLKLNSNYVYPLIKSFLYLSISLGAESKLRTKG

SEQ ID NO: 919595 - protein, 144 aa, Homo sapiens
MAQPHCLLVSQGWWLALGENGTERRAGEGQRETFASEAAAEIFLLGYCFLSPYRAMPYAAVVGRYKELTLMLCANGIGRNGSMHYAHLSSAQLRRGSTKDPSYTWAQHKPEEQQLAALGCDGPYLKSGLEGTNRAFSIQKEAHT

SEQ ID NO: 919596 - protein, 145 aa, Homo sapiens
RYNVDNSCEKWLKQIEGTEAALTQKMLDLEKEKDLFSRQKGYLEEELDYRKQALDQAYLVGPEKIQDLEATLYTALQQEPGRRAGEALSEGQREDLQAAVEKVRRQILRQSREFDSQILRERMELLQQAQQSTKSGLLSLTFEAL

SEQ ID NO: 919597 - protein, 254 aa, Homo sapiens
VLGAPRRGTSTYDTCLRAHPQPRPQRERGQSSHSLTCRSGARPACSPRTLRACALMSWHEPCFHAPTPPTLCVIPPPLMVAPGTLGCSNSRCWRDEGSGFGILQAGFQISILHPCDLGQWLKQIEGTEAALTQKMLDLEKEKDLFSRQKGYLEEELDYRKQALDQAYLVGPEKIQDLEATLYTALQQEPGRRAGEALSEGQREDLQAAVEKVRRQILRQSREFDSQILRERMELLQQAQQSTKSGLLSLTFEAL

SEQ ID NO: 919598 - protein, 156 aa, Homo sapiens
SPGFRVCAVIKHPLMDAPVFPRDPAQVLRVLCPILLKGFSWPWLWRTRWLLTARVIMLKRGLSSSHCFGQDLKIYRFHDDSPPALFYSTQENFLGSHPPKRHANSCFLIEDICDQTSSRNAGLDRARQQTLQFAFESYNGVLGWMGWLQDAFEGYL

SEQ ID NO: 919599 - protein, 167 aa, Homo sapiens
FVYVEPALHPRDEAYLIVMGEFFDVLLEGLTQLGETGNRTCLTKYLDCPLVEGVCFAGGKPTQLGCPYSSELPGGKDKSPGPQSLWPPIPLGDQAQRDSGSVPEPLAGVTGVLAWKPRPEVVSPSAECCPFPKKLRWLRQQAAAAVVLVAPPPGRLVGLSLFQLRGC

SEQ ID NO: 919600 - protein, 162 aa, Homo sapiens
MSFVRDMDEAGNHHSEQAITRTENQTPHVLTHRWELNNEDTWTQDGEHHTPGPVVGWGEGVGITLGDIPNIPRIRMGTCLWSHHSARYRKDVSKSLQDCQFLLVIQRNGCISKVSFPHIFPKSDQRKPRPGVFSGSVTISRVGLYCKKNAVTLPKRTLSHFF

SEQ ID NO: 919601 - protein, 325 aa, Homo sapiens
MGLESPTWALPSGSVRRGPPFCRPQNGRSTDSLHHAPGKAADTQRQPVKAARREAVPCKPTGAELPKTMGTHLLYQHDLHVRLTVGPVSPQTHPVVISPVPECIIDIDILNSWQNPHIDSLTGRVKAIMVGKAKWKPFEPLLPIKIVNQKQYRIPGGIAEISATIKDLKDAGVVILTTSQQEKALQQVQAAVQAALPLGPYDPEDPMVFMVFEVSVAGSSQYSGITQKWTAAALQSFSRTSLKDSYEGKSSQWAELRAVHLVVHCARKEKWPDMRLCTDSWASTNGLAGWSGTWRKHDWRIGDKEIWGRGMKVWVTPPGKKHTTC

SEQ ID NO: 919602 - protein, 150 aa, Homo sapiens
RPFTFKVNIDIMFFFSFPFPFPLFLGGVTVGSFGFASIDICTSFGRFYIGLWNSTYKPIDGTYRQKLSVVNVAGYIVDPCLLAEALCYLRQWVDSSVTRLGAGKPPRVQVLYTESLYRKSRQFSLLIQVIWCSECMKAIWHGMFTILFAV

SEQ ID NO: 919603 - protein, 167 aa, Homo sapiens
MQRLEGLQPEPPSSPWYTGNHAMAPMGSSPGGPYAQLRCQDLATSTPGVSTFSSEKWGGHLWTVMRINFGGAWRGKSGPKIQGVGLLLPILGRLRSGRPEDREPAAKRERAGVQPGCPELCQLPLQKTDAACCLQRWAACGFPVTLSPSWRCSALPRSHTPVPILVF

SEQ ID NO: 919604 - protein, 304 aa, Homo sapiens
MSRSFYVDSLIINGTSRPAPSLPEPHPGPDFFIPLGMPPPLVMSVSGPGCPSRKSGAFCVCPLCVTSHLHSSRGSVGAGSGGAGAGVTGAGGSGVAGAAGALPLLKSQFSSAPGDAQFCPRVNHAHHHHHPPQHHHHHHQPQQPGSAAAAAAAAAAAAAAAALGHPQHHAPVCTATTYNVADPRRFHCLTMGGSDASQVPNGKRMRTAFTSTQLLELEREFSSNMYLSRLRRIEIATYLNLSEKQVKIWFQNRRVKHKKEGKGTQRNSHAGCKCVGSQVHYARSEDEDSLSPASANDDKEISPL

SEQ ID NO: 919605 - protein, 224 aa, Homo sapiens
MSRSFYVDSLIINGTSRPAPSLPEPHPGPDFFIPLGMPPPLVMSVSGPGCPSRKSGAFCVCPLCVTSHLHSSRGSVGAGSGGAGAGVTGAGGSGVAGAAGALPLLKSQFSSAPGDAQFCPRVNHAHHHHHPPQHHHHHHQPQQPGSAAAAAAAAAAAAAAAALGHPQHHAPVCTATTYNVADPRRFHCLTMGRAGSWGTCAPRLSRSWSKLSTSSGGSGSPGTG

SEQ ID NO: 919606 - protein, 174 aa, Homo sapiens
LGPRSRCMHISYLVKACLSFTDGCLLFVPSNGELLKLNSLRGSDINQDVNYMRENKTKQKTWQTGVCYSSGCGSPEVWAQRRVTALHYCSLVNGDVWLQAAFSLLLLIFVVIVNEQRTVPMLNQLHILILCFFNHILQGSWTSWWLQPEEGLFQNEPLQSKAGLKAGESKGKAF

SEQ ID NO: 919607 - protein, 114 aa, Homo sapiens
MVWNTDLVETLELQNLMLCALQTIYGAEARKESRGTHAREGYKVQIDEYDYSKPIQGQQKKPFEEHWRKHTLSYVDVGTGKTLLFMVTLGYRPVIDKTLNEADCATVPPAIRSY

SEQ ID NO: 919608 - protein, 139 aa, Homo sapiens
MCSLPSVHYTIKKLVTKMQTKNKGETRIRFLTCVIGKRADVPSCFVYEAVGYKDSHTSLWNAEYCSLMEEDLAASNKTTWHLPFDSAILESASKKLQQRNERTLGTEFFSQPACVCNKVLHCGVCKCGEKRDQAGTVSV

SEQ ID NO: 919609 - protein, 123 aa, Homo sapiens
MELFVSPGMVWNTDLVETLELQNLMLCALQTIYGAEARKESRGTHAREGYKVQIDEYDYSKPIQGQQKKPFEEHWRKHTLSYVDVGTGKQCGARSHHSPAPTRPRPGLRAGLADGEQGGAGQI

SEQ ID NO: 919610 - protein, 114 aa, Homo sapiens
NAFVSSVGGMVWNTDLVETLELQNLMLCALQTIYGAEARKESRGTHAREGYKVQIDEYDYSKPIQGQQKKPFEEHWRKHTLSYVDVGTGKYRPVIDKTLNEADCATVPPAIRSY

SEQ ID NO: 919611 - protein, 162 aa, Homo sapiens
MLRKRFREDPEDPPSCSHVKTDAEEDPNCHEQHPSNTAIHLRSDQEAVTDGRRKPGGMVWNTDLVETLELQNLMLCALQTIYGAEARKESRGTHAREGYKVQIDEYDYSKPIQGQQKKPFEEHWRKHTLSYVDVGTGKYRPVIDKTLNEADCATVPPAIRSY

SEQ ID NO: 919612 - protein, 162 aa, Homo sapiens; identical to SEQ ID NO: 919611

SEQ ID NO: 919613 - protein, 162 aa, Homo sapiens; identical to SEQ ID NO: 919611

SEQ ID NO: 919614 - protein, 171 aa, Homo sapiens
MLRKRFREDPEDPPSCSHVKTDAEEDPNCHEQHPSNTAIHLRSDQEAVTDGRRKPGGMVWNTDLVETLELQNLMLCALQTIYGAEARKESRGTHAREGYKVQIDEYDYSKPIQGQQKKPFEEHWRKHTLSYVDVGTGKTLLFMVTLGYRPVIDKTLNEADCATVPPAIRSY

SEQ ID NO: 919615 - protein, 139 aa, Homo sapiens; identical to SEQ ID NO: 919608

SEQ ID NO: 919616 - protein, 114 aa, Homo sapiens; identical to SEQ ID NO: 919610

SEQ ID NO: 919617 - protein, 185 aa, Homo sapiens
MLRKRFREDPEDPPSCSHVKTDAEEDPNCHEQHPSNTAIHLRSDQEAVTDGRRKPGGMVWNTDLVETLELQNLMLCALQTIYGAEARKESRGTHAREGYKVQIDEYDYSKPIQGQQKKPFEEHWRKHTLSYVDVGTGKFWQCTAREQHITHRKQLCSCDGGLSTRKEWTIGTRSSLNKSESHYAV

SEQ ID NO: 919618 - protein, 162 aa, Homo sapiens; identical to SEQ ID NO: 919611

SEQ ID NO: 919619 - protein, 186 aa, Homo sapiens
MLRKRFREDPEDPPSCSHVKTDAEEDPNCHEQHPSNTAIHLRSDQEAVTDGRRKPGGMVWNTDLVETLELQNLMLCALQTIYGAEARKESRGTHAREGYKSLPVVTCSSDELIFVQSTRVGFCLVQIDEYDYSKPIQGQQKKPFEEHWRKHTLSYVDVGTGKYRPVIDKTLNEADCATVPPAIRSY

SEQ ID NO: 919620 - protein, 119 aa, Homo sapiens
MAKMAPKTPKLTFSQVGNPGKEGKVSPRSSSKSFGMVSWPLLGPLAIPEPIAGARGKDGKSVSQPSGPVTELLGNAAKVLWLSKNIPITQPTSPPAFCPCGGDLWFCNCLGESKSVMES

SEQ ID NO: 919621 - protein, 142 aa, Homo sapiens
YIPPMVMSLAAPPCGRRYFSHPLTDSMRGHMGLLLQTVPQNEKICGGELKPKCNMNNKQSFVIMYYSIFTLLIKTYLRLGNLQKKEDYWTYSSTWLGRLHNQGGRQGGASHILHGWQLAIKELVQGNSTFKTSRSHKTHSLS

SEQ ID NO: 919622 - protein, 156 aa, Homo sapiens
IHHGILCSHKKGEFMSFAVTWMKLETIILSKLLQGQKTKHHMFSLIGGKRTMRTLGHRKGNTESQVPPWNRRGQAPPPPPPHTTPASQGYIPVHTPPCMQAGQRFAVDLFILGCLISPSKEGFDLKLGVEFGTKMCREGGCMDSLSYAKSKMKLWN

SEQ ID NO: 919623 - protein, 286 aa, Homo sapiens
PYGKMIWMLTVLASADASRYVFRNESVHPFSPFEVKVGVFNNKGEGPFSPTTVVYSAEEEPTKPPASIFARSLSATDIEVFWASPLEKNRGRIQGYEVKYWRHEDKEENARKIRTVGNQTSTKITNLKGSVLYHLAVKAYNSAGTGPSSATVNVTTRKPPPSQPPGNIIWNSSDSKIILNWDQVKALDNESEVKGYKVLYRWNRQSSTSVIETNKTSVELSLPFDEDYIIEIKPFSDGGDGSSSEQIRIPKISNAYARGSGASTSNACTLSAISTIMISLTARSSL

SEQ ID NO: 919624 - protein, 134 aa, Homo sapiens
MKPAAEGPTCRPGLSLHCPGPQGSTTQAGLGHTPQKGPAKALPPQTQKGPAATPGPSPGLPAHAPSPPPMPSPAPGGSEISWRLQGAEAMPAGDERVLRSRWAGALQTLHLGSYFHDPKELVKYEIYRAYRICK

SEQ ID NO: 919625 - protein, 123 aa, Homo sapiens
MKPAAEGPTCRPGLSLHCPGPQGSTTQAGLGHTPQKGPAKALPPQTQKGPAATPGPSPGLPAHAPSPPPMPSPAPGGSEISWRLQGAEAMPAGDERVLRSRWAGALQTLHFFLPLSPLAIFMG

SEQ ID NO: 919626 - protein, 204 aa, Homo sapiens
GPASAGAVSKRGTVSIARSICGAFCNFSPTLPPCAEALWHFQRPAAAEMSCSKRTSLLGTLLRPRYPKLHWCTGREPHVGVGLGTCWINTITVPWSSWKLPSAQPGLLVGGAHASYMCQGSHSLASEQCNSGNVQALSVLSSLANHGHPWVPWGHYVTPAFYLSGQELLKPHLVTLRRTAHCTLTSFAVKCEIVPIECKRKERR

SEQ ID NO: 919627 - protein, 231 aa, Homo sapiens
GPASAGAVSKRGTVSIARSICGAFCNFSPTLPPCAEALWHFQRPAAAEMSCSKRTSLLGTLLRPRYPKLHWCTGREPHVGVGLGTCWINTITVPWSSWKLPSAQPGLLVGGAHASYMCQGSHSLASEQCNSGNVQALSVLSSLANHGHPWVPWGHYVTPAFYLSGQELLKPHLVTLRSAMKIPSRPAALPADAEKETRLGDAAHPYPQRAALFPLALAFGSGHSKHPWAPG

SEQ ID NO: 919628 - protein, 258 aa, Homo sapiens
MNLPGRECLVKGRITISEDGNLRIINVTKSDAGSYTCIATNHFGTASSTGNLVVKDPTRVMVPPSSMDVTVGESIVLPCQVTHDHSLDIVFTWSFNGHLIDFDRDGDHFERVGGDSAGDLMIRNIQLKHAGKYVCMVQTSVDRLSAAADLIVRGPPGPPEAVTIDEITDTTAQLSWRPGPDNHSPITMYVIQARTPFSVGWQAVSTVPELIDGKTFTATVVGLNPWVEYEFRTVAANVIGIGEPSRPSEKRRTEEARE

SEQ ID NO: 919629 - protein, 407 aa, Homo sapiens
MNLPGRECLVKGRITISEDGNLRIINVTKSDAGSYTCIATNHFGTASSTGNLVVKDPTRVMVPPSSMDVTVGESIVLPCQVTHDHSLDIVFTWSFNGHLIDFDRDGDHFERVGGDSAGDLMIRNIQLKHAGKYVCMVQTSVDRLSAAADLIVRGPPGPPEAVTIDEITDTTAQLSWRPGPDNHSPITMYVIQARTPFSVGWQAVSTVPELIDGKTFTATVVGLNPWVEYEFRTVAANVIGIGEPSRPSEKRRTEEALPEVTPANVSGGGGSKSELVITWETVPEELQNGRGFGYVVAFRPYGKMIWMLTVLASADASRYVFRNESVHPFSPFEVKVGVFNNKGEGPFSPTTVVYSAEEENPPNHQPVSLPEVFLPQILKFSGPPHWRRIEDEYKVMRLNIGDMKTKK

SEQ ID NO: 919630 - protein, 134 aa, Homo sapiens
MCYTAQFQRKGDIKSADGINVTHQLSLKQDYPGVPGNWEDFGLEERRQYDNRSQIFAGLNRELDPSITRESLLRNTLLPMKKEVALSLQKQTNKIKPCRVVCAYIREPLRIKNASCPQYASSVLKDLSYEHGKD

SEQ ID NO: 919631 - protein, 164 aa, Homo sapiens
TLKQPDLTKIHSSIIKTIPRRMVLSHSLETAPMIQSPLTQPHVQHWGLHFSMRRGLVANVNPQGAPAPSTEKGQGSRLSPALAISMECAAPGAPPHGLRREFQVLAGPLSAHSSMPDHTALPSVGDLASPIVVAPRVAGSRGLLGLGSRDCLPPPHILLTLSAV

SEQ ID NO: 919632 - protein, 164 aa, Homo sapiens; identical to SEQ ID NO: 919631

SEQ ID NO: 919633 - protein, 138 aa, Homo sapiens
ISLPSARRMRYVKLPQRPTRHLSSKLIHIQDLSNKEQWRNLLKISAGPLTVLCCLQTNTTSTDTDPRSHLQETGDNILTLFTMHPPLESEWTICNFRQIRRCVRQTPSRKNVLPSFEECHCQMASTCSLLQQLPQCSS

SEQ ID NO: 919634 - protein, 165 aa, Homo sapiens
MSQGVIFCDNRSIDPWEIMNTITGVNIPQKYNEYFPKVYTLCDIKSNISLEYADDITERTSSVIREVTSDKDHASNLTRCTNPGVKIDVNLGDLREGGICCHSQQTASQEKKGGHSSDKRPFTFMEFVGAGEINEVLPMMKPGPELKGKCCLSSSVTSTAFGLSE

SEQ ID NO: 919635 - protein, 162 aa, Homo sapiens
MQDMELGNSGRKHCAQGLEEQVGVSSRYLGAGMAPGGGGTRLGLSFKIRILGPGTQVNPECAAKPISERYLLIAFLGNYTKDLVCTEQVCGNQEGRGRKGGSREPRPRQGPYSSQTRQTERETLERAEPLWAWLEASGRMLRQEPQRSESKNHVQTQLKVPR

SEQ ID NO: 919636 - protein, 141 aa, Homo sapiens
FLVRTPSKLPEPLQMWKFGTPTLCRHPVATVSVRLAGEVARILERQRCTGPSRASTILTTVQGPSEAAQIQQDQGQWRQDFTQGRDQDGLVLQCPGTPWATEGSTLRTGLLSERLLVTASRRKYIKPPSSQEREKSVKSVG

SEQ ID NO: 919637 - protein, 207 aa, Homo sapiens
MWLLPRDEGGLQERVLGSCTRKNSGMDWDDEYSHNSFDLHCLLNSFPGDLEFEQIFSDIDEKIEQNAARDSNLDVIAHGYQSTMLKLYSVIKEDFNTLCEILAPSSMVKFIKETYLDTVTEEMAKFLENFCELQFRENAVRVVKTSKSSSKHRGAVHALDKVEFLSQLIKSFMKLEKGVQELFDEILLSLKITRDTSGLDASDFDML

SEQ ID NO: 919638 - protein, 324 aa, Homo sapiens
SHNRRWSQMEYVSKPEILTYDRLVNGMLQCVAAGFPEPTIDWYFCPGTEQRCSASVLPVDVQTLNSSGPPFGKLVVQSSIDSSAFKHNGTVECKAYNDVGKTSAYFNFAFKGKTLGAGAFGKVVEATAYGLIKSDAAMTVAVKMLKPSAHLTEREALMSELKVLSYLGNHMNIVNLLGACTIGGSYIERDVTPAIMEDDELALDLEDLLSFSYQVAKGMAFLASKNFYKMIKEGFRMLSPEHAPAEMYDIMKTCWDADPLKRPTFKQIVQLIEKQISESTNHIYSNLANCSPNRQKPVVDHSVRINSVGSTASSSQPLLVHDDV

SEQ ID NO: 919639 - protein, 151 aa, Homo sapiens
MWSQPVLNLSFHVPQSCSQHAGPQHQSQLPMSKLLSLLSLRSSNYTDLHPAAAFPNHHLISTHSHDSLMMTVVSGPQSSLHPISPPQVTSRSSTVANLHHFQTSQGPSFSSPLCMQHSPFIIQQIVTSTYYSLKAQQHLSSHMLSCNVTMP

SEQ ID NO: 919640 - protein, 452 aa, Homo sapiens
MLMTPGHFLSDRIQDALCALEGSQALEPKGGEGSEGVEAEGPGTETETVLPVSTLNFCPEIQIDIADKEIEQGEVTTSVTALLEGLEKTCSSRPSCLEKDLTNDVTYLDPSLLPVHSAIFSFEPLSSPDGPVVIQNLHITGTITAQELSGTGLQPCTRYTVKCETSLDGENSSLQQLAYHTVNHRYWEFLNLQAIRRRNQIYESSLKIIEKMVVSAIVDNLKTAFPCSESQGPTEELSEAETESKSQTEGKKARKSRLRFSSSKISPALSVTEAQDTILYCLQEGNVESKTLSMSGMESFIEKQTKLLEVQPTEAPEKDPEQLPKGHVDSCLSDAAVPAQDPSNSDSGTETELADTALNLLLLLLTEQWKWLCIENMQKFLRQRILGKESDTLVHNQYGAHHLSSGPRGEWVWLCELATGSVFSGNSLIITDCVALASKRKGAPQPFSTRQV

SEQ ID NO: 919641 - protein, 192 aa, Homo sapiens
DSALGDDHREYMEQQEINEPSLSSKRKMCEMATSGDRQRDSEVNFKELRTAKMKPELLSGHIPPGHIPKPIVMPDYVAKYPVIQTDDERERYKAVFQDQFSEYKELSAEVQAVLRKFDELDAVMSRLPHHSESRQEHERISRIHEEFKKKKNDPTFLEKKERCDYLKNKLSHIKQRIQEYDKVMNWDVQGYS

SEQ ID NO: 919642 - protein, 450 aa, Homo sapiens
MSLKKRSLMSKPNLLNQKPKCLVPFWFVVLTHGLSLVLHCGSVAPGVPHGLPVFHQCDCTSLHLPIVQPALDTLNCMNGIAFFFFFWGKQILPFAPNMWGVCASGVRNSLGLSHVAGSPASPKVSTCSFPLAPSSLSPRCGLGTSGRRHFAPTNAPSVYILGAYIWGYKHDSGVFRPCVWAPGDSDYSCGTLSCDTLCCDTPHRGFCGPPRAGDFGCADIWAERRVKVSPRGAPGLGVLLRLFSIYPPLCVAPHFPRCDFKRGLPHTVWCGRHISHCWEETPPPLFFLFLSRGESSVARDSPPLCVVSCPPEGGGSITPGVVYIRIFSAGPPIIEPASLSRPPGGVVSTDRALFPCAERLLFAAPPPEELSSGAGLYQRASPPTNRIVCGPPTVNSLLRGAAPFIELRHTPAGGYFSPHMIFGAPAEGWCASTNGLLALDPPEGCCVLST

SEQ ID NO: 919643 - protein, 432 aa, Homo sapiens
MSNDGRSRNRDRRYDEVPSDLPYQDTTIRTHPTLHDSERAVSADPLPPPPLPLQPPFGPDFYSSDTEEPAIAPDLKPVRRFVPDSWKNFFRGKKKDPEWDKPVSDIRYISDGVECSPPASPARPNHRSPLNSCKDPYGGSEGTFSSRKEADAVFPRDPYGSLDRHTQTVRTYSEKVEEYNLRYSYMKSWAGLLRILGVVELLLGAGVFACVTAYIHKDSEWYNLFGYSQPYGMGGVGGLGSMYGGYYYTGPKTPFVLVVAGLAWITTIIILVLGMSMYYRTILLDSNWWPLTEFGINVALFILYMAAAIVYVNDTNRGGLCYYPLFNTPVNAVFCRVEGGQIAAMIFLFVTMIVYLISALVCLKLWRHEAARRHREYMEQQECEMATSGDRQRDSEVNFKELRTAKMKPELLSGHIPPGHIPKPIVMPDYVA

SEQ ID NO: 919644 - protein, 238 aa, Homo sapiens
MCSSITTMNIKTYSKEDYGSTAVQSFLASLDGEKLELLKNDLISIKDIFAAKELENEENQEEQASSGLHRYSLIQAMKRAHDWVEEDQTVVSVDVAKVSEEETKKEEKEEKSQDPQEDKKEEKKTKTIEEVYMSSIESLAEVTARCIEQLHKVAELILHGQEEEKPAQDQAKVLIKLTTAMCNEVASLSKKFTNSLTTVGKKSFVPTGYLDQEGFSPRHPRGFLPRFLKVFIQKPPSK

SEQ ID NO: 919645 - protein, 161 aa, Homo sapiens
MKLFGFRSHRGQTVLGTIDHLYTGSGYRIRYSELQKIHKAAVKGDAAEMERCLARRSGDLDALDKQHSSVSPRKCQSLYVDLPMEKETEYVNGKGEGPPAKHPSLKPSTEMEDPAVKGAVQRKNVQTLRAEKALPVASEEEQQRRERSEKKQPQLILEHAL

SEQ ID NO: 919646 - protein, 163 aa, Homo sapiens
VYIHYRRCLMRELIPLSKIPTALHLACASGHVKVVTLLVNRKCQIDICDKENRTPLIQEESCAVILLEDGTIPNLKGIYGNTALHYAVYSESTSLAEKLLFHGANIEALDKQLVAAIDVYSVFIVLLFSEESHSWNNTVDIFLNIKKIKAPWQLKDLLQNILP

SEQ ID NO: 919647 - protein, 168 aa, Homo sapiens
MWAFILSPSAAGLLEFAGGLLRPCLPGYHQWRLQTSKDCCLFLPLEASSQRGTHQMPAKPLLASRWECLSLPKLRPHLPLPLGALFQGNGSFIYKPLTGAAPFLSEMPCPERRNLERQSGHSDFATLQCGLHVVNSSQSLQYEKGEKSNFAVERPDKHYLSQANGWHQ

SEQ ID NO: 919648 - protein, 187 aa, Homo sapiens
KGSMDRKQTAAWTRFPSHCGPRAYFTMKWSIEQTGLPLMMPQDNIDDAFCKDYFHWCYLVPQHGMCSHKFYGKQCCKTCSKSNLRAPRAIRSDQLPGWRSGELQEAAQAPPPPPQRPSISYQEPGATAGASVISRVTGQGTAFWFGTLPMEMGKMKFLLRCFYLFQIHALKERFFILYVLSFSVICK

SEQ ID NO: 919649 - protein, 116 aa, Homo sapiens
MHLKAILPNGPGSWGIYTPLPSVTGSGLLPGRANSPAFLACYLEGQSGSRARERPQERDAGQAVVVRQMCTEGVRFSSKDHWPIWTVLDILSAACLFSRCKKLLPIHPSLFLNVDC

SEQ ID NO: 919650 - protein, 164 aa, Homo sapiens
MFSRTILTVRPPQKIVSPKQEHEDRKHDKVTDKGSESGTSCNELSTSSCDSHSEASTPQDNPSSAQQATAHQPNTLTLDRPSKKAPVQWIPPPDKRRNSELFQTLISKSRETNLSKKKVCEKLSVEEEMKKCIQDFKKIHIPDYFPERKRQWQSELLQKYGQSL

SEQ ID NO: 919651 - protein, 112 aa, Homo sapiens
RREWRLRMVLAGQHKFRVGVGSVGPALGAAGLAAAARPAAAEGAPGPPAVLARRHCARILAGPQLPPRRAELGTCSLPCLSLPTAGGCCPAEPPRQALPPALWHPVPLTPKG

SEQ ID NO: 919652 - protein, 179 aa, Homo sapiens
MQIMLSPEDQGPLDIEWLISPADNQKMDQVMILYSGNKIYDDYYPELKGRVHFKRNDLKSGDASINVTNLQLSDIGTDQCKVKKAPGVANKIQLVVLVKPSGTRCYVDGSEEIGSDFKLKCEPKEGSLPLQYEWQKLSDSQKMPTSWLAEMTSSVISVKKMLLLSTLGHTAVHQKRSGL

SEQ ID NO: 919653 - protein, 149 aa, Homo sapiens
MLTPTIIPFNSLAGCGKSPRFPLKVKATPGWQTARKQTNSHEKLNSANTRNVLGQMFCRVFMTSVEYQLWESQYLRSFKREYKSKVKDSFSWHKKKYFMGKRVQKRTIKDGRIGESLGVEIPHIWCQKCCQQEGHASSRRAPVPFKELT

SEQ ID NO: 919654 - protein, 146 aa, Homo sapiens
MSHVMLFTAHPLVTCLSLCCPMGTGAPGTGVKNVTQPTAFAAENVISAYEVFTHIEKKAAHTTVEFTSKSTSIQGTCYSAKGSQQAKDVCSHRKQNTEGKREAERQELYRRYGTQLDGRQNARINQLFLSRISGSIQWMLHQIISQ

SEQ ID NO: 919655 - protein, 146 aa, Homo sapiens; identical to SEQ ID NO: 919654

SEQ ID NO: 919656 - protein, 355 aa, Homo sapiens
MANIQTPDAGKDVEQQELSFLMGIQNDTDLMEDSLMGSYKAKHILTILSSSCGHVETIFDCKFKPDDPNLLATASFDGTIKVWDINTLTAVYTSPGNEGVIYSLSWAPDYAIEPGTPPLLCGKVSRDIRQEIEKLTANSQVKKLRWFSECLSPPGGSDNLWNLVAVIKGQDDSLLPQNYCKGIMHLKHLIKFRTSEAQELTTVKMSKFGGGIGVPAKEERLKEAAEIHLRLGQIQRYCELMVELGEWDKALSIAPGVSVKYWKKLMQSKLAMAYLIRGNELELAVCVGTVLGESAAPATHYALELLARKCMMISVWNLAADLLLMIPDNELHLIKLCAFYPGCTEEINDLHDKVC

SEQ ID NO: 919657 - protein, 298 aa, Homo sapiens
MPLLRRTSRLLSPPGFLPQKRTKLVTIGLIVASLLWPLCCTLGWADALVGPLTSHCTTLLTYHSERTVTFTYVMLVMLWGTSICLGLLPVMGWNCLRDESTCSVVRPLYQEQRGHPLGVLPLHVCAHLQLYIQICKIVMSTPIREPLQHHFLATSHYVTTRKGVSTLAIILGTFAACWMPFTLYSLIADYTYPSFYTTPPSCPPPTIPSSTLSYMLSETKRSRKRSVSFAAAASRPVSPRERARPVMCSTLAPRRTLHLPSTSTAWPRFEMLPLNSLHWIPSQATGALSIRETMTSFR

SEQ ID NO: 919658 - protein, 135 aa, Homo sapiens
MGPMASKNFPGLYSYPNNFSLFLLLSFNINSLITSTSPIQPLLTALKLECSINLTQFLLQQPNSSFAPECWMCLSLSSSAYTALPTPLHDLLTGNITLIYKLQKGASFFDRAVSLVMRVQVIGSFGVCKYLLRAY

SEQ ID NO: 919659 - protein, 156 aa, Homo sapiens
SLSPIILAMIFWITCSSFSISTCCFTLHCYVMEVTSFLSSHEPTTSTSFQLFFCSFFTFLSLHKVDLGSCSGLDFDLREYCGWFDLFRPLKTFSESAIKLFCFLIICVFTRVVFLISFKNFSFAFTYLTIWCKRPSFWPIAVFNMPFSLSLIISSF

SEQ ID NO: 919660 - protein, 142 aa, Homo sapiens
MHCSQTTVSFLGQKTQRKTRIILSGRIPRNPSEESAMQKYPGGGTAHTAVPVIHPRQILHALSHFKALALAVLPDHALDSQEHLGWEPSWAVTTGWGAPVKTSRQTAKAFSQTKRLANFPTSSEFSSEANFLELNGMKPSCS

SEQ ID NO: 919661 - protein, 139 aa, Homo sapiens
MSGCFSESLLCSLLLVQLGSCHFSEKLAGGWNPIQNVCWGRGDTECKYMETVNLFTLQLRDSKKLFFIVSIASSDISHETLACWANYMNTLVDENGFTRGPKPAPSGWPNASKLSSCGCCIYGGIFGHNQPSEMTGGRT

SEQ ID NO: 919662 - protein, 164 aa, Homo sapiens
EFSWLNTMIVNQDSQVWSRLVTTESFRGGKSRRSDGRNNRTGGIRGLKDLWKLSYEDTNFGLHPSSPFIHTCGIYFGKKRLNKDKNCGITLCSQRKHNCHRSQNESPRARSREVQQQESTFTENPVGRLWHYQLINMLQNSFYTAARLRRAHHLHINIWTVATT

SEQ ID NO: 919663 - protein, 207 aa, Homo sapiens [sequence omitted]

SEQ ID NO: 919664 - protein, 215 aa, Homo sapiens [sequence omitted]

SEQ ID NO: 919665 - protein, 137 aa, Homo sapiens
LGRAKGRMIKSQALSPSAQLPEWEQSFQPRKMFKQYADDLAQIKNASNRCYVHKFSQQPFEYMNQSHLSWLPLTGTQLLGRREECTVDMDRLQEGEGLLGLLERECLCPYGSALQLSLHIGFMLLDQLPPYVWKQGH

SEQ ID NO: 919666 - protein, 137 aa, Homo sapiens; identical to SEQ ID NO: 919665

SEQ ID NO: 919667 - protein, 137 aa, Homo sapiens
MVKKNKQTNKQTYSHPWLYTGYWFQDPHRYQNPNILKSILKSYRTHVKSQSSGFASWEYFEQLKGFFSAAMAHVAASHMDRLLLPSGEDPLLISTPMSGLLWAGPPDASPPVSWPHCSSRDLREMAACQVPESLVSM

SEQ ID NO: 919668 - protein, 175 aa, Homo sapiens
MTEQRNKRLQQSFLLSFLALIPSKLYSVPGIPESSATTKASEAIRQHQSSAAKPRRSGKESIREPWARVPGAVEVAARKAPLRRSDTSGTWVNNPRGISAMIKHQEYHQPVTAVCLLTFSFGLGMFIVGILPPCQFWWLRSPRSRWQRWGKGPLKAVIGSTFLKDMLKDEKVFTQ

SEQ ID NO: 919669 - protein, 685 aa, Homo sapiens
MLASGLLLVALLACLTVMVLMSVWQQRKSRGKLPPGPTPLPFIGNYLQLNTEHICDSIMKFSECYGPVFTIHLGPRRVVVLCGHDAVREALVDQAEEFSGRGEQATFDWVFKGYGFHAILTSTSPASISCNGERAKQLLRFAIATLRDFGVGKRGIEERIQEESGFLIEAIRSTHGANIDPTFFLSRTVSNVISSIVFGDRFDYEDKEFLSLLSMMLGIFQFTSTSTGQLYEMFSSVMKHLPGPQQQAFKLLQGLEDFIAKKVEHNQRTLDPNSPQDFIDSFLIHMQENLFIGGTETVSTTLRYGFLLLMKHPEVEAKVHEEIDRVIGKNRQPKFEDRAKMPYMEAVIHEIQRFGDVIPMSLARRVKKDTKFRDFFLPKVLSAPTPQTTGTSSPSLCPQHPTHIRSFLDPVPLPQSVKKDFPNHHIRSTFHLDTPESCISPDSLCQENQTHVPKLPILRNRSPLSIRPFVIGTEISGPPNSCLEGHGPHVSQTSCFRDVNLLSPKAPPSEDPNSSMPATSPYLGHTSSPSSPCVLSPIPRPSSSHTTSSSLPGTEVFPMLGSVLRDPSFFSNPQDFNPQHFLNEKGQFKKSDAFVPFSIGKRNCFGEGLARMELFLFFTTVMQNFRLKSSQSPKDIDVSPKHVGFATDPTKLHHELPAPLSEGCAGAGLVGGARERAGPRPGLGE

SEQ ID NO: 919670 - protein, 180 aa, Homo sapiens
SSVLAPGRWTAPQLPAQGETSSSYYVQSLRFSTESPPKSHGSWVFISPLHPESHADPDKAQCSEHSWSGGPTSGSCRDWFQTHGGGDTQRKGGSDVTTEAEIDMMQPQEAELCRPHDATASGKCNCVHGESSAVTPQDPLNIGCASKIYLVYSSSFTHELHNADLSTMSADCVDKPLKNL

SEQ ID NO: 919671 - protein, 273 aa, Homo sapiens
SSVLAPGRWTAPQLPAQGETSSSYYVQSLRFSTESPPKSHGSWVFISPLHPESHADPDKAQCSEHSWSGGPTSGSCRDWFQTHGGGDTQRKGGSDVTTEAEIDMMQPQEAELCRPHDATASGKCNCVHGESSAGKDAESSAQAGSYGGGKMWADSGYILKIGPTGFTERLEMWTASKATDPWSQPGEECGQRRKTSGTEPWGTPGFRGPSQETEKEQPGREEAKQQSECISMCSHATQMPSRKAVWLSVVAYDWEKVECVCTPLACERLYASR

SEQ ID NO: 919672 - protein, 91 aa, Homo sapiens
RTKASRARVNRQRLRRQVILCLSSQVAGITALPSPTAAGSSSLHCTQNHTLTQIKLNAVNTLGLEVQHQGVAGTGFRHTEEETHREKEAVM

SEQ ID NO: 919673 - protein, 765 aa, Homo sapiens
MSLQVLNDKNVSNEKNTENCDFLFSPPEVTGRSSVLRVSQKENVPPKNLAKAMKVTFQTPLRDPQTHRILSPSMASKLEAPFTQDDTLGLENSHPVWTQKENQQLIKEVDAKTTHGILQKPVEADTDLLGDASPAFGSGSSSESGPGALADLDCSSSSQSPGSSENQMVSPGKVSGSPEQAVEENLSSYSLDRRVTPASETLEDPCRTESQHKAETPHGAEEECRHGGVCAPAAVATSPPGAIPKEACGGAPLQGLPGEALGCPAGVGTPVPADGTQTLTCAHTSAPESTAPTNHLVAGRAMTLSPQEEVAAGQMASSSRSGPVKLEFDVSDGATSKRAPPPRRLGERSGLKPPLRKAAVRQQKAPQEVEEDDGRSGAGEDPPMPASRGSYHLDWDKMDDPNFIPFGGDTKSGCSEAQPPESPETRLGQPAAEQLHAGPATEEPGPCLSQQLHSASAEDTPVVQLAAETPTAESKERALNSASTSLPTSCPGSEPVPTHQQGQPALELKEESFRDPAEVLGTGAEVDYLEQFGTSSFKESALRKQSLYLKFDPLLRDSPGRPVPVATETSSMHGANETPSGRPREAKLVEFDFLGALDIPVPGPPPGVPAPGGPPLSTGPIVDLLQYSQKDLDAVVKATQEENRELRSRCEELHGKNLELGKIMDRFEEVVYQAMEEVQKQKELSKAEIQKVLKEKDQLTTDLNSMEKSFSDLFKRFEKQKEVIEGYRKNEESLKKCVEDYLARITQEGQRYQALKAHAEEKLQL

SEQ ID NO: 919674 - protein, 242 aa, Homo sapiens
MSLQVLNDKNVSNEKNTENCDFLFSPPEVTGRSSVLRVSQKENVPPKNLAKAMKVTFQTPLRDPQTHRILSPSMASKLEAPFTQDDTLGLENSHPVWTQKENQQLIKEVDAKTTHGILQKPVEADTDLLGDASPAFGSGSSSESGPGALADLDCSSSSQSPGSSENQMVSPGKVSGSPEQAVEENLSSYSLDRRVTPASETLEDPCRTESQHKAETPHGAEEECKAETPHGAEEECRHGGVW

SEQ ID NO: 919675 - protein, 826 aa, Homo sapiens [sequence omitted]

SEQ ID NO: 919676 - protein, 845 aa, Homo sapiens
MSLQVLNDKNVSNEKNTENCDFLFSPPEVTGRSSVLRVSQKENVPPKNLAKAMKVTFQTPLRDPQTHRILSPSMASKLEAPFTQDDTLGLENSHPVWTQKENQQLIKEVDAKTTHGILQKPVEADTDLLGDASPAFGSGSSSESGPGALADLDCSSSSQSPGSSENQMVSPGKVSGSPEQAVEENLSSYSLDRRVTPASETLEDPCRTESQHKAETPHGAEEECRHGGVCAPAAVATSPPGAIPKEACGGAPLQGLPGEALGCPAGVGTPVPADGTQTLTCAHTSAPESTAPTNHLVAGRAMTLSPQEEVAAGQMASSSRSGPVKLEFDVSDGATSKRAPPPRRLGERSGLKPPLRKAAVRQQKAPQEVEEDDGRSGAGEDPPMPASRGSYHLDWDKMDDPNFIPFGGDTKSGCSEAQPPESPETRLGQPAAEQLHAGPATEEPGPCLSQQLHSASAEDTPVVQLAAETPTAESKERALNSASTSLPTSCPGSEPVPTHQQGQPALELKEESFRDPAEVLGTGAEVDYLEQFGTSSFKESALRKQSLYLKFDPLLRDSPGRPVPVATETSSMHGANETPSGRPREAKLVEFDFLGALDIPVRGKRQGRNGFLFHPHLPQVPGPPPGVPAPGGPPLSTGPIVDLLQYSQKDLDAVVKATQEENRELRSRCEELHGKNLELGKIMDRFEEVVYQAMEEVQKQKELSKAEIQKVLKEKDQLTTDLNSMEKSFSDLFKRFEKQKEVIEGYRKNEESLKKCVEDYLARITQEGQRYQALKAHAEEKLQLANEEIAQVRSKAQAEALALQASLRKEQMRIQSLEKTVEQKTKENEELTRICDDLISKMEKI

SEQ ID NO: 919677 - protein, 602 aa, Homo sapiens
MGRGARAGGRGAARAGHAPGRPRRRGGPLQGLPGEALGCPAGVGTPVPADGTQTLTCAHTSAPESTAPTNHLVAGRAMTLSPQEEVAAGQMASSSRSGPVKLEFDVSDGATSKRAPPPRRLGERSGLKPPLRKAAVRQQKAPQEVEEDDGRSGAGEDPPMPASRGSYHLDWDKMDDPNFIPFGGDTKSGCSEAQPPESPETRLGQPAAEQLHAGPATEEPGPCLSQQLHSASAEDTPVVQLAAETPTAESKERALNSASTSLPTSCPGSEPVPTHQQGQPALELKEESFRDPAEVLGTGAEVDYLEQFGTSSFKESALRKQSLYLKFDPLLRDSPGRPVPVATETSSMHGANETPSGRPREAKLVEFDFLGALDIPVPGPPPGVPAPGGPPLSTGPIVDLLQYSQKDLDAVVKATQEENRELRSRCEELHGKNLELGKIMDRFEEVVYQAMEEVQKQKELSKAEIQKVLKEKDQLTTDLNSMEKSFSDLFKRFEKQKEVIEGYRKNEESLKKCVEDYLARITQEGQRYQALKAHAEEKLQLANEEIAQVRSKAQAEALALQASLRKEQMRIQSLEKTVEQKTKENEELTRICDDLISKMEKI

SEQ ID NO: 919678 - protein, 514 aa, Homo sapiens
MTVGAEQERIPHAASRGSYHLDWDKMDDPNFIPVRRSGLKPPLRKAAVRQQKAPQEVEEDDGRSGAGEDPPMPASRGSYHLDWDKMDDPNFIPFGGDTKSGCSEAQPPESPETRLGQPAAEQLHAGPATEEPGPCLSQQLHSASAEDTPVVQLAAETPTAESKERALNSASTSLPTSCPGSEPVPTHQQGQPALELKEESFRDPAEVLGTGAEVDYLEQFGTSSFKESALRKQSLYLKFDPLLRDSPGRPVPVATETSSMHGANETPSGRPREAKLVEFDFLGALDIPVPGPPPGVPAPGGPPLSTGPIVDLLQYSQKDLDAVVKATQEENRELRSRCEELHGKNLELGKIMDRFEEVVYQAMEEVQKQKELSKAEIQKVLKEKDQLTTDLNSMEKSFSDLFKRFEKQKEVIEGYRKNEESLKKCVEDYLARITQEGQRYQALKAHAEEKLQLANEEIAQVRSKAQAEALALQASLRKEQMRIQSLEKTVEQKTKENEELTRICDDLISKMEKI

SEQ ID NO: 919679 - protein, 765 aa, Homo sapiens; identical to SEQ ID NO: 919673

SEQ ID NO: 919680 - protein, 208 aa, Homo sapiens
PRLSQAFTAQPEGPDAVVKATQEENRELRSRCEELHGKNLELGKIMDRFEEVVYQAMEEVQKQKELSKAEIQKVLKEKDQLTTDLNSMEKSFSDLFKRFEKQKEVIEGYRKNEESLKKCVEDYLARITQEGQRYQALKAHAEEKLQLANEEIAQVRSKAQAEALALQASLRKEQMRIQSLEKTVEQKTKENEELTRICDDLISKMEKI

SEQ ID NO: 919681 - protein, 384 aa, Homo sapiens
MSLQVLNDKNVSNEKNTENCDFLFSPPEVTGRSSVLRVSQKENVPPKNLAKAMKVTFQTPLRDPQTHRILSPSMASKLEAPFTQDDTLGLENSHPVWTQKENQQLIKEVDAKTTHGILQKPVEADTDLLGDASPAFGSGSSSESGPGALADLDCSSSSQSPGSSENQMVSPGKVSGSPEQAVEENLSSYSLDRRVTPASETLEDPCRTESQHKAETPHGAEEECRHGGVCAPAAVATSPPGAIPKEACGGAPLQGLPGEALGCPAGVGTPVPADGTQTLTCAHTSAPESTAPTNHLVAGRAMTLSPQEEVAAGQMASSSRSGPVKLEFDVSDGATSKRAPPPRRLGERSGLKPPLRKAAVRGRSRCASSRWRRQWSRRLKRTRS

SEQ ID NO: 919682 - protein, 97 aa, Homo sapiens
EVQKQKELSKAEIQKVLKEKDQLTTDLNSMEKSFSDLFKRFEKQKEVIEGYRKVCLRHPGVLTSEADGLMVQASGATSCCLCTLVLGQASPCHGGMG

SEQ ID NO: 919683 - protein, 143 aa, Homo sapiens
WPLRPKIRPRGKKDQLTTDLNSMEKSFSDLFKRFEKQKEVIEGYRKNEESLKKCVEDYLARITQEGQRYQALKAHAEEKLQLANEEIAQVRSKAQAEALALQASLRKEQMRIQSLEKTVEQKTKENEELTRICDDLISKMEKI

SEQ ID NO: 919684 - protein, 796 aa, Homo sapiens
MSLQVLNDKNVSNEKNTENCDFLFSPPEVTGRSSVLRVSQKENVPPKNLAKAMKVTFQTPLRDPQTHRILSPSMASKLEAPFTQDDTLGLENSHPVWTQKENQQLIKEVDAKTTHGILQKPVEADTDLLGDASPAFGSGSSSESGPGALADLDCSSSSQSPGSSENQMVSPGKVSGSPEQAVEENLSSYSLDRRVTPASETLEDPCRTESQHKAETPHGAEEECRHGGVCAPAAVATSPPGAIPKEACGGAPLQGLPGEALGCPAGVGTPVPADGTQTLTCAHTSAPESTAPTNHLVAGRAMTLSPQEEVAAGQMASSSRSGPVKLEFDVSDGATSKRAPPPRRLGERSGLKPPLRKAAVRQQKAPQEVEEDDGRSGAGEDPPMPASRGSYHLDWDKMDDPNFIPFGGDTKSGCSEAQPPESPETRLGQPAAEQLHAGPATEEPGPCLSQQLHSASAEDTPVVQLAAETPTAESKERALNSASTSLPTSCPGSEPVDYLEQFGTSSFKESALRKQSLYLKFDPLLRDSPGRPVPVATETSSMHGANETPSGRPREAKLVEFDFLGALDIPVPGPPPGVPAPGGPPLSTGPIVDLLQYSQKDLDAVVKATQEENRELRSRCEELHGKNLELGKIMDRFEEVVYQAMEEVQKQKELSKAEIQKVLKEKDQLTTDLNSMEKSFSDLFKRFEKQKEVIEGYRKNEESLKKCVEDYLARITQEGQRYQALKAHAEEKLQLANEEIAQVRSKAQAEALALQASLRKEQMRIQSLEKTVEQKTKENEELTRICDDLISKMEKI

SEQ ID NO: 919685 - protein, 826 aa, Homo sapiens [sequence omitted]

SEQ ID NO: 919686 - protein, 844 aa, Homo sapiens
MSLQVLNDKNVSNEKNTENCDFLFSPPEVTGRSSVLRVSQKENVPPKNLAKAMKVTFQTPLRDPQTHRILSPSMASKLEAPFTQDDTLGLENSHPVWTQKENQQLIKEVDAKTTHGILQKPVEADTDLLGDASPAFGSGSSSESGPGALADLDCSSSSQSPGSSENQMVSPGKVSGSPEQAVEENLSSYSLDRRVTPASETLEDPCRTESQHKAETPHGAEEECRHGGVCAPAAVATSPPGAIPKEACGGAPLQGLPGEALGCPAGVGTPVPADGTQTLTCAHTSAPESTAPTNHLVAGRAMTLSPQEEVAAGQMASSSRSGPVKLEFDVSDGATSKRAPPPRRLGERSGLKPPLRKAAVRQQKAPQEVEEDDGRSGAGEDPPMPASRGSYHLDWDKMDDPNFIPFGGDTKSGCSEAQPPESPETRLGQPAAEQLHAGPATEEPGPCLSQQLHSASAEDTPVVQLAAETPTAESKERALNSASTSLPTSCPGSEPVPTHQQGQPALELKEESFRDPAEVLGTGAEVDYLEQFGTSSFKESALRKQSLYLKFDPLLRDSPGRPVPVATETSSMHGANETPSGRPREAKLVEFDFLGALDIPVPGPPPGVPAPGGPPLSTGPIVDLLQYSQKDLDAVVKATQEENRELRSRCEELHGKNLELGKIMDRFEEVVYQAMEEVQKQKELSKAEIQKVLKEKDQLTTDLNSMEKSFSDLFKRFEKQKEVIEGYRKNEESLKKCVEDYLARITQEGQRYQALKAHAEEKLQLANEEIAQVRSKAQAEALALQASLRKEQMRIQSLEKTVEQKVGAGSPAQGAVWQHLLEGPWACCSLQAGRSPATHLPPPD

SEQ ID NO: 919687 - protein, 436 aa, Homo sapiens
  misc_feature (2)..(2): Xaa can be any naturally occurring amino acid
  misc_feature (27)..(27): Xaa can be any naturally occurring amino acid
  misc_feature (38)..(38): Xaa can be any naturally occurring amino acid
  misc_feature (43)..(43): Xaa can be any naturally occurring amino acid
  misc_feature (68)..(68): Xaa can be any naturally occurring amino acid
  misc_feature (76)..(76): Xaa can be any naturally occurring amino acid
  misc_feature (97)..(97): Xaa can be any naturally occurring amino acid
  misc_feature (114)..(114): Xaa can be any naturally occurring amino acid
  misc_feature (120)..(120): Xaa can be any naturally occurring amino acid
  misc_feature (122)..(122): Xaa can be any naturally occurring amino acid
  misc_feature (128)..(128): Xaa can be any naturally occurring amino acid
  misc_feature (145)..(145): Xaa can be any naturally occurring amino acid
  misc_feature (153)..(154): Xaa can be any naturally occurring amino acid
  misc_feature (166)..(166): Xaa can be any naturally occurring amino acid
  misc_feature (171)..(171): Xaa can be any naturally occurring amino acid
  misc_feature (181)..(183): Xaa can be any naturally occurring amino acid
  misc_feature (187)..(187): Xaa can be any naturally occurring amino acid
  misc_feature (209)..(209): Xaa can be any naturally occurring amino acid
MXPPPPRPPPSPAPPPPPPPAPPPPPXSPPPPGPPPPXPFPPXPPPWPAPPPPGPAPPPPPPASPLPXRPPSRPLXPPPPPPPPPRPPPPPPPPPPXPPLPPPPPPPPPPPGAXCLALTXAXFRAPAXVLGPGAEVDYLEQFGPXSFPASALXXPSFSLPFAPLLXARPGXPVPVATAPRXXXGAPXPPPAVRGPPRFVAFAFLGALAXPVPGPPPGVPAPGGPPLSTGPIVDLLQYSQKDLDAVVKATQEENRELRSRCEELHGKNLELGKIMDRFEEVVYQAMEEVQKQKELSKAEIQKVLKEKDQLTTDLNSMEKSFSDLFKRFEKQKEVIEGYRKNEESLKKCVEDYLARITQEGQRYQALKAHAEEKLQLANEEIAQVRSKAQAEALALQASLRKEQMRIQSLEKTVEQKTKENEELTRICDDLISKMEKI

SEQ ID NO: 919688 - protein, 523 aa, Homo sapiens
MSLQVLNDKNVSNEKNTENCDFLFSPPEVTGRSSVLRVSQKENVPPKNLAKAMKVTFQTPLRDPQTHRILSPSMASKLEAPFTQDDTLGLENSHPVWTQKENQQLIKEVDAKTTHGILQKPVEADTDLLGDASPAFGSGSSSESGPGALADLDCSSSSQSPGSSENQMVSPGKVSGSPEQAVEENLSSYSLDRRVTPASETLEDPCRTESQHKAETPHGAEEECRHGGVCAPAAVATSPPGAIPKEACGGAPLQGLPGEALGCPAGVGTPVPADGTQTLTCAHTSAPESTAPTNHLVAGRAMTLSPQEEVAAGQMASSSRSGPVKLEFDVSDGATSKRAPPPRRLGERSGLKPPLRKAAVRQQKAPQEVEEDDGRSGAGEDPPMPASRGSYHLDWDKMDDPNFIPFGGDTKSGCSEAQPPESPETRLGQPAAEQLHAGPATEEPGPCLSQQEIVQIKTQEKDRRKDSWARGTTTTKARRSVMAPNVWLRCYLLDTRQGDRLRSVSHLHGAAVPAPLLPSVCPV

SEQ ID NO: 919689 - protein, 183 aa, Homo sapiens
MSLQVLNDKNVSNEKNTENCDFLFSPPEVTGRSSVLRVSQKENVPPKNLAKAMKVTFQTPLRDPQTHRILSPSMASKLEAPFTQDDTLGLENSHPVWTQKENLSPQEEVAAGQMASSSRSGPVKLEFDVSDGATSKRAPPPRRLGERSGLKPPLRKAAVRGRSRCASSRWRRQWSRRLKRTRS

SEQ ID NO: 919690 - protein, 148 aa, Homo sapiens
MRGEQASKNIQCRCSRKAFNKSQRSMVRYQVKTPSDDICTELVKSCIDLVVTEVYGIKGGTVPMNVDMLHKYIFNLLLFSLDILFPESSNVPKLSLIIPPNTTLSSATQQKYQQQKMHLVCALPLVVQYSYVKNYYFLCFGILLMNYR

SEQ ID NO: 919691 - protein, 322 aa, Homo sapiens
IRPSPAFCCCRSNPESVMAAAGQEKGYLTQTAAALDKSPSLSPQLAAPIRGRPKKCLVYPHAPKSSRLSRSVLRWLQGLDLSFFPRNINRDFSNGFLIAEIFCIYYPWELELSSFENGTSLKVKLDNWAQLEKFLARKKFKLPKELIHGTIHCKAGVPEILIEEVYTLLTHREIKSIQDDFVNFTDYSYQMRLPLVSRSTVSKSIKDNIRLSELLSNPNMLTNELKAEFLILLHMLQRKLGRKLNPEWFDVKPTVGEVTLNHLPAQASGRRYNLKVKRGRVVPVLPNIGSGGSSHREIHVKQAGQHSYYSAMKPIRNMDKKP

SEQ ID NO: 919692 - protein, 322 aa, Homo sapiens; identical to SEQ ID NO: 919691

SEQ ID NO: 919693 - protein, 252 aa, Homo sapiens
MRRRAPACLVPFCVGFRVWISASSPGTSTEIFCIYYPWELELSSFENGTSLKVKLDNWAQLEKFLARKKFKLPKELIHGTIHCKAGVPEILIEEVYTLLTHREIKSIQDDFVNFTDYSYQMRLPLVSRSTVSKSIKDNIRLSELLSNPNMLTNELKAEFLILLHMLQRKLGRKLNPEWFDVKPTVGEVTLNHLPAQASGRRYNLKVKRGRVVPVLPNIGSGGSSHREIHVKQAGQHSYYSAMKPIRNMDKKP

SEQ ID NO: 919694 - protein, 907 aa, Homo sapiens
MWPESPTFWLAEPRGGSTLECPSGCLHPMRGLGALGVCSWQESGPSPLTLMHPWLNPVPQPAGPIVVTRQKVEPGILPCVGSSLLPSGETESWRGSRMFLRPHQSLKNCYARYHQAFANCNQSEQELQGHESQQLAAETQALAQGTQQDSTRRVGEQLQDTHSWKSELQREVEALAAETDLLLAQKQRLEHALDATEAPFSIATDNLQCSQGHQNANLMRDHVETELLKVPAAAHPPAPSQCLNNCFSSRKPSARNKGPCQVMETLTVQEEANPGTEGCRTRALAHKKEAELIRNIQELLKRAIVQAVSQIRLQHGGSPAVPSPATHQGPAPPRPRLNREHTEICEMDWSDKVEAYNLDETCGRHHSQSTEVQAHPALHHLPREGGPSSAPTLALAVVSPPSAWGPQRRCFPQPDPEALAPEDTWATVCPWHDASTPETWTKFTQDNLCRSQREHLDSANLWVLVDCIFRDTSEDLGLQCDAVNLAFGRRCEELEDTRHKLQHHLHKIRNNVAALKEAIKDKEAPLHIAQTLLYLRLHWPNMELCGNAAQFRHDTGQVMGRVPLSARDLCPRGLTPPCATSSSREEAPSDKPQLTPPNIPKLVSEVEELNMSITALREKLLEGEQSLCNLEDIHMSLEKDVTAMTNSLFIDRQKCMAHRTCYPTILQLAGYQTPPEATAEDEKHYCRSLGEAQVVLPSPVGSPSVSGPPCPTLEGVADGELSVEDARGGGLGDIVQPPPLRPSGHWQLLLTHRPLCGVPVDLALNSYPWWRSVEPGHSCPLRVGVALSCLMSGFPHLPPVQWLLEITLTGIRCMAQGHRNPGIQEPKVSHPGSEGLAKALTPVPITPASIPEYSGGDAIGLSRAELVPMAAGTTVAELEETRILPKSLQRECISAHTLILDLWPPER

SEQ ID NO: 919695 - protein, 109 aa, Homo sapiens
SHRPPQAPPPSGRRRRYKPRVPGVKSYVLGLLKHLKSTISFLASSSWALKYLFLDEGSTLRLNSTQHYRLGCRYGLEAMVKEKESENWLPSLQAVYLVMCHLYLYCNPC

SEQ ID NO: 919696 - protein, 157 aa, Homo sapiens
PRCKTCFSPSAMIMRPPQTHATISLLNLFFFINYPVSVFARLCGKEKEEEEEKEERKERKDEGKEIEKECKTSNAKKKVQNPVKCFGWLRNESSILEQSVMAQMYFKNAAIENKSPGAHRLESLWATMHEDIQAALWSSLHGEKLRPPANSQHQLAI

SEQ ID NO: 919697 - protein, 157 aa, Homo sapiens; identical to SEQ ID NO: 919696

SEQ ID NO: 919698 - protein, 142 aa, Homo sapiens
MAENLKRLVSNETLRTLQEKLDFWLKEYNTNTCDQNLNHCLELIEQVAKVQGQLFGILTAAAQEGGRNDGVETIKSRLLPWLEASFTAASLGKSVDSKVPSLQDTFDRERHKDPSPRDRDMQQLDSNLNSTRSQCNQVQDDY

SEQ ID NO: 919699 - protein, 233 aa, Homo sapiens
MAENLKRLVSNETLRTLQEKLDFWLKEYNTNTCDQNLNHCLELIEQVAKVQGQLFGILTAAAQEGGRNDGVETIKSRLLPWLEASFTAASLGKSVDSKVPSLQDTFDRERHKDPSPRDRDMQQLDSNLNSTRSQCNQVQDDLVETEKNLEESKNRSAISLLAAEEEINQLKKQLKSLQAQEDARHRNTDQRSSENRRSEPWSLEERKRILSISLQGISLLYLTLMACVGEVFL

SEQ ID NO: 919700 - protein, 104 aa, Homo sapiens
MAENLKRLVSNETLRTLQEKLDFWLKEYNTNTCDQNLNHCLELIEQVAKVQGQLFGILTAAAQEGGRNDGVETIKSRLLPWLEASFTAASLGKSVDSKVPSLQA

SEQ ID NO: 919701 - protein, 136 aa, Homo sapiens
MFSQRCAFLCAEALGIISAQELKRLFSTVVLNYLWAFDQYSAGNVIIALVFVTLFLFLIKIFKTLLEGFLCVEARREKISSSKFLVEKIKISQKDLNIVFMRQNKGVLPKPLIMSGKTEIMVFLLMGITIFCNLSV

SEQ ID NO: 919702 - protein, 177 aa, Homo sapiens
MGSVDKRGGGGGALRPGSVPERGRGGAEREDCRPPRPRSLRATRLSRGGTKPRPPPRPLRPPSLAARAPPPPRARQPPPSPRRPSAAPRRRRGRGLQAPRLAPPTESAARPVRGSGPAPGSTPRPLRACVPGTRRRPPGLEGKTCGGGDLRRRGRTRRGGPGRSPSRVALLHLHSVN

SEQ ID NO: 919703 - protein, 115 aa, Homo sapiens
MIFGGETSSKLYQREMNVNSAEVCRLCYKIIVHLNYFIDNNLNIKETLSFPFEILFQVLHASKTTHVSCSAGSHEKPLTLHNPLKNCSPELSGMMNLKVCSCLLTQKPVIIKLFL

SEQ ID NO: 919704 - protein, 124 aa, Homo sapiens
MLDKELGTKRALNRLTLKPSVDGKVKRVHCNTCPLGLWESQEPTPRQYHGHLPCLLHLPVCMLPCPTEIHSCCPGWSAMAQFRLSTISASQIQAILLPLSPKELGLQMKAPLSSQKSTSQTTVS

SEQ ID NO: 919705 - protein, 218 aa, Homo sapiens
MKAAVLDLGSLLAKLFETSTAPPAGPSSRPSGGAAAAGSGGSRAGTPLGTAPTLLRALAPDSPSASRRSPAPLLSSPYSRGSAASRAAGAVGTLLSWPSSPRAGKAPPQPPTPSGGGCSPARLVVPARPPSGPGGVWAALPRNPLQPGPGERELGACVAPGAGPRTLFLTLPDIGEEGASDGDSGDGEALECSGMITVHCSLNLPGSSDLILPSQTLE

SEQ ID NO: 919706 - protein, 218 aa, Homo sapiens; identical to SEQ ID NO: 919705

SEQ ID NO: 919707 - protein, 189 aa, Homo sapiens [sequence omitted]

SEQ ID NO: 919708 - protein, 192 aa, Homo sapiens
SQTLHPPMTLQLSRYSRGWGLSSDRPRGAKAKVPSCFGTAPRVLKPLHASSPTTWSPQDVAVSGSSLERSPPGCRHPPRAASPAAPRKSQRCPAPAPTLPRPPTRGRDFRLPASGLAVSGEWDPIPWGYVGEVGGCSCRGFLLVSSRNGGGARCGWANPGSPRTLRSARQGARACQGRRAGVNVASVGLQPR

SEQ ID NO: 919709 - protein, 369 aa, Homo sapiens
MGLRKKSTKNPPVLSQEFILQNHADIVSCVGMFFLLGLVFEGTAEASIVFLTLQHSVAVPAAEEQATGSKSLYYYGVKDLATVFFYMLVAIIIHATIQEYVLDKINKRMQFTKAKQNKFNESGQFSVFYFFSCIWGTFILISENCLSDPTLIWKARPHSMMTFQMKFFYISQLAYWFHAFPELYFQKTKKQDIPRQLVYIGLHLFHITGAYLLYLNHLGLLLLVLHYFVELLSHMCGLFYFSDEKYQKGISLWAIVFILGRLVTLIVSVLTVGFHLAGSQNRNPDALTGNVNVLAAKIAVLSSSCTIQAYVTWNLITLWLQRWVEDSNIQASCMKKKRSRSSKKRTENGVGVETSNRVDCPPKRKEKSS

SEQ ID NO: 919710 - protein, 242 aa, Homo sapiens
MGGGGCGLCSSGSLCLCPAAGSQSSRQLPALQTLSPESQSPGHRRGLLLGYSLPGTHPGGAMAVSIGGGNSSESVPAHSMKQRQDLALPKLKALFWAFHCLGLFNPHTSGSERRSNWPVSHSQYVVNQLPADRQAKILERSQQGKPARPDLVHSRLTDPQGSPGWHPVLPGFVGSENVQVLEAGVLLGGPAGAQGRASRGQCRGVAPMAPHQPQPLCSPILCSYHLVVSCTEMVHCSARRYR

SEQ ID NO: 919711 - protein, 192 aa, Homo sapiens
FWTLSAIGMAPQLVTEALNTHVLAKNHINDGSITRLQEFRVIFQLFTRTDINLFLQLSKVACNVSCVAIQHRGIASAELARMVQDKHLSGETSCFHWWVVFSVTSNVARTSILDRHFLDIEAHIVPRKSFTQSFMVHFDRFYFSCNTDRSKGDQHTRFENTSLHLANRKSTNTTKGLSVGQVCGALGPLATD

SEQ ID NO: 919712 - protein, 140 aa, Homo sapiens
ELNMGTSNRSTACPRPSSQSNFPKQQLFRWNLVKRHIEGGFEGRNWRVGAGKRPHAADRLVEGGAWLAPSESLPFPVTWCKQLGFAPRTWWGQIRSLPSCLSPASLSGKVWPPAAAKHGRPLPTEVKPSILRPCPSSSSI

SEQ ID NO: 919713 - protein, 136 aa, Homo sapiens
SQYKMLSHTSLLVLHMPATNGKTLHFTIPTSCMILEYLRSPLTLKFKLGYTPLDSACTQEPAFNSSGEHRHTGAVGWWNGGCVPWIYKRIPEATESQMTRSCVKASLGESHREDEKQAARKGPRAERRLTGHSAHQ

SEQ ID NO: 919714 - protein, 245 aa, Homo sapiens
  misc_feature (18)..(18): Xaa can be any naturally occurring amino acid
LNVSYSNQTHLLADVRAXLNYRAVQTKSFFYALYYRVCLVIAKILITDRNIIFTGTTCIKSLYKENKNLPLHEPVPKEQPRLIHSCDGNCSDTRGLEIAIKQRVDDALTSKLPMFYLVNRPHISLVPSAYPLQMNLEYKFLSLNWAQGDVSLEIVDGLSGKITESSPFKSGMSMASRLCKAAMLSRFNLLAKEAKKELLEAGTYHAAKCMSASYQEAKCKLKSYLQQHGYGSWIVKSPCIEQFNM

SEQ ID NO: 919715 - protein, 523 aa, Homo sapiens
ASSTSDKDDNYTHRMVLRKLRPVQDGIQGYASNFPEPLLSKNLSSISNPVLPPKKIPKEFIMKYKRGEINPVSALHQFAQMQRVQLDLKETVTTGKCNVMGPYFAFCAVVDGIQYKTGLGQNKKESRSNAAKLALDELLQLDEPEPRILETSGAQAQGDPNSVPEPLAGVIGDPPGKPRPMRKDGSGLGLKRPFGHRLPQPIVKERFNQLISNRSEYLKYSSSLAAFIIERAGQHEVVAIGTGEYNYSQDIKPDGRVLHDTHAVVTARRSLLRRLNPHSISAFEANEELCLHVAVEGKIYLTVYCPKDGVNRISSMSSSDKLTRWEVLGVQGALLSHFIQPVYISSILIGDGNCSDTRGLEIAIKQRVDDALTSKLPMFYLVNRPHISLVPSAYPLQMNLEYKFLSLNWAQGDVSLEIVDGLSGKITESSPFKSGMSMASRLCKAAMLSRFNLLAKEAKKELLEAGTYHAAKCMSASYQEAKWSIQRGLGLEPQGTLKYWIWKNKETWSYLTGKCRVRIAQRE

SEQ ID NO: 919716 - protein, 523 aa, Homo sapiens; identical to SEQ ID NO: 919715

SEQ ID NO: 919717 - protein, 537 aa, Homo sapiens
ASSTSDKDDNYTHRMVLRKLRPVQDGIQGYASNFPEPLLSKNLSSISNPVLPPKKIPKEFIMKYKRGEINPVSALHQFAQMQRVQLDLKETVTTGKCNVMGPYFAFCAVVDGIQYKTGLGQNKKESRSNAAKLALDELLQLDEPEPRILETSGAQAQGDPNSVPEPLAGVIGDPPGKPRPMRKDGSGLGLKRPFGHRLPQPIVKERFNQLISNRSEYLKYSSSLAAFIIERAGQHEVVAIGTGEYNYSQDIKPDGRVLHDTHAVVTARRSLLRRLNPHSISAFEANEELCLHVAVEGKIYLTVYCPKDGVNRISSMSSSDKLTRWEVLGVQGALLSHFIQPVYISSILIGDGNCSDTRGLEIAIKQRVDDALTSKLPMFYLVNRPHISLVPSAYPLQMNLEYKFLSLNWAQGDVSLEIVDGLSGKITESSPFKSGMSMASRLCKAAMLSRFNLLAKEAKKELLEAGTYHAAKCMSASYQEAKWSIQRGLGLEPQGTLKYWIWKNKETWSYLTAHPPTSAYTRIHTISNPAVSPVEPT

SEQ ID NO: 919718 - protein, 187 aa, Homo sapiens
ACNPCTLEGQGRTSQWNSLYRMGHSTSKEAVDRNPESKMALLSESGAWLSIGYFYPSQFLLKDGFCSQFSGPSSRQPTSRDSRQHAGSPGLVWYSGFSQPMGREATSHLPGPLASLLKALFLAPPGSPPGLIQGPSPASAHLGGAREPHGNGIGPVDTNDVSRGVPGSSLCCKSLPLTKLLPPAIPQ

SEQ ID NO: 919719 - protein, 293 aa, Homo sapiens
PDQLCITRALMGQEEKIEAKSLFKELMAGRKFPKFEKKYGCRIVLKHNYCTLKSIQKFYTNKYYNQSFKSHRQRILEAEKEKMDHDIKGNSHDINKIQEDIFLNQKYKENIIKLSRIYHDQPVKPLDRAVFWIEFVMCHKGAKHLQVAARDLTWFQYHSLDMIGFLLDYVATSCFGYADFKLRIKSRIQPFSQQLNQKEKEKHKILRNIPKQEAQRKELFSRVPGAPPLTAQGNPEGLQDGSRNGALSSEPWYHTLDPPQLAETGSPGPVDQPVGPRPSDLADHAMRPRCQWR

SEQ ID NO: 919720 - protein, 259 aa, Homo sapiens
MGKSWNSLESSEKDRKMRESLELPRDLLNCCDQNTDSDMDNEVQAQEVSDGNEELIGNWSRGHFCYALAKSLAALYPCSRDLWNLELESDDLGYLAEEIPKQQSVQDVAWLLLTTYAHMHRKRNDLKLEFIFNRETEHKKTFLTAPPITDLRPRQEEWFHGPGPGPSCSVQPLDTAPCSPFLLADFSLSKRDYLLNPYIPIVTWKFPFANIIDPSTTGVLGALTLHAVKNLHVTFDSPKSLLIIAYFGPDGCFTGNINS

SEQ ID NO: 919721 - protein, 259 aa, Homo sapiens; identical to SEQ ID NO: 919720

SEQ ID NO: 919722 - protein, 188 aa, Homo sapiens
PQLTHRSEDKKIVFMLPLFSGCLTCFSAAVATARCLGQETLAVAKATAEFWLLSWLCEEYLRAPDASAVTHCQTKCKGLGSELTETMRPFLNSEKQVIVIYSSLEFFLAVSDHGLGYRQGRVYVSQLGCFVRSGLLPPQPNLKNRTSFFRGNFPPGGISLQWTSSPLVPSAIRTPRFRSVGPKFHQIQ

SEQ ID NO: 919723 - protein, 604 aa, Homo sapiens
GRRARFIAAATAGYSGARESLGSMLCALLLLPSLLGATRASPTSGPQECAKGSTVWCQDLQTAARCGAVGYCQGAVWNKPTAKSLPCDVCQDIAAAAGNGLNPDATESDILALVMKTCEWLPSQESSAGCKWMVDAHSSAILSMLRGAPDSAPAQVCTALSLCEPLQRHLATLRPLSKEDTFEAVAPFMANGPLTFHPRQAPEGALCQDCVRQVSRLQEAVRSNLTLADLNIQEQCESLGPGLAVLCKNYLFQFFVPADQALRLLPPQELCRKGGFLVAMDGVPSLELGLPRKQSEMQMKAGVTCEVCMNVVQKLDHWLMSNSSELMINPCPGARVLGNACLYHEGVHHLGGHLTAPPVVQLVAKITPEKVCKFIRLCGNRRRARAVHDAYAIVPSPEWDAENQGSFCNGCKRLLTVSSHNLESKSTKRDILVAFKGGCSILPLPYMIQCKHFVTQYEPVLIESLKDMMDPVAVCKKVGACHGPRTPLLGTDQCALGPSFWCRSQEAAKLCNAVQHCQKHVWKEMHLHAGETRVTVAARDPEPASEAHENGDDHTCLTRMLRQFTETFWSPFPPRPAFMSLLGPENPSQGAQRGTQESLAVQAL

SEQ ID NO: 919724 - protein, 150 aa, Homo sapiens
MLIIKKYSRYFDDFFGGGKEECKDIEENKLRFSCYTLTTQNMSSVQFTILQPGLSFTSLAKPDCEVCTSTLAYSLDEMTWNTEKYEIKIDHFDYFIERNVMVLLIINEYVEGIISKNEYMIYIAVLCIDGLMQIAVITYTGWLTFLGKTF

SEQ ID NO: 919725 - protein, 194 aa, Homo sapiens
FPQHFLRCMNSYSALAGLGRGRIALAQTAGVLRSLEQEEPFDLSQKRRAKVPVFQSDGESAQGSHCHEEEEEDNCYEVEPYSPGLAPQSQQLCTPEDLSTKSEHAPEVLEEACKEEKEDASKGEWEKRSKGDLGAEGGQERDCAGRDECLSLRAFQSTRRGPSFSDYLYFKHRDESLKELLERKMEKQAVLLGI

SEQ ID NO: 919726 - protein, 112 aa, Homo sapiens
MATGAPSRTRSVPFPWQRYCLLGRTWAAEGNWGRRRLCSFREAPLWRPDRGRRCKPAPSVSQLLAMTSTGISASICHSKPRSQLTSKQMSCIPLVGVERVKRKLKLKRRRRP

SEQ ID NO: 919727 - protein, 375 aa, Homo sapiens
SGSPWADLGCGRKKMQASPIRIPTVSNDIDWDFCFHMSQQTEIPAHQQTDELYPTGGCGESEEETKAKEKEKAIDCMSHPKEKLAQSQKKVAQLIKEKMNTQANKELIRCVILSRIIFGDHHWKCARALANLAYGYLTLRGLPVQAKKHATSAKNTLLTWKANTTSNKEKEEILEALVKLYYTLGVAWLLQNRGREAYFNLQKAERNMKELKELYKGGVCELQVSENDLTLALGRASLAIHRLNLALAYFEKAIGDVIAAKGDRTSDLISLYEEAAQIEQLRRNHNQAIQYLQQAHSVCVSLFTEVSPKTAEMSALLAKAYAMSGEAQHRDAVEIYFIRSINAYRATLGSEDFETLSTTEEFCKWLVQNGEKQDK

SEQ ID NO: 919728 - protein, 310 aa, Homo sapiens
MATGAPSRTRSVPFPWQRYCLLGRTWAAEGNWGRRRLCSFREAPLWRPDRGRRCKPAPSVSQLLAMTSTGISASICLPVQAKKHATSAKNTLLTWKANTTSNKEKEEILEALVKLYYTLGVAWLLQNRGREAYFNLQKAERNMKELKELYKGGVCELQVSENDLTLALGRASLAIHRLNLALAYFEKAIGDVIAAKGDRTSDLISLYEEAAQIEQLRRNHNQAIQYLQQAHSVCVSLFTEVSPKTAEMSALLAKAYAMSGEAQHRDAVEIYFIRSINAYRATLGSEDFETLSTTEEFCKWLVQNGEKQDK

SEQ ID NO: 919729 - protein, 361 aa, Homo sapiens
MQASPIRIPTVSNDIDWDFCFHMSQQTEIPAHQQTDELYPTGGCGESEEETKAKEKEKAIDCMSHPKEKLAQSQKKVAQLIKEKMNTQANKELIRCVILSRIIFGDHHWKCARALANLAYGYLTLRGLPVQAKKHATSAKNTLLTWKANTTSNKEKEEILEALVKLYYTLGVAWLLQNRGREAYFNLQKAERNMKELKELYKGGVCELQVSENDLTLALGRASLAIHRLNLALAYFEKAIGDVIAAKGDRTSDLISLYEEAAQIEQLRRNHNQAIQYLQQAHSVCVSLFTEVSPKTAEMSALLAKAYAMSGEAQHRDAVEIYFIRSINAYRATLGSEDFETLSTTEEFCKWLVQNGEKQDK

SEQ ID NO: 919730 - protein, 365 aa, Homo sapiens
HLLSTPVPAKPPRHRPAALASWGAWGGWRGCVCTEALALGQPQSAMVSPSQPWSAPISHGQPQSAVVSPGQPQSAMVILSQPWSAPCPLTLLGSRGKPPAPAKETGVLRHSRRDKNMDDSGTRSKNPVSFRVALGGPAEPTTCRMDLRGIRASSHLDFLLARPLTLVAGTVLRTSALGLAQSLHLGQQHRGSLFHTCLLPEQAFTRNLGSGYKGRTWFHPLPVSRTVCSDESRNRERENPPGPGHCFSPVSPIIAQIITCVSPILAQTITCVSPSIAQTITAATGYIIVIIIIIIITNTTITITSITIITITTAINSIITTTTIIDITTITRTITTIIIITTMTTISTITTTTITASLTIITIMS

SEQ ID NO: 919731 - protein, 210 aa, Homo sapiens
MKVENFKTSEIQELFDIFTYSKGASMARMLSCFLNEHLFVSALKSYLKTFSYSNAEQDDLWRHFQMAIDDQSTVILPATIKNIMDSWTHQSGFPVITLNVSTGVMKQEPFYLENIKNRTLLTSNDTWIVPILWIKNGTTQPLVWLDQSSKVFPEMQVSDSDHDWVILNLNMTGYYRVNYDKLGWKKLNQQLEKDPKKESDMAEDMKGGVM

SEQ ID NO: 919732 - protein, 391 aa, Homo sapiens
MPTYLVAFVICDYDHVNRTERGKEIRIWARKDAIANGSADFALNITGPIFSFLEDLFNISYSLPKTDIIALPSFDNHAMENWGLMIFDESGLLLEPKDQLTEKKTLISYVVSHEIGHQWFGNLVTMNWWNNIWLNEGFASYFEFEVINYFNPKLPRNEIFFSNILHNILREDHALVTRAVAMKVENFKTSEIQELFDIFTYSKGASMARMLSCFLNEHLFVSALKSYLKTFSYSNAEQDDLWRHFQMAIDDQSTVILPATIKNIMDSWTHQSGFPVITLNVSTGVMKQEPFYLENIKNRTLLTSNDTWIVPILWIKNGTTQPLVWLDQSSKVFPEMQVSDSDHDWVILNLNMTGYYRVNYDKLGWKKLNQQLEKDPKKESDMAEDMKGGVM

SEQ ID NO: 919733 - protein, 145 aa, Homo sapiens
MRRRNRKTRRYGVLDTNIENMELTPLEQDDEDDDNTLFDANHPRSVEFLGFFVAQAIVQNQKNFKSQSPTSNVLLDFRDKASVEPVQKKSFQCPGLLLVQLKDWQLVFVFSLQGLVVSSFNPDTNKDHRDSGEGQNPIQEIYGIQ

SEQ ID NO: 919734 - protein, 167 aa, Homo sapiens
MTGKLATKKFGEEVCGCSSLSGQKLKLFVSHVSAHQRVTSGEEEFNNQVDRMTRSVDTTQPLSPTILSSPNGPMNKVAMVTGMDKATYALNQYPIYGTISPIARIHGYRNQGEEVEVVPLTITSSDPRAKVLLPVPMTLCSAGLEVLVPEGGMLPPGDTTMIQLNWK

SEQ ID NO: 919735 - protein, 452 aa, Homo sapiens
MEFWYVRSRGCLYNQHPRLKNLGTDSLMSRNNTSHVSSQFDGGRIMSSETPTGHFNRVEAWTRDVAFLLRQEGRPMVNLIRNRTKVRVMERDWQNTDKAVNWLRKEAINYTEPFVIYLGLNLPHPYPSPSSGENFGSSTFHTSLYWLEKVSHDAIKIPKWSPLSEMHPVDYYSSYTKNCTGRFTKKEIKNIRAFYYAMCAETDAMLGEIILALHQLDLLQKTIVIYSSDHGELAMEHRQFYKMSMYEASAHVPLLMMGPGIKAGLQVSNVVSLVDIYPTMLDIAGIPLPQNLSGYSLLPLSSETFKNEHKVKNLHPPWILSEFHGCNVNASTYMLRTNHWKYIAYSDGASILPQLFDLSSDPDELTNVAVKFPEITYSLDQKLHSIINYPKVSASVHQYNKEQFIKWKQSIGQNYSNVIANLRWHQDWQKEPRKYENAIDQWLKTHMNPRAV

SEQ ID NO: 919736 - protein, 452 aa, Homo sapiens; identical to SEQ ID NO: 919735

SEQ ID NO: 919737 - protein, 134 aa, Homo sapiens
MTHLLRSRAFRLQRLSVKAPKPLEGDANGCGGAHEHHQVVIWKLSLSEGLCSHQWSQTASGHSFPISVLDRSDAVQAPGITRSFLCVLYLTTGSPGPRRELPLSRSSLVFAEETSLPLNREGGKVVTIWLGDYV

SEQ ID NO: 919738 - protein, 150 aa, Homo sapiens
LRDAWGWMLLFIIRCIFCYSWSWALGAIMDMFQCCRDFVYGQFWGQFMARFWGALLPTCPASLICKSTKAKAALSWFSSAIYDSFLICPQVGGCVQRVLLVTGSSPRGLTPPVKDEECTIWQVGHHWTIALASFQNVDCPEFQSLKEHPA

SEQ ID NO: 919739 - protein, 150 aa, Homo sapiens; identical to SEQ ID NO: 919738

SEQ ID NO: 919740 - protein, 295 aa, Homo sapiens
ENRRLESKIREHLEKKGPQIDNARLAADDFRVKYETELAMRQSVENDIHGLRNVIDDTVTRLQLETEIEAVKEELLFMKKNHKEEAKSLQAQIASSGLMVEVDAPKSQDLAKVMADIRAQYDELAQKNGEELDKHWPQQIEESTTVVTTQSAEVGAAETTLTELRRTVQFLEDDLDSMRNLKASLENSLREVEAPYALQMEQLNGILLHLESELAQTRAEGQRQAQEYEALLNIKVKLEAEIATYRRLLEDGEDFNLGDALDSSNSMQTIQKTTTRRIVDGKVVSETNDTKVLRH

SEQ ID NO: 919741 - protein, 155 aa, Homo sapiens
MGSTVTRGVGIIAVEKDGVVTKAQVTKLPLHGGNLSFSDEKGDPAMQRSDWIRKLKLAHGQQPASYKGLPTAHEALSPAKSHVHELRRASSSRLGKRQSVCSKRKERRKHVERPKEQAKSDDEVKKSNSNHFNRFGCKSETGDEVEWRESGRDSL

SEQ ID NO: 919742 - protein, 141 aa, Homo sapiens
MVYWSVLTLPIKTYLRLELSHYHENSMKVTAPMIQLPPTGSLPRDTGIMGTTIEDSTDTLRDQRRSSGGSPSLPLPGQGSCHSRHGSRDGPGILVTRAPCPCEWEIAGDVGWASPCTLRTHCQGAGPQVGSKEPLEENIVP

SEQ ID NO: 919743 - protein, 205 aa, Homo sapiens
MAASTASHRPIKGILKNKTSTTSSMVASAEQPRRSVDEELSKKSQKWDEINILATYHPADKGYGLMKIDEPSPPYHSMMGDDEDACRDTETTEAMAPDILAKKLAAAEGLEPKYRIQEQESSGEEDSDLSPEEREKKRQFEMRRKLHYNEGLNIKLARQLISKDLHDDDEDEEMLETADGESMNTEESNQGSTPSDQQQNKLRSS

SEQ ID NO: 919744 - protein, 66 aa, Homo sapiens
EVISQAMLNNAQPDQYEAPDKDFMIVALDLLSGLAEGLGGNIEQLVARSNILTLMYQCMQDKMPER

SEQ ID NO: 919745 - protein, 898 aa, Homo sapiens
MVWDRQTKMEYEWKPDEQGLQQILQLLKESQSPDTTIQRTVQQKLEQLNQYPDFNNYLIFVLTKLKSEDEPTRSLSGLILKNNVKAHFQNFPNGVTDFIKSECLNNIGDSSPLIRATVGILITTIASKGELQNWPDLLPKLCSLLDSEDYNTCEGAFGALQKICEDSAEILDSDVLDRPLNIMIPKFLQFFKHSSPKIRSHAVACVNQFIISRTQALMLHIDSFIENLFALAGDEEPEVRKNVCRALVMLLEVRMDRLLPHMHNIVEYMLQRTQDQDENVALEACEFWLTLAEQPICKDVLVRHLPKLIPVLVNGMKYSDIDIILLKGDVEEDETIPDSEQDIRPRFHRSRTVAQQHDEDGIEEEDDDDDEIDDDDTISDWNLRKCSAAALDVLANVYRDELLPHILPLLKELLFHHEWVVKESGILVLGAIAEGCMQGMIPYLPELIPHLIQCLSDKKALVRSITCWTLSRYAHWVVSQPPDTYLKPLMTELLKRILDSNKRVQEAACSAFATLEEEACTELVPYLAYILDTLVFAFSKYQHKNLLILYDAIGTLADSVGHHLNKPEYIQMLMPPLIQKWNMLKDEDKDLFPLLECLSSVATALQSGFLPYCEPVYQRCVNLVQKTLAQAMLNNAQPDQYEAPDKDFMIVALDLLSGLAEGLGGNIEQLVARSNILTLMYQCMQDKMPEVRQSSFALLGDLTKACFQHVKPCIADFMPILGTNLNPEFISVCNNATWAIGEISIQMGIEMQPYIPMVLHQLVEIINRPNTPKTLLENTAITIGRLGYVCPQEVAPMLQQFIRPWCTSLRNIRDNEEKDSAFRGICTMISVNPSGVIQDFIFFCDAVASWINPKDDLRDMFCKILHGFKNQVGDENWRRFSDQFPLPLKERLAAFYGV

SEQ ID NO: 919746 - protein, 898 aa, Homo sapiens; identical to SEQ ID NO: 919745

SEQ ID NO: 919747 - protein, 890 aa, Homo sapiens
MEYEWKPDEQGLQQILQLLKESQSPDTTIQRTVQQKLEQLNQYPDFNNYLIFVLTKLKSEDEPTRSLSGLILKNNVKAHFQNFPNGVTDFIKSECLNNIGDSSPLIRATVGILITTIASKGELQNWPDLLPKLCSLLDSEDYNTCEGAFGALQKICEDSAEILDSDVLDRPLNIMIPKFLQFFKHSSPKIRSHAVACVNQFIISRTQALMLHIDSFIENLFALAGDEEPEVRKNVCRALVMLLEVRMDRLLPHMHNIVEYMLQRTQDQDENVALEACEFWLTLAEQPICKDVLVRHLPKLIPVLVNGMKYSDIDIILLKGDVEEDETIPDSEQDIRPRFHRSRTVAQQHDEDGIEEEDDDDDEIDDDDTISDWNLRKCSAAALDVLANVYRDELLPHILPLLKELLFHHEWVVKESGILVLGAIAEGCMQGMIPYLPELIPHLIQCLSDKKALVRSITCWTLSRYAHWVVSQPPDTYLKPLMTELLKRILDSNKRVQEAACSAFATLEEEACTELVPYLAYILDTLVFAFSKYQHKNLLILYDAIGTLADSVGHHLNKPEYIQMLMPPLIQKWNMLKDEDKDLFPLLECLSSVATALQSGFLPYCEPVYQRCVNLVQKTLAQAMLNNAQPDQYEAPDKDFMIVALDLLSGLAEGLGGNIEQLVARSNILTLMYQCMQDKMPEVRQSSFALLGDLTKACFQHVKPCIADFMPILGTNLNPEFISVCNNATWAIGEISIQMGIEMQPYIPMVLHQLVEIINRPNTPKTLLENTAITIGRLGYVCPQEVAPMLQQFIRPWCTSLRNIRDNEEKDSAFRGICTMISVNPSGVIQDFIFFCDAVASWINPKDDLRDMFCKILHGFKNQVGDENWRRFSDQFPLPLKERLAAFYGV

SEQ ID NO: 919748 - protein, 691 aa, Homo sapiens
MVWDRQTKMEYEWKPDEQGLQQILQLLKESQSPDTTIQRTVQQKLEQLNQYPDFNNYLIFVLTKLKSEDEPTRSLSGLILKNNVKAHFQNFPNGVTDFIKSECLNNIGDSSPLIRATVGILITTIASKGELQNWPDLLPKLCSLLDSEDYNTCEGAFGALQKICEDSAEILDSDVLDRPLNIMIPKFLQFFKHSSPKIRSHAVACVNQFIISRTQALMLHIDSFIENLFALAGDEEPEVRKNVCRALVMLLEVRMDRLLPHMHNIVEYMLQRTQDQDENVALEACEFWLTLAEQPICKDVLVRHLPKLIPVLVNGMKYSDIDIILLKGDVEEDETIPDSEQDIRPRFHRSRTVAQQHDEDGIEEEDDDDDEIDDDDTISDWNLRKCSAAALDVLANVYRDELLPHILPLLKELLFHHEWVVKESGILVLGAIAEGCMQGMIPYLPELIPHLIQCLSDKKALVRSITCWTLSRYAHWVVSQPPDTYLKPLMTELLKRILDSNKRVQEAACSAFATLEEEACTELVPYLAYILDTLVFAFSKYQHKNLLILYDAIGTLADSVGHHLNKPEYIQMLMPPLIQKWNMLKDEDKDLFPLLECLSSVATALQSGFLPYCEPVYQRCVNLVQKTLAQAMLNNAQPDQYEAPDKDFMIVALDLLSGLAEGLGGNIEQLVARSNILTLMYQCMQDKMPER

SEQ ID NO: 919749 - protein, 581 aa, Homo sapiens
CCELLVTQGVREEPQYKGMSRQVVSKLCPMEPNLAHDLQAGDEEPEVRKNVCRALVMLLEVRMDRLLPHMHNIVEGDVEEDETIPDSEQDIRPRFHRSRTVAQQHDEDGIEEEDDDDDEIDDDDTISDWNLRKCSAAALDVLANVYRDELLPHILPLLKELLFHHEWVVKESGILVLGAIAEGCMQGMIPYLPELIPHLIQCLSDKKALVRSITCWTLSRYAHWVVSQPPDTYLKPLMTELLKRILDSNKRVQEAACSAFATLEEEACTELVPYLAYILDTLVFAFSKYQHKNLLILYDAIGTLADSVGHHLNKPLNNAQPDQYEAPDKDFMIVALDLLSGLAEGLGGNIEQLVARSNILTLMYQCMQDKMPEVRQSSFALLGDLTKACFQHVKPCIADFMPILGTNLNPEFISVCNNATWAIGEISIQMGIEMQPYIPMVLHQLVEIINRPNTPKTLLENTAITIGRLGYVCPQEVAPMLQQFIRPWCTSLRNIRDNEEKDSAFRGICTMISVNPSGVIQDFIFFCDAVASWINPKDDLRDMFCKILHGFKNQVGDENWRRFSDQFPLPLKERLAAFYGV

SEQ ID NO: 919750 - protein, 247 aa, Homo sapiens
GTDDISACRIKCQNSVELLAFYPACTDTLVSGCYFGLPAVRQSSFALLGDLTKACFQHVKPCIADFMPILGTNLNPEFISVCNNATWAIGEISIQMGIEMQPYIPMVLHQLVEIINRPNTPKTLLENTAITIGRLGYVCPQEVAPMLQQFIRPWCTSLRNIRDNEEKDSAFRGICTMISVNPSGVIQDFIFFCDAVASWINPKDDLRDMFCKILHGFKNQVGDENWRRFSDQFPLPLKERLAAFYGV

SEQ ID NO: 919751 - protein, 247 aa, Homo sapiens; identical to SEQ ID NO: 919750

SEQ ID NO: 919752 - protein, 898 aa, Homo sapiens; identical to SEQ ID NO: 919745

SEQ ID NO: 919753 - protein, 898 aa, Homo sapiens; identical to SEQ ID NO: 919745

SEQ ID NO: 919754 - protein, 930 aa, Homo sapiens
KFAVTQSGRLLALGGRGGSSSRRWRPGCQEQFRRVSLQTKMEYEWKPDEQGLQQILQLLKESQSPDTTIQRTVQQKLEQLNQYPDFNNYLIFVLTKLKSEDEPTRSLSGLILKNNVKAHFQNFPNGVTDFIKSECLNNIGDSSPLIRATVGILITTIASKGELQNWPDLLPKLCSLLDSEDYNTCEGAFGALQKICEDSAEILDSDVLDRPLNIMIPKFLQFFKHSSPKIRSHAVACVNQFIISRTQALMLHIDSFIENLFALAGDEEPEVRKNVCRALVMLLEVRMDRLLPHMHNIVEYMLQRTQDQDENVALEACEFWLTLAEQPICKDVLVRHLPKLIPVLVNGMKYSDIDIILLKGDVEEDETIPDSEQDIRPRFHRSRTVAQQHDEDGIEEEDDDDDEIDDDDTISDWNLRKCSAAALDVLANVYRDELLPHILPLLKELLFHHEWVVKESGILVLGAIAEGCMQGMIPYLPELIPHLIQCLSDKKALVRSITCWTLSRYAHWVVSQPPDTYLKPLMTELLKRILDSNKRVQEAACSAFATLEEEACTELVPYLAYILDTLVFAFSKYQHKNLLILYDAIGTLADSVGHHLNKPEYIQMLMPPLIQKWNMLKDEDKDLFPLLECLSSVATALQSGFLPYCEPVYQRCVNLVQKTLAQAMLNNAQPDQYEAPDKDFMIVALDLLSGLAEGLGGNIEQLVARSNILTLMYQCMQDKMPEVRQSSFALLGDLTKACFQHVKPCIADFMPILGTNLNPEFISVCNNATWAIGEISIQMGIEMQPYIPMVLHQLVEIINRPNTPKTLLENTAITIGRLGYVCPQEVAPMLQQFIRPWCTSLRNIRDNEEKDSAFRGICTMISVNPSGVIQDFIFFCDAVASWINPKDDLRDMFCKILHGFKNQVGDENWRRFSDQFPLPLKERLAAFYGV

SEQ ID NO: 919755 - protein, 307 aa, Homo sapiens
MVWDRQTKMEYEWKPDEQGLQQILQLLKESQSPDTTIQRTVQQKLEQLNQYPDFNNYLIFVLTKLKSEDEPTRSLSGLILKNNVKAHFQNFPNGVTDFIKSECLNNIGDSSPLIRATVGILITTIASKGELQNWPDLLPKLCSLLDSEDYNTCEGAFGALQKICEDSAEILDSDVLDRPLNIMIPKFLQFFKHSSPKIRSHAVACVNQFIISRTQALMLHIDSFIENLFALAGDEEPEVRKNVCRALVMLLEVRMDRLLPHMHNIVEYMLQRTQDQDENVALEACEFWLTLAEQPICKDVLVRHLPK

SEQ ID NO: 919756 - protein, 199 aa, Homo sapiens
GNELRLGCSGGEERTFQASEMPNMSSSAGQTDHGPPQPGQVSVIVGQREDGTGLDPCPGPLTPRPQLFPHSVFHLHFAPEDFLKLSLVHTASAPGSCPVICVAKCYTQQENVTRDTNPSVTKQDTITIRPEPTLQMDPAQWKAGQEAEVQVPTLDSITKHCTRGSQAASEDLILLNTSIPVSGRTFANPSQLDAATSEG

SEQ ID NO: 919757 - protein, 157 aa, Homo sapiens
MNGPDFLQGIKERNEQHKKERKKEQRPNDWDFLEERRSPNRQKHLKLVNSCFRIRSQRLGKNASSEHAHNFRKHTVHVAPPKCWQATARADSPTQGKISGEEKGEKECNTPETCQHIKPAAMSTITVLRGMWVRISALALLHWMILGKRFHLFKPML

SEQ ID NO: 919758 - protein, 136 aa, Homo sapiens [sequence omitted]

SEQ ID NO: 919759 - protein, 136 aa, Homo sapiens [sequence omitted]

SEQ ID NO: 919760 - protein, 297 aa, Homo sapiens
MPAGWGGQPMMFVASSISDKDDSVDAQNICHVWHMNVEALPEWISCLIQKAQWTVGKLNCPFCGARLGGFNFVSTPKCSCGQLAAVHLSKSRTDYQPTQAGRLMRPSVKYLSHPRVQSGCDKEALLTGGGSENRNHRLLNMARNNNDPGRLTEALCLEVRPTYFEMKNEKLLSKASEPKYQLFVPQLVTGRCATRAFHRKSHSLDLNISEKLTLLPTLYEIHSKTTAYSRLNETQPIDLSGLPLQSSKNSYSFQNPSSFDPSMLLQRFSVAPHETQTQRGGEFQCGLEAASVYSGPY

SEQ ID NO: 919761 - protein, 282 aa, Homo sapiens
MFPAQEEADRTVFVGNLEARVREEILYELFLQKAGPLTKVTICKDREGKPKSFGFVCFKHPESVSYAIALLNGIRLYGRPINVQYRFGSSRSSEPANQSFESCVKINSHNYRNEEMLVGRSSFPMQYFPINNTSLPQEYFLFQKMQWHVYNPVLQLPYYEMTAPLPNSASVSSSLNHVPDLEAGPSSYKWTHQQPSDSDLYQMTAPLPNSASVSSSLNHVPDLEAGPSSYKWTHQQPSDSDLYQMNKRKRQKQTSDSDSSTDNNRGNECSQKFRKSKKKKRY

SEQ ID NO: 919762 - protein, 282 aa, Homo sapiens; identical to SEQ ID NO: 919761

SEQ ID NO: 919763 - protein, 247 aa, Homo sapiens
VKPEKGRGLSSYFILRPRPEDVPCSGGGRQDRVCWEFRGPSSGRDSVRAVPSGSSRSSEPANQSFESCVKINSHNYRNEEMLVGRSSFPMQYFPINNTSLPQEYFLFQKMQWHVYNPVLQLPYYEMTAPLPNSASVSSSLNHVPDLEAGPSSYKWTHQQPSDSDLYQMTAPLPNSASVSSSLNHVPDLEAGPSSYKWTHQQPSDSDLYQMNKRKRQKQTSDSDSSTDNNRGNECSQKFRKSKKKKRY

SEQ ID NO: 919764 - protein, 790 aa, Homo sapiens
MLGAGQQLFDFAAHCLSEFLDAQPVNKQGLQLGFSFSFPCHQTGLDRSTLISWTKGFRCSGVEGQDVVQLLRDAIRRQGAYNIDVVAVVNDTVGTMMGCEPGVRPCEVGLVVDTGTNACYMEEARHVAVLDEDRGRVCVSVEWGSFSDDGALGPVLTTFDHTLDHESLNPGVFEKMIGGLYLGELVRLVLAHLARCGVLFGGCTSPALLSQGSILLEHVAEMEDPSTGAARVHAILQDLGLSPGASDVELVQHVCAAVCTRAAQLCAAALAAVLSCLQHSREQQTLQVAVATGGRVCERHPRFCSVLQGTVMLLAPECDVSLIPSVDGGGRGVAMVTAVAARLAAHRRLLEETLAPFRLNHDQLAAVQAQMRKAMAKGLRGEASSLRMLPTFVRATPDGSERGDFLALDLGGTNFRVLLVRVTTGVQITSEIYSIPETVAQGSGQQLFDHIVDCIVDFQQKQGLSGQSLPLGFTFSFPCRQLGLDQGILLNWTKGFKASDCEGQDVVSLLREAITRRQAVELNVVAIVNDTVGTMMSCGYEDPRCEIGLIVGTGTNACYMEELRNVAGVPGDSGRMCINMEWGAFGDDGSLAMLSTRFDASVDQASINPGKQRFEKMISGMYLGEIVRHILLHLTSLGVLFRGQQIQRLQTRDIFKTKFLSEIESDSLALRQVRAILEDLGLPLTSDDALMVLEVCQAVSQRAAQLCGAGVAAVVEKIRENRGLEELAVSVGVDGTLYKLHPRFSSLVAATVRELAPRCVVTFLQSEDGSGKGAALVTAVACRLAQLTRV

SEQ ID NO: 919765 - protein, 197 aa, Homo sapiens
MRCVWLGGVCVTREGGVCEMSTRGMRGTCSCGGRVPESRGYPLSGCGPRSCRLGAGPLRRAPTQQAQKCLHKVQLRQELWGPGPGPVCACMAVCMRGPWRGTGGEVASHAHTHTQMGWAWPRLQALSLLGPGAEWPAATPHVFRLVQREVDLIDLPSGYGIWGDEEADSWNGRKRARAYPLPKHPTPHHTAPPGAFL

SEQ ID NO: 919766 - protein, 761 aa, Homo sapiens
MLGAGQQLFDFAAHCLSEFLDAQPVNKQGLQLGFSFSFPCHQTGLDRSTLISWTKGFRCSGVEGQDVVQLLRDAIRRQGAYNIDVVAVVNDTVGTMMGCEPGVRPCEVGLVVDTGTNACYMEEARHVAVLDEDRGRVCVSVEWGSFSDDGALGPVLTTFDHTLDHESLNPGGSHGALVGWGASGLSPKPLPFPSSPSTGAARVHAILQDLGLSPGASDVELVQHVCAAVCTRAAQLCAAALAAVLSCLQHSREQQTLQVAVATGGRVCERHPRFCSVLQGTVMLLAPECDVSLIPSVDGGGRGVAMVTAVAARLAAHRRLLEETLAPFRLNHDQLAAVQAQMRKAMAKGLRGEASSLRMLPTFVRATPDGSERGDFLALDLGGTNFRVLLVRVTTGVQITSEIYSIPETVAQGSGQQLFDHIVDCIVDFQQKQGLSGQSLPLGFTFSFPCRQLGLDQGILLNWTKGFKASDCEGQDVVSLLREAITRRQAVELNVVAIVNDTVGTMMSCGYEDPRCEIGLIVGTGTNACYMEELRNVAGVPGDSGRMCINMEWGAFGDDGSLAMLSTRFDASVDQASINPGKQRFEKMISGMYLGEIVRHILLHLTSLGVLFRGQQIQRLQTRDIFKTKFLSEIESDSLALRQVRAILEDLGLPLTSDDALMVLEVCQAVSQRAAQLCGAGVAAVVEKIRENRGLEELAVSVGVDGTLYKLHPRFSSLVAATVRELAPRCVVTFLQSEDGSGKGAALVTAVACRLAQLTRV

SEQ ID NO: 919767 - protein, 522 aa, Homo sapiens
MSNESCLPYYTAHSYSSMSAFKTSMGDLQRQLYNRGEYNIFKYAPMFESNFIQINKKGEVIDVHNRVRMVTVGIVCTSPILPLPDVMVLAQPTKICEQHVRWGRFAKGRGRRPVKTLELTRLLPLKFVKISIHDHEKQQLRLKLATGRTFYLQLCPSSDTREDLFCYWEKLVYLLRPPVESYCSTPTLLSGDAPPEDNKSLVAAELHREGDQSETGLYKPCDVSAATSSAYAGGEGIQHASHGTASAASPSTSTPGAAEGGAARTAGGMAVAGTATGPRTDVAIAGAAMSPATGAMSIATTKSAGPGQVTTALAGAAIKNPGENESSKSMAGAANISSEGISLALVGAASTSLEGTSTSMAGAASLSQDSSLSAAFAGSITTSKCAAERTEGPAVGPLISTLQSEGYMSERDGSQKVSQPSAEVWNENKERREKKDRHPSRKSSHHRKAGESHRRRAGDKNQKASSHRSASGHKNTRDDKKEKGYSNVRGKRHGSSRKSSTHSSTKKDSSTLEDRSWVSGKT

SEQ ID NO: 919768 - protein, 288 aa, Homo sapiens
MSDKLKERKRTPVSHKVIEKRRRDRINRCLNELGKTVPMALAKQEALAQIRSRVRSLVLSSATVPDQQALGRCEGPFLLLQSSGKLEKAEILEMTEGRGPAKAPLPARRQQGGEGELVPREAAELLAEFANYFHYGYHECMKNLVHYLTTVERMETKDTKYARILAFLQSKARLGAEPAFPPLGSLPEPDFSYQLHPAGPEFAGHSPGEAAVFPQGSGAGPFPWPPGAARSPALPYLPSAPVPLASPAQQHSPFLTPVQGLDRHYLNLIGHAHPNALNLHTPQHPPVL

SEQ ID NO: 919769 - protein, 30 aa, Homo sapiens
MSDKLKERKVSRLSPNGTCALVVEASDSPT

SEQ ID NO: 919770 - protein, 132 aa, Homo sapiens
MYKSMFLNDLRVKVIALIKDNVYGIEFRDKRQFVAHGNSGSHNTIVFTLTLYGPIPTGQKQMGQEHMILCRFADQTAVQLPPQRRLIGKQCMCLVDLDRARAAEECGYSVQVISMEPESCSPKNNMIVGVPI

SEQ ID NO: 919771 - protein, 140 aa, Homo sapiens
SRESSDSAHFKYGGLGEALPSGSYPRSRSERLGVAVEVSPLMPTPFKKQELASSCILGTGGKSPRLTQSSGFFGNLSMVTNLDDSNWAAAFSSQRSGLFTNTEPHSITEDVTISAVMLREDDPGEAGKMALSFVTSSFSL

SEQ ID NO: 919772 - protein, 174 aa, Homo sapiens
MFSDFLQSFLKHSSSTVFDLVEEYENICGSQVNILSKIVSRATPGLQKFSKTASMLWLLQQEMVTWRLLASLYRDRIQSALEEESVFAVTAVNASEKTVVEALFQRDSLVRQSQLVVDWLESIAKDEIGEFSDNIEFYAKSVYWENTLHTLKQRQLTSYVGSVRPLVTELVNVL

SEQ ID NO: 919773 - protein, 327 aa, Homo sapiens [sequence omitted]

SEQ ID NO: 919774 - protein, 227 aa, Homo sapiens [sequence omitted]

SEQ ID NO: 919775 - protein, 180 aa, Homo sapiens
MPSSVPKTSVESLGSPSSLSSSKPREPLCPLKHPSHQPPASTLSPNPTSSTESLGYLSSLSSSQPPEPLRPLKHPSHKPHGRSPPRRRNPGWVSWSDSMQADSETDAIICPMCKAPERSCPHTWWVPSSPRVIRGVGRCSDPNLGLSWRQEAARAWCHCTSSQYPFEHPNLPTHLPKASF

SEQ ID NO: 919776 - protein, 353 aa, Homo sapiens
MPRAQLPEDSSAVDMDILFPLDSVIGTELCPSPIPQIIHFVLFVVFSLVILIILRLYIPREPSSVPPREEDSENDQAEVGEWLRIGNKYITLKDYRILLKELENLEIYTFLSKKCLKKLSREGSSHHLPRQVRPGPVYKPAPARNHRPRGGRGKASPTSFHVSPRAPLAPLASMPSSVPKTSVESLGSPSSLSSSKPREPLCPLKHPSHQPPASTLSPNPTSSTESLGYLSSLSSSQPPEPLRPLKHPSHKPHGRSPPRRRNPGWVSWSDSMQADSETDAIICPMCKAPERSCPHTWWVPSSPRVIRGVGRCSDPNLGLSWRQEAARAWCHCTSSQYPFEHPNLPTHLPKASF

SEQ ID NO: 919777 - protein, 150 aa, Homo sapiens
AQLPEDSSAVDMDILFPLDSVIGTELCPSPIPQIIHFVLFVVFSLVILIILRLYIPREPSSVPPREEDSENVRSPQPTPSRECFYFSCSLFHFSTSARGAPVMGTLIIPLGTAGQAGVGVGIGFPTQAPRPSVEVHGRRQSKTKPQDSAA

SEQ ID NO: 919778 - protein, 322 aa, Homo sapiens
MPRAQLPEDSSAVDMDILFPLDSVIGTELCPSPIPQIIHFVLFVVFSLVILIILRLYIPREPSSVPPREEDSENDQAEVGEWLRIGNKYITLKDYRILLKELENLEIYTFLSKKCLKKLSREGSSHHLPRQVRPGPVYKPAPARNHRPRGGRGKASPTSFHVSPRAPLAPLASMPSSVPKTSVESLGSPSSLSSSKPREPLCPLKHPSHQPPASTLSPNPTSSTESLGETPHAGRWRQGSRFPQPGCANAAGRIRHQNPRHSHGHRISDIHEQWESPEDNLEMESHSVASGWSAVDHLGSPNFLRIQAILLLSSEYRIQACA

SEQ ID NO: 919779 - protein, 394 aa, Homo sapiens
LSFLVCKIVELNLDPLMLVLKSKAKNNCKRPYFRVASYSSCACAVSLEQRRGQQACFRNPPVLSSFRTQDSKLIGGLSCLTAPSRFLRRFSARHSLRCEDGVGQRGKVLCLRRRFCGVGNGFSDLNRDKLLHPTGFPISPRDPRVQVQELPSNRPWQRVSRIAEVSRVGVLRLPQSSRTVQRGFAFKTSCRHLDREGAVPCFSRGPDTATDLDAFSSPQTKNLDFRRKWDKDEYEKLAEKRLTEEREKKDGKPVQPVKRELLRHRDYKVDLESKLGKTIVITRQPLNLRWEDQRNLGMSMRVERSTLDQVKKRFEVNKKKMEEKQKDYDFEERMKELREEVTAEKETVNRGHTCGRALQGLGKATSLSLLCVPRWTTPQLSGGPFDPVLSSGPE

SEQ ID NO: 919780 - protein, 307 aa, Homo sapiens
PTFAHSSLARASHMLFLVMMGTGSAPPLALLQLPLTVGLCEALDDVELGFCISPENCGDFVWKLTQSMSLIEIGNPSQSLENVCRWAYLQQKPDTGHDEYHDHAIFLTRQDFGPSGMQGYAPVTGMCHPVRSCTLNHEDGFSSAFVVAHETGHVLGMEHDGQGNRCGDEVRLGSIMAPLVQAAFHRFHWSRCSQQELSRYLHSYDCLLDDPFAHDWPALPQLPGLHYSMNEQCRFDFGLGYMMCTAFRTFDPCKQLWCSHPDNPYFCKTKKGPPLDGTMCAPGKFRPGAVAHACYPSTLGGQGRWIA

SEQ ID NO: 919781 - protein, 193 aa, Homo sapiens
DREMRLNPKIHSGLTLYQDTGYKIPPGNDKYQKPGSKVLNINGPLVERKKNTVVLFNSTSRPVPGEIVPSSSNSGASKIERVRLPLGGLKYLWPLCENIRSDHPRFPEWYSFSLMASSTRSRPQARVVAMESREVVPRAAVMRGDGPVSSLKAEHTTTAGKLQQLQRTMWKGRCLNGLEFYIKNSGGLEEAPR

SEQ ID NO: 919782 - protein, 247 aa, Homo sapiens
MTCSSLSSTIVVSPPQPHETVSPLNLSLYKLPIIRDLECSEDRQMWESLELPRDLLNGFVQNADSDVNNKVQNDVISDGDEELVGNWSKSDSSYGENNGFLGQVQGPPKDLVSCVPATPAVAKRGQSTAWLWLQGMQAPSFVSSYIVLSLQAHKSQELRFGNLHLDFRGCMEIPGCPGRSLLQGVQVVLWIIAKEIYYTESESGMFLTERQHGTERGYEENCPGLPRDLDIQIQEAQRTPEKFIAKR

SEQ ID NO: 919783 - protein, 247 aa, Homo sapiens; identical to SEQ ID NO: 919782

SEQ ID NO: 919784 - protein, 168 aa, Homo sapiens [sequence omitted]

SEQ ID NO: 919785 - protein, 129 aa, Homo sapiens
APGPSGRTRRRPDAPAPDPERIQRLRRLMVAKEEGDGAAGAGRRGPGRSRKAPRNVLTRMPCESAGRAGSGAAAVRKLAAEGASAGRRWPGAGLHVLRERLGENLRGSSVTMGWICLSNVGNEGVGRVT

SEQ ID NO: 919786 - protein, 305 aa, Homo sapiens
VAEYESFLRTGVRGGGRGRGRARGAAAGSGVPAAPGPSGRTRRRPDAPAPDPERIQRLRRLMVAKEEGDGAAGAGRRGPGRSRKAPRNVLTRMPLHEGSPLGELHRCIREGVKVNVHIRTFKGLRGVCTGFLVAFDKFWNMALTDVDETYRKPVLGKAYERDSSLTLTRLFDRLKLQDSSKKEADSKSAVEDSTLSRYSQTSTWKLASVWGRADTGRGSHKRSRSVPSSLQASAREESRSELSGRTTRTDGSSVGGTFSRATTLSRGQSRKKKRKPKVDYQQVFTRHINQIFIRGENVLLVHLAQ

SEQ ID NO: 919787 - protein, 136 aa, Homo sapiens
MPEPPTHSMGSCVARASPTSTTPCSTAPSPIDHPRAEECERTAQDWQAAPPAAPLRDCKYTNQHPVFSSFVNAPIDTLYLAALAIVHGWLPASQINTDTQRRGPMPGSGNSPQRRWGWPLHMDPWLGPKYHLIPGL

SEQ ID NO: 919788 - protein, 136 aa, Homo sapiens; identical to SEQ ID NO: 919787

SEQ ID NO: 919789 - protein, 94 aa, Homo sapiens
VTGLTGPWVLGRMRMLRSQGRALGGGDQPPVLQFPVSLGTVAAVSVSGGCRREAGLGQREVALWEWKACISLPGPHAPRARRVELKMLGICFTF

SEQ ID NO: 919790 - protein, 99 aa, Homo sapiens
VTGLTGPWVLGRMRMLRSQGRALGGGDQPPVLQFPVSLGTVAAVSVSGGCRREAGLGQREVALWEWKACISLPGPHAPRARRVELKFRDDGLSKDPSSC

SEQ ID NO: 919791 - protein, 192 aa, Homo sapiens
VVPMETFTTGDSKLNTGDGKGLVKSPDVDLKSSGISSKGSARSHLTGYDQYWGLYSSKGSLSNFWTTLMVSEAFCRLSSNNSLLVVLGQQCVATEIKSNSSSYVVVVCAQAGLEFLSSSSPPSLASQSAGITGVSHHAQYLRYLRQHWGFSCTLLQLISLHTQRCQASFHCDTNQVPKGGVPPSTVEPIGST

SEQ ID NO: 919792 - protein, 136 aa, Homo sapiens
MSVYMHITRYNANTLKILNTQALAPPPTFHHIEGLTCLVPAKWKHSHATIGECDSASWSYWGCVLTYGPHENCNPSKCGGCEAFKKLGQEQGLKEEHQFMGATEAFRDFVTYQTGTASKWMTSVKNTTCEVMESIC

SEQ ID NO: 919793 - protein, 116 aa, Homo sapiens
TILSWSKQSQDQTASRKLHTMTPCLESFCQRAKDCKQNIPLPFLIQDWPLSESKPQGQDFWTPQPLQAAAPSHEFQQVALHPARTRLASRPQGGRLMSSREVGLRAPRCSCGKRKR

SEQ ID NO: 919794 - protein, 391 aa, Homo sapiens
VPFARYLAMNKVKKMKRYHVGKVWRRESPTIVQGRYREFCQCDFDIAGQFDPMIPDAECLKIMCEILSGLQLGDFLIKVNDRRIVDGMFAVCGVPESKFRAICSSIDKLDKFEKERSWGWANVWVFMQMAWKDVRHEMVVKKGLAPEVADRIGDYVQCHGGVSLVEQMFQDPRLSQNKQAGLEGLGDLKLLFEYLTLFGIADKISFDLSLARGLDYYTGVIYEAVLLQTPTQAGEEPLNVGSVAAGGRYDGLVGMFDPKGHKVPCVGLSIGVERIFYIVEQRMKTKGEKVRTTETQVFVATPQKNFLQERLKLIAELWDSGIKAEMLYKNNPKLLTQLHYCESTGIPLVVIIGEQELKEGVIKIRSVASREEVAIKRENFVAEIQKRLSES

SEQ ID NO: 919795 - protein, 106 aa, Homo sapiens
MHVVTERLPEGHFHDQRDLFNTLWVPAPISGSRVHLSTTKSQGGWVSAHQSQTAGWHKTTLPTKPQEEEKLRLSFSTQKTLYWTRTLGRHPRLTFRRKENMTNGYS

SEQ ID NO: 919796 - protein, 190 aa, Homo sapiens
HHTLGPVVGLLTSRHIGCGVCCYSPSFAMPPKDDEKKDAGKSAKKDKDPVNKSGGKAKKKKWSKGKVRDKLNNLVLFDKATYDKLCKEVPNYKLITPAVVSERLKIRGSLARAALQELLSKGLIKLVSKHRAQVIYTRNTKGGDAPAAEHWAKNQGTQEVERRCVRREQPAASSGEEGKLYQPGRQSSSL

SEQ ID NO: 919797 - protein, 138 aa, Homo sapiens
HHTLGPVVGLLTSRHIGCGVCCYSPSFAMPPKDDEKKDAGKSAKKDKDPVNKSGGKAKKKKWSKGKVRDKLNNLVLFDKATYDKLCKEVPNYKLITPAVVSERLKIRGSLARAALQELLSKGLIKLVSKHRAHSEHTG

SEQ ID NO: 919798 - protein, 152 aa, Homo sapiens
HHTLGPVVGLLTSRHIGCGVCCYSPSFAMPPKDDEKKDAGKSAKKDKDPVNKSGGKAKKKKWSKGKVRDKLNNLVLFDKATYDKLCKEVPNYKLITPAVVSERLKIRGSLARAALQELLSKGLIKLVSKHRAQVIYTRNTKGGDAPAAGEDA

SEQ ID NO: 919799 - protein, 136 aa, Homo sapiens
MRLGNKGVSTLQMFRRRISTCLEVFLVSASCLQYRGPQIHDTSPGAPQESLAEDLTIPSKTKHCCPGSATVTSLQLSSGHNLQIFLAIQTFTIIRINACRTKEPDTWVQTCPTIYSESLTCQSRALNHKNTKAKQA

SEQ ID NO: 919800 - protein, 136 aa, Homo sapiens; identical to SEQ ID NO: 919799

SEQ ID NO: 919801 - protein, 488 aa, Homo sapiens
MGTRDYSPRQMAVREKVFDVIIRCFKRHGAEVIDTPVFELKETLMGKYGEDSKLIYDLKDQGGELLSLRYDLTVPFARYLAMNKLTNIKRYHIAKVYRRDNPAMTRGRYREFYQCDFDIAGNFDPMIPDAECLKIMCEILSSLQIGDFLVKVNDRRILDGMFAICGVSDSKFRTICSSVDKLDKVSWEEVKNEMVGEKGLAPEVADRIGDYVQQHGEEQNQASPAAVPLPSVLKLKLFCVMYVGDLTHKSVSPGGVSLVEQLLQDPKLSQNKQALEGLGDLKLLFEYLTLFGIDDKISFDLSLARGLDYYTGVIYEAVLLQTPAQAGEEPLGVGSVAAGGRYDGLVGMFDPKGRKVPCVGLSIGVERIFSIVEQRLEALEEKIRTTETQVLVASAQKKLLEERLKLVSELWDAGIKAELLYKKNPKLLNQLQYCEEAGIPLVAIIGEQELKDGVIKLRSVTSREEVDVRREDLVEEIKRRTGQPLCIC

SEQ ID NO: 919802 - protein, 260 aa, Homo sapiens
MKESAFNCVRWYEGKNPKPWVIYCQKTENHQYQEGSSPERSPLTHLQNKRFSLVRRKQFPRIGNLWSPMAASPAPSASLSPFWRNCSPGKPAPSWDPNPAHSPTPQWQGQQPWTSGPLFSYKASAPCLISLRRLAIVANSQSTGILFWFLLTNQEAHSPSPCLTLSKPRNVDRGYAATGLTKAALASPWRAGPGAAGTEWTPTWELLHGKTHAKVDLLDCSVIPLELDGLVAHGLENYLHTNSNRKKDTRLTVIRALSIQ

SEQ ID NO: 919803 - protein, 187 aa, Homo sapiens
SHHRERSRLSLVAAMTTASTSQAAINRQINLELYASCVYLSMSYYFDRDDVALKNFAKYFLHQSHEEREHAEKLMKLQNQGGGRIFLQDIKKPDCDDWESGLNAMECALHLEKNVNQSLLELHKLATDKNDPHLCDFIETHYLNEQVKAIKELGDHVTNLRKMGAPESGLAEYLFDKHTLGDSDNES

SEQ ID NO: 919804 - protein, 149 aa, Homo sapiens [sequence omitted]

SEQ ID NO: 919805 - protein, 103 aa, Homo sapiens
MEDYHFSLHHTGRSVWKWMWTRCCCLRLAGSNSFPIWRDPDITYIALICCLKALLGQEMVLQQQKTMNWALGDRISGCILAIHTLKEDRDREFEYPTNIPTKG

SEQ ID NO: 919806 - protein, 82 aa, Homo sapiens
GRGKRSCPPCSQVPLLTWVMAFSPRLSALWLAALQLAAARISVEMDVDAVLLPEISRKQFFSHLERPRLCWARRWFCSSRRL

SEQ ID NO: 919807 - protein, 439 aa, Homo sapiens
MRPWALAVTRWPPSAPVGQRRFSAGPGSTPGQLWGSPIGASSLWCSPGLEGPLASPPARDERLPSQQPPSRPPHLPVEERRASAPAGGSPRMLHPATQQSPFMVDLHEQVHQGPVPLSYTVTTVTTQGFPLPTGQHIPGCSAQQLPACSVMFSGQHYPLCCLPPPLIQACTMQQLPVPYQAYPHLISSDHYILHPPPPAPPPQPTHMAPLGQFVSLQTQHPRMRLDNDVDLRGDQPSLGSFTYSTSAPGPALSPSVPLHYLPHDPLHQELSFGVPYSHMMPRRLSTQRYRLQQPLPPPPPPPPPPPYYPSFLPYFLSMLPMSPTAMGPTISLDLDVDDVEMENYEALLNLAERLGDAKPRGLTKADIEQLPSYRFNPDSHQSEQTLCVVCFSDFEARQLLRVLPCNHEFHTKCVDKWLKANRTCPICRADASEVPREAE

SEQ ID NO: 919808 - protein, 161 aa, Homo sapiens
  misc_feature (31)..(31): Xaa can be any naturally occurring amino acid
RGSCRTSTSDALQGSKRVYCVGQPPWAVQLXQFRAYFLSMLPMSPTAMGPTISLDLDVDDVEMENYEALLNLAERLGDAKPRGLTKADIEQLPSYRFNPDSHQSEQTLCVVCFSDFEARQLLRVLPCNHEFHTKCVDKWLKANRTCPICRADASEVPREAE

SEQ ID NO: 919809 - protein, 439 aa, Homo sapiens; identical to SEQ ID NO: 919807

SEQ ID NO: 919810 - protein, 439 aa, Homo sapiens; identical to SEQ ID NO: 919807

SEQ ID NO: 919811 - protein, 439 aa, Homo sapiens; identical to SEQ ID NO: 919807

SEQ ID NO: 919812 - protein, 387 aa, Homo sapiens
MRPWALAVTRWPPSAPVGQRRFSAGPGSTPGQLWGSPIGASSLWCSPGLEGPLASPPARDERLPSQQPPSRPPHLPVEERRASAPAGGSPRMLHPATQQSPFMVDLHEQVHQGPVPLSYTVTTVTTQGFPLPTGQHIPGCSAQQLPACSVMFSGQHYPLCCLPPPLIQACTMQQLPVPYQAYPHLISSDHYILHPPPPAPPPQPTHMAPLGQFVSLQTQHPRMRLDNDVDLRGDQPSLGSFTYSTSAPGPALSPSVPLHYLPHDPLHQELSFGVPYSHMMPRRLSTQRYRLQQPLPPPPPPPPPPPYYPSFLPYFLSMLPMSPTAMGPTISLDLDVDDVEMENYEALLNLAERLGDAKPRGLTKADIEQLPSYRFNPGRRLRGAQGG

SEQ ID NO: 919813 - protein, 142 aa, Homo sapiens
MLLTSSGQRPELLLNVSQEVKDFCNEHYKTLMKEIEKDTKNEKIFHVHGLEELILLKHPYYPKQSTDQCNPYEYTNDILHRNMKKNSKVYIESQSPRIAKAILSKRNKTRGITLPDFKLYYRAIVTKKAWYCHKNKQTNGTE

SEQ ID NO: 919814 - protein, 142 aa, Homo sapiens; identical to SEQ ID NO: 919813

SEQ ID NO: 919815 - protein, 142 aa, Homo sapiens; identical to SEQ ID NO: 919813

SEQ ID NO: 919816 - protein, 142 aa, Homo sapiens; identical to SEQ ID NO: 919813

SEQ ID NO: 919817 - protein, 142 aa, Homo sapiens; identical to SEQ ID NO: 919813

SEQ ID NO: 919818 - protein, 239 aa, Homo sapiens
KESQGREMGWGPFIGFGAASSGIGAAWEPRVGEIKLKEDLWASKSIRAAAAAARRHDDQPKTVRSSCLDKKATGCDPGPCVRILTAQPCTSAVCNENDWHELGRARVGAVSKAVFKEWKENWGKDLGSMGSARFPFVNLYNDFVRMAKPGQEKWGNCKESLQALKGHGVAGSVSLQPLSQEDLGRSQRALGQSSRGPGSGYQQLTRRLSQEMRLSQEDPCQVSERFHFYSNYIVRALAL

SEQ ID NO: 919819 - protein, 156 aa, Homo sapiens
SHSADSLMAPKSVKRKGLPLQGHLLISSPFPKQDETVCRARKKDCCMDNIYRQKKKSDVHKIEVGTETAELVIAQSPANYLRPKTTVSADGRVRIMMRTTMETQTFSCRASPAPSCRPLAFSVAATQQLTRLGSPLETEQRRTIPQRVRLDPKAGP

SEQ ID NO: 919820 - protein, 173 aa, Homo sapiens
MQGQHCCEDPGRQMQSTSPGERPLEEPALQTPYPGVAASRTVREERSYVRPHLRRFVLAAQAQECSHQMSTSTFMYPGPGCLQPPRQREETAGVTLSHSHTGARTPPLIKNGLDCIPGPACKVNDELAIKHPRGCEPCTAPRWPAFLLVGLGSGPGRLVFDTQTRMFPGALRG

SEQ ID NO: 919821 - protein, 394 aa, Homo sapiens
MEKDKHSHFYNQKSDFRIEHSMLEELENKLIHSRKTERAKIQQQLAKIHNNVKKLQHQLKDVKPTPDFVEKLREMMEEIENAINTFKEEQRLIYEELIKEEKTTNNELSAISRKIDTWALGNSETEKAFRAISSKVPVDKVTPSTLPEEVLDFEKFLQQTGGRQGAWDDYDHQNFVKVRNKHKGKPTFMEEVLEHLPGKTQDEVQQHEKWYQKFLALEERKKESIQIWKTKKQQKREEIFKLKEKADNTPVLFHNKQEDNQKQKEEQRKKQKLAVEAWKKQKSIEMSMKCASQLKEEEEKEKKHQKERQRQFKLKLLLESYTQQKKEQEEFLRLEKEIREKAEKAEKRKNAADEISRFQERDLHKLELKILDRQAKEDEKSQKQRRLAKLKEKG

SEQ ID NO: 919822 - protein, 362 aa, Homo sapiens
MEKDKHSHFYNQKSDFRIEHSMLEELENKLIHSRKTERAKIQQQLAKIHNNVKKLQHQLKDVKPTPDFVEKLREMMEEIENAINTFKEEQRLIYEELIKEEKTTNNELSAISRKIDTWALGNSETEKAFRAISSKVPVDKVTPSTLPEEVLDFEKFLQQTGGRQGAWDDYDHQNFVKVRNKHKGKPTFMEEVLEHLPGKTQDEVQQHEKWYQKFLALEERKKESIQIWKTKKQQKREEIFKLKEKADNTPVLFHNKQEDNQKQKEEQRKKQKLAVEAWKKQKSIEMSMKCASQLKEEEEKEKKHQKERQRQFKLKLLLESYTQQKKEQEEFLRLEKEIREKAEKAEKRKNAADEISRFQERG

SEQ ID NO: 919823 - protein, 408 aa, Homo sapiens
MEKDKHSHFYNQKSDFRIEHSMLEELENKLIHSRKTERAKIQQQLAKIHNNVKKLQHQLKDVKPTPDFVEKLREMMEEIENAINTFKEEQRLIYEELIKEEKTTNNELSAISRKIDTWALGNSETEKAFRAISSKVPVDKVTPSTLPEEVLDFEKFLQQTGGRQGAWDDYDHQNFVKVRNKHKGKPTFMEEVLEHLPGKTQDEVQQHEKWYQKFLALEERKKESIQIWKTKKQQKREEIFKLKEKADNTPVLFHNKQEDNQKQKEEQRKKQKLAVEAWKKQKSIEMSMKCASQLKEEEEKEKKHQKERQRQFKLKLLLESYTQQKKEQEEFLRLEKEIREKAEKAEKRKNAADEISRFQERDLHKLELKILDRQAKEDEKSQKQRRLAKLKEKGYSNLETRNTEKSMR

SEQ ID NO: 919824 - protein, 504 aa, Homo sapiens
VCRGQGAPATNPQAPVAAAARVARRVNMAALTTVVVAAAATAVAGAVAGAGAATGTGVGATPAPQQSDGCFSTSGGIRPFHLQNWKQKVNQTKKAEFVRTAEKFKNQVINMEKDKHSHFYNQKSDFRIEHSMLEELENKLIHSRKTERAKIQQQLAKIHNNVKKLQHQLKDVKPTPDFVEKLREMMEEIENAINTFKEEQRLIYEELIKEEKTTNNELSAISRKIDTWALGNSETEKAFRAISSKVPVDKVTPSTLPEEVLDFEKFLQQTGGRQGAWDDYDHQNFVKVRNKHKGKPTFMEEVLEHLPGKTQDEVQQHEKWYQKFLALEERKKESIQIWKTKKQQKREEIFKLKEKADNTPVLFHNKQEDNQKQKEEQRKKQKLAVEAWKKQKSIEMSMKCASQLKEEEEKEKKHQKERQRQFKLKLLLESYTQQKKEQEEFLRLEKEIREKAEKAEKRKNAADEISRFQERDLHKLELKILDRQAKEDEKSQKQRRLAKLKEKG

SEQ ID NO: 919825 - protein, 244 aa, Homo sapiens
MEKDKHSHFYNQKSDFRIEHSMLEELENKLIHSRKTERAKIQQQLAKIHNNVKKLQHQLKDVKPTPDFVEKLREMMEEIENAINTFKEEQRLIYEELIKEEKTTNNELSAISRKIDTWALGNSETEKAFRAISSKVPVDKVTPSTLPEEVLDFEKFLQQTGGRQGAWDDYDHQNFVKVRNKHKGKPTFMEEVLEHLPGKTQDEVQQHEKWYQKFLALEERKKESLQSGKELLKMKSIRHNQSSR

SEQ ID NO: 919826 - protein, 135 aa, Homo sapiens
MGVSSEKSWLLHRRQCSLERNPAPMPGKQSHCFRVTKTPPFSGPAGRRKATCVSSVRQQGSRSRKRASKKTPTLAGRHVPVKIEKEAIQFSLIEKKDVYIIEKKKKPNVDSAQLTRSTCQGTDTAGINCRLHFWS

SEQ ID NO: 919827 - protein, 167 aa, Homo sapiens
SLREPWVGTVSQSAMTAEQGSTAFRPEALRLGKAAKPEKTQGSCLRGSKEGLDFPIRKGKEPGSGHEATLLTFTIPASYWVRVRQIDLQLGWAMVGLQLICDFVQEDEQNKDMLQAVFSGRLLSQEGFSPVRSMDSGVIGLECKSQLYRLPAVQLGQVTLYYSVSTS

SEQ ID NO: 919828 - protein, 156 aa, Homo sapiens
LGKIHALKNIGLSSWVMVGAPPLASLPPCSLISDCCASNERGSVGIGPSKSCAGYNLLEREFPDPLHFLGEAMLHPASAHAWCTAPTVLHPVSLNPQCDEPSTSVGNAEITCLLCRSRWELQTGAVPIRPSYISEFLNSYFRENRPSSLAANMETG

SEQ ID NO: 919829 - protein, 254 aa, Homo sapiens
ASTSDSQAVMNIMNTEQSQNSIVSRIKVFEGQTNIETSGLPKKPEITPRSLPPKPTVSSGKPSVAPKPAANRASGEWDSGTENRLKVTSKEGLTPYPPLQEAGSIPVTKPELPKKPNPGLIRSVNPEIPGRGPLAESSDSGKKVPTPAPRPLLLKKSVSSENPTYPSAPLKPVTVPPRLAGASQAKAYKSLGEGPPANPPVPVLQSKPLVDIDLISFDDDVLPTPSGNLAEESVGSEMVLEARAVCDRIMAASS

SEQ ID NO: 919830 - protein, 148 aa, Homo sapiens
MPASLGELRGAGAIGLLKILPEIIHPKLVDLWKTRLPELLQPLEGKNISTVLWETMLLQLLKESLWKISDVAWTIQLTQDFKQQMGSYSNNSTEKSLFSGKKSLTKTDVMVIYGAVALHAPKKQLLSRLNQDIISQVLSLHGQCSQPF

SEQ ID NO: 919831 - protein, 461 aa, Homo sapiens
MTLPNPPLEFHQQKELRTDTDTMCFQPTAQPDHPTVKLSGNKYHLQASHWAFQASRGVTPGAPPRALAQSWGPRLRERDGSERVPPLPLLVSVGVVSAAASSAASSPASRSPSAVPSVPGRAEPGCTVPAVGPHHGDQTGGDSRQRPGRSLQVLLVQGYLAKSGWGFPKGKVNKEEAPHDCAAREVFEETGFDIKDYICKDDYIELRINDQLARLYIIPGIPKDTKFNPKTRREIRNIEWFSIEKLPCHRNDMTPKSKLGLAPNKFFMAIPFIRPLRDWLSRRFGDSSDSDNGFSSTGSTPAKPTVEKLSRTKFRHSQQLFPDGSPGDQWVKHRQPLQQKPYNNHSEMSDLLKGKNQSMRGNGRKQYQDSPNQKKRTNGLQPAKQQNSLMKCEKKLHPRKLQDNFETDAVYDLPSSSEDQLLEHAEGQPVACNGHCKFPFSSRAFLSFKFDHNAIMKILDL

SEQ ID NO: 919832 - protein, 313 aa, Homo sapiens
MTLPNPPLEFHQQKELRTDTDTMCFQPTAQPDHPTVKLSGNKYHLQASHWAFQASRGVTPGAPPRALAQSWGPRLRERDGSERVPPLPLLVSVGVVSAAASSAASSPASRSPSAVPSVPGRAEPGCTVPAVGPHHGDQTGGDSRQRPGRSLQVLLVQGYLAKSGWGFPKGKVNKEEAPHDCAAREVFEETGFDIKDYICKDDYIELRINDQLARLYIIPGIPKDTKFNPKTRREIRNIEWFSIEKLPCHRNDMTPKSKLGLAPNKFFMAIPFIRPLRDWLSRRFGDSSDSDNGFSSTGSTPAKPTVEKLRIKV

SEQ ID NO: 919833 - protein, 404 aa, Homo sapiens
MTLPNPPLEFHQQKELRTDTDTMCFQPTAQPDHPTVKLSGNKYHLQASHWAFQASRGVTPGAPPRALAQSWGPRLRERDGSERVPPLPLLVSVGVVSAAASSAASSPASRSPSAVPSVPGRAEPGCTVPAVGPHHGDQTGGDSRQRPGRSLQVLLVQGYLAKSGWGFPKGKVNKEEAPHDCAAREVFEETGFDIKDYICKDDYIELRINDQLARLYIIPGIPKDTKFNPKTRREIRNIEWFSIEKLPCHRNDMTPKSKLGLAPNKFFMAIPFIRPLRDWLSRRFGDSSDSDNGFSSTGSTPAKPTVEKLSRTKFRHSQQLFPDGSPGDQWVKHRQPLQQKPYNNHSEMSDLLKGKNQSMRGNGRKQYQDSPNQKKRTNGLQPAKQQNSLMVRVIAVTLSRQFIL

SEQ ID NO: 919834 - protein, 461 aa, Homo sapiens; identical to SEQ ID NO: 919831

SEQ ID NO: 919835 - protein, 154 aa, Homo sapiens
MTLPNPPLEFHQQKELRTDTDTMCFQPTAQPDHPTVKLSGNKYHLQASHWAFQASRGVTPGAPPRALAQSWGPRLRERDGSERVPPLPLLVSVGVVSAAASSAASSPASRSPSAVPSVPGRAEPGCTVPAVGPHHGDQTGGDSRQRPGRSLQDM

SEQ ID NO: 919836 - protein, 160 aa, Homo sapiens
GWSPRQGPHPSLPSTPLPPFHVNMKADIGSWEPTSSCPQTHGGVVGSWASSNSTEYFPGYLTKLLQNHTTYACDGDYLNLQCPRHSTISVQSAFYGQDYQMCSSQKPASQREDSLTCVAATTFQDGSLNTTSSRGLENAGTHVAEEWKGQEKERGPTCLL

SEQ ID NO: 919837 - protein, 160 aa, Homo sapiens; identical to SEQ ID NO: 919836

SEQ ID NO: 919838 - protein, 364 aa, Homo sapiens
VVVVMMKVVVVTVVVVLVMVEVVVVIDGGSGGDGGADDDGEGGGDEGGGRVVIMVVVVIKIVLVDVVVMVEVVVVIKVVEVVVTVDVVVVIKVVVVVVVEVVVVIKLVLVVVVLVMVVVTVEVVVVMMLVVVLVEVVVTVEVVVVMKVVVVVVVEVVVVMKLVLVVVVLVMVVVTVEVVVVMVVVVVVMKVLVVMMEVVVIMVMVVVMVVMVEVVGCGIGGGSGGNKGGGGGDGGGGGGDDAGGGVGGGSGDGGGSGGSEGGGGDGGGDGGDDGGGVGGGSGDGGGSGGNEGDGGGGGDNDGGDSGSDEVGDGGDDGDSGGGSSEGPYGRENFGFRVVMGGFIKKTSGNREGISGISEIVIIIS

SEQ ID NO: 919839 - protein, 181 aa, Homo sapiens
GAHPPIVAMAAAVSSVVRRVEELGDLAQAHIQQLSEAAGEDDHFLIRASAALEKLKLLCGEEKECSNPSNLLELYTQAILDMTYFEENKLVDEDFPEDSSSQKVKELISFLSEPEILVKENNMHPKHCNLLGDELLECLSWRRGALLYMYCHSLTKRREWLLRKSSLLKKVRRHSLHIFHC

SEQ ID NO: 919840 - protein, 225 aa, Homo sapiens
GAHPPIVAMAAAVSSVVRRVEELGDLAQAHIQQLSEAAGEDDHFLIRASAALEKLKLLCGEEKECSNPSNLLELYTQAILDMTYFEENKLVDEDFPEDSSSQKVKELISFLSEPEILVKENNMHPKHCNLLGDELLECLSWRRGALLYMYCHSLTKRREWLLRKSSLLKKYLLDGISYLLQMLNYRCPIQLNEGVSFQDLDTAKLLSAGIFSDIHLLAMMYSGEM

SEQ ID NO: 919841 - protein, 141 aa, Homo sapiens
LELHEAGMGSHSKFSIATAAAAGEGYNNQWILKPSGERLMENLKVEGSSCHHLNPLINAAISKSDSRHCMPPAIMQCEPYPKGRYAKDKSGFFNDLMTKKWRGVKEQSTFFRCSVGPLWISGLFSQSFWSKIHDESLCMLL

SEQ ID NO: 919842 - protein, 141 aa, Homo sapiens; identical to SEQ ID NO: 919841

SEQ ID NO: 919843 - protein, 158 aa, Homo sapiens
FFTPQRGAGRGEMVQDSNSSLETLSLYLFHLSSIKGWWWPPTVLGNPGGQQRAAVQQEILWNPCTEESAREQEFQSDPLKAISGRARRGTLVSHLEGLERPFAPEFSKVGSTLCPRGRCTGGTDSAAGGQLQFPMSSSRTQPIRALDSLASPYPPSCP

SEQ ID NO: 919844 - protein, 255 aa, Homo sapiens
NVLILMDQSAWDSNATLRQMAIRGLGNTASGAPHKVKKHKQLMLESIIRGLYHLARTEVVCESLKALKKILELLTDRDVSFYFKEIVLQTRTFFEDACRDVLMVCIPFLGLQELYGVLDRLLDQDLPRARDFYRQFCVKLAKKNQEILWILHTHSFTFFTSTWEVIRSAAVKLTESPWWLPLAKSKSHKFTSGITCDLDRDSHMALPRLALCLEKRFSLLLPCEEGRFCFPSRGNCKFPEAFSAMQNSLLSPAAM

SEQ ID NO: 919845 - protein, 280 aa, Homo sapiens
MAVGKNKRLTKGGKKGAKKKVVDPFSKKDWYDVKAPAMFNIRNIGKTLVTRTQGTKIASDGLKGRVFEVSLADLQNDEVAFRKFKLITEDVQGKNCLTNFHGMDLTRDKMCSMVKKWQTMIEAHVDVKTTDGYLLRLFCVGFTKKRNNQIRKTSYAQHQQVRQIRKKMMEIMTREVQTNDLKEVVNKLIPDSIGKDIEKACQSIYPLHDVFVRKVKMLKKPKFEWSFKGKGIQLSFLEWLCMDITGNAAHQPSLAGEGQEEQARQGCQQVVHTIQTIPLG

SEQ ID NO: 919846 - protein, 151 aa, Homo sapiens
MVRAHLKKGGEEIFFPDADSPYCCVILLLARENNKEETKDGRSATDLQSPGPDCNKGIKTSGGGKGYKYVEDLAIKELTDTHGSTCGEETSKLLLEPFGGLAACYREAEGGPPWKRTCFTQVFSATVRKPPPPHQPQVLSQPKSKSHWYYH

SEQ ID NO: 919847 - protein, 538 aa, Homo sapiens
MGAVKLESTVEIISCMVLNASCFVFSTTEMDSHGRVLSNRVTLCRFKFCEILTIVRNGLSWGNIGVTGGSMITSLEGLGTDNVFSLHEDNHYRISKSLVKSAEGSTVPLTRVKCLVSMTTPHDIRLHGSSVTPAFVEFDTSLEGLAPHNAPTNNTVTTGLIDGAVVSGIGSGERFFPPPSGLSYSSWFCIEHFSSPPNNHPVRLLTVVRRANSSEQHYVCLAIVLSAKDRSLIVSTKEELLQNYVDDFSEESSFYEILPCCARFRCGELIIEGQWHHLVLVMSKGMLKNSTAALYIDGQLVNTVKLHYVHSTPGGSGSANPPVVSTVYAYIGTPPAQRQIASLVWRLGPTHFLEEVLPSSNVTTIYELGPNYVGSFQAVCMPCKDAKSEGVVPSPVSLVPEEKVSFGLYALSVSSLTVARIRKVYNKLDSKAIAKQLGISSHENATPVKLIHNSAGHLNGSARTIGAALIGYLGVRTFVPKPVATTLQYVGGAAAILGLVAMASDVEGLYAAVKALVCVVKSNPLASKEMERIKGYQN

SEQ ID NO: 919848 - protein, 267 aa, Homo sapiens
GSPLRFGIHILHLTFSLVGTVDSGHETSIIPNSTAFQDLLCDFEVWLHAPYELHLSLFEHFIELLTESSEASKNAKLMREFQLIPKLLLTLRDMSLSQPTIAAISNVLSFLLQGFPSSNDLLSKLSKNYVVNFLLAYLLGRFNVFIFILGTEEEFGGLVSANLILLRNRLLDILLKLIYTSKEKTSINLQACEELVKTLGFDWIMMFMEEHLHSTTVTAAMRILVVLLSNQSILIKFKEGLSGGGWLEQTDSVLTNKIGTVLGMGLF

SEQ ID NO: 919849 - protein, 153 aa, Homo sapiens
MAQNKYYDLLNQRGRVPTSRVSNLVGLEWSHNMCISDKFQSDADTMGWEPYFGEPLLKGHLVFIFHWLAQGTCCVSLIKCHCGECPLLNTAVSLHTVERSQTQALHAPRDSWRTYAMCLSSFQESTSEEPFNEFPREILKESTVDILTVNRLQ

SEQ ID NO: 919850 - protein, 416 aa, Homo sapiens
CHGEEHPAEFPVTRNIPQEEMEAERLRLLEEEAKLKKVARMGFNASSMLRKSQLGFLNVTSYSRLANELRVSCMERKKVQIRSLDPSSLASDRFNFILASTNSDQLFVVNQVEVEGSKYGIISLRTLKIPSFHVYVLRNLYVPNRKVKSLCWASLNQLDSHVLLCFEGITDAPSCAVLLPASRFLSVHTRVNQPGMLCSFQIPEAWSCAWSLNTRAYHCFSAGLSQQVLLTSVATGHQQSFDTSSDVLAQQFASTAPLLFNGCRSGEIFAIDLRCRNRGKGWRATRLFHDSAVTSVQILQEEQCLMASDMTGKIKLWDLRATKCVRQYEGHVNESAYLPLHVHEEEGIVVAVGQDCYTRIWSLHDAHLLRTIPSPYSASEDDIPSVAFASRLGGIRGAAPGLLMAVRQDLYCFPFS

SEQ ID NO: 919851 - protein, 1225 aa, Homo sapiens
IDSGEGCVVKPIPVKGDGSEMNHLAAESPGEVQASAASPASKGRRSPSPGNSPSGRTVKSESPGVRRKRVSPVPFQSGRITPPRRAPSPDGFSPYSPEETNRRVNKVMRARLYLLQQIGPNSFLIGGDSPDNKYRVFIGPQNCSCARGTFCIHLLFVMLRVFQLEPSDPMLWRKTLKNFEVESLFQKYHSRRSSRIKAPSRNTIQKFVSRMSNSHTLSSSSTSTSSSENRAAQQQTVQQQPLAGSRRNQESNFNLTHYGTQQIPPAYKDLAEPWIQVFGMELVGCLFSRNWNVREMALRRLSHDVSGALLLANGESTGNSGGSSGSSPSGGATSGSSQTSISGDVVEACCSVLSMVCADPVYKVYVAALKTLRAMLVYTPCHSLAERIKLQRLLQPVVDTILVKCADANSRTSQLSISTLLELCKGQAGELAVGREILKAGSIGIGGVDYVLNCILGNQTESNNWQELLGRLCLIDRLLLEFPAEFYPHIVSTDVSQAEPVEIRYKKLLSLLTFALQSINNSHSMVGKLSRRIYLSSARMVTTVPHVFSKLLEMLSVSSSTHFTRMRRRLMAIADEVEIAEAIQLGVEDTLDGQQDSFLQASVPNNYLETTENSSPECTIHLEKTGKGLCATKLSASSEDISERLASISVGPSSSTTTTTTTEQPKPMVQTKGRPHSQCLNSSPLSHHSQLMFPALSTPSSSTPSVPAGTATDVSKHRLQGFIPCRIPSASPQTQRKFSLQFHRNCPENKDSDKLSPVFTQSRPLPSSNIHRPKPSRPTPGNTSKQGDPSKNSMTLDLNSSSKCDDSFGCSSNSSNAVIPSDETVFTPVEEKCRLDVNTELNSSIEDLLEASMPSSDTTVTFKSEVAVLSPEKAENDDTYKDDVNHNQKCKEKMEAEEEEALAIAMAMSASQDALPIVPQLQVENGEDIIIIQQDTPETLPGHTKAKQPYREDTEWLKGQQIGLGAFSSCYQAQDVGTGTLMAVKQVTYVRNTSSEQEEVVEALREEIRMMSHLNHPNIIRMLGATCEKSNYNLFIEWMAGGSVAHLLSKYGAFKESVVINYTEQLLRGLSYLHENQIIHRDVKGANLLIDSTGQRLRIADFGAAARLASKGTGAGEFQGQLLGTIAFMAPEVLRGQQYGRSCDVWSVGCAIIEMACAKPPWNAEKHSNHLALIFKIASATTAPSIPSHLSPGLRDVALRCLELQPQDRPPSRELLKHPVFRTTW

SEQ ID NO: 919852 - protein, 829 aa, Homo sapiens
MVLEQYVVVANYQKQESSEISLSVGQVVDIIEKNESVSWRYWSLPRPVGRRRTLGDLYAISWRQGAYLGVFFPLPEQITLGVGAVLALWDTLPECSDEQPALPSPGPPGLLWEGRSWGQLSGRRLPFVPTEEKYTVIYPYTARDQDEMNLERGAVVEVIQKNLEGWWKIRYQPLPPTVAGYQGKEGWAPASYLKKNSGEPLPPKPGPGSPSHPGALDLDGVSRQQNAVGREKELLSSQRDGRFEGRPVPDGDAKQRSPKMRQRPPPRRDMTIPRGLNLPKPPIPPQVEEEYYTIAEFQTTIPDGISFQAGLKVEVIEKNLSGWWYIQIEDKEGWAPATFIDKYKKTSNASRPNFLAPLPHEVTQLRLGEAAALENNTGSEATGPSRPLPDAPHGVMDSGLPWSKDWKGSKDVLRKASSDMSASAGYEEISDPDMEEKPSLPPRKESIIKSEGELLERERERQRTEQLRGPTPKPPGVILPMMPAKHIPPARDSRRPEPKPDKSRLFQLKNDMGLECGHKVLAKEVKKPNLRPISKSKTDLPEEKPDATPQNPFLKSRPQVRPKPAPSPKTEPPQGEDQVDICNLRSKLRPAKSQDKSLLDGEGPQAVGGQDVAFSRSFLPGEGPGRAQDRTGKQDGLSPKEISCRAPPRPAKTTDPVSKSVPVPLQEAPQQRPVVPPRRPPPPKKTSSSSRPLPEVRGPQCEGHESRAAPTPGRALLVPPKAKPFLSNSLGGQDDTRGKGSLGPWGTGKIGENREKAAAASVPNADGLKDSLYVAVADFEGDKDTSSFQEGTVFEVREKNSSGWWFCQVLSGAPSWEGWIPSNYLRKKP

SEQ ID NO: 919853 - protein, 829 aa, Homo sapiens; identical to SEQ ID NO: 919852

SEQ ID NO: 919854 - protein, 829 aa, Homo sapiens; identical to SEQ ID NO: 919852

SEQ ID NO: 919855 - protein, 145 aa, Homo sapiens
RSMSFSSMIIIHTYFMCMAALFSIIVFDCIDQEVAFIVRHNHLGVLCPQAFNHILCHEASGVSCVPKPSTTSSAMKPQVSVSSRKGSASSQALSGRRLQRPIQDGSGKKHRNLRQGIAAPAAGQAQQKVLPIIGTKKGISASEGC

SEQ ID NO: 919856 - protein, 145 aa, Homo sapiens; identical to SEQ ID NO: 919855

SEQ ID NO: 919857 - protein, 373 aa, Homo sapiens
AESGNRILSVVQSYFVYWARIESSVVSQQTHSSAHSDDRMEPRLLMPNLHQRLGDVEGAAPAPRTPITLPQQHTHVFAVALPGAAEEDNLDPVPASIWVTKFPGDAETLSQPSSHTATEGSINQQPSGDSNPTLEPSLEVHRLERLVALKRVSSESFASSLSTHHRTQDDPSFDSLETCLSSDGGEQDKTKASNRTVTQPPLSTVQLTYPQCLWSSETFTGNGVRASNPIPVLQTSGTSGLPAAGDQSEASRASASFLPQSKHKELRAGKGNGEGGVGYPRQTNPRPDIGLEGAQAPLGIQLRTPQLGILLCLSATLGMALAAGLRYLHTQYCHQQTEVSFSEPASDAVARSNSETQGSSKQGLKTMNNAFFR

SEQ ID NO: 919858 - protein, 128 aa, Homo sapiens
PGPPADAAMVTTPAVRAGAQAGAPANRALVAGKFDSTNHRPRRGKSPAGASEAEPNGAAARRRKGWRSRFVYAPLRRAGGGEALLRKVSEAGGSSEDNAALGHTAAEDGTPIESSCWSGARISTVAVS

SEQ ID NO: 919859 - protein, 132 aa, Homo sapiens
PGPPADAAMVTTPAVRAGAQAGAPANRALVAGKFDSTNHRPRRGKSPAGASEAEPNGAAARRRKGWRSRFVYAPLRRAGGGEALLRKVSEAGGSSEDNAALGHTAAEDGTPIESSCWSGARISTSRMLKCEA

SEQ ID NO: 919860 - protein, 151 aa, Homo sapiens
PGPPADAAMVTTPAVRAGAQAGAPANRALVAGKFDSTNHRPRRGKSPAGASEAEPNGAAARRRKGWRSRFVYAPLRRAGGGEALLRKVSEAGGSSEDNAALGHTAAEDGTPIESSCWSGARISTMKSHSVPPGWSCSELRSHHSIPAWATE

SEQ ID NO: 919861 - protein, 140 aa, Homo sapiens
MVLHRRSSFTETIGALGTCVNVVTPSYCFKEQETNAVRTAETTAYSGIPQMGLIRRLIWGQLFNNLDSQACESKKGGYPSDRVARFWGTRERQVRPRPFKTLESVDVANQCLAGPKNPTTSGSRARALVRALTRNFLLEC

SEQ ID NO: 919862 - protein, 140 aa, Homo sapiens; identical to SEQ ID NO: 919861

SEQ ID NO: 919863 - protein, 140 aa, Homo sapiens
MCCFLNKYGSKLRISLNKVDYLHFLKALPPVVWQLAEKRKATRSHLKHGHHLSKEQKYNDSVLYGCIDKGSEQETLVLSDGRGNRSVLPFTSPAFRLAESIRQDRPSDSPPPFHFCQVYIRPNYFSLGCQSCFLDRPDHP

SEQ ID NO: 919864 - protein, 158 aa, Homo sapiens
MAEERSFEAHEKLNQPLTERCMAHGPVPEARYLKARYCLLLEAGLGATCHSWAGVELSDIFETLSWAGWDSWGSSPHSLPSSDRSTRAHSCSDGRAPWKQQERASPKERVFLQASACIACADVPLAAIVIHTAKPRLNVGRGYLQTEGVNHWWPLLQK

SEQ ID NO: 919865 - protein, 289 aa, Homo sapiens
MYKKSNKQSLIHYVNVETGEKTYVCVECGKSFLKKSQIIIHQRIHTGEKPYDCGACGKAFSEKSHLIAHQRTHTGEKPYDCSECGKGFSQKSSLIIHQRVHTGEKPYECSECEKAFSQKSPLIIHQRIHTGEKPYECRVWESLFPESQLIIHHRAHTGEKPFHTGEKPYKCAQCEEAFSRKSELIIHQIIHTGEKPYECTECGKTFSRKSQLIIHQRTHTGEKPYKCTKCGKSFCQQSHLIGHQRIHTGEQPYKSDLVVHQIIHTGEKPDRCTKETLIYKYSMPGKDGT

SEQ ID NO: 919866 - protein, 147 aa, Homo sapiens
MLTDARGERHSTMTYFKDEFVNCQIKGERLPGWYPTHLPPYCNGPELQTLVTYVPWTVCKNCVPNAQSTQSPLWFTGTTTSTITITRNKQIQKLANNIPPSSPLTTPYLSTFTVDSMFSLKSFLLPHHSYHCCENSHVQHSREVTSG

SEQ ID NO: 919867 - protein, 189 aa, Homo sapiens
MHRVSRLIGVAFLGIGWVDICVVPNTLEPTGNNAQTWPSQLLQGPLLPLGSPSIFPGFMGAVISYSLLEREQSTLFLFGHQEEGCLYLDGLAWQEALGTLVDPCLFRFADGTPPSSYVIFPGFKLFFGCKCTFGRRTVGSPGTESKPAGTEYAGSLDRVEFLGVLVFKGAAAILQLGLEYMMSSCYLSV

SEQ ID NO: 919868 - protein, 524 aa, Homo sapiens
VSKQLYAMKSADSGSASALPDGLVDCLDPDCCLQSACQNSLLCRGSRDPLDIIQQGQTDWPAVKSFYDRIKLLAGKDSTHIIPGENPFNSRTPRNAKVSASKNRADFDKIVTKDGLVSLIRGQVVTTDGTPLVGVNVSFVKYPKYGYTITRQDGTFDLIANGGASLTLHFERAPFMSQERTVWLPWNSFYAMDTLVMKTEENSIPSCDLSGFVRPDPIIISSPLSTFFSAAPGQNPIVPETQVLHEEIELPGSNVKLRYLSSRTAGYKSLLKITMTQSTVPLNLIRVHLMVAVEGHLFQKSFQASPNLAYTFIWDKTDAYGQRVYGLSDAVVSVGFEYETCPSLILWEKRTALLQGFELDPSNLGGWSLDKHHILNVKSGILHKGTGENQFLTQQPAIITSIMGNGRRRSISCPSCNGLAEGNKLLAPVALAVGIDGSLYVGDFNYIRRIFPSRNVTSILELRHPVGNREPWEKTEANQPSPGTVSPPNLHSCCLLCLKYLLYLIYHITSTCKAQCQGPLFHVA

SEQ ID NO: 919869 - protein, 523 aa, Homo sapiens
EDPLFKAHPPVLIDKDYEGDGLVDCLDPDCCLQSACQNSLLCRGSRDPLDIIQQGQTDWPAVKSFYDRIKLLAGKDSTHIIPGENPFNSRTPRNAKVSASKNRADFDKIVTKDGLVSLIRGQVVTTDGTPLVGVNVSFVKYPKYGYTITRQDGTFDLIANGGASLTLHFERAPFMSQERTVWLPWNSFYAMDTLVMKTEENSIPSCDLSGFVRPDPIIISSPLSTFFSAAPGQNPIVPETQVLHEEIELPGSNVKLRYLSSRTAGYKSLLKITMTQSTVPLNLIRVHLMVAVEGHLFQKSFQASPNLAYTFIWDKTDAYGQRVYGLSDAVVSVGFEYETCPSLILWEKRTALLQGFELDPSNLGGWSLDKHHILNVKSGILHKGTGENQFLTQQPAIITSIMGNGRRRSISCPSCNGLAEGNKLLAPVALAVGIDGSLYVGDFNYIRRIFPSRNVTSILELRHPVGNREPWEKTEANQPSPGTVSPPNLHSCCLLCLKYLLYLIYHITSTCKAQCQGPLFHVA

SEQ ID NO: 919870 - protein, 134 aa, Homo sapiens
MASGKDTCPTLPKLTNNCSDESLYKSANKYEEIHLPRFSLKQGMIPRRYVMPWKENMIFRNVNLKQAEVCGIHTGPLEDSLFLNHSERLCHGEDRKVVFQKGPPEIKIADMPLHSPLSRYQSTVISHGFRRRLV

SEQ ID NO: 919871 - protein, 171 aa, Homo sapiens
SVRLYELIMKTYTCFSGCPGAKKHEFLTSVLDALSTDMVHAASDPSSSSGRLSEPDPSHTLEERVVHWYFKLLDKNSSGDIGKKEIKPFKRFLRKKSKPKKCVKKFVEYCDVNNDKSISVQELMGCLGVAKEDGKADTKKRHNHGWLPPEWIVFWYLRCKPGNHWNNQPCT

SEQ ID NO: 919872 - protein, 175 aa, Homo sapiens
SVRLYELIMKTYTCFSGCPGAKKHEFLTSVLDALSTDMVHAASDPSSSSGRLSEPDPSHTLEERVVHWYFKLLDKNSSGDIGKKEIKPFKRFLRKKSKPKKCVKKFVEYCDVNNDKSISVQELMGCLGVAKEDGKADTKKRHTPRGHAESTSNRQLKETRINGSDPEGSPKFGIL

SEQ ID NO: 919873 - protein, 256 aa, Homo sapiens
MDEGMEISSEGNSLIKAVHQSRLRLTRLLLEGGAYINESNDRGETPLMIACKTKHVDHQSVSKAKMVKYLLENNADPNIQDKSGKTALMHACLEKAGPEVVSLLLKSGADLSLQDHSSYSALVYAINSEDTETLKVLLSACKAKGKEVIIITTAKSPCGKHTTKQYLNMPPVDIDGCHSPATCTTPSEIDIKTASSPLSHSSETELTLFGFKDLELAGSNDDTWDPGSPVRKPALAPKGPKLPHAPPWVKNVCNSS

SEQ ID NO: 919874 - protein, 162 aa, Homo sapiens
MCRTLWLWNLGPNTGSGWMGTSSICDPYSDASHRNLLSTAKPFPVHSIGTNWKETTRFRNDISTGLELNPGVSECFQLVSFWVSVVERQHSAKTWNQPKCPTTIDWIEKMWHIHTMEYYAAIKNDEFMSFVGTWMKLETIILSKLSQGQKTKHRMFSLIGGN

SEQ ID NO: 919875 - protein, 146 aa, Homo sapiens
QVCPAPDLPLPMAFQFPELLQPNHQIQSIKIHLAFIYSLIHPSSPTYAPSPLHVTHSAPVRLLEPGNIFQGPYLLPQEAFQELAFIALPTSDQIVWLQGPYLLPQEAFQELAFIALPTSDQIDVAVDFKQEEWQQLDLAQRVLYMM

SEQ ID NO: 919876 - protein, 146 aa, Homo sapiens
AKEVSKEMCALHPTIGKCSHCLPSDETFLICSVCQEGTMRGLGANSLSLATQNVVWGLKKTSTSSSAEGAGLDLGQPPQKLAKPRTHHFTLHSEAQGASAWHGGRRKKPVCVLRPCCDFGSCLSAGASVPAQLDLGGSIAWRREIK

SEQ ID NO: 919877 - protein, 171 aa, Homo sapiens
RKLALPCQEPPAAGGMNESCKMGLSHSHAPRLRPLYGAVGGGAGNSLDGFQTEGDIPAFILEHTLGTETAGQFGARNQVIKKKAYEPGRRRRGGKCRQFTAASESDELPLRGSVIMGKDEQALLSCMFFSSAGFLHAIPVKQELSRMCLTITNGHNGKTFVNGISALIKEA

SEQ ID NO: 919878 - protein, 170 aa, Homo sapiens
MADAPPAVKLQHNRLISDCCASSEQDSMGMGCAKPGMGGYLLVYRLLRPWEKSSIWSGVYRFSSQIRNPPGKGEESPPLRASAMFLSSGAAPSSKSPAYDSPLGQCSLVNHLLGLLTASLLISILNNGSQTLAGISHLGGWFVKAQIADPTLRVSDSAGLGWGLLMCISN

SEQ ID NO: 919879 - protein, 239 aa, Homo sapiens
FQMDVHVSDFALPQCRLRTGMRGAFGKPQGTVARVHIGQVIMSICTKLQNKEHVIEALHRAKFKFPGRQKIHISKKWGFIKFNANEFEDMVAEKRLILDGCGVKYIPSRGLLDKWRALHSRGLPLLMSSRNPGQRAELSFAAATGATPIAGHFTPGTFINQVQAAFWELRLLVDTDPRVATGLSQQHLMITYLPYLCGTQVLLCAVWIFPSHATRELTRGSDVGNAGSGSSAHAWHCLL

SEQ ID NO: 919880 - protein, 166 aa, Homo sapiens
QQQVKTSGCGTCGLSYCQQGGRAEDMAFVRLILELCKELLDSTVPNRQLSPDGQRAAGLVDGSSKVDHSTIDLVKLYPQHWQVTLIPSLQSLAWPDLAGSETARGEAVLGEGPPSPSFLPTGRSHTGSHHLPQGVAWPLLFLCGNWDANGWWEAPKWDEDGWWEAP

SEQ ID NO: 919881 - protein, 166 aa, Homo sapiens; identical to SEQ ID NO: 919880

SEQ ID NO: 919882 - protein, 184 aa, Homo sapiens
MLSYWKTSPRWLGGPVGPALEAVPLEQMAVKLWRRDKLGLTAAPFGTRLASTSLQEATHPATAFLSRRRPPPHSFRPQISPETSPEGGTAPSPRPVTSAKLAAGLSPSSAIRRGLKREARSVAVLQRSGGASLLGPPPRGILYQNNTPGARVRAAHSPPPVPARSHSAGPVTQPGDPALSLNST

SEQ ID NO: 919883 - protein, 145 aa, Homo sapiens
THMLTHTLAHPHTHSLHTHKVTYTHIPTHTYSLTHSYTHIHMYLTQPTLSHTFTHSITHTLTGIFSHFTHTKKPLVLKQLDSLRIDVSLTQSYFKRQVLSEGMTLSFNFINSWAQLAIKLSARVFLSSNDFAAETLIHRRGAQRE

SEQ ID NO: 919884 - protein, 112 aa, Homo sapiens
MPHLCRSHANICPVLRHPPGSQLLLLKIQISSAPSEAEVTVSGRHWSRLGGKHSGQQGGGVAHVAVLDDNIPTLPSDTSQTLVPQDPSDSTEERCRAACHQVTNSFFSSYIH

SEQ ID NO: 919885 - protein, 313 aa, Homo sapiens
MNSVFPPTSIVARESPFGHLAAWEETFTCGIPGYSKWRIHRCDYDGCNKVYAKSSHLKAHRRRHTEKPYKCTWEGCTWTFARSDELKRHLGKHTGIKPLQCPDCNRRNQPLKKEKPKWKSDYPMTDGQLRSKRDEFWDTAPAFEGRKEIWDALKAAAHAFESNDHELAQAIIDGANITLPHGALTECYDELGNRYQLPVYCLAPPINMIEEKSDIETLDIPEPPPNSGYECQLRLRLSTGKDLKLVVRSTDTVFHMKRRLHAAEGVEPGSQRWFFSGRPLTDKMKFEELKIPKDYVVQVIVSQPVQNPTPVEN

SEQ ID NO: 919886 - protein, 148 aa, Homo sapiens [sequence omitted]

SEQ ID NO: 919887 - protein, 261 aa, Homo sapiens
APEEAAAAAAAGPDERPEVADEAPGAPMGGCVGAQHDSSGSLNENSEGTGVALGRNQPLKKEKPKWKSDYPMTDGQLRSKRDEFWDTAPAFEGRKEIWDALKAAAHAFESNDHELAQAIIDGANITLPHGALTECYDELGNRYQLPVYCLAPPINMIEEKSDIETLDIPEPPPNSGYECQLRLRLSTGKDLKLVVRSTDTVFHMKRRLHAAEGVEPGSQRWFFSGRPLTDKMKFEELKIPKDYVVQVIVSQPVQNPTPVEN

SEQ ID NO: 919888 - protein, 261 aa, Homo sapiens; identical to SEQ ID NO: 919887

SEQ ID NO: 919889 - protein, 261 aa, Homo sapiens; identical to SEQ ID NO: 919887

SEQ ID NO: 919890 - protein, 202 aa, Homo sapiens
MHSLRIKFLFISSLSEGALTECYDELGNRYQLPVYCLAPPINMIEEKSDIETLDIPEPPPNSGYECQLRLRLSTGKDLKLVVRSTDTVFHMKRRLHAAEGVEPGSQRWFFSGRPLTDKMKFEELKIPKDYVVQVIVSQPKIKITGRVRWLTPVIPALGEAEAGGSRGQEIKTILANTVKSHLYYFFHVRRILMNSTLSFLKF

SEQ ID NO: 919891 - protein, 261 aa, Homo sapiens; identical to SEQ ID NO: 919887

SEQ ID NO: 919892 - protein, 261 aa, Homo sapiens; identical to SEQ ID NO: 919887

SEQ ID NO: 919893 - protein, 261 aa, Homo sapiens; identical to SEQ ID NO: 919887

SEQ ID NO: 919894 - protein, 140 aa, Homo sapiens
MAWDWRAAPPAAPVRDPLGEASWAPESGGALENLYLRDYKRTNQCPVKTDHSALPISRTWVGPDKRIKAGCPSQQWQPARVPFDTLWKMVKLRFRMMNNTPKSNSQVSERGLRPQVCPGRAKSLIRLLHCCYQEWSLGFS

SEQ ID NO: 919895 - protein, 518 aa, Homo sapiens
YDLQQPAPGGSEVAPSMLEITIQNAKAYLLKTSSNSGFNLYDHLSNMLTKILNERPENAVDIFENISQDVKMAHFSKKFDALQNENELLPTYEIAEKQKALFLQGHLEGVDQELEDEIAENALPNVMESAFYFEQAGVGLGTDETYRIFLALKQLTDTHPIQRCRFWGKILGLEMNYIVAEVEFREGEDEEEVEEEDVAEERDNGESEAHEDEEDELPKSFYKAPQAIPKEESRTGANKYVYFVCNEPGRPWVKLPPVIPAQIVIARKIKKFFTGRLDAPIISYPPFPGNESNYLRAQIARISAGTHVSPLGFYQFGEEEGEEEEEAEGGRNSFEENPDFEGIQVIDLVESLSNWVHHVQHILSQGRCNWFNSIQKNEEEEEEEDEEKDDSDYIEQEVGLPLLTPISEDLGYFTNANIEEHDEPKGPASLTATSRKDSSALYSKSDVPGWGHKYSPDNYTPPVPPPVYQEYPSGPEITEMDDPSVEEEQAFRAAQEAVLLAAENEESEEDEDEEDDYD

SEQ ID NO: 919896 - protein, 318 aa, Homo sapiens
MALPIIVKWGGQEYSVTTLSEDDTVLDLKQFLKTLTGVLPERQKLLGLKVKGKPAENDVKLGALKLKPNTKIMMMGTREESLEDVLGPPPDNDDVVNDFDIEDEVVEVENREENLLKISRRVKEYKVEILNPPREGKKLLVLDVDYTLFDHRSCAETGVELMRPYLHEFLTSAYEDYDIVIWSATNMKWIEAKMKELGVSTNANYKITFMLDSAAMITVHTPRRGLIDVKPLGVIWGKFSEFYSKKNTIMFDDIGRNFLMNPQNGLKIRPFMKAHLNRDKDKELLKLTQYLKEIAKLDDFLDLNHKYWERYLSKKQGQ

SEQ ID NO: 919897 - protein, 318 aa, Homo sapiens; identical to SEQ ID NO: 919896

SEQ ID NO: 919898 - protein, 146 aa, Homo sapiens
MYCIIIPRVLAATNMKWIEAKMKELGVSTNANYKITFMLDSAAMITVHTPRRGLIDVKPLGVIWGKFSEFYSKKNTIMFDDIGRNFLMNPQNGLKIRPFMKAHLNRDKDKELLKLTQYLKEIAKLDDFLDLNHKYWERYLSKKQGQ

SEQ ID NO: 919899 - protein, 318 aa, Homo sapiens; identical to SEQ ID NO: 919896

SEQ ID NO: 919900 - protein, 227 aa, Homo sapiens
PPHLKSPMHLNSVSMHVIVVQGLLVGGTFVGMDSGCPGFEATAPTVTLARAAPTVTLARAAPTVTLARAAPTVTLARAAPTVTLARAAPTVTLARAAPTVTLARAAPTVTLARAAPAVGEGEWWLRHLGSVKAKIDVNVASVANKYFAYDTIYAITMGGIKRSQSQWEGSRGANHNGRDQEEPITMGGIKRSQSQWEGSRGANHNGWDQEEPITMRGIKRSQSQWAG

SEQ ID NO: 919901 - protein, 139 aa, Homo sapiens
ERNREVRMGNRFLEGKLGLKDDYFIFGHTLRFLSGAVFNNGIMCAHNSVDCILSLALLMVEEWLSTVVKVLCFLFHGLSSNIEDYNLTKDLSGDTDPNHISTNKTYENEVKIELGQVNLVLNCCTSLPDVCSLSNIPRV

SEQ ID NO: 919902 - protein, 149 aa, Homo sapiens
MPMVMADQHRSVSELLSNSKFDVNYAFGRVKRSLLHIAANCGSVECLVLLLKKGANPNYQDISGCTPLHLAARNGQKKCMSKLLEYSADVNICNNEGLTAIHWLAVNGRTELLHDLVQHVSDVDVEDAMGQTALHVACQNGHKTSSSEL

SEQ ID NO: 919903 - protein, 183 aa, Homo sapiens
MERAMEQLNRLTRSLRRARTVELPEDNETAVYTLMPMVMADQHRSVSELLSNSKFDVNYAFGRVKRSLLHIAANCGSVECLVLLLKKGANPNYQDISGCTPLHLAARNGQKKCMSKLLEYSADVNICNNEGLTAIHWLAVNGRTELLHDLVQHVSDVDVEDAMGQTALHVACQNGHKTSSSEL

SEQ ID NO: 919904 - protein, 485 aa, Homo sapiens
MSIEELCSDFKKYLFPNSFEISVFLQTLAMIHSIEMINNSTLLPGVKLGYEIYDTCTEVTVAMAATLRFLSKFNCSRETVEFKCDYSSYMPRVKAVIGSGYSEITMAVSRMLNLQLMPQVGYESTAEILSDKIRFPSFLRTVPSDFHQIKAMAHLIQKSGWNWIGIITTDDDYGRLALNTFIIQAEANNVCIAFKEVLPAFLSDNTIEVRINRTLKKIILEAQVNVIVVFLRQFHVFDLFNKAIEMNINKMWIASDNWSTATKITTIPNVKKIGKVVGFAFRRGNISSFHSFLQNLHLLPSDSHKLLHEYAMHLSACAYVKDTDLSQCIFNHSQRTLAYKANKAIERNFVMRNDFLWDYAEPGLIHSIQLAVFALGYAIRDLCQARDCQNPNAFQPWELLGVLKNVTFTDGWNSFHFDAHGDLNTGYDVVLWKEINGHMTVTKMAEYDLQNDVFIIPDQETKNEFRNLKPKDFAPAISFAYNNFL

SEQ ID NO: 919905 - protein, 260 aa, Homo sapiens
  misc_feature (248)..(248): Xaa can be any naturally occurring amino acid
  misc_feature (251)..(251): Xaa can be any naturally occurring amino acid
MSIEELCSDFKKYLFPNSFEISVFLQTLAMIHSIEMINNSTLLPGVKLGYEIYDTCTEVTVAMAATLRFLSKFNCSRETVEFKCDYSSYMPRVKAVIGSGYSEITMAVSRMLNLQLMPQVGYESTAEILSDKIRFPSFLRTVPSDFHQIKAMAHLIQKSGWNWIGIITTDDDYGRLALNTFIIQAEANNVCIAFKEVLPAFLSDNTIEVRINRTLKKIILEAQVNVIVVFLRQFHVFDLFNKAGCGSXPFXFFTYATSTI

SEQ ID NO: 919906 - protein, 350 aa, Homo sapiens
AYIKIGETSNKQSNDASSWERWLTSVIPALWEAKVGPVSLLAIGVLTVHCMVILLNCAQHLSQRLQKTFVNYGEATMYGLETCPNTWLRAHAVWGRYTVSFLLVITQLGFCSVYFMFMADNLQQQPHCLSLCFMSDGGKSHVTSNICQPREILTLTPILDIRFYMLIILPFLILLVFIQNLKGIPYPSNLPLMANWKTFLLFFGTAIFTFEGVGMVLPLKNQMKHPQQFSFVLYLGMSIVIILYILLGTLGYMKFGSDTQASITLNLPNCWYVLPTSGEIGRDTGTVLVVIAESTAKLSHEAGNPSLEVTYVSPAHTASVKASHMAAPHSKGAGKCNSAMCLEVFGEQHK

SEQ ID NO: 919907 - protein, 185 aa, Homo sapiens
MRVVAVMKKMCQNCDAESGAPTSPSLLEEDDPGPLSSQQQATSSRDKKPLSSLHLSHRAQVALEYLPFFCTYGCLLEEEGLVLQPKTPLQEDSELLSGFFPYYRSEEESLPSLALPGWSHRGSQDLPTEKEARAGCFCRTTVRDECSTLTGPWTGPSQGCCGPWSKVSLVGSTDTAGRLSCSSPA

SEQ ID NO: 919908 - protein, 533 aa, Homo sapiens
MGRTVFGAWRCLLDATVAGGQTRLQASDRYRDLAGGTGRSAKEQVLRKRAQAEVLQSVRELSRSRKLYGQRERVWALAQEKAADVQARLNRSDHGIFHSRTSLQKLSTKLSAQSAQYSQQLQAARNEYLLNLVATNAHLDHYYQEEAASSAQEHLRDPLTSLSHTELEAAEVILEHAHRGEQTTSQVCVLEWGAEGVAGKSGLEKEVQRLTSRAARDYKIQNHGHRVLQRLEQRRQQASEREAPSIEQRLQEVRESIRRAQVSQVKGAARLALLQGAGLDVERWLKPAMTQAQDEVEQERRLSEARLSQRDLSPTAEDAELSDFEECEETGELFEEPAPQALATRALPCPAHVVFRYQAGREDELTITEGEWLEVIEEGDADEWVKARNQHGEVGFVPERYLNFPDLSLPESSQDSDNPCGAEPTAFLAQALYSYTGQSAEELSFPEGALIRLLPRAQDGVDDGFWRGEFGGRVGVFPSLLVEELLGPPGPPELSDPEQMLPSPSPPSFSPPAPTSVLDGPPAPVLPGAPTYK

SEQ ID NO: 919909 - protein, 406 aa, Homo sapiens
ISIVEARCVDPVADRLAGAEMQPPPRKVKPAQEVKLRFLEQLSILQTWQQREADLLEDIRSYSKQRAAIEREYGQALQKLAGPFLKREGHRSGEMDSRTVFGAWRCLLDATVAGGQTRLQASDRYRDLAGGTGRSAKEQVLRKGTENLQRAQAEVLQSVRELSRSRKLYGQRERVWALAQEKAADVQARLNRSDHGIFHSRTSLQKLSTKLSAQSAQYSQQLQAARNEYLLNLVATNAHLDHYYQEELPALLKALVSELSEHLRDPLTSLSHTELEAAEVILEHAHRGEQTTSQVSWEQDLKLFLQEPGVFSPTPPQQFQPAGTDQVCVLEWGAEGVAGKSGLEKEVQRLTSRAARDYKIQNHGHRVRWGGTGVMCTFLSQQEELREGILESLRVSWSYRGEGKVF

SEQ ID NO: 919910 - protein, 406 aa, Homo sapiens; identical to SEQ ID NO: 919909

SEQ ID NO: 919911 - protein, 397 aa, Homo sapiens
EFTQGWGFMILQAPVYNEQKPAQEVKLRFLEQLSILQTWQQREADLLEDIRSYSKQRAAIEREYGQALQKLAGPFLKREGHRSGEMDSRTVFGAWRCLLDATVAGGQTRLQASDRYRDLAGGTGRSAKEQVLRKGTENLQRAQAEVLQSVRELSRSRKLYGQRERVWALAQEKAADVQARLNRSDHGIFHSRTSLQKLSTKLSAQSAQYSQQLQAARNEYLLNLVATNAHLDHYYQEELPALLKALVSELSEHLRDPLTSLSHTELEAAEVILEHAHRGEQTTSQVSWEQDLKLFLQEPGVFSPTPPQQFQPAGTDQVCVLEWGAEGVAGKSGLEKEVQRLTSRAARDYKIQNHGHRVRWGGTGVMCTFLSQQEELREGILESLRVSWSYRGEGKVF

SEQ ID NO: 919912 - protein, 406 aa, Homo sapiens; identical to SEQ ID NO: 919909

SEQ ID NO: 919913 - protein, 705 aa, Homo sapiens
GFLQFRSPVADRLAGAEMQPPPRKVKPAQEVKLRFLEQLSILQTWQQREADLLEDIRSYSKQRAAIEREYGQALQKLAGPFLKREGHRSGEMDSRTVFGAWRCLLDATVAGGQTRLQASDRYRDLAGGTGRSAKEQVLRKGTENLQRAQAEVLQSVRELSRSRKLYGQRERVWALAQEKAADVQARLNRSDHGIFHSRTSLQKLSTKLSAQSAQYSQQLQAARNEYLLNLVATNAHLDHYYQEELPALLKALVSELSEHLRDPLTSLSHTELEAAEVILEHAHRGEQTTSQVSWEQDLKLFLQEPGVFSPTPPQQFQPAGTDQVCVLEWGAEGVAGKSGLEKEVQRLTSRAARDYKIQNHGHRVLQRLEQRRQQASEREAPSIEQRLQEVRESIRRAQVSQVKGAARLALLQGAGLDVERWLKPAMTQAQDEVEQERRLSEARLSQRDLSPTAEDAELSDFEECEETGELFEEPAPQALATRALPCPAHVVFRYQAGREDELTITEGEWLEVIEEGDADEWVKARNQHGEVGFVPERYLNFPDLSLPESSQDSDNPCGAEPTAFLAQALYSYTGQSAEELSFPEGALIRLLPRAQDGVDDGFWRGEFGGRVGVFPSLLVEELLGPPGPPELSDPEQMLPSPSPPSFSPPAPTSVLDGPPAPVLPGDKALDFPGFLDMMAPRLRPMRPPPPPPAKAPDPGHPDPLT

SEQ ID NO: 919914 - protein, 406 aa, Homo sapiens; identical to SEQ ID NO: 919909

SEQ ID NO: 919915 - protein, 412 aa, Homo sapiens
GPQMMYEAGPGVKYTSGGSALELNCEMHAARRKEKPAQEVKLRFLEQLSILQTWQQREADLLEDIRSYSKQRAAIEREYGQALQKLAGPFLKREGHRSGEMDSRTVFGAWRCLLDATVAGGQTRLQASDRYRDLAGGTGRSAKEQVLRKGTENLQRAQAEVLQSVRELSRSRKLYGQRERVWALAQEKAADVQARLNRSDHGIFHSRTSLQKLSTKLSAQSAQYSQQLQAARNEYLLNLVATNAHLDHYYQEELPALLKALVSELSEHLRDPLTSLSHTELEAAEVILEHAHRGEQTTSQVSWEQDLKLFLQEPGVFSPTPPQQFQPAGTDQVCVLEWGAEGVAGKSGLEKEVQRLTSRAARDYKIQNHGHRVRWGGTGVMCTFLSQQEELREGILESLRVSWSYRGEGKVF

SEQ ID NO: 919916 - protein, 344 aa, Homo sapiens
MYVMQLAKYQSHSKSCPTVFPPTPVLCLPNQVLQRLEQRRQQASEREAPSIEQRLQEVRESIRRAQVSQVKGAARLALLQGAGLDVERWLKPAMTQAQDEVEQERRLSEARLSQRDLSPTAEDAELSDFEECEETGELFEEPAPQALATRALPCPAHVVFRYQAGREDELTITEGEWLEVIEEGDADEWVKARNQHGEVGFVPERYLNFPDLSLPESSQDSDNPCGAEPTAFLAQALYSYTGQSAEELSFPEGALIRLLPRAQDGVDDGFWRGEFGGRVGVFPSLLVEELLGPPGPPELSDPEQMLPSPSPPSFSPPAPTSVLDGPPAPVLPGGEWKELGALGG

SEQ ID NO: 919917 - protein, 162 aa, Homo sapiens
VVGRILTRGAGFMNGKSFDPKLKIIHTGDKPFKGDECHKAFNQFSTLTNCKRIHTGEKPYKRKECGKGFNQFSHLTKHKKTHTGEKPYKCKECGKGFNQFSHLTKHKKTHTGKKSYKCEECGKAFNQFANLIKHKRIHTGEKSYNMKNDEKLLPSPQTLLNT

SEQ ID NO: 919918 - protein, 148 aa, Homo sapiens
NWVTAEVGTEEDRKMWESLELPRDLLDNFNQNADSDMDNEVQAEMASDGDEELIGNGKGAGSKPWWLPCGVGPVVRRRQELSFGTVCQFQRMYGNTWMSRQKSVAGWSCERGPPSSRAQKGRSIDSLHHAPGKTIGIQQQPVKAVQGF

SEQ ID NO: 919919 - protein, 148 aa, Homo sapiens; identical to SEQ ID NO: 919918

SEQ ID NO: 919920 - protein, 240 aa, Homo sapiens
MQNNSPSVLCLYCLLFSKMSHIWDHTVLPLENKMKNARHFPAILSLGMSIVTSLYIGMAALGYLRFGDDIKASISLNLPNCWLYQSVKLLYIAGILCTYALQFYVPAEIIIPFAISRVSTRWALPLDLSIRLVMVCLTCLLAILIPRLDLVISLVGSVSGTALALIIPPLLEVTTFYSEGMSPLTIFKDALISILGFVGFVVGTYQALDELLKSEDSHPFSNSTTFINQPTNFQTRVKPS

SEQ ID NO: 919921 - protein, 122 aa, Homo sapiens
MLIEETVVEAVNSTTNNCYSNETVILTPTMDSRLYMLSFLPFLVLLVLIRNLRILTIFSMLANISMLVSLVIIIQYITQEIPDPSRLPLVASWKTYPLFFGTAIFSFESIGVVRFELRWPYP

SEQ ID NO: 919922 - protein, 156 aa, Homo sapiens
MDSRLYMLSFLPFLVLLVLIRNLRILTIFSMLANISMLVSLVIIIQYITQEIPDPSRLPLVASWKTYPLFFGTAIFSFESIGVVLPLENKMKNARHFPAILSLGMSIVTSLYIGMAALGYLRFGDDIKASISLNLPNCWYLHGLSGGGDSGMGGNV

SEQ ID NO: 919923 - protein, 126 aa, Homo sapiens
MCLCMRVYALTRVCVLSKRYSSLEKVKKYEGFLHLVCKLNSPLFSSNPLCVCLQEINLLDLLLRWLVTCCMKWGGDEKVQLLLQQLSLQQNFQRYLRMPIVGSVFEIKNKTKQKKSVCFSALSAVG

SEQ ID NO: 919924 - protein, 194 aa, Homo sapiens
RPPLHMRPSCTLAWTQLPAMLVILWLPSATPVQKSGLNKAVLQTVQHKGYSNVVNHFNENQSFSVNSLGKNDVRFRALKPSPTACRWDRCTPPLEAGCTSPWTPLPKPLTWVCSKSWPLEDFPTLLCKIVPVLAYWTTWKANLGGECICFQSGIHASCSMELRRQETSLGLVGRSGSRFSGVLMISQVPLRTRI

SEQ ID NO: 919925 - protein, 212 aa, Homo sapiens
MFIMEKFEDVLLLALKMEEDGGRGHKPSKPPLEIGNGRQCARARLGGAPEPGHLRRLGCALSRRTLCGFLPSSEPLLWPPRGREAEMADEIAKAQVARPGGDTIFGKIIRKEIPAKIIFEDDRCLAFHDISPQAPTHFLVIPKKHISQISVAEDDDESLLGHLMIVGKKCAADLGLNKGYRMVVNEGSDGGQSVYHVHLHVLGGRQMHWPPG

SEQ ID NO: 919926 - protein, 164 aa, Homo sapiens
MFIMEKFEDVLLLALKMEEDGGRGHKPSKPPLEIGNGRQCARARLGGAPEPGHLRRLGCALSRRTLCGFLPSSEPLLWPPRGREAEMADEIAKAQVARPGGDTIFGKIIRKEIPAKIIFEDDRCLAFHDISPQAPTHFLVIPKKHISQISVAEDDDESSVEYLM

SEQ ID NO: 919927 - protein, 189 aa, Homo sapiens
MFIMEKFEDVLLLALKMEEDGGRGHKPSKPPLEIGNGRQCARARLGGAPEPGHLRRLGCALSRRTLCGFLPSSEPLLWPPRGREAEMADEIAKAQVARPGGDTIFGKIIRKEIPAKIIFEDDRCLAFHDISPQAPTHFLVIPKKHISQISVAEDDDESVITKEKPEKPLGLQLPSCFPKLLHHFVSHQQ

SEQ ID NO: 919928 - protein, 189 aa, Homo sapiens; identical to SEQ ID NO: 919927

SEQ ID NO: 919929 - protein, 182 aa, Homo sapiens
MRGSEARWEAWEHRMCKISISLPFTLSALFKGHLSLVYIGRGSSNGFHLAFPLNSPHPTSEAANVGVLPAPKYIYANDAFWHWGNDHRMSPGAHWTHYKGGKADGSMGRGEDAATTGDGEAVPSGKKRSSEFTNSVSPTSSGSSHKSTFQVSGSQSFPMNALTLTVDTWQSCTCIFHWGEDC

SEQ ID NO: 919930 - protein, 182 aa, Homo sapiens; identical to SEQ ID NO: 919929

SEQ ID NO: 919931 - protein, 869 aa, Homo sapiens
QKALVPTSSPCSVGGECVPVICWVCRGAQAWCKQTQEARRTSLEFTVTSQENLKMSSRRKRAPPVRVDEEKRQQLHWNMHEDRRNEPIIISDDDEQPCPGSDTSSAHYIILSDSLKEEVAHRDKKRCSKVVGIYLLEAGLAKLDFLSDANSRMKKFNQLMKKVMEKLHNSIIPDVLEEDEDDPESEPEGQDIDELYHFVKQTHQQETQSIQVDVQHPALIPVLRPYQREAVNWMLQQECFRSSPATEIQNIEFEPKEKVQCPPTRVMILTAVKEMNGKKGVSILSIYKYVSSIYRYDVQRNRSLLKRMLKCLIFEGLVKQIKGHGFSGTFTLGKNYKEEDICDKTKKQAVGSPRKIQKETRKSGNKDTDSEYLPSDTSDDDDDPYYYYYKSRRNRSKLRKKLVPSTKKGKSQPFINPDSQGHCPATSDSGITDVAMSKSTCISEFNQEHETEDCAESLNHADSDVPPSNTMSPFNTSDYRFECICGELDQIDRKPRVQCLKCHLWQHAKCVNYDEKNLKIKPFYCPHCLVAMEPVSTRATLIISPSSICHQWVDEINRHVRSSSLRVLVYQGVKKDGFLQPHFLAEQDIVIITYDVLRSELNYVDIPHSNSEDGRRLRNQKRYMAIPSPLVAVEWWRICLDEAQMVECPTVKAAEMAQRLSGINRWCISGTPVQRGLEDLFGLVVFLGIEPYCVKHWWVRLLYRPYCKKNPQHLYSFIAKILWRSAKKDVIDQIQIPPQTEEIHWLHFSPVERHFYHRQHEVCCQDVVVKLRKISDWALKLSSLDRRTVTSILTMTMEELLTSLQKKCGTECEEAHRQLVCALNGLAGIHIIKGEYALAAELYREVLRSSEEHKGKLKTDSLQEKYLVI

SEQ ID NO: 919932 - protein, 123 aa, Homo sapiens
RGARRRHQAVRLEPCVSRRHAHTCPPPLPAASLAAGAERARLNLPFIPGPGGRARPRWSFTAGAPEPPKRVPAQAVGAHGRCRRLFWWRLRVPGPVTPGSPRAACPGHHSEQHNSRVAETTKM

SEQ ID NO: 919933 - protein, 137 aa, Homo sapiens
MSLRGATVKANIKDFNLTKMWSEIVFPVQILAEKNLVHLILDYSKESENGVCSEKPSASLRTIQAARELLEVKVSGEADQTWAESPSSHAHMCFLRLDFSPPGSANLRGNSTPAGVTPSPTDSLQHTQTFPVIPKKG

SEQ ID NO: 919934 - protein, 801 aa, Homo sapiens
MHSSLNFDQNKLEEEMRKRKERVEKWREEQRKKAMENIGELKKEIEEMKQGKKWSLEDDDDDEDDPAEAEKEGNEMEGEELDPLDAYMEEVKEEVKKFNMRSVKGGGGNEKKSGPTVTKVVTVVTTKKAVVDSDKKKGELMENDQDAMEYSSEEEEVDLQTALTGYQTKQRKLLEPVDHGKIEYEPFRKNFYVEVPELAKMSQEEVNVFRLEMEGITVKGKGCPKPIKSWVQCGISMKILNSLKKHGYEKPTPIQTQAIPAIMSGRDLIGIAKTGSGKTIAFLLPMFRHIMDQRSLEEGEGPIAVIMTPTRELALQITKECKKFSKTLGLRVVCVYGGTGISEQIAELKRGAEIIVCTPGRMIDMLAANSGRVTNLRRVTYVVLDEADRMFDMGFEPQVMRIVDNVRPDRQTVMFSATFPRAMEALARRILSKPIEVQVGGRSVVCSDVEQQVIVIEEEKKFLKLLELLGHYQESGSVIIFVDKQEHADGLLKDLMRASYPCMSLHGEDQARYAGDIIKALELSGTAVPPDLEKLWSDFKDQQKAGFKFDETEQALANERKKLQKAALGLQDSDDEDAAVDIDEQIESMFNSKKRVKDMAAPGTSSVPAPTAGNAEKLEIAKRLALRINAQKNLGIESQDVMQQATNAILRGGTILAPTVSAKTIAEQLAEKINAKLNYVPLEKQEEERQDGGQNESFKRYEEELEINDFPQASNRWKVTSKEALQRISEYSEAAITIRGTYFPPGKEPKEGERKIYLAIESANELAVQKAKAEITRLIKEELIRLQNSYQPTNKGRYKVL

SEQ ID NO: 919935 - protein, 184 aa, Homo sapiens
MTEGRKTNGKLNYVSIQGVCEIKQKKNIFTIHEVEVDHHKGLHPHHLHVVEEEEKEKGSDSPWVGLAVAAVVDGGVVLRPMELCSQGDYDYLCCVMQNLISKKRLVEPVLCEIYFGKFGLGKGKPVNVLRRVTWSKIFYRAFSWQEYDLMRKRLEAQRTDESSLASALGHLRELCIKAEMWLEL

SEQ ID NO: 919936 - protein, 245 aa, Homo sapiens
YRGASAMLLRDVPGYCLYFIPYVFLSEWITPEACTGPSPCAVWLAGGMAGACAHAQLLVRAQSVPTGREDGKAPFALTFAESRVNPALSELQTFSLMPHPGLSSGALGRCSQVPVEPVTLSPIKTANKYCHVSSTGCGLALAQCFTFINSFGPQNSPIKIGAISWGTATPMDVVKSRLQADGVYLNKYKGVLDCISQSYQKEGLKVFFRGITVNAVRGFPMSAAMFLGYELSLQAIRGDHAVTSP

SEQ ID NO: 919937 - protein, 391 aa, Homo sapiens
MFSGSWKESSMNIIELEIPDQNIDVDALQVAFGSLYRDDVLIKPSRVVAILAAACMLQLDGLIQQCGETMKETINVKTVCGYYTSVEIYGLDSVKKKCLEWLLNNLMTHQNVKLFKELGINVMKQLIGSSNLFVMQVEMDVYTTLKKWMFLQLVPSWNGSLKQLLTETDVWFSKQRKDFEGMAFLETEPGKPFVSVFRHLRLQYIISDLASARIIEQDGIVPSEWLSSVYKQQWFAMLRAEQDHEVGPQEINKEDLEGSSMRCGRKLAKDGEYYWCWTGFNFGFDLLVIYTNGYIIFKRNTLNQPCSGSVSLRPRRSIAFRLRLASFDSSGKLVCSRTTGYQILILKKDQEQVVMNLDSRFLTFPLYICCELIQFPGMKSHLYENDSNLFL

SEQ ID NO: 919938 - protein, 391 aa, Homo sapiens; identical to SEQ ID NO: 919937

SEQ ID NO: 919939 - protein, 161 aa, Homo sapiens
MEKPLTVLRVSLYHPTLGPSAFANVPPRLQHDTSPLLLGRGQDAHLQLQLPRLSRRHLSLEPYLEKGSALLAFCLKALSRKGCVWVNGLTLRYLEQVPLSTVNRVSFSGIQMLVRVEEGTSLEAFVCYFHVSPSPLIYRPEAEETDEWEGISQGQPPPGSG

SEQ ID NO: 919940 - protein, 164 aa, Homo sapiens
CGGNNPEMTQGVERRLVEEGYEEEEGWQIHPWELNTQSKKIRGSGKGSESRQAREKDESEHLQDLVYQRRQAARRPLNFCPGTVCCREAAPELVETASRVQRPESGGGALGAGSAACGCRGTQEHKLKSHIPVEELGDKMQSAANRSHSFRDDRPPGFEEQQTA

SEQ ID NO: 919941 - protein, 189 aa, Homo sapiens
MRLKQGSFLWYLYLDKIYCLLSVRNVKALAEYFHILDVHGKNTLNDVLFYHFLHHVTDLKKAQINIVFDMLDWNAVGEIDFEKFYMLNHLEGQFMYRHSRPVFDLLDLKGDLRIGAKNFEMYRFLFNIQKQELKDLFRDFDITGDNRLNYQEFKLYTIIYTDKLQKRQKTEEKEKGERKRSLYSKCHIK

SEQ ID NO: 919942 - protein, 155 aa, Homo sapiens
MPPHFSPSRAPRSVEVYVSWDLIAPNYPRSLSPASAWLSPREPEATGQFIGCPRGKGSSCRDERSGAGGGERLQKEDHEHVRRNKSHHVCTRAGAQGRERGARPRGPGTVVPCSGHSRGRGYSHESVVDERPAAGSLQHVVQKLIREPRTTSEII

SEQ ID NO: 919943 - protein, 154 aa, Homo sapiens
EEEEAARMAGSALARSPSHGQVRLTTLLLPLTHSPLGSPSSSSFPCGIRSPPPPPPQTASRGSQTSARNPALRACRRGGRRARSFRPLLARERALSAPGASTFRGPGLGARLRRGMSVASPPTLPPPTAHSAPEGPITRLASEGRSQALAGIEP

SEQ ID NO: 919944 - protein, 154 aa, Homo sapiens; identical to SEQ ID NO: 919943

SEQ ID NO: 919945 - protein, 153 aa, Homo sapiens
MKAERGEEAAEDKFDTSRGAKVGTHGVHWEHRGGTSCPVLRERGSEEASPGKVTSNPSPDREWGLGQQRDVWKCISGPWKVCEMGEHDSFMEPQLWFTCKVPSPNSSSGIHRCLKWKFLGRGLPSRWHFPVAERERNDVTVSASTVLGTPRML

SEQ ID NO: 919946 - protein, 134 aa, Homo sapiens
MPQLLPKQALGPALVAILQAEGKHGLGTGGRWAFLTSHFPIFLSTFSRPEAQERQVEKPGEAAALSCSRSLSTLHRPGHRHCTWAGERGLARNPRRSTSDQRAVLTSPLRIKNGTLSGFCERAQGGFEKGEARV

SEQ ID NO: 919947 - protein, 140 aa, Homo sapiens
MENCSAASTFLTDSLELELGTEWCKPPYFSCAVDNRGGGKHFSGESYLCSGALKRLILNLDPLPTNFEEDTLEIFGIQWVTETALVNSSRELFHLFRQQLYNLETLLQSSCDFAFSTVMAFITSPLGYTLAGARNSLHAG

SEQ ID NO: 919948 - protein, 156 aa, Homo sapiens
ELHGLLLYIGHLSELPSVNIGAFVNQNQIKLFPPSWHLLHLHLDIHWLVLEILYMLGEKLKQVVYGHQFMNLASDNLTNISLFEEHCETLLCDLISLSLNRYDKVRSSESLMSDQCPCLCIKELWVLLIHLLDHRSKWFVSESYGGQEVPNLRLAS

SEQ ID NO: 919949 - protein, 141 aa, Homo sapiens
MGTVFPQDLYVSLDNVKIQLPGLLSRAKSGKQARGHHITSTFSLEPADEPGLTTPATPQASVRRLCSGPALALEKRRRHSEPRGFQAAFSTRVRSPNTVSAALHARQWEGSPFPSITPGSSRADGVLCSIFKLEVPHSGFY

SEQ ID NO: 919950 - protein, 149 aa, Homo sapiens
WWRADFHVCALTGDVSVLLMPKKILHKIKSQALRQLTEHNSLHIYEVFHFIYNFLHLCNVMVFDPLCELSTPATISPTQQLSSQGFWDKFLSMRFNWRSMRGIPLGTMLKSSLTSIVASICSSWASAISRRRTCLMALTGPKRMRDTWS

SEQ ID NO: 919951 - protein, 377 aa, Homo sapiens
CLFHWDVPHSRTGKVVNMGTIRAHLLLIPLARGLHSPPGLRLPGRPAGAQSPPPEPAGRGYKTTATQGGCHQRGANSRLACGRDLGPLRKRRGGERGGETLRTWRRRRRRRRRNKEQEFTWANRLRGTCRAGGRPAEKTNRCFFFLLLLLLPHRNTHKHPTTGPSYRGGIAAGPGTNSPVGGGVPPCGLVVSEQNADRKCSCRNDSLRRRQTLTTTPSSPLHFRHRRSRRCRHLGSRPRPRRAAPGPSSREAAALLYARPLRAAVDVASIVDASERRLPCDTGGPALLCLYFPGGRQERGPSSVVVVSVGGTQARTGSQVADGGGWRPRWLSQVVVSFREPISGRPHRGRPRFDGDDARFKWCPCSRVDGWIVHLAF

SEQ ID NO: 919952 - protein, 377 aa, Homo sapiens; identical to SEQ ID NO: 919951

SEQ ID NO: 919953 - protein, 377 aa, Homo sapiens; identical to SEQ ID NO: 919951

SEQ ID NO: 919954 - protein, 175 aa, Homo sapiens
ECVGPNCNAFKCLISTPKRGCPCDTHVSLLCMCTPTFMTVRTSSYNLLNMWPLVSQWLGFMWSDSEPADTRTSQREVWQDWRFCVVCMYSKSFREKLQAMQTHELNSGRGAGDDLEGKDECLAQDGTDRKETWITLSLILTGCGIQKNSPNLQSQFSHLKNGVNISVCITLCCED

SEQ ID NO: 919955 - protein, 461 aa, Homo sapiens
MSGLDGVKRTTPLQTHSIIISDQVPSDQDAHQYLRLRDQSEATQVMAEPGEGGSETVALPPPPPSEEGGVPQDAAGRGGTPQIRVVGGRGHVAIKAGQEEGQPPAEGLAAASVVMAADRSLKKGVQGGEKALEICGAQRSASELTAGAEAEAEEVKTGKCATVSAAVAERESAEVVVKEGLAEKEVMEEQMEVEEQPPEGEEIEMAEEDRLEEEAREEEGPWPLHEALRMDPLEAIQLELDTVNAQADRAFQQLEHKFGRMRRHYLERRNYIIQNIPGFWMTAFRNHPQLSAMIRGQDAEMLRYITNLEVKELRHPRTGCKFKFFFRRNPYFRNKLIVKEYEVRSSGRVVSLSTPIIWRRGHEPQSFIRRNQDLICSFFTWFSDHSLPESDKIAEIIKEDLWPNPLQYYLLREGVRRARPPTAPFHYPKAVDHKECSPDQQYLHHLDLVRNADFQTPPMSY

SEQ ID NO: 919956 - protein, 163 aa, Homo sapiens
PCFPAAAGMRAADTSISGREIMYVAEMARNLYNSSWIIKDALVVLPKQILFNFPFNMILQVSFFDTENCISKCVLQVVYICKDIGLHPKSSRLSISVRKMKQKTDGKSRSLYFFSFTSPEKAFLANSHPYFPAPTSHLQFNSPSSFAVFIANTLQDFCQCILR

SEQ ID NO: 919957 - protein, 176 aa, Homo sapiens
SPTSKGKQKSDKRSCSYCMFRVAASMNAWRQSILLAHERASTAIPLAKGPVTNSTFYHYPSAAEKLTETSGCQHNLVPDKAKVITKACKTLHLLYPSYFPLCPLIPGLLGPQHVLTLLPRVFAGAGSSAWSMESSDPHTGDPSPPSSPDSNVTLSASTSLITTLIKIITSLSILLP

SEQ ID NO: 919958 - protein, 176 aa, Homo sapiens; identical to SEQ ID NO: 919957

SEQ ID NO: 919959 - protein, 246 aa, Homo sapiens
MKPGIVSTEKAFMLSVKPTFLNPLLLEIFLKIIQKTSSSQGGKSELVKQSLKKPKLPEGRFDAPEDSHLEKEPLEKFPDDVNPVTKEKGGPRGPEPTRYGDWERKGRWLAAPGCLGPLLLGILAAQAALAQVVPSVARPATPKGPSCKSWQHCPVMQVVSDAAHAPTPEGTSSEPWRPAHAAYSAGTQQELAMLSGNVGPELLQKVPNRAVHSGAAGAGPPWDLRTVELPVCNTSLEKLQAPDSNL

SEQ ID NO: 919960 - protein, 146 aa, Homo sapiens
WVELPKTMGTHFLHWHDLDVSHGVKGDHFGTLRLDCPNDFGLAWAFSPLFCFKGETLPPGDTTIIPLNWKLRLPPGHFGFLLPLSQQAKKGVTVLAGVIDPDYQDEISLPLHNREMAEERDLLVSTDWVILSTCFLQFSSTEVILC

SEQ ID NO: 919961 - protein, 101 aa, Homo sapiens
RDRAEQLGTASRAARAWAAVRPRRPKWLRKETYWYLQTGSSYLLVFYNSPLLRSSFADHSELPMRLQLQAEKRSHCSKAETMDICATSSWTLLVPSGPAWV

SEQ ID NO: 919962 - protein, 154 aa, Homo sapiens
SVPGRMTPLQTAQRCGSRELGSRGQGRGRGSRNRYWMGRVREAGALGAPELAEQWSGKGRGTRDCNRHFQALAPRAWSPQGHSQGSSRALKQKSLEPVSSPCLSRPRIPVSSSPAPSCSEHPGLLVKILVPGRSELRLLKWFILVNPGATFCGL

SEQ ID NO: 919963 - protein, 141 aa, Homo sapiens
SVPGRMTPLQTAQRCGSRELGSRGQGRGRGSRNRYWMGRVREAGALGAPELAEQWSGKGRGTRDCNRHFQALAPRAWSPQGHSQGSSRALKQKSLEPVSSPCLSRPRIPVSSSPAPSCIVSALNLGNKCFQHKRCEGIKTC

SEQ ID NO: 919964 - protein, 164 aa, Homo sapiens
MFLCHFLEAVLCLPPNSPPPGCTPPPSVPQLPGNSEWFRRCCSRAARPLAATQNNEQQQFPTPFMGLMRGHFDDLLVAQDRAVRQQKHRWQHLAGDKSQPSDNLREILQNVARLQGVSNMRKLGHLNNFTKQYLLDNLLQLLYRHLLLYLAILCYGDGFFPLTS

SEQ ID NO: 919965 - protein, 130 aa, Homo sapiens
MPLELQNQQVFIRDFKRGEGYKQGDGKGDPRVIAAPGVESTQSRLELCDSRDRHVKGCLSNTPEAMEWFCESEDRMARMRAPCGQKFLSALFNAVSLVPRTVSGTCSYSMADLSASKFSLCLKALRLKHK

SEQ ID NO: 919966 - protein, 171 aa, Homo sapiens
MRDDSIADPANHLFPSIITTTIHQGNQTKEDRCTKNENTKCKKEEIISDINLMICASIKMSREDNQEIMVFRKTREEGIQRIKEWATVQNVLEGPNKCRPGKDHLKALAVMGDLVTKADPEGIYFLWASKLSFGPHAGPDGSPLSTLGISFWQTSSQLLHTSCSLNRKHCK

SEQ ID NO: 919967 - protein, 616 aa, Homo sapiens
RKRDCPHSVTYAGRSVLKAGGPRPAGGADNPVREVSQEGHSGDGGGPKERQREGAVCCSFTSLGAGKDTRSSCHWAAPALSVCPVGDLVHSCMIVFAAGRDRLHRVLYHGLSVLLGGADMWHTVACVVVRAVAAGPAGIAMGSVGSLLERQDFSPEELRAALAGSRGSRQPDGLLRKGLGQREFLSYLHLPKKDSKSTKNTKRAPRNEPADYATLYYREHSRAGDFSKTSLPERGRFDKCRIRPSVFKPTAGNGKGFLSMQSLASHKGQKLWRSNGSLHTLACHPPLSPGPRASQARAQLLHALSLDEGGPEPEPSLSDSSSGGSFGRSPGTGPSPFSSSLGHLNHLGGSLDRASQGPKEAGPPAVLSCLPEPPPPYEFSCSSAEEMGAVLPETCEELKRGLGDEDGSNPFTQVLEERQRLWLAELKRLYVERLHEVTQKAERSERNLQLQLFMAQQEQRRLRKELRAQQGLAPEPRAPGTLPEADPSARPEEEARWESEDTTSGQRAQAQAQDAELVRLREAVRSLQEQAPREEAPGSERIRGQEQALRFEQERRTWQEEKERVLRYQREIQGGYMDMAAQGTSEKLSAESPPSLPLATLAVPGSPSGPTAPGNH

SEQ ID NO: 919968 - protein, 214 aa, Homo sapiens
APRNSWDIMYGAAGSLLEQVGIRPLWQESRSTPRASAPGLCTDSRGTCGAEGKWQHSASGQDWPSPLPCAQLLPMEERGEQDWLLEDTRDWACLRVTVLGLSLLPVNASQGVGPRRLQCFPSPKVTNCPAAGSVCRGRFSSQGGAGIKGVWGDRKRLSLWGLRASPLGRVGSLGCLRFPPPPLSLLPLDKALQRSPISFSPLLPLGCKFPEGLE

SEQ ID NO: 919969 - protein, 214 aa, Homo sapiens; identical to SEQ ID NO: 919968

SEQ ID NO: 919970 - protein, 1234 aa, Homo sapiens
MKEEVKGIPVRVALRCRPLVPKEISEGCQMCLSFVPGETQVVVGTDKSFTYDFVFDPCTEQEEVFNKAVAPLIKGIFKGYNATVLAYGQTGSGKTYSMGGAYTAEQENEPTVGIIPRVIQLLFKEIDKKSDFEFTLKVSYLEIYNEEILDLLCPSREKAQINIREDPKEGIKIVGLTEKTVLVALDTVSCLEQGNNSRTVASTAMNSQSSRSHAIFTISIEQRKKSDKNCSFRSKLHLVDLAGSERQKKTKAEGDRLKEGININRGLLCLGNVISALGDDKKGSFVPYRDSKLTRLLQDSLGGNSHTLMIACVSPADSNLEETLSTLRYADRARKIKNKPIVNIDPHTAELNHLKQQVQQLQVLLLQAHGGTLPGSINAEPSENLQSLMEKNQSLVEENEKLSRCLSKAAGQTAQMLERIILTEQVNEKLNAKLEELRQHVACKLDLQKLVETLEDQELKENVEIICNLQQLITQLSDETVACTAAAIDTAVEEEAQVETSPETSRSSDAFTTQHALHQAQMSKEVVELNNALALKEALVRKMTQNDNQLQPIQFQYQDNIKNLELEVINLQKEKEELVRELQTAKKNVNQAKLSEHRHKLLQELEGQIADLKKKLNEQSKLLKLKESTERTVSKLNQEIWMMKNQRVQLMRQMKEDAEKFRQWKQKKDKEVIQLKERDRKRQYELLKLERNFQKQSSVLRRKTEEAAAANKRLKDALQKQREVTDKRKETQSHGKEGIAARVRNWLGNEIEVMVSTEEAKRHLNDLLEDRKILAQDVVQLKEKKESRENPPPKLRKCTFSLSEVHGQVLESEDCITKQIESLETEMELRSAQIADLQQKLLDAESEDRPKQCWENIATILEAKCALKYLIGELVSSKIHVTKLENSLRQSKASCADMQKMLFEEQNHFSEIETELQAELVRMEQQHQEKVLYLVSQLQESQMAEKQLEKSASEKEQQLVSTLQCQDEELEKMREVCEQNQQLLQENEIIKQKLILLQVASRQKHLPNDTLLSPDSSFEYIPPKPKPSRVKEKFLEQSMDIEDLKYCSEHSVNEHEDGDGDGDSDEGDDEEWKPTKLVKVSRKNIQGCSCKGWCGNKQCGCRKQKSDCGVDCSCDPTKCRNRQQGKDSLGTVEQTQDSEGSFKLEDPTEVTPGLSFFNPVCATPNSKILKEMCDMEQVLSKKTAPAPSPFDLPESKHGATEYQQNKPPGKKKKRALASNTSFFSGCSPIEEEAH

SEQ ID NO: 919971 - protein, 134 aa, Homo sapiens
MGQKPGPFLSRKYHEAGKAGTAEGGGALLGYQDSLSLCLAFEGLETLVETQRAGFTYKDHVDQVCLDQVCLKRCSAWVQNVTAVFASPLHWQRPTLFMTSKATVALQLQSQQQQEFNEGRLCARYYNLMTKSRN

SEQ ID NO: 919972 - protein, 186 aa, Homo sapiens
MGAYKYIQELWRKKQSDVMRFLLRVRCWQYRQLSALHRAPRPTRPDKARRLGYKAKQGYVIYRIRVRRGGRNQLKFARSLQSVAEERAGRHCGALRVLNSYWVGEDSTYKFFEVILIDPFHKAIRRNPDTQWITKPVHKHREMRGLTSAGRKSRGLGKGHKFHHTIGGSRRAAWRRRNTLQLHRYR

SEQ ID NO: 919973 - protein, 164 aa, Homo sapiens
MGAYKYIQELWRKKQSDVMRFLLRVRCWQYRQLSALHRAPRPTRPDKARRLGYKAKQGYVIYRIRVRRGGRKRPVPKGATYGKPVHHGVNQLKFARSLQSVAEERAGRHCGALRVLNSYWVGEDSTYKFFEVILIDPFHKAIRRNPDTQWITKPVHASPCRQRP

SEQ ID NO: 919974 - protein, 269 aa, Homo sapiens
  misc_feature (4)..(4): Xaa can be any naturally occurring amino acid
MGTXSLTVLSTDGQTSMLLRATILSTRQKVKNHLHSHSSLAQPLKTDEARAHGPRLPAPTAITASEPRVTLLVAGKLISFLIDSGATYSALPEFSGPTHPSQVSVVGVDGLISCPLATRPLTCYVIYRIRVRRGGRKRPVPKGATYGKPVHHGVNQLKFARSLQSVAEERAGRHCGALRVLNSYWVGEDSTYKFFEVILIDPFHKAIRRNPDTQWITKPVHKHREMRGLTSAGRKSRGLGKGHKFHHTIGGSRRAAWRRRNTLQLHRYR

SEQ ID NO: 919975 - protein, 204 aa, Homo sapiens [sequence omitted]

SEQ ID NO: 919976 - protein, 63 aa, Homo sapiens
MGAYKYIQELWRKKQSDVMRFLLRVRCWQYRQLSALHRAPRPTRPDKARRLGYKAKQGYVIYR

SEQ ID NO: 919977 - protein, 204 aa, Homo sapiens [sequence omitted]

SEQ ID NO: 919978 - protein, 157 aa, Homo sapiens
MGAYKYIQELWRKKQSDVMRFLLRVRCWQYRQLSALHRAPRPTRPDKARRLGYKAKQGYVIYRIRVRRGGRKRPVPKGATYGKPVHHGVNQLKFARSLQSVAEERAGRHCGALRVLNSYWVGEDSTYKFFEVILIDPFHKAIRRNPDTQNAPVCPPE

SEQ ID NO: 919979 - protein, 150 aa, Homo sapiens
MAHCSLNVLERHGNMINQLHNWALGNIIRESVFKVCTEAVAVRILCLVVSLQSRIDQHPKFGLNVKADEEPFTHQVSRHQPRANLTSRLEGLTAPKSCYPQRSSFVLMKQLLVGSQRVSRQELVAKETNHAIRGLEYSAPPHDFQRQRKG

SEQ ID NO: 919980 - protein, 125 aa, Homo sapiens
ENKDLLLALRLPPALGDTCTMAGYARLKNVLLALQTRLQPLQEGDSRQDPASQKRLLVESLFRDLDADGNGHLSSSELAQHVLKKQDLDEDLLGCSPGDLLRFDDYNSDSSLTLREFYMAFQESW

SEQ ID NO: 919981 - protein, 924 aa, Homo sapiens
RWHSSGQRRLRQLEPQQPPASPGPADSPRNQPKDAGRGRRRQPRGAPVHSPSQLFSANLGHSRSSPRPVIRLSQEGQPGTAFGVHLTAAREPSRAGLRMGLACDPVNPCSEARMWVWGSHMADGAQNALKSQEEKGFSSHNELLASCGKKFCSRGSRCVLSRKTGEPECQCLEACRPSYVPVCGSDGRFYENHCKLHRAACLLGKRITVIHSKDCFLKGDTCTMAGYARLKNVLLALQTRLQPLQEGDSRQDPASQKRLLVESLFRDLDADGNGHLSSSELAQHVLKKQDLDEDLLGCSPGDLLRFDDYNSDSSLTLREFYMAFQVVQLSLAPEDRVSVTTVTVGLSTVLTCAVHGDLRPPIIWKRNGLTLNFLDLEDINDFGEDDSLYITKVTTIHMGNYTCHASGHEQLFQTHVLQVNVPPVIRVYPESQAQEPGVAASLRCHAEGIPMPRITWLKNGVDVSTQMSKQLSLLANGSELHISSVRYEDTGAYTCIAKNEVGVDEDISSLFIEDSARKTLANILWREEGLSVGNMFYVFSDDGIIVIHPVDCEIQRHLKPTEKIFMSYEEICPQREKNATQPCQWVSAVNVRNRYIYVAQPALSRVLVVDIQAQKVLQSIGVDPLPAKLSYDKSHDQVWVLSWGDVHKSRPSLQVITEASTGQSQHLIRTPFAGVDDFFIPPTNLIINHIRFGFIFNKSDPAVHKVDLETMMPLKTIGLHHHGCVPQAMAHTHLGGYFFIQCRQDSPASAARQLLVDSVTDSVLGPNGDVTGTPHTSPDGRFIVSAAADSPWLHVQEITVRGEIQTLYDLQINSGISDLAFQRSFTESNQYNIYAALHTEPDLLFLELSTGKVGMLKNLKEPPAGPAQPWGGTHRIMRDSGLFGQYLLTPARESLFLINGRQNTLRCEVSGIKGGTTVVWVGEV

SEQ ID NO: 919982 - protein, 605 aa, Homo sapiens
MFNSPQVVQLSLAPEDRVSVTTVTVGLSTVLTCAVHGDLRPPIIWKRNGLTLNFLDLEDINDFGEDDSLYITKVTTIHMGNYTCHASGHEQLFQTHVLQVNVPPVIRVYPESQAQEPGVAASLRCHAEGIPMPRITWLKNGVDVSTQMSKQLSLLANGSELHISSVRYEDTGAYTCIAKNEVGVDEDISSLFIEDSARKTLANILWREEGLSVGNMFYVFSDDGIIVIHPVDCEIQRHLKPTEKIFMSYEEICPQREKNATQPCQWVSAVNVRNRYIYVAQPALSRVLVVDIQAQKVLQSIGVDPLPAKLSYDKSHDQVWVLSWGDVHKSRPSLQVITEASTGQSQHLIRTPFAGVDDFFIPPTNLIINHIRFGFIFNKSDPAVHKVDLETMMPLKTIGLHHHGCVPQAMAHTHLGGYFFIQCRQDSPASAARQLLVDSVTDSVLGPNGDVTGTPHTSPDGRFIVSAAADSPWLHVQEITVRGEIQTLYDLQINSGISDLAFQRSFTESNQYNIYAALHTEPDLLFLELSTGKVGMLKNLKEPPAGPAQPWGGTHRIMRDSGLFGQYLLTPARESLFLINGRQNTLRCEVSGIKGGTTVVWVGEV

SEQ ID NO: 919983 - protein, 605 aa, Homo sapiens; identical to SEQ ID NO: 919982

SEQ ID NO: 919984 - protein, 605 aa, Homo sapiens; identical to SEQ ID NO: 919982

SEQ ID NO: 919985 - protein, 160 aa, Homo sapiens
LNLMTSSKPLVIYNIVRGSGISTVIFWRPLFCLLHSSVNLHDEHAGISCSNNIDHRERKGPWKSIGPDLSFLIRSQFYLKVNLKGYTGDFRSLLASNWALRLLAILPVPIRLANAFSKRPFSKRLLRPLEEGGAKREMLPSDSLWRISNATTGGWKQFSL

SEQ ID NO: 919986 - protein, 160 aa, Homo sapiens; identical to SEQ ID NO: 919985

SEQ ID NO: 919987 - protein, 160 aa, Homo sapiens; identical to SEQ ID NO: 919985

SEQ ID NO: 919988 - protein, 160 aa, Homo sapiens; identical to SEQ ID NO: 919985

SEQ ID NO: 919989 - protein, 167 aa, Homo sapiens
MFFRTECRLPSKTPKTFSSLLLEGPNTEDSLKNQFIHSSLVDLKQSLSWRNLLSYRDMCQLSKTVTWPKHNKTVIFLRLREPQPKAPMGAHTAKEELSQPGERTAGREDTHTDQPRLHTPHRALGSWPCPLLTGLEPLTLQGQTCPGQLPPLGTVGQRRAWGLLGIC

SEQ ID NO: 919990 - protein, 167 aa, Homo sapiens; identical to SEQ ID NO: 919989

SEQ ID NO: 919991 - protein, 322 aa, Homo sapiens
NLEEAVEKEYMKQLVKLTRLLFNLSEVKSIFSKAQVEYLSISEDPKKALVRFFEAVGVTYGNVQTLSDKSAMVTKSLEYLGEVLKYIKPYLGKKVFSAGLQLTYGMMGILVKSWAQIFATSKAQKLLFRIIDCLLLPHAVLQQEKELPAPMLSAIQKSLPLYLQGMCIVCCQSQNPNAYLNQLLGNVIEQYIGRFLPASPYVSDLGQHPVLLALRNTATIPPISSLKKCIVQVIRKSYLEYKGSSPPPRLASILAFILQLFKETNTDIYEVELLLPGILKCLVLVSEPQVKRLATENLQYMVKACQVGSEEEPSSQLTSVFR

SEQ ID NO: 919992 - protein, 404 aa, Homo sapiens
NLEEAVEKEYMKQLVKLTRLLFNLSEVKSIFSKAQVEYLSISEDPKKALVRFFEAVGVTYGNVQTLSDKSAMVTKSLEYLGEVLKYIKPYLGKKVFSAGLQLTYGMMGILVKSWAQIFATSKAQKLLFRIIDCLLLPHAVLQQEKELPAPMLSAIQKSLPLYLQGMCIVCCQSQNPNAYLNQLLGNVIEQYIGRFLPASPYVSDLGQHPVLLALRNTATIPPISSLKKCIVQVIRKSYLEYKGSSPPPRLASILAFILQLFKETNTDIYEVELLLPGILKCLVLVSEPQVKRLATENLQYMVKACQVGSEEEPSSQLTSVFRQFIQDYGMRYYYQVYSILETVATLDQQVVIHLISTLTQSLKDSEQKWGLGRNIAQREAYSKLLSHLGQMGQDEMQRLENDNT

SEQ ID NO: 919993 - protein, 623 aa, Homo sapiens
MEELTEVGLQNFFSLFLLLAAVAEVEDVASHVLDLLNFLKPAFVTSQRALIWKGHMAFLLMYAQKNLDIGVLAEKFSCAFREKAKEFLVSKNEEMVQRQTIWTLLSIYIDGVQEVFETSYCLYPSHEKLLNDGFSMLLRACRESELRTVLSFLQAVLARIRSMHQQLCQELQRDNVDLFVQSSLSAKERHLAAVASALWRHFFSFLKSQRMSQVVPFSQLADAAAEKEYMKQLVKLTRLLFNLSEVKSIFSKAQVEYLSISEDPKKALVRFFEAVGVTYGNVQTLSDKSAMVTKSLEYLGEVLKYIKPYLGKKVFSAGLQLTYGMMGILVKSWAQIFATSKAQKLLFRIIDCLLLPHAVLQQEKELPAPMLSAIQKSLPLYLQGMCIVCCQSQNPNAYLNQLLGNVIEQYIGRFLPASPYVSDLGQHPVLLALRNTATIPPISSLKKCIVQVIRKSYLEYKGSSPPPRLASILAFILQLFKETNTDIYEVELLLPGILKCLVLVSEPQVKRLATENLQYMVKACQVGSEEEPSSQLTSVFRQFIQDYGMRYYYQVYSILETVATLDQQVVIHLISTLTQSLKDSEQKWGLGRNIAQREAYSKLLSHLGQMGQDEMQRLENDNT

SEQ ID NO: 919994 - protein, 182 aa, Homo sapiens
MSSTFLDSTYDARGSPSLHTLINDCLPANSARGSPSLHTLNNDCLPANSARGSPSLHTLNNDCLPANSARGSPSLHTLINDCLPANSPGLAPMEVRDFVAMEGPWANPTPFASGDADREQPRKPGPEPAPVASRPFLYSGSHLRGQQLCLELGDPNYHCASGWPLRLASTPQTPAAPPSPWI

SEQ ID NO: 919995 - protein, 539 aa, Homo sapiens
LWQTCTTMTMKNLHDLYLFHVAQLQIAELTKSLLNGGMLASCHVGFPYCYTMLLIAFIWKESSPSASHQTCHGTKGVFELLSGWRRTKENLPFKDRIADAYSDVMVTYTMTSSLYFITFGMGASPFTNIEAVKVFCQNMCVSILLNYFYIFSFFGSCLVFAGQLEQNRYHSIFCCKIPSAEYLDRKPVWFQTVMSDGHQQTSHHETNPYQHHFIQHFLREHYNEWITNIYVKPFVVILYLIYASFSFMGCLQISDGANIINLLASDSPSVSYAMVQQKYFSNYSPVIGFYVYEPLEYWNSSVQDDLRRLCSGFTAVSWVEQYYQFLKVSNVSANNKSDFISVLQSSFLKKPEFQHFRNDIIFSKAGDESNIIASRLYLVARTSRDKQKEITEVLEKLRPLSLSKSIRFIVFNPSFVFMDHYSLSVTVPVLIAGFGVLLVLILTFFLVIHPLGNFWLILSVTSIELGVLGLMTLWNVDMDCISILCLIYTLNFAIDHCAPLLFTFVLATEHTRTQCIKSSLQDHGTAILQNVTSFLIGVH

SEQ ID NO: 919996 - protein, 140 aa, Homo sapiens
MKIFEPERVSLAGLGETNFCVMERARDNSCKDLDSANNLNKLGKGSLAFDDIMAHQHLDYNFIRPKKKRAQHDFCDLEEEDEKKEKENFLAMTTVVIMTITVYKVMALMMLMTKYTFTNSCHALNNSRNYNAKNDFPSLY

SEQ ID NO: 919997 - protein, 140 aa, Homo sapiens; identical to SEQ ID NO: 919996

SEQ ID NO: 919998 - protein, 161 aa, Homo sapiens
AAIGDVLVKMVVFGEEVDLAYQEAMLNMATINRTAAGLMHKFNAHVATDITGFGILGHSQNLVKQQRNDVSFVICNLPVIAKMAAISKARGQVMEVGKSKIKVLADSVPHEDLHPEIWVKEPSDDSSDQDFEQPQLMLSGAETNQPQWALTKSQIHNAQSH

SEQ ID NO: 919999 - protein, 148 aa, Homo sapiens
ELLLVLCVGLKLQLPPDIPAMSLLRVLTSLSRLTPMLSMKIKRTFHEVSPESSTGEEVPLRNENQSQMERSLFVETPFPSVYLDLILKVTSHFIWAGGKSTKPDVERHCRMSKKQPHCIPKTWESRSRRYDDTIYSQDISSCVVFNEY

SEQ ID NO: 920000 - protein, 156 aa, Homo sapiens
MDLQTPLHKNSLSALDNMIDDGGRQTGSWAERGGAVPCRATGEELLKALADYLLHRCALDDALGLMSHCIVILKICHTLREKLVAMTMGSEAEKKTSTTVSSIIVVAKWIIPRVDDVVKSVYHLLSTKLLDAPSAESREEKQLDIQEKQLDFKETT

SEQ ID NO: 920001 - protein, 134 aa, Homo sapiens
MDLQTPLHKNSLSALDNMIDDGGRQTGSWAERGGAVPCRATGEELLKALADYLLHRCALDDALGLMSHCIVILKICHTLREKLVAMTMGSEAEKKTSTTVSSIIVVAKWIIPRVDDVVKSVYHLLSTKLLDMKL

SEQ ID NO: 920002 - protein, 277 aa, Homo sapiens
EAAGAMGRVRNRATAQRRRRKRPGDPPAACAAIAVTGASRAQCPRVQVGVGSHAAAKRWLGRWRRKRRWRRVRKAGPRDLLPSAPTPYPPGPAPSPKDLDLGAQRERWETFRKLRGLSCEGAAKVLLDTFEYPGLVHHTGGCHCGAVRFAVWAPADLRVVDCSCRLCRKKQHRHFLVPASRFTLLQGAESIVTYRSNTHPALHSFCSRCGVQSFHAAVSDPRVYGVAPHCLDEGTVRSVVIEEVGGGDPGEEAAEEHKAIHKTSSQSAPACPREQEQ

SEQ ID NO: 920003 - protein, 460 aa, Homo sapiens
TSGCQNLPLTRRRPTGSCVCLGRGGPGGGGLRAGSRHPAPAAMHPRRPDGFDGLGYRGGARDEQGFGGAFPARSFSTGSDLGHWVTTPPDIPGSRNLHWGEKSPPYGVPTTSTPYEGPTEEPFSSGGGGSVQGQSSEQLNRFAGFGIGLASLFTENVLAHPCIVLRRQCQVNYHAQHYHLTPFTVINIMYSFNKTQGPRALWKGMGSTFIVQGVTLGAEGIISEFTPLPREVLHKWSPKQIGEHLLLKSLTYVVAMPFYSASLIETVQSEIIRDNTGILECVKEGIGRVIGMGVPHSKRLLPLLSLIFPTVLHGVLHYIISSVIQKFVLLILKRKTYNSHLAESTSPVQSMLDAYFPELIANFAASLCSDVILYPLETVLHRLHIQGTRTIIDNTDLGYEVLPINTQYEGMRDCINTIRQEEGVFGFYKGFGAVIIQYTLHAAVLQITKIIYSTLLQNNI

SEQ ID NO: 920004 - protein, 443 aa, Homo sapiens
TSGCQNLPLTRRRPTGSCVCLGRGGPGGGGLRAGSRHPAPAAMHPRRPDGFDGLGYRGGARDEQGFGGAFPARSFSTGSDLGHWVTTPPDIPGSRNLHWGEKSPPYGVPTTSTPYEGPTEEPFSSGGGGSVQGQSSEQLNRFAGFGIGLASLFTENVLAHPCIVLRRQCQVNYHAQHYHLTPFTVINIMYSFNKTQGPRALWKGMGSTFIVQGVTLGAEGIISEFTPLPREVLHKWSPKQIGEHLLLKSLTYVVAMPFYSASLIETVQSEIIRDNTGILECGLLPLLSLIFPTVLHGVLHYIISSVIQKFVLLILKRKTYNSHLAESTSPVQSMLDAYFPELIANFAASLCSDVILYPLETVLHRLHIQGTRTIIDNTDLGYEVLPINTQYEGMRDCINTIRQEEGVFGFYKGFGAVIIQYTLHAAVLQITKIIYSTLLQNNI

SEQ ID NO: 920005 - protein, 327 aa, Homo sapiens
MKTEQLNRFAGFGIGLASLFTENVLAHPCIVLRRQCQVNYHAQHYHLTPFTVINIMYSFNKTQGPRALWKGMGSTFIVQGVTLGAEGIISEFTPLPREVLHKWSPKQIGEHLLLKSLTYVVAMPFYSASLIETVQSEIIRDNTGILECVKEGIGRVIGMGVPHSKRLLPLLSLIFPTVLHGVLHYIISSVIQKFVLLILKRKTYNSHLAESTSPVQSMLDAYFPELIANFAASLCSDVILYPLETVLHRLHIQGTRTIIDNTDLGYEVLPINTQYEGMRDCINTIRQEEGVFGFYKGFGAVIIQYTLHAAVLQITKIIYSTLLQNNI

SEQ ID NO: 920006 - protein, 444 aa, Homo sapiens
TSGCQNLPLTRRRPTGSCVCLGRGGPGGGGLRAGSRHPAPAAMHPRRPDGFDGLGYRGGARDEQGFGGAFPARSFSTGSDLGHWVTTPPDIPGSRNLHWGEKSPPYGVPTTSTPYEGPTEEPFSSGGGGSVQGQSSEQLNRFAGFGIGLASLFTENVLAHPCIVLRRQCQVNYHAQHYHLTPFTVINIMYSFNKTQGVTLGAEGIISEFTPLPREVLHKWSPKQIGEHLLLKSLTYVVAMPFYSASLIETVQSEIIRDNTGILECVKEGIGRVIGMGVPHSKRLLPLLSLIFPTVLHGVLHYIISSVIQKFVLLILKRKTYNSHLAESTSPVQSMLDAYFPELIANFAASLCSDVILYPLETVLHRLHIQGTRTIIDNTDLGYEVLPINTQYEGMRDCINTIRQEEGVFGFYKGFGAVIIQYTLHAAVLQITKIIYSTLLQNNI

SEQ ID NO: 920007 - protein, 460 aa, Homo sapiens; identical to SEQ ID NO: 920003

SEQ ID NO: 920008 - protein, 110 aa, Homo sapiens [sequence omitted]

SEQ ID NO: 920009 - protein, 460 aa, Homo sapiens; identical to SEQ ID NO: 920003

SEQ ID NO: 920010 - protein, 233 aa, Homo sapiens
TSGCQNLPLTRRRPTGSCVCLGRGGPGGGGLRAGSRHPAPAAMHPRRPDGFDGLGYRGGARDEQGFGGAFPARSFSTGSDLGHWVTTPPDIPGSRNLHWGEKSPPYGVPTTSTPYEGPTEEPFSSGGGGSVQGQSSEQLNRFAGFGIGLASLFTENVLAHPCIVLRRQCQVNYHAQHYHLTPFTVINIMYSFNKTQGPRALWKGMGSTFIVQGVTLGAEGIISEFTPLPRYHF

SEQ ID NO: 920011 - protein, 460 aa, Homo sapiens; identical to SEQ ID NO: 920003

SEQ ID NO: 920012 - protein, 460 aa, Homo sapiens; identical to SEQ ID NO: 920003

SEQ ID NO: 920013 - protein, 391 aa, Homo sapiens
TSGCQNLPLTRRRPTGSCVCLGRGGPGGGGLRAGSRHPAPAAMHPRRPDGFDGLGYRGGARDEQGFGGAFPARSFSTGSDLGHWVTTPPDIPGSRNLHWGEKSPPYGVPTTSTPYEGPTEEPFSSGGGGSVQGQSSGEKHGDRHRDEGLLGPRLAACRPRKRRRGSRLLFLLILSRATPFALLCSTAMCQQLPAEEQMWSEIIRDNTGILECVKEGIGRVIGMGVPHSKRLLPLLSLIFPTVLHGVLHYIISSVIQKFVLLILKRKTYNSHLAESTSPVQSMLDAYFPELIANFAASLCSDVILYPLETVLHRLHIQGTRTIIDNTDLGYEVLPINTQYEGMRDCINTIRQEEGVFGFYKGFGAVIIQYTLHAAVLQITKIIYSTLLQNNI

SEQ ID NO: 920014 - protein, 460 aa, Homo sapiens; identical to SEQ ID NO: 920003

SEQ ID NO: 920015 - protein, 460 aa, Homo sapiens; identical to SEQ ID NO: 920003

SEQ ID NO: 920016 - protein, 271 aa, Homo sapiens
MYWHILALFYAANVRLITMLSITISLHLQSSILCTVSTKLREVLHKWSPKQIGEHLLLKSLTYVVAMPFYSASLIETVQSEIIRDNTGILECVKEGIGRVIGMGVPHSKRLLPLLSLIFPTVLHGVLHYIISSVIQKFVLLILKRKTYNSHLAESTSPVQSMLDAYFPELIANFAASLCSDVILYPLETVLHRLHIQGTRTIIDNTDLGYEVLPINTQYEGMRDCINTIRQEEGVFGFYKGFGAVIIQYTLHAAVLQITKIIYSTLLQNNI

SEQ ID NO: 920017 - protein, 374 aa, Homo sapiens
TSGCQNLPLTRRRPTGSCVCLGRGGPGGGGLRAGSRHPAPAAMHPRRPDGFDGLGYRGGARDEQGFGGAFPARSFSTGSDLGHWVTTPPDIPGSRNLHWGEKSPPYGVPTTSTPYEGPTEEPFSSGGGGSVQGQSSEQLNRFAGFGIGLASLFTENVLAHPCIVLRRQCQVNYHAQHYHLTPFTVINIMYSFNKTQGPRALWKGMGSTFIVQGVTLGAEGIISEFTPLPREVLHKWSPKQIGEHLLLKSLTYVVAMPFYSASLIETVQSEIIRDNTGILECVKEGIGRVIGMGVPHSKRLLPLLSLIFPTVLHGVLHYIISSVIQKFVLLILKRKTYNSHLAESTSPVQSFALNFVFQNRCTWREKQLFLSPFI

SEQ ID NO: 920018 - protein, 776 aa, Homo sapiens
MNCAFVILRAIVPSQPESKVIPVVKEMQLFLHYYCHMFKGKELLLCDPVHTLPNPFTQPMAVLNNFMRYSIDYIKLKKGHRSPCKNLLKKKKQAKQNAETASAVATRTHTGKEDNNTVVLEPDKCNIAVEEEYMTDEKKKRKSNQLKEIRRTELKRYYSIVELLMVLCCQPPEPPSDALMIEIDGGESWSFMGLSTWPSAITRDLKSERGRQERARETTQAALLALRVKAGPWLKLPADAELARYADANSPSSTLRLSSSSPGATVSPSSSDAEYDKLPDADLARKALKPIERVLSSTSEEDEPGVVKFLKMNCRYFTDGKGVVGGVMIVTPNNIMFDPHKSDPLVIENGCEEYGLICPMEEVVSIALYNDISHMKIKDALPSPGEWEDLASEKDINPFSKFKSINKEKRQQNGEKIMTSDSRPIVPLEKSTGHTPTKPSGSSVSEKLKKLDSSRETSHGSPTVTKLSKEPSDTSSAFESTAKENFLGEDDDFVDLEELSSQTGGGMHKKDTLKECLSLDPEERKKAESQINNSAVEMQVQSALAFLGTENDVELKGALDLETCEKQDIMPEVDKQSGSPESRVENTLNIHEDLDKVKLIEYYLTKNKEGPQVSENLQKTELSDGKSIEPGGIDITLSSSLSQAGDPITEGNKEPDKTWVKKGEPLPVKLNSSTEANVIKEALDSSLESTLDNSCQGAQMDNKSEVQLWLLKRIQVPIEDILPSKEEKSKTPPMFLCIKVGKPMRKSFATHTAAMVQQYGKRRKQPEYWFAVPRER

SEQ ID NO: 920019 - protein, 246 aa, Homo sapiens
MAMERFLVSTKSSLSASHSQREGKRHGSGAATPLKNVRSSTPSLQVRDKQKETQQVIVAQGVTAIQAISVAQIVSVTQAITASKIISATQVISFAQHASVTELVSVTQGVSATQVVTISQDISTTQVVTVSQVVQSQQVVTVSQGCLVTQNEAMVAMVDQNAWPCLYKLHFFMCPHHITLSVSVSGTFMLFQKCFIPFLKCFQFGHIPNVFLPNFFLFNLSTFQRKFEPSVSVSLASLFKILCGRN

SEQ ID NO: 920020 - protein, 357 aa, Homo sapiens
  misc_feature (23)..(23): Xaa can be any naturally occurring amino acid
LVREKLDLTCAGPQQLGHSPLQXMKGEAGHMLHNEKSKQEGHIWGSMRRTAFILGSGLLSFVAFWNSVTWHLQRFWGASGYFWQAQWERLLTTFEGKEWILFFIGAIQVPCLFFWSFNGLLLVVDTTGKPNFISRYRIQVGKNEPVDPVKLRQSIRTVLFNQCMISFPMVVFLYPFLKWWRDPCRRELPTFHWFLLELAIFTLIEEVLFYYSHRSGSRKFASGTTLGLSVYPTKSLHLPGPCLQSSLLLQVSNMLPVIVGPLVMGSHLSSITMWFSLALIITTISHCGYHLPFLPSPEFHDYHHLKFNQCYGVLGVLDHLHGTDTMFKQTKAYERHVLLLGFTPLSESIPDSPKRME

SEQ ID NO: 920021 - protein, 343 aa, Homo sapiens
LLELLFEFWMKGEAGHMLHNEKSKQEGHIWGSMRRTAFILGSGLLSFVAFWNSVTWHLQRFWGASGYFWQAQWERLLTTFEGKEWILFFIGAIQVPCLFFWSFNGLLLVVDTTGKPNFISRYRIQVGKNEPVDPVKLRQSIRTVLFNQCMISFPMVVFLYPFLKWWRDPCRRELPTFHWFLLELAIFTLIEEVLFYYSHRSGSRKFASGTTLGLSVYPTKSLHLPGPCLQSSLLLQVSNMLPVIVGPLVMGSHLSSITMWFSLALIITTISHCGYHLPFLPSPEFHDYHHLKFNQCYGVLGVLDHLHGTDTMFKQTKAYERHVLLLGFTPLSESIPDSPKRME

SEQ ID NO: 920022 - protein, 187 aa, Homo sapiens
LCVSVAKVTMADRAAAERACKDPNPIIDGRKANVNLAYLGAKPRIMQPGFAFGVQQLHPALIQRPFGIPAHYVYPQAFVQPGVVIPHVQPTAAAASTTPYIDYTGAAYAQYSAAAAAAAAAAAYDQYPYAASPAAAGYVTAGGYGYAVQQPITAAAPGTAAAAAAAAAAAAAFGQYQPQQLQTDRMQ

SEQ ID NO: 920023 - protein, 139 aa, Homo sapiens
MTSFLLALGNIYKSGYLPTMSIRRLLCSREWSFHTSSRQQLPPPPPLTLITLELHTHNTQQLLLLPPPLLPMTSTPMQPLQLLQDMLLLGAMATQSSSQSPQRHLGQLPPPLQQLLPLQHLASTSLSSCRQTECNRPAI

SEQ ID NO: 920024 - protein, 158 aa, Homo sapiens
MFKMVNLHYVYLPQLNFFKLKRQKSIKVIQKTSSRASSAVSSFQSQYIHSLRQERQTDSNSWTVPDLWSLAHPTEDSQGHGMQRITAHLPWHWEEGVVACMPIFCHAWFMVYRWTHWMFQWTQPAFKKHVDLEKALPPTCQRMFMLRTAGKKEMAYID

SEQ ID NO: 920025 - protein, 137 aa, Homo sapiens
MLTIKQRQSGPSGGIPEEDIVTIGDDSSMHTIVPEDLMGQDVEVKDSDIDDPDPVGKCYATLNFVNIIPCFSLQLYHGKCISTSFILNAIYSVYRDSSIIYFQGTANISSTIAISVYTSPSPANASIFCLKAFSGHQ

SEQ ID NO: 920026 - protein, 137 aa, Homo sapiens; identical to SEQ ID NO: 920025

SEQ ID NO: 920027 - protein, 120 aa, Homo sapiens
MAGRDTWLFMRNIPLQSDAKLDFFGTLLVWMKMNLITANSWFEFEAGFHCDFLFFEPCSGAKLSCSVEIVRQKEAEIQKGAGKIDHGNEEDQHSLPCLQCSYSTPVSFLMPRLFYPSLTF

SEQ ID NO: 920028 - protein, 166 aa, Homo sapiens
FIFRGKNAVIMLINLELSLRKLKKFEIEYNVEQRSLKNTGPWGLLSQWVPWILPFLGPPAAIILRLFFGPCIFNLLVKFVSSRIEAVKLLIVLQKEPQMQSMTKIYHRPLDRPASPCTDVNDIESTPPRKFQLHNPYYAPIQQEAVRAVVGQPPQQHLGFPVERGD

SEQ ID NO: 920029 - protein, 144 aa, Homo sapiens
MFEVSPPSDGMSCLLPGPWGLSVRQAGKDTSFRKALLSPDPSTTTETLWLGVSSPRNLKAKEHSCASENQENFGRRRRTSFLREWLSPPLQMVPGKHLLSPPGSGLWNGQEEVQDVGHRKSCDWETFETQVLLPCHTSSRVSIL

SEQ ID NO: 920030 - protein, 151 aa, Homo sapiens
CVFQRMPLIMFSLDTSQAPDKIKCLLTLFPILILKKQIIYSLKHRIFIRICQLLLEHNRLIINGSEPDAFAEALRKRTGSSTELLRKEQLRGGVSRFAHLHLSDPLHRKARKQGSQESSALLPMTLPAPDDTYWCSLKHSVRKLFGVKHVY

SEQ ID NO: 920031 - protein, 346 aa, Homo sapiens
MLFKQQAWLRQKLLVLGSLAVGSLLYLVARVGSLDRLQPICPIEGRLGGARTQAEFPLRALQFKRGLLHEFRKGNASKEQVRLHDLVQQLPKAIIIGVRKGGTRALLEMLNLHPAVVKASQEIHFFDNDENYGKGIEWYRKKMPFSYPQQITIEKSPAYFITEEVPERIYKMNSSIKLLIIVREPTTRAISDYTQVLEGKERKNKTYYKFEKLAIDPNTCEVNTKYKAVRTSIYTKHLERWLKYFPIEQFHVVDGDRLITEPLPELQLVEKFLNLPPRISQYNLYFNATRGFYCLRFNIIFNKCLAGSKGRIHPEVDPSVITKLRKFFHPFNQKFYQITGRTLNWP

SEQ ID NO: 920032 - protein, 136 aa, Homo sapiens
MLLNILWDDIPSTTKNCLAHNVNSSKVEKPCTKTIITLYPWGQRCFDPRTEAINQKQAKWKTGVLVWINHPPLIEISNQTENTHNQPDQNIGFSSGEAGLESMSWVQMEKGFSYPSHLHPPMASSWRSAGLPPVVL

SEQ ID NO: 920033 - protein, 797 aa, Homo sapiens
HRESPAEQEGRAMIVKNKNHLPKGFSDLGPGHDGALGVAEGPSQGFGAKNCLGLVLSPPKRPWTHSRVTAMGSCIYYFFSAVDGCHPRLPGKPSHQAPPQGDPAPTRILPPRGPAPMRPCPHAAQPPPGSCPCILRWVGICIFGVFQGKGNMADKAKPAKAANRTPPKSPGDPSKDWAAKKLSLELEDMCTEWCGRPSRGAVVLVRPRATTALSMQNNSAFGDLKSDELELLYSAYGDETGVQCAPRQVLAPGSPWLLSSFSCALVWDPEPHMCVGGERAIPQPSRWQLRSSRCFQSSTQMDTRSGSQCSVTPEAIRNNEELVLPPRISRVNGWSLPLHYFRVREGFLEDPAMDLAVGSGPWLPGGTSHLSWARLCPPSLQCSSGLKGPSSVARVGTEAEEVPRVSEGCQGCQRAVTSQHHCVVLGLGHPGQVSGKWTASPAALPMPAPQRPPRAPWPAACGFALWRLEGACAIRHLQGPGRLWEVTSQAQWLQPLTPREVTGGIFSFHLVVHLIASCIDPADSNVRLMKNYSQPMPLFDRSKHAHVIQNQFCHLCKVTVNKKTKHCISCNKCVSGFDHHCKWINNCVGSRNYWFFFSTVASATAGMLCLIAILLYVLVQYLVNPRVLRTDPRYEDVKNMNTWLLFLPLFPVQVQTLIVVIIRMLVLLLDLLGLVQLGQLLIFHIYLKAKKMTTFEYLINTRKEESSKHQAVRKDPYVQMDKGFLQQGAGALGSSAQGVKAKSSLLIYKCPCHFCTSVNQDGDSKAQEADDAPSTSTLGLQQETTEPMKTDSAESED

SEQ ID NO: 920034 - protein, 318 aa, Homo sapiens
MNTWLLFLPLFPVQVQTLIVVIIRMLVLLLDLLGLVQLGQLLIFHIYLKAKKMTTFEYLINTRKEESSKHQAVRKDPYVQMDKGFLQQGAGALGSSAQGVKAKSSLLIYKCPCHFCTSVNQDGDSKAQEADDAPSTSTLGLQQETTEPMKTDSAESEELRFGSSGAPVIQVFYPETPPSIKVLPVESTLQSLLLLPMLQARNQSPSSQRPLDVLRRNQDPQSPASISVIIFITPKEEPALQEGLHLQEDGLPATAEDAATCLTVLSSQPASCRASCCLRADGPGMLAHTCEHSTGKWEHSTGKWEHSTEKWEHSTGKW

SEQ ID NO: 920035 - protein, 143 aa, Homo sapiens
APVSRCWTQCLSLVSPDVKNMNTWLLFLPLFPVQVQTLIVVIIRMLVLLLDLLGLVQLGQLLIFHIYLSMSPTLSPRSPQAWLVRAAHLTPLLEYVPNPEPPTPGARVFVPRVRMCSGSASPRSEIMDKKGKSQEEIKSMRAQ

SEQ ID NO: 920036 - protein, 212 aa, Homo sapiens
MSTVLGNGSTWHWEIGVYSTGKWEHSTGNWEHSTGKWEHSTRKWELTALGNGNIVLGNGSTVLGKGSPQYWELGAQYWEMGVHSTRKWEHSIGKWEHKYWKMGAHSTGKWEHSIGKWEHSTGNWEHSAEKWELTVLGNGAQYLEMGAQYWEMGAHSTGKWDTVLGIGSTVLGNGSSQYWEMGAHSTGKWEHSIRKWEHSTGKWELTALGNGA

SEQ ID NO: 920037 - protein, 122 aa, Homo sapiens
MLQARNQSPSSQRPLDVLRRNQDPQSPASISVIIFITPKEEPALQEGLHLQEDGLPATAEDAATCLTVLSSQPASCRASCCLRADGPGMLAHTCEHSTGKWEHSTGKWEHSTEKWEHSTGKW

SEQ ID NO: 920038 - protein, 144 aa, Homo sapiens
SGISMVIGGRKDKSWKVFGNVQLSIHATSRVPRATSGRYHEKYGGNVKFWDTCAEHSGPSAAGLLEFAGGPFQTLFAWLSLAEAAEQQRLLPVPSSGSFVPGGTRQMPVGALLYEVSVDPSWEVSPSQENDQTMQALATKGCSS

SEQ ID NO: 920039 - protein, 681 aa, Homo sapiens
MTSHHYAKYFLSTRLAQNKTPILKDSTGASRLSVAAPSIPLHILDFRAPETIESVAQGIRKNCPFDYACITDMVKSSETTSGNIAFIVELLKNISTDLSDNVTREKMKGKNYSDSNHQSNSRHFTSDLGYTAGENIPPLSSIKQSLKSHGKLGFYTLQSGNAALRAIIKQSYSEVANHILDTAAISNWAFIPNKNASSDLLQSVNLFARQLHIHNNSENIVNELFIQTKGFHINHNTSEKSLNFSMSMNNTTEDILGMVQIPRQELRKLWPNASQAISIAFPTLGAILREAHLQNVSLPRQVNGLVLSVVLPERLQEIILTFEKINKTRNARAQCVGWHSKKRRWDEKACQMMLDIRNEVKCRCNYTSVVMSFSILMSSKSMTDKVLDYITCIGLSVSILSLVLCLIIEATVWSRVVVTEISYMRHVCIVNIAVSLLTANVWFIIGSHFNIKAQDYNMCVAVTFFSHFFYLSLFFWMLFKALLIIYGILVIFRRMMKSRMMVIGFAIGYGCPLIIAVTTVAITEPEKGYMRPEACWLNWDNTKALLAFAIPAFVIVAVNLIVVLVVAVNTQRPSIGSSKSQDVVIIMRISKNVAILTPLLGLTWGFGIATLIEGTSLTFHIIFALLNAFQGFFILLFGTIMDHKIRDALRMRMSSLKGKSRAAENASLGPTNGSKLMNRQG

SEQ ID NO: 920040 - protein, 712 aa, Homo sapiens
MVELLDLYQMEDEAYSSLAEATTELYQYLLQPFRDMRELAMLRRQQIKISMENDYLGPRRIESLQKEDADWQRKAHMAVLSIQDLTVKYFEITAKAQKAVYDRMRADQKKFGKASWAAAAERMEKLQYAVSKETLQMMRAKEICLEQRKHALKEEMQSLRGGTEAIARLDQLEADYYDLQLQLYEVQFEILKCEELLLTAQLESIKRLISEKRDEVVYYDTYESMEAMLEKEEMAASAYLQREELQKLQQKARQLEARRGRVSAKKSYLRNKKNTGEHLKVCAEERDQRERVIEVGRSRRARSHRSEDDDSTQQDEFREKLWARSRSWWSEKGVQQRFKAVTDGIAKETVQEICIAKHNEKIQQRTRIEDEYRTHHTVQLKREKLHDEEERKSAWVSQERQRTLDRLRTFKQRYPGQVILKSTRLRLAHARRKGAASPVLQEDHCDSLPSVLQVEEKTEEVGEGRVKRGPSQTTEPQSLVQLEDTSLTQLEATSLPLSGVTSELPPTISLPLLNNNLEPCSVTINPLPSPLPPTPPPPPPPPPPPPPPPLPVAKDSGPETLEKDLPRKEGNEKRIPKSASAPSAHLFDSSQLVSARKKLRKTAEGLQRRRVSSPMDEVLASLKRGSFHLKKVEQRTLPPFPDEDDSNNILAQIRKGVKLKKVQKDVLRESFTLLPDTDPLTRSIHEALRRIKEASPESEDEEEALPCTDWEN

SEQ ID NO: 920041 - protein, 712 aa, Homo sapiens; identical to SEQ ID NO: 920040

SEQ ID NO: 920042 - protein, 167 aa, Homo sapiens
ISGVYSDLNKVAGPMHQDPEDRIFSNYYSMGLCPACLDSTSSVHCLIGTDVIVNVPTDSAIIWQQHSSSTHIVYVQPSANEKIWLAGYQDCQSFCLIHKFHSLGYRAHQCHKEVEDLDCVRGNLFGMGLKMEAGAVHGLTLMGYYQTVRETHSLREKCLLCHLQLPC

SEQ ID NO: 920043 - protein, 911 aa, Homo sapiens
MEALGPGGDRASPASSTSSLDLWHLSMRADSAYSSFSAASGGPEPRTQSPGTDLLPYLDWDYVRVVWGGPGPAPPDAALCTSPRPRPAVAARSGPQPTEVPGTPGPLNRQATPLLYALAAEAEAAAQAAEPPSPPASRAAYRQRLQGAQRRVLRETSFQRKELRMSLPARLRPTVPARPPATHPRSASLSHPGGEGEPARSRAPAPGTAGRGPLANQQRKWCFSEPGKLDRVGRGGGPARECLGEACSSSGLPGPEPLEFQHPALAKFEDHEVGWLPETQPQGSMNLDSGSLKLGDAFRPASRSRSASGEVLGSWGGSGGTIPIVQAVPQGAETPRPLFQTKLSRFLPQKEAAVMYPAELPQSSPADSEQRVSETCIVPAWLPSLPDEVFLEEAPLVRMRSPPDPHASQGPPASVHASDQPYGTGLGQRTGQVTVPTEYPLHECPGTAGADDCWQGVNGSVGISRPTSHTPTGTANDNIPTIDPTGLTTNPPTAAESDLLKPVPADALGLSGNDTPGPSHNTALARGTGQPGSRPTWPSQCLEELVQELARLDPSLCDPLASQPSPEPPLGLLDGLIPLAEVRAAMRPACGEAGEEAARNLDTEPLKLGTGNPGSSGFVPRSYQFSFTQLLPAPREETRLENPATHPVLDQPCGQGLPAPNNSIQGKKVELAARLQKMLQDLHTEQERLQGEAQAWARRQAALEAAVRQACAPQELERFSRFMADLERVLGLLLLLGSRLARVRRALARAASDSDPDEQASLLQRLRLLQRQEEDAKELKEHVARRERAVREVLVRALPVEELRVYCALLAGKAAVLAQQRNLDERIRLLQDQLDAIRDDLGHHAPSPSPARPPGTCPPPPAPLPHPPSWLPAAVLSGFWGSTGRGWHRCWATGSPAAASPARLFRPRCSS

SEQ ID NO: 920044 - protein, 153 aa, Homo sapiens
MAQGSHTAGWLVPNHKPPQPSPFLAKGFSFIGQKTLTHFPKTVPPVSRKQLRSVFILILNLMAVRCTSLEGEVRQPGGRGSSEKLQVLGETLAILPTEVEPREVHALCSMACLAPPLPSLETRDSNSNLNFHGCGMEKKPVFSRTKESPATVS

SEQ ID NO: 920045 - protein, 148 aa, Homo sapiens
MLYKKGSEELKRKEEEYGKDVEINQQLKRTLKTRAMELRTVRKNLDQISLSHKKEKGLLHENSMLQEEIAMLRLELDTIKHQNEIKEKKYFEDIESVKEEHDNLLKAITLNEEALAKTVFQYNGQLSILTTENKMLSSELKNVKHNKE

SEQ ID NO: 920046 - protein, 141 aa, Homo sapiens
PISQSGQQRLASERMGPSVECFLLRRRELRLLQTHTNLLPLTGVLLMITLGQEYIAGAIAGKLTLNIHPTSRISSYCTPAPFTLQGDCSATAGSTGILKHKLTVLPTLISHTNPSLLSGTVGFVTFSMCWTVAWSLLPGTL

SEQ ID NO: 920047 - protein, 171 aa, Homo sapiens
VKEAQEPRQGGRSFAQKNNQSPFYWLMAWHEHWHVYNGVQEDVRSDSTNSDITAKLFLLKNKLISFLCGTFYTVFPAFFEAWSFSCQSILKVYWPLDRASESLGTEIQNCVYLIFHASPRCPPFPAKVSQCGGLIQEEGMQTDRQMALKDESPMSHQQTGTNGTRFGGLLV

SEQ ID NO: 920048 - protein, 1091 aa, Homo sapiens
VKAGTSHFHLFCGSSVASGHLDIYVQTWAQRPDKDFLPRPHQPTYAIASVPEYTLFTSVTMGEPSVLWAEANLSMCTLDPTLSPKDRVWLCCRGGSVVDLLQNTDAHKRAFHEIYRTRSVNGIPVPPDQLEDMAERFHFVSSTSELHLMKMEFLELKYRLLSLLVLAESKLKSWIIKYGRRESVEQLLQNYVSFIENSKFFEQYEVTYQILKQTAEMYVKADGSVEEAENVMKFMNETTAQWRNLSVEVRSVRSMLEEVISNWDRYGNTVASLQAWLEDAEKMLNQSENAKKDFFRNLPHWIQQHTAMNDAGNFLIETCDEMVSRDLKQQLLLLNGRWRELFMEVKQYAQADEMDRMKKEYTDCVVTLSAFATEAHKKLSEPLEVSFMNVKLLIQDLEDIEQRVPVMDAQYKIITKTAHLITKESPQEEGKEMFATMSKLKEQLTKVKECYSPLLYESQQLLIPLEELEKQMTSFYDSLGKINEIITVLEREAQSSALFKQKHQELLACQENCKKTLTLIEKGSQSVQKFVTLSNVLKHFDQTRLQRQIADIHVAFQSMVKKTGDWKKHVETNSRLMKKFEESRAELEKVLRIAQEGLEEKGDPEELLRRHTEFFSQLDQRVLNAFLKACDELTDILPEQEQQGLQEAVRKLHKQWKDLQGEAPYHLLHLKIDVEKNRFLASVEECRTELDRETKLMPQEGSEKIIKEHRVFFSDKGPHHLCEKRLQLIEELCVKLPVRDPVRDTPGTCHVTLKELRAAIDSTYRKLMEDPDKWKDYTSRFSEFSSWISTNETQLKGIKGEAIDTANHGEVKRAVEEIRNGVTKRGETLSWLKSRLKVLTEVSSENEAQKQGDELAKLSSSFKALVTLLSEVEKMLSNFGDCVQYKEIVKNSLEELISGSKEVQEQAEKILDTENLFEAQQLLLHHQQKTKRISAKKRDVQQQIAQAQQGEGGLPDRGHEELRKLESTLDGLERSRERQERRIQVTLRKWERFETNKETVVRYLFQTGSSHERFLSFSSLESLSSELEQTKEFSKRTESIAVQAENLVKEASEIPLGPQNKQLLQQQAKSIKEQVKKLEDTLEEEYVIDKS

SEQ ID NO: 920049 - protein, 1001 aa, Homo sapiens
QRKLEQHKDLLQNTDAHKRAFHEIYRTRSVNGIPVPPDQLEDMAERFHFVSSTSELHLMKMEFLELKYRLLSLLVLAESKLKSWIIKYGRRESVEQLLQNYVSFIENSKFFEQYEVTYQILKQTAEMYVKADGSVEEAENVMKFMNETTAQWRNLSVEVRSVRSMLEEVISNWDRYGNTVASLQAWLEDAEKMLNQSENAKKDFFRNLPHWIQQHTAMNDAGNFLIETCDEMVSRDLKQQLLLLNGRWRELFMEVKQYAQADEMDRMKKEYTDCVVTLSAFATEAHKKLSEPLEVSFMNVKLLIQDLEDIEQRVPVMDAQYKIITKTAHLITKESPQEEGKEMFATMSKLKEQLTKVKECYSPLLYESQQLLIPLEELEKQMTSFYDSLGKINEIITVLEREAQSSALFKQKHQELLACQENCKKTLTLIEKGSQSVQKFVTLSNVLKHFDQTRLQRQIADIHVAFQSMVKKTGDWKKHVETNSRLMKKFEESRAELEKVLRIAQEGLEEKGDPEELLRRHTEFFSQLDQRVLNAFLKACDELTDILPEQEQQGLQEAVRKLHKQWKDLQGEAPYHLLHLKIDVEKNRFLASVEECRTELDRETKLMPQEGSEKIIKEHRVFFSDKGPHHLCEKRLQLIEELCVKLPVRDPVRDTPGTCHVTLKELRAAIDSTYRKLMEDPDKWKDYTSRFSEFSSWISTNETQLKGIKGEAIDTANHGEVKRAVEEIRNGVTKRGETLSWLKSRLKVLTEVSSENEAQKQGDELAKLSSSFKALVTLLSEVEKMLSNFGDCVQYKEIVKNSLEELISGSKEVQEQAEKILDTENLFEAQQLLLHHQQKTKRISAKKRDVQQQIAQAQQGEGGLPDRGHEELRKLESTLDGLERSRERQERRIQVTLRKWERFETNKETVVRYLFQTGSSHERFLSFSSLESLSSELEQTKEFSKRTESIAVQAENLVKEASEIPLGPQNKQLLQQQAKSIKEQVKKLEDTLEEEYVIDKS

SEQ ID NO: 920050 - protein, 156 aa, Homo sapiens
MVTNVFIISSPGDFKENVLLFSINNTEFYLLNLVNFSIKTMEMVKTKWDHFGSNFETLSVWITEKEKELNALETSSSAMDMQISQIKVTIQEIESKLSSIVGLEEEAQSFAQFVTTGESARIKAKLTQIRRYGEELREHAQCLEGTILGHLSQQQK

SEQ ID NO: 920051 - protein, 693 aa, Homo sapiens
VKAGTSHFHLFCGSSVASGHLDIYVQTWAQRPDKDFLPRPHQPTYAIASVPEYTLFTSVTMGEPSVLWAEANLSMCTLDPTLSPKDRVWLCCRGGSVVDLLQNTDAHKRAFHEIYRTRSVNGIPVPPDQLEDMAERFHFVSSTSELHLMKMEFLELKYRLLSLLVLAESKLKSWIIKYGRRESVEQLLQNYVSFIENSKFFEQYEVTYQILKQTAEMYVKADGSVEEAENVMKFMNETTAQWRNLSVEVRSVRSMLEEVISNWDRYGNTVASLQAWLEDAEKMLNQSENAKKDFFRNLPHWIQQHTAMNDAGNFLIETCDEMVSRDLKQQLLLLNGRWRELFMEVKQYAQADEMDRMKKEYTDCVVTLSAFATEAHKKLSEPLEVSFMNVKLLIQDLEDIEQRVPVMDAQYKIITKTAHLITKESPQEEGKEMFATMSKLKEQLTKVKECYSPLLYESQQLLIPLEELEKQMTSFYDSLGKINEIITVLEREAQSSALFKQKHQELLACQENCKKTLTLIEKGSQSVQKFVTLSNVLKHFDQTRLQRQIADIHVAFQSMVKKTGDWKKHVETNSRLMKKFEESRAELEKVLRIAQEGLEEKGDPEELLRRHTEFFSQLDQRVLNAFLKACDELTDILPEQEQQGLQEAVRKLHKQWKVSQDRTETPCILNEGRSLSVLRSKCKRNLEIPGKSL

SEQ ID NO: 920052 - protein, 134 aa, Homo sapiens [sequence omitted]

SEQ ID NO: 920053 - protein, 139 aa, Homo sapiens
MHVFFVFLSLLETLRRLPVADVSVPHTGENCSPRMEAALTKNTVDIAEGLEQVQMGSLPGTISENSPSPSERNRRVNSDLVTNGLINKPQSLESRERQKSSDILEELIVQGIIQSHSKVFRNGESYDVTASNFVINISL

SEQ ID NO: 920054 - protein, 268 aa, Homo sapiens
MHVFFVFLSLLETLRRLPVADVSVPHTGENCSPRMEAALTKNTVDIAEGLEQVQMGSLPGTISENSPSPSERNRRVNSDLVTNGLINKPQSLESRERQKSSDILEELIVQGIIQSHSKVFRNGESYDVTLTTTEKPLRKPPSRLKKLKIKKQVKDFTMKDIEEKMEAAEERRKTKEEEIRKRLRSDRLLPSANHSDSAELDGAEVAFAKGLQRVRSAGFEPSDLQGGKPLKRKKSKCDATLIDRNESDESFGVVESDMSYNQADDIVY

SEQ ID NO: 920055 - protein, 242 aa, Homo sapiens
MCGCCICPGEQCLGASEYVRRSPSPSGISSSTISLPCAPAAGRSCLYVCMNSPRASREGCGMLPDSQAGAQYSLHAHTLCSLCCARHTWTYMDLSHGGDYEPQDGIVQLVPLMSLGNRNPFLEFLTEEHPRGPAGHPAAAPGHRAQAQLAVTPDTHSVLVTRSSEQQNEEGALEAAPGSLLSCNGRGFPILHIPASIWWFSVLDFGHTHSSRAEDMTGPWIKGFSLKPGCSVCASRRAQCLP

SEQ ID NO: 920056 - protein, 163 aa, Homo sapiens
SGFRKNTYRRKSIKLCKISEEIGSEPNMSDQWPVTRPAGDPENMWPRWTLKSQSLKPPCSFPWEFSVSLWVPLVSPPPSAYSKRFHCLVMRVWQDSLAADDSYPRRDFRRHLPYPHASDDTYRYLQFYLLLTPPECKFHEGRGLASLLHCQQLERSACYTVGA

SEQ ID NO: 920057 - protein, 146 aa, Homo sapiens
VYKSMTTSPKVADGVVYATRHPRRDPFCVISPAPPPVPSSSFRSACGRRAAQLTYGSGWSRPRRGRFENPGPPLAILVEACPSERSQYSVLCPVCVRLKSRAALRAALLSTRGRPRRDLLSTYLGGLLRVSSSVSFSQNNFGPLLG

SEQ ID NO: 920058 - protein, 153 aa, Homo sapiens
IWKHLTTMRIPMPPWIPSFYIFPDHASPVNFNKLVLGMRPHIRKHSSLKGSCKGGCFSPVNLHQSLNGAPKESEGTSLHYLPLHFRAGHVWTRSRTWKSKGSWEMCEAVINPLPAKLTADSLQTSTDLRCCCPFIQNKGILSVARQASTWFLS

SEQ ID NO: 920059 - protein, 158 aa, Homo sapiens
MGLWKASSSLSCSVGTEMALGAQYPDKGHPPDKGHHPFPRAGLGKGRGRGENGGVSGQQWGYRLCLWLPWLRALAGPSFPTWSGRAAPQDQLARLLGPVGLCPVRRSLRKDRVRERLKPGPEKHHRNYSWKFPVDPDRLLLDTSRPICWLPTMVLPQF

SEQ ID NO: 920060 - protein, 308 aa, Homo sapiens
GVGGIYVSEKHTLTDMCWLLHQLITSRPMEYKWINQMTQSQTFPMTEMNFLNHPECEERRSDSPEENEEALATWWGPERTHLHQQLLGPPKTLGAFSTWGDLHWGPKWAALLPLVLTLTRHQMAQTPCFLHSRLLPGILYDEHFLGQQKAKVMPSLHKPFESQTTMRNMVYLRSAPSPGPAPPAACPRSPPRLRKWRGWRRCVLTPSSQAPTPHPSAGEESEKDQWLENGELSVVRVEAGERQQSLQRRQMAHWSLEENQEGLVVSVNQRREFQKEESTLADLDKMVSGGHRQLIIGVLWDYDFREAT

SEQ ID NO: 920061 - protein, 148 aa, Homo sapiens
PGSLMTLYVAVPDLDCALLDSGDMQGKKNETNKKTRLGLLHLPLAVMEFYATQILYLLQKCASQDGALELWCSIFRQTLWLLLLTAGFQPAVCQLALPSPITRQRVAVVSCVLTLCSLGPAPCFGPALKFYKHTLFLLSNCLKSQEVE

SEQ ID NO: 920062 - protein, 485 aa, Homo sapiens
RYLKSSLSSSKFHRSLGNSRKKFLFSLFPAYLMPVSNTGAQCLQCLCIVRVTLLHFPTNSSSPSETTSAWTLLSISLLTFWSKPFNKSLGSSKLSHIFLSSSEPSKLFQPLPVTHFQSCFHMFGYLYSSTPLYWYQLIVLVCSHTANKDIPETGIIYKGKRLNGLTVLHGWGGLTIMVEGKEVQKHVSHSGRQERACAGELPFIKPSDLMRLSHYHENSMGGTIPMIQLSAPGPTLDTWELLQCKISVKCSNQFKLEVCLLKSENKVVDNQAGTQGQLKVLGANLWWPYLMHEHPAYLYSWEVMVVWDLLKGGLLLPSGSPGFSRSPGQVNGQGRPDGAQAVGALTPGALAVIGAADCTEVTGAFDFYTLPVGLRTVPVTESQWALYVDVIRVNSYYSWYRNYGHLELIQLQLAAQFENCEEYQKSLLEQYHLGLNQKRRKYVVGELIWNFADFMTNQSKDEGKTGPHYGFTFGIHSLFQRRVKG

SEQ ID NO: 920063 - protein, 140 aa, Homo sapiens
AAQCMNHRMLKSTYENCNQSRELGSRLSELDRVFDVAPLMTCSSEDPAQKRQVCLPHGTENQCHFQPIQILTSPPSFNQGCFSLMLIHKCRGSHENAMTIYYSVLSFATVFLHGGYFKCICTAAKHRLHHIPGEGFLGPT

SEQ ID NO: 920064 - protein, 228 aa, Homo sapiens
PRPPHSAGRRRFASQEAASAWARAGRGGELPAQRQVRGGRLIPARTAPPRDKVQRWRGREWRRPESARNLSELKHPALSQRSMKKPFFPARPRGYGAITSPDTLLLVWGEERSRRTATLTWEEGGSRPSGAVVPSSLFPGLKNAWRRGLGAAGESKGCSTFESVGRIQPTVGNSSGHPAVQTPSQCLRVFRLGEDVGSGKVEEKVLVPLLFYVKEFQISSKILVLTLN

SEQ ID NO: 920065 - protein, 134 aa, Homo sapiens
PVAMERHVGFILSMMGNLWEILISATMKQTNTGTENQIPHVLTYKWELNMEYTWPQRREQQQQQQKETQRRENRHQGLLEGGGWKKGEDRKTIYQRMPGEYKFLNYFVNQLTEALTRLYKLLKSTDSPSFVKHS

SEQ ID NO: 920066 - protein, 200 aa, Homo sapiens
MAFRLVLELVQDVWDVWLYLISELWAWRSVCRGPGLGTKGEGPPLSRRGQNADRIPAPLSLRALNTIFPGHKSGDSRVFVVAELGDALELRAHSTGLLWYLCSEVEDRITRMEHRSCRITENLLRVVLTPLMSSVRVFVGWPATQQLSPTRRSSALAQTGMRGTECPGNRSWEQWGTVGYLNSQELGSERPRPAANLAKG

SEQ ID NO: 920067 - protein, 140 aa, Homo sapiens
MDRSNPVKPALDYFSNRLVNYQISVKCSNQFKLEVCLLNAENKVVDNQAGTQGQLKVLGANLWWPYLMHEHPAYLYSWEDGDCSHQSLGPLPACDLCDQLHLRSRQGGSVCGCDPCEQLLLLVSQLRAPGVDSAAAGRPV

SEQ ID NO: 920068 - protein, 140 aa, Homo sapiens; identical to SEQ ID NO: 920067

SEQ ID NO: 920069 - protein, 188 aa, Homo sapiens
MFSSLYPSGLRCSFLKIQGKDGHYRFRGPGFWKRRPPDDWMHFSLGLTLCRYSSSLLKITDRHLHLSPPTEWLHWQLSNELKECVWLTRGPHACMYGALSQLPYLQRGHDWCLPQRVVLRIKQNDVCETLGTVSGSWQEVSVTCLRPFVCLPVCFCKADPVQGTRDVVGATRDDDVPTLRELTLTRGQ

SEQ ID NO: 920070 - protein, 966 aa, Homo sapiens
STAAIRGHPKEGEGETDGAGESAGPLAEPVPNDLHFARMRILWTTAACAAWSLLFSPVRMRSSVVAEHQQFDELLLSFSVWIKLFLSELQTTSEISIMDHQVALTRHKDHAAEVESKKGELQSLQGHLAKLGSLGRAEDLHLLQGKAEDCFQLFEEASQVVERRQLALSHLAEFLQSHASLSGILRQLRQTVEATNSMNKNESDLIEKDLNDALQNAKALESAAVSLDGILSKAQYHLKIGSSEQRTSCRATADQLCGEVERIQNLLGTKQSEADALAVLKKAFQDQKEELLKSIEDIEERTDKERLKEPTRQALQQSVEALKIIFGERLRVFNQLEDELNSHEHELCWLKDKAKQIAQKDVAFAPEVDREINRLEVTWDDTKRLIHENQGQCCGLIDLMREYQNLKSAVSKVLENASSVIVTRTTIKDQEDLKWAFSKHETAKNKMNYKQKDLDNFTSKGKHLLSELKKIHSSDFSLVKTDMESTVDKWLDVSEKLEENMDRLRVSLSIWDDVLSTRDEIEGWSNNCVPQMAENISNLDNHLRAEELLKEFESEVKNKALRLEELHSKVNDLKELTKNLETPPDLQFIEADLMQKLEHAKEITEVAKGTLKDFTAQSTQVEKFINDITTWFTKVEESLMNCAQNETCEALKKVKDIQKELQSQQSNISSTQENLNSLCRKYHSAELESLGRAMTGLIKKHEASMQEFQEWFLGAKAAAKESSDRTGDSKVLEAKLHDLQNILDSVSDGQSKLDAVTQEGQTLYAHLSKQIVSSIQEQITKANEEFQAFLKQCLKDKQALQDCASELGSFEDQHRKLNLWIHEMEERFNTENLGESKQHIPEKKNEVHKVEMFLGELLAARESLDKLSQRGQLLSEEGHGAGQEGRLCSQLLTSHQNLLRMTKEKLRSCQVALQEHEALEEALQSMWFWVKAIQDRLACAESTLGSKDTLEKRLSQIQVHATPARH

SEQ ID NO: 920071 - protein, 627 aa, Homo sapiens
STAAIRGHPKEGEGETDGAGESAGPLAEPVPNDLHFARMRILWTTAACAAWSLLFSPVRMRSSVVAEHQQFDELLLSFSVWIKLFLSELQTTSEISIMDHQVALTRHKDHAAEVESKKGELQSLQGHLAKLGSLGRAEDLHLLQGKAEDCFQLFEEASQVVERRQLALSHLAEFLQSHASLSGILRQLRQTVEATNSMNKNESDLIEKDLNDALQNAKALESAAVSLDGILSKAQYHLKIGSSEQRTSCRATADQLCGEVERIQNLLGTKQSEADALAVLKKAFQDQKEELLKSIEDIEERTDKERLKEPTRQALQQSVEALKIIFGERLRVFNQLEDELNSHEHELCWLKDKAKQIAQKDVAFAPEVDREINRLEVTWDDTKRLIHENQGQCCGLIDLMREYQNLKSAVSKVLENASSVIVTRTTIKDQEDLKWAFSKHETAKNKMNYKQKDLDNFTSKGKHLLSELKKIHSSDFSLVKTDMESTVDKWLDVSEKLEENMDRLRVSLSIWDDVLSTRDEIEGWSNNCVPQMAENISNLDNHLRAEELLKEFESEVKNKALRLEELHSKVNDLKELTKNLETPPDLQFIEADLMQKLEHAKEITEVAKGTLKDFTAQSTCESRSGSF

SEQ ID NO: 920072 - protein, 3380 aa, Homo sapiens
NLTNQEGFAQMKERPKPAISEGMRDQLSDQDEEGKIKQEYIISDPSFSMVTVQREDSGITWETNSSRSSTPWASEESQTSGVCSREGSTVNSPPGNVSFIVDEVKKVRKRTHKSKHGSPSLRRKGNRKRNSFESQDVPTNKKGSPLTSASQVLTTEKEKSYTGIYDKARKKKTTSNTPPITGAIYKEHKPLVLRPVYIGTVQYKIKMFNSVKEELIPLQFYGTLPKGYVIKEIHYRKGKDASISLEPDLDNSGSNTVSKTRKLVAQSIEDKVKEVFPPWRGALSKGSESLTLMFSHEDQKKIYADSPLNATSALEHTVPSYSSSGRAEQGIQLRHSQSVPQQPEDEAKPHEVEPPSVTPDTPATMFLRTTKEECELASPGTAASENDSSVSPSFANEVKKEDVYSAHHSISLEAASPGLAASTQDGLDPDQEQPDLTSIERAEPVSAKLTPTHPSVKGEKEENMLEPSISLSEPLMLEEPEKEEIETSLPIAITPEPEDSNLVEEEIVELDYPESPLVSEKPFPPHMSPEVEHKEEELILPLLAASSPEHVALSEEEREEIASVSTGSAFVSEYSVPQDLNHELQEQEGEPVPPSNVEAIAEHAVLSEEENEEFEAYSPAAAPTSESSLSPSTTEKTSENQSPLFSTVTPEYMVLSGDEASESGCYTPDSTSASEYSVPSLATKESLKKTIDRKSPLILKGVSEYMIPSEEKEDTGSFTPAVAPASEPSLSPSTTEKTSECQSPLPSTATSEHVVPSEGEDLGSERFTPDSKLISKYAAPLNATQESQKKIINEASQFKPKGISEHTVLSVDGKEVIGPSSPDLVVASEHSFPPHTTEMTSECQAPPLSATPSEYVVLSTKRQSLNLKGASSPMNLSEEDQEDIGPFSPDSAFVSEFSFPPYATQEAEKREFECDSPICLTSPSEHTILSDEDTEEAELFSPDSASQVSIPPFRISETEKNELEPDSLLTAVSASGYSCFSEADEEDIGSTAATPVSEQFSSSQKQKAETFPLMSPLEDLSLPPSTDKSEKAEIKPEIPTTSTSVSEYLILAQKQKTQAYLEPESEDLIPSHLTSEVEKGEREASSSVAAIPAALPAQSSIVKEETKPASPHSVLPDSVPAIKKEQEPTAALTLKAADEQMALSKVRKEEIVPDSQEATAHVSQDQKMEPQPPNVPESEMKYSVLPDMVDEPKKGVKPKLVLNVTSELEQRKLSKNEPEVIKPYSPLKETSLSGPEVLSAVKMEMKHDSKITTTPIVLHSASSGVEKQVEHGPPALAFSALSEEIKKEIEPKVEAKEVKAGLPVIKTSSSQHSDKSEEARVEDKQDLVFSTVCDSERLVSSQKKSLMSTSEVLEPEHELPLSLWGEIKKKETELPSSQNVSPASKHIIPKGKDEETASSSPELENLASGLAPTLLLLSDDKNKPAVEVSSTAQGDFPSEKQDVALAELSLEPEKKDKPHQPLELPNAGSEFSSDLGRQSGSIGTKQAKSPITETEDSVSEKGPAELRSREGKEENRELCASSTMPAISELSSLLREESQNEEIKPFSPKIISLESKEPPASVAEGGNPEEFQPFTFSLKGLSEEVSHPADFKKGGNQEIGPLPPTGNLKAQVMGDILDKLSEETGHPNSSQVLQSITEPSKIAPSDLLVEQKKTEKALHSDQTVKLPDVSTSSEDKQDLGIKQFSLMRENLPLEQSKSFMTTKPADVKETKMEEFFISPKDENWMLGKPENVASQHEQRIAGSVQLDSSSSNELRPGQLKAAVSSKDHTCEVRKQVLPHSAEESHLSSQEAVSALDTSSGNTETLSSKSYSSEEVKLAEEPKSLVLAGNVERNIAEGKEIHSLMESESLLLEKANTELSWPSKEDSQEKIKLPPERFFQKPVSGLSVEQVKSETISSSVKTAHFPAEGVEPALGNEKEAHRSTPPFPEEKPLEESKMVQSKVIDDADEGKKPSPEVKIPTQRKPISSIHAREPQSPESPEVTQNPPTQPKVAKPDLPEEKGKKGISSFKSWMSSLFFGSSTPDNKVAEQEDLETQPSPSVEKAVTVIDPEGTIPTNFNVAEKPADHSLSEVKLKTADEPRGTLVKSGDGQNVKEKSMILSNVEDLQQPKFISEVSREDYGKKEISGDSEEMNINSVVTSADGENLEIQSYSLIGEKLVMEEAKTIVPPHVTDSKRVQKPAIAPPSKWNISIFKEEPRSDQKQKSLLSFDVVDKVPQQPKSASSNFASKNITKESEKPESIILPVEESKGSLIDFSEDRLKKEMQNPTSLKISEEETKLRSVSPTEKKDNLENRSYTLAEKKVLAEKQNSVAPLELRDSNEIGKTQITLGSRSTELKESKADAMPQHFYQNEDYNERPKIIVGSEKEKGEEKENQVYVLSEGKKQQEHQPYSVNVAESMSRESDISLGHSLDETQSFSLVKATSVTEKSEAMLAEAHPEIREAKAVGTQPHPLEESKVLVEKTKTFLPVALSCRDEIENHSLSQEGNLVLEKSSRDMPDHSEEKEQFRESELSKGGSVDITKETVKQGFQEKAVGTQPRPLEESKVLVEKTKTFLPVVLSCHDEIENHSLSQEGNLVLEKSSRDMPDHSEEKEQFKESELWKGGSVDITKESMKEGFPSKESERTLARPFDETKSSETPPYLLSPVKPQTLASGASPEINAVKKKEMPRSELTPERHTVHTIQTSKDDTSDVPKQSVLVSKHHLEAAEDTRVKEPLSSAKSNYAQFISNTSASNADKMVSNKEMPKEPEDTYAKGEDFTVTSKPAGLSEDQKTAFSIISEGCEILNIHAPAFISSIDQEESEQMQDKLEYLEEKASFKTIPLPDDSETVACHKTLKSRLEDEKVTPLKENKQKETHKTKEEISTDSETDLSFIQPTIPSEEDYFEKYTLIDYNISPDPEKQKAPQKLNVEEKLSKEVTEETISFPVSSVESALEHEYDLVKLDESFYGPEKGHNILSHPETQSQNSADRNVSKDTKRDVDSKSPGMPLFEAEEGVLSRTQIFPTTIKVIDPEFLEEPPALAFLYKDLYEEAVGEKKKEEETASEGDSVNSEASFPSRNSDTDDGTGIYFEKYILKDDILHDTSLTQKDQGQGLEEKRVGKDDSYQPIAAEGEIWGKFGTICREKSLEEQKGVYGEGESVDHVETVGNVAMQKKAPITEDVRVATQKISYAVPFEDTHHVLERADEAGSHGNEVGNASPEVNLNVPVQVSFPEEEFASGATHVQETSLEEPKILVPPEPSEERLRNSPVQDEYEFTESLHNEVVPQDILSEELSSESTPEDVLSQGKESFEHISENEFASEAEQSTPAEQKELGSERKEEDQLSSEVVTEKAQKELKKSQIDTYCYTCKCPISATDKVFGTHKDHEVSTLDTAISAVKVNRC

SEQ ID NO: 920073 - protein, 2002 aa, Homo sapiens
NLTNQEGFAQMKERPKPAISEGMRDQLSDQDEEGKIKQEYIISDPSFSMVTVQREDSGITWETNSSRSSTPWASEESQTSGVCSREGSTVNSPPGNVSFIVDEVKKVRKRTHKSKHGSPSLRRKGNRKRNSFESQDVPTNKKGSPLTSASQVLTTEKEKSYTGIYDKARKKKTTSNTPPITGAIYKEHKPLVLRPVYIGTVQYKIKMFNSVKEELIPLQFYGTLPKGYVIKEIHYRKGKDASISLEPDLDNSGSNTVSKTRKLVAQSIEDKVKEVFPPWRGALSKGSESLTLMFSHEDQKKIYADSPLNATSALEHTVPSYSSSGRAEQGIQLRHSQSVPQQPEDEAKPHEVEPPSVTPDTPATMFLRTTKEECELASPGTAASENDSSVSPSFANEVKKEDVYSAHHSISLEAASPGLAASTQDGLDPDQEQPDLTSIERAEPVSAKLTPTHPSVKGEKEENMLEPSISLSEPLMLEEPEKEEIETSLPIAITPEPEDSNLVEEEIVELDYPESPLVSEKPFPPHMSPEVEHKEEELILPLLAASSPEHVALSEEEREEIASVSTGSAFVSEYSVPQDLNHELQEQEGEPVPPSNVEAIAEHAVLSEEENEEFEAYSPAAAPTSESSLSPSTTEKTSENQSPLFSTVTPEYMVLSGDEASESGCYTPDSTSASEYSVPSLATKESLKKTIDRKSPLILKGVSEYMIPSEEKEDTGSFTPAVAPASEPSLSPSTTEKTSECQSPLPSTATSEHVVPSEGEDLGSERFTPDSKLISKYAAPLNATQESQKKIINEASQFKPKGISEHTVLSVDGKEVIGPSSPDLVVASEHSFPPHTTEMTSECQAPPLSATPSEYVVLSTKRQSLNLKGASSPMNLSEEDQEDIGPFSPDSAFVSEFSFPPYATQEAEKREFECDSPICLTSPSEHTILSDEDTEEAELFSPDSASQVSIPPFRISETEKNELEPDSLLTAVSASGYSCFSEADEEDIGSTAATPVSEQFSSSQKQKAETFPLMSPLEDLSLPPSTDKSEKAEIKPEIPTTSTSVSEYLILAQKQKTQAYLEPESEDLIPSHLTSEVEKGEREASSSVAAIPAALPAQSSIVKEETKPASPHSVLPDSVPAIKKEQEPTAALTLKAADEQMALSKVRKEEIVPDSQEATAHVSQDQKMEPQPPNVPESEMKYSVLPDMVDEPKKGVKPKLVLNVTSELEQRKLSKNEPEVIKPYSPLKETSLSGPEVLSAVKMEMKHDSKITTTPIVLHSASSGVEKQVEHGPPALAFSALSEEIKKEIEPKVEAKEVKAGLPVIKTSSSQHSDKSEEARVEDKQDLVFSTVCDSERLVSSQKKSLMSTSEVLEPEHELPLSLWGEIKKKETELPSSQNVSPASKHIIPKGKDEETASSSPELENLASGLAPTLLLLSDDKNKPAVEVSSTAQGDFPSEKQDVALAELSLEPEKKDKPHQPLELPNAGSEFSSDLGRQSGSIGTKQAKSPITETEDSVSEKGPAELRSREGKEENRELCASSTMPAISELSSLLREESQNEEIKPFSPKIISLESKEPPASVAEGGNPEEFQPFTFSLKGLSEEVSHPADFKKGGNQEIGPLPPTGNLKAQVMGDILDKLSEETGHPNSSQVLQSITEPSKIAPSDLLVEQKKTEKALHSDQTVKLPDVSTSSEDKQDLGIKQFSLMRENLPLEQSKSFMTTKPADVKETKMEEFFISPKDENWMLGKPENVASQHEQRIAGSVQLDSSSSNELRPGQLKAAVSSKDHTCEVRKQVLPHSAEESHLSSQEAVSALDTSSGNTETLSSKSYSSEEVKLAEEPKSLVLAGNVERNIAEGKEIHSLMESESLLLEKANTELSWPSKEDSQEKIKLPPERFFQKPVSGLSVEQVKSETISSSVKTAHFPAEGVEPALGNEKEAHRSTPPFPEEKPLEESKMVQSKVIDDADEGKKPSPEVKIPTQRKPISSIHAREPQSKDSSLISVDRQSTKWKGLEWLAPVTLG

SEQ ID NO: 920074 - protein, 3370 aa, Homo sapiens
NLTNQEGFAQMKERPKPAISEGMRDQLSDQDEEGKIKQEYIISDPSFSMVTVQREDSGITWETNSSRSSTPWASEESQTSGVCSREGSTVNSPPGNVSFIVDEVKKVRKRTHKSKHGSPSLRRKGNRKRNSFESQDVPTNKKGSPLTSASQVLTTEKEKSYTGIYDKARKKKTTSNTPPITGAIYKEHKPLVLRPVYIGTVQYKIKMFNSVKEELIPLQFYGTLPKGYVIKEIHYRKGKDASISLEPDLDNSGSNTVSKTRKLVAQSIEDKVKEVFPPWRGALSKGSESLTLMFSHEDQKKIYADSPLNATSALEHTVPSYSSSGRAEQGIQLRHSQSVPQQPEDEAKPHEVEPPSVTPDTPATMFLRTTKEECELASPGTAASENDSSVSPSFANEVKKEDVYSAHHSISLEAASPGLAASTQDGLDPDQEQPDLTSIERAEPVSAKLTPTHPSVKGEKEENMLEPSISLSEPLMLEEPEKEEIETSLPIAITPEPEDSNLVEEEIVELDYPESPLVSEKPFPPHMSPEVEHKEEELILPLLAASSPEHVALSEEEREEIASVSTGSAFVSEYSVPQDLNHELQEQEGEPVPPSNVEAIAEHAVLSEEENEEFEAYSPAAAPTSESSLSPSTTEKTSENQSPLFSTVTPEYMVLSGDEASESGCYTPDSTSASEYSVPSLATKESLKKTIDRKSPLILKGVSEYMIPSEEKEDTGSFTPAVAPASEPSLSPSTTEKTSECQSPLPSTATSEHVVPSEGEDLGSERFTPDSKLISKYAAPLNATQESQKKIINEASQFKPKGISEHTVLSVDGKEVIGPSSPDLVVASEHSFPPHTTEMTSECQAPPLSATPSEYVVLSTKRQSLNLKGASSPMNLSEEDQEDIGPFSPDSAFVSEFSFPPYATQEAEKREFECDSPICLTSPSEHTILSDEDTEEAELFSPDSASQVSIPPFRISETEKNELEPDSLLTAVSASGYSCFSEADEEDIGSTAATPVSEQFSSSQKQKAETFPLMSPLEDLSLPPSTDKSEKAEIKPEIPTTSTSVSEYLILAQKQKTQAYLEPESEDLIPSHLTSEVEKGEREASSSVAAIPAALPAQSSIVKEETKPASPHSVLPDSVPAIKKEQEPTAALTLKAADEQMALSKVRKEEIVPDSQEATAHVSQDQKMEPQPPNVPESEMKYSVLPDMVDEPKKGVKPKLVLNVTSELEQRKLSKNEPEVIKPYSPLKETSLSGPEVLSAVKMEMKHDSKITTTPIVLHSASSGVEKQVEHGPPALAFSALSEEIKKEIEPKVEAKEVKAGLPVIKTSSSQHSDKSEEARVEDKQDLVFSTVCDSERLVSSQKKSLMSTSEVLEPEHELPLSLWGEIKKKETELPSSQNVSPASKHIIPKGKDEETASSSPELENLASGLAPTLLLLSDDKNKPAVEVSSTAQGDFPSEKQDVALAELSLEPEKKDKPHQPLELPNAGSEFSSDLGRQSGSIGTKQAKSPITETEDSVSEKGPAELRSREGKEENRELCASSTMPAISELSSLLREESQNEEIKPFSPKIISLESKEPPASVAEGGNPEEFQPFTFSLKGLSEEVSHPADFKKGGNQEIGPLPPTGNLKAQVMGDILDKLSEETGHPNSSQVLQSITEPSKIAPSDLLVEQKKTEKALHSDQTVKLPDVSTSSEDKQDLGIKQFSLMRENLPLEQSKSFMTTKPADVKETKMEEFFISPKDENWMLGKPENVASQHEQRIAGSVQLDSSSSNELRPGQLKAAVSSKDHTCEVRKQVLPHSAEESHLSSQEAVSALDTSSGNTETLSSKSYSSEEVKLAEEPKSLVLAGNVERNIAEGKEIHSLMESESLLLEKANTELSWPSKEDSQEKIKLPPERFFQKPVSGLSVEQVKSETISSSVKTAHFPAEGVEPALGNEKEAHRSTPPFPEEKPLEESKMVQSKVIDDADEGKKPSPEVKIPTQRKPISSIHAREPQSPESPEVTQNPPTQPKVAKPDLPEEKGKKGISSFKSTPDNKVAEQEDLETQPSPSVEKAVTVIDPEGTIPTNFNVAEKPADHSLSEVKLKTADEPRGTLVKSGDGQNVKEKSMILSNVEDLQQPKFISEVSREDYGKKEISGDSEEMNINSVVTSADGENLEIQSYSLIGEKLVMEEAKTIVPPHVTDSKRVQKPAIAPPSKWNISIFKEEPRSDQKQKSLLSFDVVDKVPQQPKSASSNFASKNITKESEKPESIILPVEESKGSLIDFSEDRLKKEMQNPTSLKISEEETKLRSVSPTEKKDNLENRSYTLAEKKVLAEKQNSVAPLELRDSNEIGKTQITLGSRSTELKESKADAMPQHFYQNEDYNERPKIIVGSEKEKGEEKENQVYVLSEGKKQQEHQPYSVNVAESMSRESDISLGHSLDETQSFSLVKATSVTEKSEAMLAEAHPEIREAKAVGTQPHPLEESKVLVEKTKTFLPVALSCRDEIENHSLSQEGNLVLEKSSRDMPDHSEEKEQFRESELSKGGSVDITKETVKQGFQEKAVGTQPRPLEESKVLVEKTKTFLPVVLSCHDEIENHSLSQEGNLVLEKSSRDMPDHSEEKEQFKESELWKGGSVDITKESMKEGFPSKESERTLARPFDETKSSETPPYLLSPVKPQTLASGASPEINAVKKKEMPRSELTPERHTVHTIQTSKDDTSDVPKQSVLVSKHHLEAAEDTRVKEPLSSAKSNYAQFISNTSASNADKMVSNKEMPKEPEDTYAKGEDFTVTSKPAGLSEDQKTAFSIISEGCEILNIHAPAFISSIDQEESEQMQDKLEYLEEKASFKTIPLPDDSETVACHKTLKSRLEDEKVTPLKENKQKETHKTKEEISTDSETDLSFIQPTIPSEEDYFEKYTLIDYNISPDPEKQKAPQKLNVEEKLSKEVTEETISFPVSSVESALEHEYDLVKLDESFYGPEKGHNILSHPETQSQNSADRNVSKDTKRDVDSKSPGMPLFEAEEGVLSRTQIFPTTIKVIDPEFLEEPPALAFLYKDLYEEAVGEKKKEEETASEGDSVNSEASFPSRNSDTDDGTGIYFEKYILKDDILHDTSLTQKDQGQGLEEKRVGKDDSYQPIAAEGEIWGKFGTICREKSLEEQKGVYGEGESVDHVETVGNVAMQKKAPITEDVRVATQKISYAVPFEDTHHVLERADEAGSHGNEVGNASPEVNLNVPVQVSFPEEEFASGATHVQETSLEEPKILVPPEPSEERLRNSPVQDEYEFTESLHNEVVPQDILSEELSSESTPEDVLSQGKESFEHISENEFASEAEQSTPAEQKELGSERKEEDQLSSEVVTEKAQKELKKSQIDTYCYTCKCPISATDKVFGTHKDHEVSTLDTAISAVKVNRC

SEQ ID NO: 920075 - protein, 1906 aa, Homo sapiens
SADEHSVLAEEDKVAIKGASPIETSSKHLAVVRGREGKEENRELCASSTMPAISELSSLLREESQNEEIKPFSPKIISLESKEPPASVAEGGNPEEFQPFTFSLKGLSEEVSHPADFKKGGNQEIGPLPPTGNLKAQVMGDILDKLSEETGHPNSSQVLQSITEPSKIAPSDLLVEQKKTEKALHSDQTVKLPDVSTSSEDKQDLGIKQFSLMRENLPLEQSKSFMTTKPADVKETKMEEFFISPKDENWMLGKPENVASQHEQRIAGSVQLDSSSSNELRPGQLKAAVSSKDHTCEVRKQVLPHSAEESHLSSQEAVSALDTSSGNTETLSSKSYSSEEVKLAEEPKSLVLAGNVERNIAEGKEIHSLMESESLLLEKANTELSWPSKEDSQEKIKLPPERFFQKPVSGLSVEQVKSETISSSVKTAHFPAEGVEPALGNEKEAHRSTPPFPEEKPLEESKMVQSKVIDDADEGKKPSPEVKIPTQRKPISSIHAREPQSPESPEVTQNPPTQPKVAKPDLPEEKGKKGISSFKSWMSSLFFGSSTPDNKVAEQEDLETQPSPSVEKAVTVIDPEGTIPTNFNVAEKPADHSLSEVKLKTADEPRGTLVKSGDGQNVKEKSMILSNVEDLQQPKFISEVSREDYGKKEISGDSEEMNINSVVTSADGENLEIQSYSLIGEKLVMEEAKTIVPPHVTDSKRVQKPAIAPPSKWNISIFKEEPRSDQKQKSLLSFDVVDKVPQQPKSASSNFASKNITKESEKPESIILPVEESKGSLIDFSEDRLKKEMQNPTSLKISEEETKLRSVSPTEKKDNLENRSYTLAEKKVLAEKQNSVAPLELRDSNEIGKTQITLGSRSTELKESKADAMPQHFYQNEDYNERPKIIVGSEKEKGEEKENQVYVLSEGKKQQEHQPYSVNVAESMSRESDISLGHSLDETQSFSLVKATSVTEKSEAMLAEAHPEIREAKAVGTQPHPLEESKVLVEKTKTFLPVALSCRDEIENHSLSQEGNLVLEKSSRDMPDHSEEKEQFRESELSKGGSVDITKETVKQGFQEKAVGTQPRPLEESKVLVEKTKTFLPVVLSCHDEIENHSLSQEGNLVLEKSSRDMPDHSEEKEQFKESELWKGGSVDITKESMKEGFPSKESERTLARPFDETKSSETPPYLLSPVKPQTLASGASPEINAVKKKEMPRSELTPERHTVHTIQTSKDDTSDVPKQSVLVSKHHLEAAEDTRVKEPLSSAKSNYAQFISNTSASNADKMVSNKEMPKEPEDTYAKGEDFTVTSKPAGLSEDQKTAFSIISEGCEILNIHAPAFISSIDQEESEQMQDKLEYLEEKASFKTIPLPDDSETVACHKTLKSRLEDEKVTPLKENKQKETHKTKEEISTDSETDLSFIQPTIPSEEDYFEKYTLIDYNISPDPEKQKAPQKLNVEEKLSKEVTEETISFPVSSVESALEHEYDLVKLDESFYGPEKGHNILSHPETQSQNSADRNVSKDTKRDVDSKSPGMPLFEAEEGVLSRTQIFPTTIKVIDPEFLEEPPALAFLYKDLYEEAVGEKKKEEETASEGDSVNSEASFPSRNSDTDDGTGIYFEKYILKDDILHDTSLTQKDQGQGLEEKRVGKDDSYQPIAAEGEIWGKFGTICREKSLEEQKGVYGEGESVDHVETVGNVAMQKKAPITEDVRVATQKISYAVPFEDTHHVLERADEAGSHGNEVGNASPEVNLNVPVQVSFPEEEFASGATHVQETSLEEPKILVPPEPSEERLRNSPVQDEYEFTESLHNEVVPQDILSEELSSESTPEDVLSQGKESFEHISENEFASEAEQSTPAEQKELGSERKEEDQLSSEVVTEKAQKELKKSQIDTYCYTCKCPISATDKVFGTHKDHEVSTLDTAISAVKVNRC

SEQ ID NO: 920076 - protein, 130 aa, Homo sapiens
LSSNMAGWRKRNVTEHIKGDVSPGRLTTLVGSSHDQRCCMTHGSTSFPALLWQEGKMLCFSLMNCASYDSVGQPVSIDLFLVDTVGQKALLTTEARVKCALTTISKVNDGALIMGQEADACMLFHTAPFY

SEQ ID NO: 920077 - protein, 259 aa, Homo sapiens
MFPLWGSEEDKKMWESVVLPRDLLNGFDQGADSDVDNKAQAEVISDRNEELVGNWSKAAEICITNEEPNVNHQDNGENVPRACQKSSWQPLPSQAWRPRRKKWFCGLDTGSLCCVQPRDLVPCTAATPALAKRGQCRARATVSEGASLKPLQLTCGVEPMSAQKAVQKGNVGWEPPHRVPTGALPGGDIRRRPPSSRPQNGRSTYSLHCVTGKDVDTQHQPMKAAMREAVLCKTTEVELLKTMGIHLLHKRDQGKDENV

SEQ ID NO: 920078 - protein, 942 aa, Homo sapiens
KRDSQRAPEAVLCLQLWQRTVPLDTLKGLGTCFPSGPELRGAGIAAAMERASERRTASALFAGFRALGLFSNDIPHVVRFSALKRRFYVTTCVGKSFHTYDVQKLSLVAVSNSVPQDICCMAADGRLVFAAYGNVFSAFARNKEIVHTFKGHKAEIHFLQPFGDHIISVDTDGILIIWHIYSEEEYLQLTFDKSVFKISAILHPSTYLNKILLGSEQGSLQLWNVKSNKLLYTFPGWKVGVTALQQAPAVDVVAIGLMSGQVIIHNIKFNETLMKFRQDWGPITSISFRTDGHPVMAAGSPCGHIGLWDLEDKKLINQMRNAHSTAIAGLTFLHREPLLVTNGADNALRIWIFDGPTGEGRLLRFRMGHSAPLTNIRYYGQNGQQILSASQDGTLQSFSTVHEKFNKSLGHGLINKKRVKRKGLQNTMSVRLPPITKFAAEEARESDWDGIIACHQGKLSCSTWNYQKSTIGAYFLKPKELKKDDITATAVDITSCGNFAVIGLSSGTVDVYNMQSGIHRGSFGKDQAHKGSVRGVAVDGLNQLTVTTGSEGLLKFWNFKNKILIHSVSLSSSPNIMLLHRDSGILGLALDDFSISVLDIETRKIVREFSGHQGQINDMAFSPDGRWLISAAMDCSIRTWDLPSGCLIDCFLLDSAPLNVSMSPTGDFLATSHVDHLGIYLWSNISLYSVVSLRPLPADYVPSIVMLPGTCQTQDVEVSEETVEPSDELIEYDSPEQLNEQLVTLSLLPESRWKNLLNLDVIKKKNKPKEPPKVPKSAPFFIPTIPGLVPRYAAPEQNNDPQQSKVVNLGVLAQKSDFCLKLEEGLVNNKYDTALNLLKESGPSGIETELRSLSPDCGGSIEVMQSFLKMIGMMLDRKRDFELAQAYLALFLKLHLKMLPSEPVLLEEITNLSSQVEENWTHLQSLFNQSMCILNYLKSALL

SEQ ID NO: 920079 - protein, 942 aa, Homo sapiens; identical to SEQ ID NO: 920078

SEQ ID NO: 920080 - protein, 942 aa, Homo sapiens; identical to SEQ ID NO: 920078

SEQ ID NO: 920081 - protein, 146 aa, Homo sapiens
MSLLKSCIALKVCVHFSGERICSVHHIFQRSLKSGKPTIYCSAPNSLFFSEEKGEKIKASTGWSCFDSPVDSDEIRESCWQLPSILTLNEQYRVSTALLIVHQFDGLTMVQVEAGRGVCQVAETDTALGCRLVTMRLTSPRLQVGL

SEQ ID NO: 920082 - protein, 146 aa, Homo sapiens; identical to SEQ ID NO: 920081

SEQ ID NO: 920083 - protein, 148 aa, Homo sapiens
RKTHLQEAPSSMWVGTIRSAASTTRKSRQKKVEEDDLLSLLAFIFLFCWMLPALKHQTPRSSAFGLLDLHQWYARGSPAFSHRLKAALVKLKCDFCSSPANCSIKDWKYCEKRKRERNVLIIHNILLLPTANLTTAGKKQQKQTNKKT

SEQ ID NO: 920084 - protein, 148 aa, Homo sapiens; identical to SEQ ID NO: 920083

SEQ ID NO: 920085 - protein, 150 aa, Homo sapiens
MVLGKVKSLTISFDCLNDSNVPVYSSGDTVSGRVNLEVTGEIRVKSLKIHARGHAKVRWTESRNAGSNTAYTQNYTEEVEYFNHKDILIGHERGNRRAPVKVPPERPPPSPYSRLFPGFWGRPARVNIMFCRPSFGPPKGHRKETTSGFN

SEQ ID NO: 920086 - protein, 206 aa, Homo sapiens
MVLGKVKSLTISFDCLNDSNVPVYSSGDTVSGRVNLEVTGEIRVKSLKIHARGHAKVRWTESRNAGSNTAYTQNYTEEVEYFNHKDILIGHERDDDNSEEGFHTIHSGRHEYAFSFELPQTPLATSFEGRHGSVRYWVKAELHRPWLLPVKLKKEFTVFEHIDINTPSLLSPQAGTKEKTLCCWFCTSGPISLSAKIERKGYTPGM

SEQ ID NO: 920087 - protein, 247 aa, Homo sapiens
MVLGKVKSLTISFDCLNDSNVPVYSSGDTVSGRVNLEVTGEIRVKSLKIHARGHAKVRWTESRNAGSNTAYTQNYTEEVEYFNHKDILIGHERDDDNSEEGFHTIHSGRHEYAFSFELPQTPLATSFEGRHGSVRYWVKAELHRPWLLPVKLKKEFTVFEHIDINTPSLLSPQAGTKEKTLCCWFCTSGPISLSAKIERKGYTPGESIQIFAEIENCSSRMVVPKAAIYQHRPSMPRENEGSNTACG

SEQ ID NO: 920088 - protein, 270 aa, Homo sapiens
MHTEMQALRADWKQWEDSVFQTQSCLENLVSQMALSEQEFSGQVAQLEQALEQFSALLKTWAQQLTLLEGKNTDEEIVECWHKGQEILDALQKAEPRTEDLKSQLNELCRFSRDLSTYSGKVSGLIKEYNCLCLQASKGCQNKEQILQQRFRKAFRDFQQWLVNAKITTAKCFDIPQNISEVSTSLQKIQEFLSESENGQHKLNMMLSKGELLSTLLTKEKAKGIQAKVTAAKEDWKNFHSNLHQKESALEVYIANHMEAFCVICYCCCC

SEQ ID NO: 920089 - protein, 130 aa, Homo sapiens
SLDMLSSCKHKSTRERVGTHAAPEDVETSANAALVKAAPMAKPNTKGQIILLWLPIHMVKPRMDHYECDKNESQVEGDKAVRVNKMEIGKALNTFVSSGETSREEVTEDIEKTSGKWMSKIPEKLRSRDL

SEQ ID NO: 920090 - protein, 172 aa, Homo sapiens
MRQEKMFAENTCFGIEQNPLVQYGWRNSFFFFLFGGSSLELLSVLVLLLLEELESESESEEEEEVVEEAEDEELEELSSMSLSSEEDEANAVEPHISSKMIKLEVFNKLPKAKCGIVNQCEDSSFCRHMGVVCLQKPGSSHWYTIQHLLHYYTVKFFAGFPSMITTGCSQIR

SEQ ID NO: 920091 - protein, 323 aa, Homo sapiens
MEHPSKMEFFQKLGYDREDVLRVLGKLGEGALVNDVLQELIRTGSRPGALEHPAAPRLVPRGSCGVPDSAQRGPGTALEEDFRTLASSLRPIVIDGSNPNAIGRAWLNPEDLAAALWRLTEWATGPVLFTEMGSPKQDYWHHSSFCKRWVNVMRTPSDDVGRVEDGDLVNRPMAAPSFAGPLAVPHKGNQGSQKYRTARPGLPNTTPRSEGKAHPCPVPTEPLATCDTVIQDIRREITLRNTCCVSMISLFSHCSHGNKETFSCRGIKLAVDWFRDRGHTYIKVFVPSWRKDPPRADTPIRGMLEQMYAQEEVNSHNGRLLPS

SEQ ID NO: 920092 - protein, 323 aa, Homo sapiens; identical to SEQ ID NO: 920091

SEQ ID NO: 920093 - protein, 188 aa, Homo sapiens
RVSSCTIQSCEADPAEQLALQSTLTVLAERMSTIRMKASGKRQLLEEKLNDQLEEQRQEQALQRYRCEADELDSWLLSTKATLDTALSPPKEPMDMEAQLMDCQNMLVEIEQKVVALSELSVHNENLLLEGKAHTKDEAEQLAGKLRRLKGSLLELQRALHDKQLNMQVRVPAAGPQLKVGTLFTCSF

SEQ ID NO: 920094 - protein, 564 aa, Homo sapiens
PSRSFMVPHTLLEESKEIDSELEAMTEKLQYLTSVYCTEKMSQQVAELGRETEELRQMIKIRLQNLQDAAKDMKKFEAELKKLQAALEQAQATLTSPEVGRLSLKEQLSHRQHLLSEMESLKPKVQAVQLCQSALRIPEDVVASLPLCHAALRLQEEASRLQHTAIQQSVVQYEQYEQEMKHLQQLIEGAHREIEDKPVATSNIQELQAQISRHEKPLIRPHPLISPFVPTRGRGLGHFGCACAAPRSLRSGSVARCRRTRRLHILPPGPARLCALIGSPCRKMNATTSELAQKIKGYQEQIASLNSKCKMLTMKAKHATMLLTVTEVEGLAEGTEDLDGELLPTPSAHPSVVMVFLDGREKVNKAREDVNRPRSLKKQFMGFSESVGESGLSSETGKHKIRLSQSEFILPHDTATFVSQTAGAFFNTFYQYMILNKTQDIAYYQALSAERLQTDAAKIHPSTSASQEFYEPGLEPSATAKLGDLQRSWETLKNVISEKQRTLYEALERQQKYQDSLQSISTKMEAIELKLSESPEPGRSPESQMAEHQLVVVVLAITAVRRYS

SEQ ID NO: 920095 - protein, 458 aa, Homo sapiens
MHSRRERARGLRGAHHPLVDNGPPQSLRAPPLLSPLKTAGAKSIWEPLASARSLVWETPANPGSHFVVPGRPETPERTPLQKTPEQVPTNFMGALHMKTSAPLSSRNGEGRRGGTSVASCPWVVGAVCSAERQPCTQRICKLRKGAFGSVRAFSLRSPAALRLADLYPTGGWRPKQNSPGRCLPLAPHVPRAHRKLQQNKQLTTGIPLSAARRLPAGKISRKPRGRGAEGRQRGARPSPPGGGQRDSGREGGSASGAALPVLRLQNELWERSCALPASPISPPSRGEGGEPNPSAPRTPAASSRQLSPQSASNRGEQRPSSPPGNPYIATLPPAGAIRLIPALRTAGGGRRRPPRPGPGSVLSSPSPHHTQSCTKTPFTPPAPPSAPPSGPAALPSPTRGTSRFLVGDCATRRQAGRQRTRAGCSHSAPRPRRQMRCPPPRSLAARRQPQNAHLSLRK

SEQ ID NO: 920096 - protein, 458 aa, Homo sapiens; identical to SEQ ID NO: 920095

SEQ ID NO: 920097 - protein, 458 aa, Homo sapiens; identical to SEQ ID NO: 920095

SEQ ID NO: 920098 - protein, 458 aa, Homo sapiens; identical to SEQ ID NO: 920095

SEQ ID NO: 920099 - protein, 458 aa, Homo sapiens; identical to SEQ ID NO: 920095

SEQ ID NO: 920100 - protein, 458 aa, Homo sapiens; identical to SEQ ID NO: 920095

SEQ ID NO: 920101 - protein, 145 aa, Homo sapiens
CGIRPQMTNWQPTGHVRPTDMSCLAHNKLPGGCLSHMKALAAVVERIIHGDLQLYCYYHRETAETKEGILIESKPGRKDALALTCNRSICAMAWRDEVENPCLIGIPDHRLHEGCLLQHSRDSRLWAYCSVSCDKNLKSEPDFRT

SEQ ID NO: 920102 - protein, 145 aa, Homo sapiens; identical to SEQ ID NO: 920101

SEQ ID NO: 920103 - protein, 222 aa, Homo sapiens
MKKGGLIDSQFHRLNRKHDWEASENLQLWQKATGKAKPYHSLRGDNVLAALAGLRSLLGLGVCSGWAQGALQPATALWGPLSGAGRSWSQLPLLAGRCGGGGAGGNRGCTRTSWADTGSCFTPEASETMNPLEGMNNSRRAALKSLTLTAKVCSSPPEVSETMNPPEGINSGHIGTSDGTNSRHTIFKNCNTQPGLKGDFREELTEEIHSRISPFSPHHGQA

SEQ ID NO: 920104 - protein, 913 aa, Homo sapiens
MEYDLEKRGITSKVLPLQLENIFYKLLADGYSEKIEHVGDFNQKACSTSEMMEEKPHILGDIKSKEGNYYSPNLETVKEIGLESSTVWASTLPRDEKLKDLCNDFPSHLECTSGSKEMASGDSSTEQESLDNNLEALKNQLRQLENVLKDLGHTKMQLETTAFDVQFFISEYAQDLSPNQSKQLLRLLNTTQKCFLDVQESVTTQVERLETQLHLEQDLDDQKIVAERQQEYKEKLQGICDLLTQTENRLIGHQEAFMIGDGTVELKKYQSKQEELQKDMQGSAQALAEVVKNTENFLKENGEKLSQEDKALIEQKLNEAKIKCEQLNLKAEQSKKELDKVVTTAIKEETEKVAAVKQLEESKTKIENLLDWLSNVDKDSERAGTKHKQVIEQNGTHFQEGDGKSAIGEEDEVNGNLLETDVDGQVGTTQENLNQQYQKVKAQHEKIISQHQAVIIATQSAQVLLEKQGQYLSPEEKEKLQKNMKELKVHYETALAESEKKMKLTHSLQEELEKFDADYTEFEHWLQQSEQELENLEAGADDINGLMTKLKRQKSFSEDVISHKGDLRYITISGNRVLEAAKSCSKRDGGKVDTSATHREVQRKLDHATDRFRSLYSKCNVLGNNLKDLVDKYQHYEDASCGLLAGLQACEATASKHLSEPIAVDPKNLQRQLEETKALQGQISSQQVAVEKLKKTAEVLLDARGSLLPAKNDIQKTLDDIVGRYEDLSKSVNERNEKLQITLTRSLSVQDGLDEMLDWMGNVESSLKEQGQVPLNSTALQDIISKNIMLEQDIAGRQSSINAMNEKVKKFMETTDPSTASSLQAKMKDLSARFSEASHKHKETLAKMEELKTKVELFENLSEKLQTFLETKTQALTEVDVPGKDVTELSQYMQTCYYVFDLRNVFVFWIHSR

SEQ ID NO: 920105 - protein, 598 aa, Homo sapiens
MEYDLEKRGITSKVLPLQLENIFYKLLADGYSEKIEHVGDFNQKACSTSEMMEEKPHILGDIKSKEGNYYSPNLETVKEIGLESSTVWASTLPRDEKLKDLCNDFPSHLECTSGSKEMASGDSSTEQESLDNNLEALKNQLRQLENVLKDLGHTKMQLETTAFDVQFFISEYAQDLSPNQSKQLLRLLNTTQKCFLDVQESVTTQVERLETQLHLEQDLDDQKIVAERQQEYKEKLQGICDLLTQTENRLIGHQEAFMIGDGTVELKKYQSKQEELQKDMQGSAQALAEVVKNTENFLKENGEKLSQEDKALIEQKLNEAKIKCEQLNLKAEQSKKELDKVVTTAIKEETEKVAAVKQLEESKTKIENLLDWLSNVDKDSERAGTKHKQVIEQNGTHFQEGDGKSAIGEEDEVNGNLLETDVDGQVGTTQENLNQQYQKVKAQHEKIISQHQAVIIATQSAQVLLEKQGQYLSPEEKEKLQKNMKELKVHYETALAESEKKMKLTHSLQEELEKFDADYTEFEHWLQQSEQELENLEAGADDINGLMTKLKRQKSFSEDVISHKGDLRYITISGNRVLEAAKSAADEGGVSQMRGSSR

SEQ ID NO: 920106 - protein, 158 aa, Homo sapiens
MNTCYLGRQDSQLMTCLRNSQQLVGGERNRLDLGGPGLMWISYCRRRSASEGCVPMTTSDSMMGTPGVQTDSTVQLCSGEEELWCSQSIGHNTLMRGFHLKHIVSVVTVGFVLTRTCQKPYQGAHTTLGSNTGGGVAEFNFMKAGVSICFLHHCIPNI

SEQ ID NO: 920107 - protein, 151 aa, Homo sapiens
MTVSTSPSKHTVHSPFLMPAGSGGENTGDTGGLSGELGAVTAEREKRTYVNNVSLRDDSDAEEDWLTLKVISESLSSWEPLRDPDGVVVAGLDCRVPEAQRDSIRGSGRKEGTHSIHWEGSLELEEPTRGKGLPESDANTEASRALSWKER

SEQ ID NO: 920108 - protein, 228 aa, Homo sapiens
MFIHHSSVLIKDILVAGQITFTKPTTEKFTKDVVDSVIAVLFSSEKGQNKQVTSKVTEQMLNCLLEDLCRRRDQASPPTGVHRKWCHTCAEVSRPASTTSNPLSELPSCMGWQCPHSTAENLYYVEQCEDSRSEAASNWSGSSGSSKLQYGPLASIPGGYDADISRVFNGNNGTSCQQKLLPGPLQIYDIDADIKGSVHCKSFPLSYNRNLEHRHMDPSLGSTKKPIL

SEQ ID NO: 920109 - protein, 103 aa, Homo sapiens
MGSRSRNGLGNFNCGSTCWCGLGQRRRTNLVCKLNTRTTILAATNPKGQYDPQESVSVNIALGSPLLSRFDLILVLLDTKNEDWDRIISSFILENKGYVKTNK

SEQ ID NO: 920110 - protein, 211 aa, Homo sapiens
NSRPRRTRLTRRRQKLILVLLDTKNEDWDRIISSFILENKGYPSKSEKLWSMEKMKTYFCLIRNLQPTLSDVGNQVLLRYYQMQRQSDCRNAARTTIRLLESLIRLAEAHARLMFRDTVTLEDAITVVSVMESSMQGGALLGGVNALHTSFPENPGEQYQRQCELILEKLELQSLLSEELRRLESDCEHHPHQHFSVHFSGYQTFRQARWG

SEQ ID NO: 920111 - protein, 253 aa, Homo sapiens
MSEYTEMNCTVSPGSLVCKLNTRTTILAATNPKGQYDPQESVSVNIALGSPLLSRFDLILVLLDTKNEDWDRIISSFILENKGYPSKSEKLWSMEKMKTYFCLIRNLQPTLSDVGNQVLLRYYQMQRQSDCRNAARTTIRLLESLIRLAEAHARLMFRDTVTLEDAITVVSVMESSMQGGALLGGVNALHTSFPENPGEQYQRQCELILEKLELQSLLSEELRRLESDCEHHPHQHFSVHFSGYQTFRQARWG

SEQ ID NO: 920112 - protein, 155 aa, Homo sapiens
MGFPLVAAYTLDCLLALQDEIPLWGEGGHNRTGICKFIEDPTLSLNPSFAYWRCCPSELGMLASFVLKPETPLLRFPPITFWVSYYISWAQLSYLETRILIATLKHGCKEEMKSLCGNAKPSAWHRAGAQRPRIWEKEHALGSKVLFLSLSHSSH

SEQ ID NO: 920113 - protein, 155 aa, Homo sapiens; identical to SEQ ID NO: 920112

SEQ ID NO: 920114 - protein, 155 aa, Homo sapiens; identical to SEQ ID NO: 920112

SEQ ID NO: 920115 - protein, 437 aa, Homo sapiens
NSFCNGVTFTQRPIRLYEQVRLRLVAVRPGWSGALRFGFTAHDPSLMSAQDIPKYACPDLVTRPGYWAKALPENLALRDTVLAYWADRHGRVFYSVNDGEPVLFHCGVAVGGPLWALIDVYGITDEVQLLESAFADTLTPARLSQARFSACLPPSSHDAANFDNNELENNQVVAKLGHLALGRAPGPPPADAAAAAIPCGPRERPRPASSPALLEADLRFHATRGPDVSLSADRKVACAPRPDGGRTLVFSERPLRPGESLFVEVGRPGLAAPGALAFGITSCDPGVLRPNELPADPDALLDRKEYWVVARAGPVPSGGDALSFTLRPGGDVLLGINGRPRGRLLCVDTTQALWAFFAVRGGVAGQLRLLGAAPPEASPRFPTLSARARSTPSKIAGLHPRVPDSVGARCAPRTCISDKCPEMLTKWNGGLNHPILR

SEQ ID NO: 920116 - protein, 151 aa, Homo sapiens
MVGMNLASNSLRRVVFLWQYQGCKGECVPGLVQVHLEAWVPSGTESRKICYYALKGIVINTKFYARQPRPYPGRGLKRHSWKGFGTKYSLDSGTPDNSWARTGGHLRNEVSVKACTPTIRIPDPSPVGSQDTGREVYILQAEDGRFSLQGK

SEQ ID NO: 920117 - protein, 221 aa, Homo sapiens
MWTEGQWDMSGDMWFLSRQGPPPPLCPHGNPHSLCYDITVIPKFRPGPRWCAVQGQVDEKTFLHYDCGSKTVTPVSPLGKKLNVTTAWKAQNPVLREVVDILTEQLLDIQLENYIPKEPLTLQARMSCEQKAEGHGSGSWQLSFDGQIFLLFDSENRMWTTVHPGARKMKEKWENDKDMTMSFHYISMGDCTGWLEDFLMGMDSTLEPSAGGKTRPCRDRS

SEQ ID NO: 920118 - protein, 217 aa, Homo sapiens
AASPAFLLRLPLLLLLSSWCRTGLADPHSLCYDITVIPKFRPGPRWCAVQGQVDEKTFLHYDCGSKTVTPVSPLGKKLNVTTAWKAQNPVLREVVDILTEQLLDIQLENYIPKEPLTLQARMSCEQKAEGHGSGSWQLSFDGQIFLLFDSENRMWTTVHPGARKMKEKWENDKDMTMSFHYISMGDCTGWLEDFLMGMDSTLEPSAGGKTRPCRDRS

SEQ ID NO: 920119 - protein, 184 aa, Homo sapiens
QLLDSWTYTSGLVGAPPPMAKRGQATAWAMASEGASLKAWQLPHGIGLAGVQKTKIEIWEPLPKFQTTYGNAWMSRVPTGALPSGAVRRGPPSSRSQNGRSTNSLHLVLGKAIGTQRQSVKAAMGAIPCRATEAELPKAVGGHPLHQCAMDVRHRVKGDSYGALRLNGSPAGFWTHMGPVAPLF

SEQ ID NO: 920120 - protein, 339 aa, Homo sapiens
SSPSRLGSQAEGLLTSQTMGGQAETLLTSQTGLRAATFRLFPQLLMTLLIQIHHSIGLTMSDVDIPSGLYTEQEVPSEKVMYLLVPLLNRGNDKHKLTSAGFFVELLRSPVAKRLPSIYSVARFKDWLQDGNHLFRILGLRGLYNLVGHQEMREDIKSLLPYIVDSLRETDEKIVLSAIQILLQLVRTMDFTTLAAMMRTLFSLFGDVRSDVHRFSVTLFGAAIKSVKNPDKKSIENQVLDSLVPLLLYSQDENDAVAEDVDQEEISPLEFLPSNPEMPQGQKTNTDVLQEPKTSHQKISSLVCLLSKYMDHNELRRMGTDWIEDDLRGFYLQPVFAYR

SEQ ID NO: 920121 - protein, 131 aa, Homo sapiens
MGPRGTAEFGPGSEKMPHSVPFLHGSKEDNFNPLRKGFGARNQKKLSLRESQLKKGSHGLLYQGCYGLVWMCTVGEYTTESPQMEPICQQLDFGLLASKTVRKQIPVVSVHRHTVVFLFVKESATISKAAH

SEQ ID NO: 920122 - protein, 411 aa, Homo sapiens
MLNLPIGGEAPDSLLVMAEHGIQNNSTGEDKASIVVRVLSKDKSRYGCLGSAARSALPTWPLEARLPSPAPRLLGTVKAAACHRLLQPFSSSTTSPPSWSSEDQPSWRRGGNVPRQPTILGFSLEQAWARTLGDLCVHGINLNEIRHNIINDWLGKVFTKHLPPRLLSLNLGGHLNSVDLQGQLSRNRAQAVTATGVRCQLWRFRVFEGNQVVEQVLVWKLEGDLEAQNSQHEKLTLHNAVPELPEAGFQFQGLTARVKVPVGHIDDVMSPQVLLFRFAGQVNGRHGNQLDTCLHDEPRHSEVHPGFGRRLPLGAPRCRPPSAALRGFHEARRPRRKERLLCAQRPAERGGGSRCIFPLRGSHWRLILVQPVPAKQKAKALAHGEVSHGICHRLDVAGTFPRREIFTIVNF

SEQ ID NO: 920123 - protein, 417 aa, Homo sapiens
MSLSKKLTLDKLDVRGKRVIMRVDFNVPMKKNQITNNQRIKASIPSIKYCLDNGAKAVVLMSHLGRPDGVPMPDKYSLAPVAVELKSLLGKDVLFLKDCVGAEVEKACANPAPGSVILLENLRFHVEEEGKGQDPSGKKIKAEPDKIEAFRASLSKLGDVYVNDAFGTAHRAHSSMVGVNLPHKASGFLMKKELDYFAKALENPVRPFLAILGGAKVADKIQLIKNMLDKVNEMIIGGGMAYTFLKVLNNMEIGASLFDEEGAKIVKDIMAKAQKNGVRITFPVDFVTGDKFDENAQVGKATVASGISPGWMGLDCGPESNKNHAQVVAQARLIVWNGPLGVFEWDAFAKGTKALMDEIVKATSKGCITVIGGGDTATCCAKWNTEDKVSHVSTGGGASLELLEGKILPGVEALSNM

SEQ ID NO: 920124 - protein, 417 aa, Homo sapiens; identical to SEQ ID NO: 920123

SEQ ID NO: 920125 - protein, 188 aa, Homo sapiens
MMHPVASSNPAFCGPGKPSCLNEDAMRAADQFDIYSSQQSKYSHTVNHKPMVCQRQDPLNETHLQTTSGRSIEIKDELKKKKNLNRSGKRGRPSGTTKSAGYRTSTGRPLGTTKAAGFKTSPGRPLGTTKAAGYKVSPGRPPGSIKALSRLADLGYGCGTAAFPYPMMHGRAVHGVEETSSEVKPPNE

SEQ ID NO: 920126 - protein, 97 aa, Homo sapiens
VGGGRSGLAMRVSVCVRGPRELAHAASEHYRVVAASSYCVRGRTVRGGRGGCWEPAPASPPPSLPATPSWPVLRTVQRRRAGEGAAPARGSQPLGSP

SEQ ID NO: 920127 - protein, 188 aa, Homo sapiens; identical to SEQ ID NO: 920125

SEQ ID NO: 920128 - protein, 188 aa, Homo sapiens; identical to SEQ ID NO: 920125

SEQ ID NO: 920129 - protein, 130 aa, Homo sapiens
MCRPIIKTFRGGAGCVAMASAEWTFRVIEKMMHPVASSNPAFCGPGKPSCLNEDAMRAADQFDIYSSQQSKYSHTVNHKPMVCQRQDPLNETHLQTTSGRSIEIKDELKKKKNLNRSGKKQQAFRCSSDA

SEQ ID NO: 920130 - protein, 188 aa, Homo sapiens; identical to SEQ ID NO: 920125

SEQ ID NO: 920131 - protein, 31 aa, Homo sapiens
MVLGFSAETPRVASLRTGKPGGVGDPRAKLA

SEQ ID NO: 920132 - protein, 106 aa, Homo sapiens
MMHPVASSNPAFCGPGKPSCLNEDAMRAADQFDIYSSQQSKYSHTVNHKPMVCQRQDPLNETHLQTTSGRSIEIKDELKKKKNLNRSGKRGRPSGTTKSRQTFGDN

SEQ ID NO: 920133 - protein, 155 aa, Homo sapiens
MMHPVASSNPAFCGPGKPSCLNEDAMRAADQFDIYSSQQSKYSHTVNHKPMVCQRQDPLNETHLQTTSGRSIEIKDELKKKKNLNRSGKRGRPSGTTKSAGYRTSTGRPLGTTKAAGFKTSPGRPLGTTKAAGYKVSPGRPPGKKQQAFRCSSDA

SEQ ID NO: 920134 - protein, 130 aa, Homo sapiens; identical to SEQ ID NO: 920129

SEQ ID NO: 920135 - protein, 513 aa, Homo sapiens
MNSDQVTLVGQVFESYVSEYHKNDILLILKERDEDAHYPVVVNAMTLFETNMEIGEYFNMFPSEVLTIFDSALRRSALTILQSLSQPEAVSMKQNLHARISGLPVCPELVREHIPKTKDVGHFLSVTGTVIRTSLVKVLEFERDYMCNKCKHVFVIKADFEQYYTFCRPSSCPSLESCDSSKFTCLSGLSSSPTRCRDYQEIKIQEQVQRLSVGSIPRSMKVILEDDLVDSCKSEMGLTGNGYSSKDAADDIGAQRDWIVENKMCCCEVEIVLKANYIQVNNEQSSGIIMDEEVQKEFEDFWEYYKSDPFAGRNVILASLCPQVFGMYLVKLAVAMVLAGGIQRTDATGTRVRGESHLLLVGDPGTGKSQFLKYAAKITPRSVLTTGIGSTSAGLTVTAVKDSGEWNLEAGALVLADAGFAVLMSSIASKSMIGPVSMKQWSNKHKFAKAGLVCKLNTRTTILAATNPKGQYDPQESVSVNIALGSPLLSRFDLILVLLDTKNEDWDRIISSF

SEQ ID NO: 920136 - protein, 592 aa, Homo sapiens
GVGRERRPGRAAGARPPDTARASPRPVAPRAATCTRALRLTSLLAPETNPLPGWSSLGPSASGATRSRRLLTQPLPRFKMNSDQVTLVGQVFESYVSEYHKNDILLILKERDEDAHYPVVVNAMTLFETNMEIGEYFNMFPSEVLTIFDSALRRSALTILQSLSQPEAVSMKQNLHARISGLPVCPELVREHIPKTKDVGHFLSVTGTVIRTSLVKVLEFERDYMCNKCKHVFVIKADFEQYYTFCRPSSCPSLESCDSSKFTCLSGLSSSPTRCRDYQEIKIQEQVQRLSVGSIPRSMKVILEDDLVDSCKSEMGLTGNGYSSKDAADDIGAQRDWIVENKMCCCEVEIVLKANYIQVNNEQSSGIIMDEEVQKEFEDFWEYYKSDPFAGRNVILASLCPQVFGMYLVKLAVAMVLAGGIQRTDATGTRVRGESHLLLVGDPGTGKSQFLKYAAKITPRSVLTTGIGSTSAGLTVTAVKDSGEWNLEAGALVLADAGFAVLMSSIASKSMIGPVSMKQWSNKHKCAKAGLVCKLNTRTTILAATNPKGQYDPQESVSVNIALGSPLLSRFDLILVLLDTKNEDWDRIISSF

SEQ ID NO: 920137 - protein, 183 aa, Homo sapiens
MLGFSYSLFPKAVEFIPMQANHGLVIVRGQRKQPLAVWSLHVTAVLMVTHVDFILNFLPHNQVIPTITLSTEQEFGGSQLSTTVLNLTHMPIKQEAPSTPYTIPPRQVLEDRALQWLLFHSVSPPRSVHSENTFLIAYLFLKTNPSTCSNGLSKEKAAIHSHRLLKTDCVKDSNGQVSKTLQR

SEQ ID NO: 920138 - protein, 251 aa, Homo sapiens
MYFCNLDLSCPFYIYVCPAPAGISQRNQTTFEINPLSSFRDELARQAFEAGSFWHFTSLSLAKRRSVARVPEVVCFLVGRRRGLGSWSKNQPSKCEMPVQGHVIEKLMMIFSSCCFNHSKTNKTIPGPRRIGEGWVDRYLPGKLAIVNVTAKCPITDARRWGNANFASSGQCCGDAALGPASSGLLAGAGSSPGSAALRGQDSQKDLPDCHVENGLEGTRLELRMLLEDFVYGQHSHGEKGSKNTGAMEGD

SEQ ID NO: 920139 - protein, 143 aa, Homo sapiens
PTSLAERMSHALVLRFPARAQPPFIQVKNSVEPSDSQAYLKPYLCSSSFPAPATSFLNKSLIQVLLTEALLLVNLFQAQCERIKAYKRIIKIQRRGKREEQNFEKHMMYLVREGVGKETEGVSKSLETEEKEEGKEEKTGMDL

SEQ ID NO: 920140 - protein, 260 aa, Homo sapiens
MPREDRATWKSNYFLKIIQLLDDYPKCFIVGADNVGSKQMQQIRMSLRGKAVVLMGKNTMMRKAIRGHLENNPALEKLLPHIRGNVGFVFTKEDLTEIRDMLLANKVPAAARAGAIAPCEVTVPAQNTGLGPEKTSFFQALGITTKISRGTIEILSDVQLIKTGDKVGASEATLLNMLNISPFSFGLVIQQVFDNGSIYNPEVLDITEETLHSRFLEGVRNVASVCLQIGYPTVASVPHSIINGYKRVLALSARNESWAR

SEQ ID NO: 920141 - protein, 317 aa, Homo sapiens
MPREDRATWKSNYFLKIIQLLDDYPKCFIVGADNVGSKQMQQIRMSLRGKAVVLMGKNTMMRKAIRGHLENNPALEKLLPHIRGNVGFVFTKEDLTEIRDMLLANKVPAAARAGAIAPCEVTVPAQNTGLGPEKTSFFQALGITTKISRGTIEILSDVQLIKTGDKVGASEATLLNMLNISPFSFGLVIQQVFDNGSIYNPEVLDITEETLHSRFLEGVRNVASVCLQIGYPTVASVPHSIINGYKRVLALSVETDYTFPLAEKVKAFLADPSAFVAAAPVAAATTAAPAAAAAPAKVEAKEESEESDEDMGFGLFD

SEQ ID NO: 920142 - protein, 156 aa, Homo sapiens
MVYMCHIFLIQSIIDGHLEKTTTRGPYAWRNGRENLTGLTFSVPPPHGKEEVRIASYLVEVFVSLRVIGYPTVASVPHSIINGYKRVLALSVETDYTFPLAEKVKAFLADPSAFVAAAPVAAATTAAPAAAAAPAKVEAKEESEESDEDMGFGLFD

SEQ ID NO: 920143 - protein, 80 aa, Homo sapiens
GDFGVPIAILIMVLCVETDYTFPLAEKVKAFLADPSAFVAAAPVAAATTAAPAAAAAPAKVEAKEESEESDEDMGFGLFD

SEQ ID NO: 920144 - protein, 362 aa, Homo sapiens
MRQEVFVTIADLSYQDVHLLLGSEDRAELFSLTIKSIITLPSVRTLTQIQEIMPNGTCNTECLYRQTFQAFSEMLQSLVVKDPHLENLDTIIKHLVPWLQSVKDHERERATASMAQVLKCLSKHLNLKLPLRFQRLGHLVALMALLCGDPQEKVAEEAAEGIHSLLHITLRLKYITHDKKDQQNLKRALTKCREFLELHSSAAKCFYNCPFRIAQVFEGFLDSNELCQFIMTTFDTLKTLKHPCIQRSAGELLLTLAKNTESQFEKVPEIMGVICAQLSIISQPRVRQQIINTMFLTLKFMNHWLKGCALSKFRCIFSTLKMCGKLKAFCNTSLTINSFSKYFIYSLRNPKKITEVISGKEV

SEQ ID NO: 920145 - protein, 362 aa, Homo sapiens; identical to SEQ ID NO: 920144

SEQ ID NO: 920146 - protein, 311 aa, Homo sapiens
MRQEVFVTIADLSYQDVHLLLGSEDRAELFSLTIKSIITLPSVRTLTQIQEIMPNGTCNTECLYRQTFQAFSEMLQSLVVKDPHLENLDTIIKHLVPWLQSVKDHERERATASMAQVLKCLSKHLNLKLPLRFQRLGHLVALMALLCGDPQEKVAEEAAEGIHSLLHITLRLKYITHDKKDQQNLKRALTKCREFLELHSSAAKCFYNCPFRIAQVPEIMGVICAQLSIISQPRVRQQIINTMFLTLKFMNHWLKGCALSKFRCIFSTLKMCGKLKAFCNTSLTINSFSKYFIYSLRNPKKITEVISGKEV

SEQ ID NO: 920147 - protein, 181 aa, Homo sapiens
LSGRRDGSRLQSARPPRAGAESRSAPATRRPGALERTRGAMRRQPAKVAALLLGLLLECTEAKKHCWYFEGLYPTYYICRSYEDCCGSRCCVRALSIQRTGDEPCREFHGNGFPGPTQLTPGECGLPAPSSLLQHASAPVRTGSEGQVVGCPRARGETGEGLSLAFLSSLMFTSRNGLVGC

SEQ ID NO: 920148 - protein, 273 aa, Homo sapiens
VCCSHRVLKNASSSLLKIKPQGSMMGQLDGKVIILTAAAQGIGQAAALAFVREGAKVIATDINVSKLQELEKYLGIQTRVLDVTKKKQIDQFANEVERLDVLFNVAGFVHHGTVLDCEEKDWDFSMNLNVRSTYLMIKAFLPKMLAQKSGNIITMFSVVSSIKGVVNRCVYSTTKAAVIGLTKSVAADFIQQGIRCNCVCPGTVDTPSLQERIQARGNPEEARNDFLKRQKMGRFATAEEIAMLCVYVASDESAYVTDSAPCPTTCKRPKRKN

SEQ ID NO: 920149 - protein, 389 aa, Homo sapiens
MGERAGSPGTDQERKAGKHHYSYSSDFETPQSSGRSSLVSSSPASVRRKNPKRQTSDGQVHHQAPRKPSPKGLPNRKGVRVGFRSQSLNREPLRKDTDLVTKRILSARLLKINELQNEVSELQVKLAELLKENKSLKRLQYRQEKALNKFEDAENEISQLIFRHNNEITALKERLRKSQEKERATEKRVKDTESELFRTKFSLQKLKEISEARHLPERDDLAKKLVSAELKLDDTERRIKELSKNLELSTNSFQRQLLAERKRAYEAHDENKVLQKEVQRLYHKLKSDFADLCTKGVQTMEDFKPEEYPLTPETIMCYENKWEEPGHLTLNGKEKNLIKSKKKRHLYWKEKKSQSGKLEGTFHKDGNNSSQGAKATRTEVALPASPALV

SEQ ID NO: 920150 - protein, 128 aa, Homo sapiens
SPSPNLDLTETGKEMRSIICQGRYKKVVTCMDFLHQQLPISMETAYRMGIFYPKTPETDHSTRCQIFFIRVHQNKMWHQIECRSRYEDSAVFDECYLLRCLVDAAVVAVLGRCYYYYAQCSPTMAALR

SEQ ID NO: 920151 - protein, 151 aa, Homo sapiens
MESRLKESHKERQASEREKPDVKGSRNASREEVFGKVAEVVKDIMKNLEPMKQKDLFWNTWCGILENSRYDRHAARVVTQGPALRRSLHMTQCSTVAILKLLIVFEQEALGSMSYTATRITDYIGNSTFIRSNGIHRSQDLSSPSVCSDNT

SEQ ID NO: 920152 - protein, 198 aa, Homo sapiens
RAAAGFLVGRAGTSGRAATFSLGSRSSGLPPRPGDTRGTPGLSRAVTLPMWTGVHPRGRFLGCHGARARRVTAGEGGRVPERLLRVVSPPAGTARSTSRAPQPPHPAEQSRAPRTPRAPAVLPTPWPRRRPARGGVNKRRARFDLARPGFLAGVPPEQSLEFRAKDNNCGSAFKAGISPATAECFVSPVSNFAERDQM

SEQ ID NO: 920153 - protein, 198 aa, Homo sapiens; identical to SEQ ID NO: 920152

SEQ ID NO: 920154 - protein, 173 aa, Homo sapiens
MRSPLGVMTRGSPWGGPGVLCGSGVLLEGLTDTHGGYTGADTQRPEHEIRFVSFVKEDLGCGAGKLEPPRAVRLPVASSPGGSREQSRVGKAIRPLSSGPLLQAPEDSPACIWSRISSVTSKLPLGAHGCPADPNSDPVPGKGRGHPHPVTRMEEEEEPTLPQRPPHAYTSPT

SEQ ID NO: 920155 - protein, 141 aa, Homo sapiens
MPVMPDDLRWNSFIPKPFPLLPQNQSLVPKRRTEEPRPCRWIGYGGSGKGEVKNHLQVSDLISEEIVVPFTQRDRERALEHNKSLFCLPASLAAPALYHKKLLSYSFIHLLTQSTNILEHLLCAVHCTEPGDTVVNSLHEI

SEQ ID NO: 920156 - protein, 151 aa, Homo sapiens
MRLICHHKNSMGNTLMIQFPPTESLLQHMGIMEVTIHDEIWMPGYFGLGTHVFSVPMGYSIYLIILSGKDAHVKFGLASRPALPVPTWNSVGWKAPAALPTHPLLGKVQRAAVSCMVGVRSNEREELVVKENSNDKQQPKNRYCWFAADSF

SEQ ID NO: 920157 - protein, 330 aa, Homo sapiens
MGQFRKAQSAPALKFSFTCYGSESEPWGLHIEQVPQGDSRDWANSGSSVQLGIWKWNWIKYSAVMELDFKKEITAKRANCSDFLESKGCFANTTPSGKSVSSSSSVETGPSVSEPPGLPRVSAYVDTTADLDRKLSFSHSDHSSEMSLPEVQKDKYPEEFSLLKLQTKDGHRPEWTFYPRFSSNIHTYHVGKQCFFNGVFLGNKRSLSERTVDKCFGRKKYDIDPRNGIPKLTPGDNPYMYPEQSKGFHKAGSMLPPVNFSIVPYEKKFDTFIPLEPLPQIPNLPFWVKEKANSLKNEIQEVEELDNWQPAVPLMHMLHLSGALDFPRQS

SEQ ID NO: 920158 - protein, 154 aa, Homo sapiens
QYNFHHFLFLVPYMQEKPFTGRLLREIWQFLDKEIGDLRPGTEAHACNPCTLGGRSGRITMSTDQDHPGQHEHASRTFIYYEKIMHQEQLVPAGGELCLCQLKLQEALWDPHPLQTPTRRRALFRVLPAWAHFHRRPFPYGGWGQVLTLPGHTA

SEQ ID NO: 920159 - protein, 179 aa, Homo sapiens
MLPTVEYGNVLGLHSHSHYSLTDSSKATSSPSNFIHMSSHLQTPVTAGEVPDQLPAQTKPARSHLNKKEYQSSRHVLQGGKVATDNTQRRGSSNLRVTGMRKNKQAVSFTEEEVSSKKNEIFVRRHHVDITKKLHPNQAGLDSKVLIGSQNDLVDEEKERSNRGATAIAETFKNEKHQK

SEQ ID NO: 920160 - protein, 139 aa, Homo sapiens
WTLVMTFKAHLDNLGHSCHLHILTHTCKVPFVIEGSIPEFQGLGHGHFVVGISWPAQLPRADISAAAGQKSEGAPGVEPMGPCFVLEPLALNLSLVQVHLYDSQGLRRQELPKEKMFEALDKKKAGRMFITVPKTLPHW

SEQ ID NO: 920161 - protein, 165 aa, Homo sapiens
WITIAFVVPGRCFSCNTNQSPAPSPQAMYPANIHDCHVTRTLRLVARPTWWKLRPTTNSQHQAVHVCSFTSEAGETTSPPGETNNSQRAAFKNCNTQVRAFILEEVRKDEENSEQGSHKLEYSGVQLEAVENANSWAHQLTPIQWNQGWAQESALKVLPQHSRCF

SEQ ID NO: 920162 - protein, 332 aa, Homo sapiens
MPTVDDILEQVGESGWFQKQAFLILCLLSAAFAPICVGIVFLGFTPDHHCQSPGVAELSQRCGWSPAEELNYTVPGLGPAGEAFLGQCRRYEVDWNQSALSCVDPLASLATNRSHLPLGPCQDGWVYDTPGSSIVTESDIHPVCSAYSLYSGTGCDAAGEMQKKIVRSLKESAVLWGLRGEEDGKNETSFNLVCADSWKLDLFQSCLNAGFFFGSLGVGYFADRFGRKLCLLGTVLVNAVSGVLMAFSPNYMSMLLFRLLQGLVSKGNWMAGYTLITEFVGSGSRRTVAIMYQMAFTVGLVALTGLAYALPHWRWLQLAVSLPTFLFLLYYW

SEQ ID NO: 920163 - protein, 291 aa, Homo sapiens
MPTVDDILEQVGESGWFQKQAFLILCLLSAAFAPICVGIVFLGFTPDHHCQSPGVAELSQRCGWSPAEELNYTVPGLGPAGEAFLGQCRRYEVDWNQSALSCVDPLASLATNRSHLPLGPCQDGWVYDTPGSSIVTEFNLVCADSWKLDLFQSCLNAGFFFGSLGVGYFADRFGRKLCLLGTVLVNAVSGVLMAFSPNYMSMLLFRLLQGLVSKGNWMAGYTLITEFVGSGSRRTVAIMYQMAFTVGLVALTGLAYALPHWRWLQLAVSLPTFLFLLYYWCVPESPRWLLS

SEQ ID NO: 920164 - protein, 67 aa, Homo sapiens
RALDKCLLSAHGVPRAWRDVAGMRLEESEPALPSRHSRSGPGRRPEQDGWAADRGGKSWGSAEVARK

SEQ ID NO: 920165 - protein, 42 aa, Homo sapiens
MRKLRLKYLREPAQSHTNAAALTQSSVVPDFSSTSVMRPSAT

SEQ ID NO: 920166 - protein, 67 aa, Homo sapiens; identical to SEQ ID NO: 920164

SEQ ID NO: 920167 - protein, 161 aa, Homo sapiens
REKFMITMRGHQHRPGRSTSENYITGTEWRGPNLLHFLLSTHLTKHKIPAGKALSTCLPGLVSTLPCRACTSPEIREQRTHASGSPGFSAMGKAAFTGTMAGLELKPVSNKSYPTLMEEFQGEDLGQLQDAWIGGHSQRGVTCALFNSVTAGLKTDQTSFR

SEQ ID NO: 920168 - protein, 161 aa, Homo sapiens; identical to SEQ ID NO: 920167

SEQ ID NO: 920169 - protein, 160 aa, Homo sapiens
MATSRGASRCPRDIANVMQRLQATGLLEFAGGPLQTLFAWVLPAEAGEQQILQKSKYCCLIVPLETSSPYRPAYMRCLLAPTGRCIPVRLHGELKRRAGRTTAVFSAVRQGHLSLQKLSAAFYSAMPCPQRWSLQRQYSLSRLPLAKKGKSPNPLHFRAT

SEQ ID NO: 920170 - protein, 136 aa, Homo sapiens
MPYKSDFVNADCIRQRGVDKGYTKVLSTQKWRRANGDPGKGGFLPKYPCEHEDSFQTEKEWARESSNASFPDTKCFVQCLASTCRSRGNVLRASPLGRHFVMENIDHIEQKWEQQGLMANALAESIGTRGKTNITV

SEQ ID NO: 920171 - protein, 136 aa, Homo sapiens; identical to SEQ ID NO: 920170

SEQ ID NO: 920172 - protein, 398 aa, Homo sapiens
MNEKVYYLFLSFPLFEITLDRHDGTSNGTARLPQLGTVGQSPYTSAPPLSHTPNADFQPPYFPPPYQPIYPQSQDPYSHVNDPYSLNPLHAQPQPQHPGWPGQRQSQESGLLHTHRGLPHQLSGLDPRRDYRRHEDLLHGPHALSSGLGDLSIHSLPHAIEEVPHVEDPGINIPDQTVIKKGPVSLSKSNSNAVSAIPINKDNLFGGVVNPNEVFCSVPGRLSLLSSTSKYKVTVAEVQRRLSPPECLNASLLGGVLRSEARHAPPPRPRGGNHCASRGRWRRPKQASPGGPPYAGRKGGGEKSVEPSGPDLGAGGAGDAEPDLRCFPQASSGATSLLPGARQSSIRPPPTQAARSAAGSIPATAEGAAYSHLFPLRAHLASPGKVPLRLLALPYLSE

SEQ ID NO: 920173 - protein, 217 aa, Homo sapiens
MSISGRLRLCTGERRQALSQKDGGLELQSAVADWKWGQEREKEASTPTPWGSASCSPLDVTGAHFSLSTWLLLTDCLVHGGCHGPQGGQVADVAAVHMKAAAGPEREAVTRCVRERESHGPAAGGASVAQSTGHRLWKLGAEHKSRKGDPKRPGQVQGASPLPGSFLVPTTVAIALGPWTALPGSLRSLSLPEDKGLSQGLSESTVAMFLGQFLEGT

SEQ ID NO: 920174 - protein, 151 aa, Homo sapiens
DPVFSLPLVLPLRMSHPALPVLHILPNISVINTQIHTLPFQFHEHCMKHQNFPFLRKLRICCPLQKYEVGLQEYELLSTCRDPRCLSSLFEIIATKGELSGQPGRSSPHSAETCLHLRPQSKSPWASGSSDIWRQLLSLPALRFTMSRLNG

SEQ ID NO: 920175 - protein, 161 aa, Homo sapiens
MSWREGSKERLAGEASQSWWKAKVEQRHVLPGGRQESCAGELPFIKAADLTESYSIEARVSQAFELTVNYTTGFPGSPACRQQITGLLGLVSNSHLPFTMSKSFLRPHKKQMQDPSVLYSLQNCPTAIQLNKKEGEAVNCRSKDFSNFFTYMESPWALIKM

SEQ ID NO: 920176 - protein, 144 aa, Homo sapiens
YTTMGQSPRFKSKKQDKMCLECYYLSKRKCDRKSLALRDRIRKQIPGEAKGSHLLMDSGKRPSTLDKNSVSGDHKEVECNQKENCGPTELRKKRSEFWNQKEQVGRVLHLRTLDPWFGTGPHTCNVRLLRLRRTAVRSGSEGIC

SEQ ID NO: 920177 - protein, 144 aa, Homo sapiens; identical to SEQ ID NO: 920176

SEQ ID NO: 920178 - protein, 136 aa, Homo sapiens
MSRVDKTARKAKEVGQTKVGDCYIKSSLFLLELCHQGFGHVCVTWNPSVIVFIQTFYQVETKSGGSVHSQAQSCGGAEVASAGEWKTALLEELKEPPLPSSVPGACMAGPWDHELTTPPRVTVVDIRITPRCSVFG

SEQ ID NO: 920179 - protein, 176 aa, Homo sapiens
HFLSSVLSKKLESVFGYLLTLLVFLCEGDLRKSMHGSRTKRNNLIIPKRFQELPGGKARSAGLQRLQPPLLLGAQAQGDPGSVPEPKAGVIGVPPAGKPCPMMMHGSGSGLKGHSGHRLLRPGAYCVRQLPVPVLAAAPPPRSSNSLESRQPQLQIWVTPSRRCLAVALGHSTGSV

SEQ ID NO: 920180 - protein, 141 aa, Homo sapiens
MTNSHINFDCKSKLHLDLFLSTSPGRLERKHGEIELQYGGKCRHSRESCENGPRHRHHLSSSSFLLPVLSTSSSEVLKKGKRKGVRVGQFSLNWPLANQEKAQKNQRIQETLVTHINQHLDLEYKANIRRLSMRKRKRQTS

SEQ ID NO: 920181 - protein, 170 aa, Homo sapiens
SLTARWGKEPPFTKMRVKRLLVMCILAHHGHDTSLVKGIIFMERSVEEEEDTGLENRGDSPLRVIGPEDSPVGQDVEVKDSDIDHPDPVMLWYSVGDTGFSPSWRGWAFAWENTGFLHVGFPLYDRAFAGTIIPTLPLINVLIAQRTCVEGLRPRGLTILHLASLSPRSS

SEQ ID NO: 920182 - protein, 148 aa, Homo sapiens
MQKENQERILIQDEEGFFYYLKTSNDFFWLTRCYIPTPHCGFKEDDSGEALDVGVKERTGVWIPLLTLVHGNNEIYRSCLVPLYDTLLTPADESIRSPLLLVGCWKGVEGQKEEAKWSRKCENVHVIYAYAAHPGTPASTRFIMRDQK

SEQ ID NO: 920183 - protein, 135 aa, Homo sapiens
MWLLEEGYSLQGNSAKVLRQERGYKVCEESRRTGHRSSLSQERVIGNEDEEITGQQRGQIVLGLLGHYVSADCFVLLRKDSCIIEENTRKKKFWHLLKPKYFYDTKHMREKLILYMVSDGVEFHCFHISSILKKR

SEQ ID NO: 920184 - protein, 126 aa, Homo sapiens
MVALFQHSPYWQADGYGHSHRLKCQHFKQHRQYNDKLEISSNLGPQFNALLNILLNIVHPTLSHDTRRSKGLKIEGLLQSRELGNSWTVTMCIWVLKALQSSAPNKPLDWLDPMPCFQNLLARGTP

SEQ ID NO: 920185 - protein, 132 aa, Homo sapiens
MAHGRSHSLQLYSFLLFIPTRMYHIENNELNLQKIMISKEPSRKCIISLIKVFCDICDVGSAIAYELMLAFLPPSEDIQHEGSSWVVNCENLGNSSAYYFITPDTLANTLKTENIASGDIEIQDKKEATGTC

SEQ ID NO: 920186 - protein, 157 aa, Homo sapiens
MDAELPVTLTVEDFTGDLWFCREDHMAHGRSHSLQLYSFLLFIPTRMYHIENNELNLQKIMISKEPSRKCIISLIKVFCDICDVGSAIAYELMLAFLPPSEDIQHEGSSWVVNCENLGNSSAYYFITPDTLANTLKTENIASGDIEIQDKKEATGTC

SEQ ID NO: 920187 - protein, 132 aa, Homo sapiens; identical to SEQ ID NO: 920185

SEQ ID NO: 920188 - protein, 247 aa, Homo sapiens
MWTVRTEGGHFPLHSPTFSWRNVAFLLLLSLALEWTSAMLTKKIKHKPGLCPKERLTCTTELPDSCNTDFDCKEYQKCCFFACQKKCMDPFQEPCMLPVRHGNCNHEAQRWHFDFKNYRCTPFKYRGCEGNANNFLNEDACRTACMLIVKDGQCPLFPFTERKECPPSCHSDIDCPQTDKCCESRCGFVCARAWTGKDWGYTSQIYWACAKDVMLSPWSGGCLEPQMLLGLIFEDLWEPLLMPNKLY

SEQ ID NO: 920189 - protein, 238 aa, Homo sapiens
SSHPYRHFPLHSPTFSWRNVAFLLLLSLALEWTSAMLTKKIKHKPGLCPKERLTCTTELPDSCNTDFDCKEYQKCCFFACQKKCMDPFQEPCMLPVRHGNCNHEAQRWHFDFKNYRCTPFKYRGCEGNANNFLNEDACRTACMLIVKDGQCPLFPFTERKECPPSCHSDIDCPQTDKCCESRCGFVCARAWTVKKGFCPRKPLLCTKIDKPKCLQDEECPLVEKCCSHCGLKCMDPRR

SEQ ID NO: 920190 - protein, 254 aa, Homo sapiens
  misc_feature (9)..(9): Xaa can be any naturally occurring amino acid
RGSSGRRQXLGARATAGAGKAGHFPLHSPTFSWRNVAFLLLLSLALEWTSAMLTKKIKHKPGLCPKERLTCTTELPDSCNTDFDCKEYQKCCFFACQKKCMDPFQEPCMLPVRHGNCNHEAQRWHFDFKNYRCTPFKYRGCEGNANNFLNEDACRTACMLIVKDGQCPLFPFTERKECPPSCHSDIDCPQTDKCCESRCGFVCARAWTVKKGFCPRKPLLCTKIDKPKCLQDEECPLVEKCCSHCGLKCMDPRR

SEQ ID NO: 920191 - protein, 241 aa, Homo sapiens
MWTVRTEGGHFPLHSPTFSWRNVAFLLLLSLALEWTSAMLTKKIKHKPGLCPKERLTCTTELPDSCNTDFDCKEYQKCCFFACQKKCMDPFQEPCMLPVRHGNCNHEAQRWHFDFKNYRCTPFKYRGCEGNANNFLNEDACRTACMLIVKDGQCPLFPFTERKECPPSCHSDIDCPQTDKCCESRCGFVCARAWTVKKGFCPRKPLLCTKIDKPKCLQDEECPLVEKCCSHCGLKCMDPRR

SEQ ID NO: 920192 - protein, 241 aa, Homo sapiens; identical to SEQ ID NO: 920191

SEQ ID NO: 920193 - protein, 247 aa, Homo sapiens; identical to SEQ ID NO: 920188

SEQ ID NO: 920194 - protein, 241 aa, Homo sapiens; identical to SEQ ID NO: 920191

SEQ ID NO: 920195 - protein, 244 aa, Homo sapiens
MQPDMAVGAQVGHFPLHSPTFSWRNVAFLLLLSLALEWTSAMLTKKIKHKPGLCPKERLTCTTELPDSCNTDFDCKEYQKCCFFACQKKCMDPFQEPCMLPVRHGNCNHEAQRWHFDFKNYRCTPFKYRGCEGNANNFLNEDACRTACMLIVKDGQCPLFPFTERKECPPSCHSDIDCPQTDKCCESRCGFVCARAWTVKKGFCPRKPLLCTKIDKPKCLQDEECPLVEKCCSHCGLKCMDPRR

SEQ ID NO: 920196 - protein, 241 aa, Homo sapiens; identical to SEQ ID NO: 920191

SEQ ID NO: 920197 - protein, 241 aa, Homo sapiens; identical to SEQ ID NO: 920191

SEQ ID NO: 920198 - protein, 164 aa, Homo sapiens
IRTGGELSCWQKGLLELPDQVLRMCTPVDCGRPAPGKQLRTNWRNFRDSFGLQSIDFSPPFSLFSNLTVFFAVPQTQQLDPTTTKELNALLYPLNNVAHLDGVLKILYPLNNLAHLDGVLKILCTFESPEDVPKRFQVFCVLGLSFKIEIEKNNFKPTNYLFFK

SEQ ID NO: 920199 - protein, 537 aa, Homo sapiens
TQHSIRMWLLGASTMQQRPIQPSFTKSLCRESHWKCLLLSLLMYGCLGAVAWCHVTTVTRLTFSSAYQGNSLMYHDSPCSNGYVYIPLAFLLMLYAVYLVECWHCQARHELQHRVDVSSVRERVGRMQQATPCIWWKAISYHYVRRTRQVTRYRNGDAYTTTQVYHERVNTHVAEAEFDYARCGVRDVSKTLVGLEGAPATRLRFTKCFSFASVEAENAYLCQRARFFAENEGLDDYMEAREGMHLKNVDFREFMVAFPDPARPPWYACSSAFWAAALLTLSWPLRVLAEYRTAYAHYHVEKLFGLEGPGSASSAGGGLSPSDELLPPLTHRLPRVNTVDSTELEWHIRSNQQLVPSYSEAVLMDLAGLGTRCGGAGGGYAPSCRYGGVGGPGAAGVAPYRRSCEHCQRAVSSSSIFSRSALSICASPRAGPGPGGGAGCGGSRFSLGRLYGSRRSCLWRSRSGSVNEASCPTEQTRLSSQASMGDDEDDDEEEAGPPPPYHDALYFPVLIVHRQEGCLGHSHRPLHRHGSCVETSL

SEQ ID NO: 920200 - protein, 150 aa, Homo sapiens
LGCEGHKMGTLPARRHIPPWVKVPEDLKDPEVFQVQTRLLKAIFGECAQYWRAAPARESQPARGSHLFSPTGPDGSRIPYIEQVSKAMLELKALESSDLTEVVVYGSYLYKLRTKWMLQSMAEWHRQRQERGMLKLAEAMNALELGPWMK

SEQ ID NO: 920201 - protein, 175 aa, Homo sapiens
MEPGGAAAARGGLEPRRASGGWKEPSWTFREARPACTWNRDHRSLAAVLCALPAPGAEIMGLWLLFCERVDLLVKATSQCHLSRRPWERNTVPFSFLEPPPLSLAYVLWHVLSCGHSEPQAPGLSAQLLLWPSMVDPPSRPIPDSPHPPNCPRSAAATAPRRTLCSLLGTEGCFI

SEQ ID NO: 920202 - protein, 801 aa, Homo sapiens
VPQLPPQPAPQWSAPVGCHSSLDAMEEPGATPQPYLGLVLEELGRVVAALPESMRPDENPYGFPSELVVCAAVIGFFVVLLFLWRSFRSVRSRLYVGREQKLGATLSGLIEEKCKLLEKFSLIQKEYEGYEVESSLEDASFEKAAAEEARSLEATCEKLSRSNSELEDEILCLEKDLKEEKSKHSQQDELMADISKSIQSLEDESKSLKSQIAEAKIICKTFKMSEERRAIAIKDALNENSQLQTSHKQLFQQEAEVWKGQVSELNKQKITFEDSKVHAEQVLNDKENHIKTLTGHLPMMKDQAAVLEEDTTDDDNLELKVNSQWENGANLDDPPKGALKKLIHAAKLNVSLKSLEGERNHIIIQLSEVDKTKEELTEHIKNLQTQQASLQSENIYFESENQKLQQKLKIMTEFYQENEMKLYRKLTVEENYRIEEEEKLSRVEEKISHATEELETYRKLAKDLEEELERTVHFYQKQVISYEKRGHDNWLAARTAERNLSDLRKENAHNKQKLTERELKFELLEKDPNALDVSNTAFGREHSPCSPSPLGRPSSETRAFPSPQTLLEDPLRLSPVLPGGGGRGPSSPGNPLDHQITNERGEPSYDRLIDPHRAPSDTGSLSSPVEQDRRMMFPPPGQSYPDSTLPPQREDRFYSNSERLSGPAEPRSFKMTSLDKMDRSMPSEMESSRNDAKDDLGNLNVPDSSLPAENEATGPGLIPPPLAPISGPLFPVDTRGPFMRRGPPFPPPPPGTMFGASRGYFPPRDFPGPPHAPFAMRNIYPPRGLPPYLHPRPGFYPNPTF

SEQ ID NO: 920203 - protein, 412 aa, Homo sapiens
MNDLADNICEMSKGEGENKSLKCGLGSCSPMELILEKPLTVMEENFLVLPEHDIKDSFQKVILRKYGSSDLNTLHLKKDYQSVGNCKGQKSRYNGLHQCLSTTRSKTSQCNKCGKAFGLCSIFTEHKEIFSKEKCYKCEECGKDCRLFSDFTLQKRIHTAERCYKCEDCAKVFKKFSNLTEHNRVHPGEKPYKCEECGKTFTCSSTLIKHKRNHSGDRPGKCEECNKAYRWFSHLAKHKRIHTGEKSYKCNECGKAFTWISVLSHHKKIHTREKPYICEGCGKAFTRSSTLISHKRIHMEERPYKCEECNKAYKCQHKRIHTGEKPYKCNECGKAFTCILALSQHKIIHVGEKPYICEECGKAFTRSSTLTNHKRIHMEERPYKCEECSKTFKCFSDLTNYKRIHTGEKPYK

SEQ ID NO: 920204 - protein, 151 aa, Homo sapiens
MVVSKCGFISLLANRELFVRCDYQNPLEGYQHHLTMNPVLLILTPIFPQDSVDGIFLNVLFMVQVNMRVTIARVSAFGRRPGTVSGNVRNLVFQMLTSLHSPCECPEPLQDVGVTGAAEPEQTAEIRADSVREAAHESAGVKKLLMKAAAE

SEQ ID NO: 920205 - protein, 146 aa, Homo sapiens
TVPDSRAYWEGMYIFSFRGCQILLEINKKKTENPIEKSVKELNGHIAKEDAQPYYCISISGYKEGQVEKDMEQPEVLYADGGSGNQCNHFGKLAISSLRYDKMLLLQLMAGNHDGTPILCQTLWKAIHKVIFYGLNVISPNLYFES

SEQ ID NO: 920206 - protein, 564 aa, Homo sapiens
TECAGTFWATLRASDTGTLCLGLRMVQAATPGASGLPCSPRQALALYQYLFWCPASPGQLRAALWQVQEGRGYPPGLELPPVLLQMEWSRRAQEQLLWDLELLTGVELGLFWPPQAQFFGPRGQAQQAWSQCCQPGGSTGGDPEQPPQIWVKPGVVQTKGGRALEDLQSPHADLAQREERSEAEPETQKRKLTPGTPGPGDLPSQNLPSQDALEGLGSDPHLGQERAELQRPPRMDTPESERRTLRIRKRRPLSVREPRPPGARSKMLLRVRRRRHTGARAQGLLRVRGRSRREFSPKCQGKASPQSPGKKMLRSWEGNISQAWEVAPGEATVQPPEEGDPHSHPRDSCGSLKAQTPKPVGRESPNLRRRTTTLTQSMIKGEPQRSAPAVAKLGAAREGAWAALTRPKPPARRRLPGRGAGAEMPATLRAEVSGQQGLLGALRGPQAWSAIRTGCRALEWAPHRGSRRWARLGFRVPSGVGWGGPERPKALKAAWPAPLSTAKAPAGLSAAQQVTALQRLLELHSAARRQRRRRDREQQRLRVCPHAGIGACLERAGHRGAAGR

SEQ ID NO: 920207 - protein, 652 aa, Homo sapiens
TECAGTFWATLRASDTGTLCLGLRMVQAATPGASGLPCSPRQALALYQYLFWCPASPGQLRAALWQVQEGRGYPPGLELPPVLLQMEWSRRAQEQLLWDLELLTGVELGLFWPPQAQFFGPRGQAQQAWSQCCQPGGSTGGDPEQPPQIWVKPGVVQTKGGRALEDLQSPHADLAQREERSEAEPETQKRKLTPGTPGPGDLPSQNLPSQDALEGLGSDPHLGQERAELQRPPRMDTPESERRTLRIRKRRPLSVREPRPPGARSKMLLRVRRRRHTGARAQGLLRVRGRSRREFSPKCQGKASPQSPGKKMLRSWEGNISQAWEVAPGEATVQPPEEGDPHSHPRDSCGSLKAQTPKPVGRESPNLRRRTTTLTQSMIKGEPQRSAPAVAKLGAAREGAWAALTRPKPPARRRLPGRGAGAEMPATLRAEVSGQQGLLGALRGPQAWSAIRTGCRALEWAPHRGSRRWARLGFRVPSGVGWGGPERPKALKAAWPAPLSTAKAPAGLSAAQQVTALQRLLELHSAARRQRRRRDREQQRLRVCPHAGIGACLERAGHRGAAGRCLPPLQVLERLHIARNRHCRVHPVGLPPSPAQLPPQEDAAGRRRALREQLEQMHRERTERLRALGARNTQNFLELLCSPGAEDPVPAK

SEQ ID NO: 920208 - protein, 152 aa, Homo sapiens
MAWHFRAAHCSSGAISVFIFLPQGTEAGIEEVLSFIALRVSRPQGRNGEHKWKGWRFLWRVRGDQTRVPRAADRRGESCMEKQLPRPAEEPSRVFRTALFSTECMKLKRLTIPNVDKDVQHLGLSYPDDENVEWCNHFGKQFGGFLERIFML

SEQ ID NO: 920209 - protein, 540 aa, Homo sapiens
MRQMMGSSGHYEAKDGPEEAIMGSTGHYEAEDGPEEAIMRKELAQLLPSDGISRPQMASGRWGPPGPAWASQRPLQTQVVLKSSPCLLAASRRQASTSTVGPPGPPLASPWRPRARLPASGLPPHTQLTKYSAHRTVSSEASRGVSVFVWRNVEPHSVAVFPWYSVPFLTPPWSHTRPSNLPVTQWPPTRANNLPSWQLLLMSIHQVGQGVLTLGGPLEPPALKAQGPEPHTLWGWWNLAQSLSALRKEQDSSSEKDGCSPNKWDKDHIPWPISGGHELQQAAPGPGRAHQGHPNQDNRTVCQILSERWYTLGPNEMQKYHDLAFQVKVAHLQQGPKEVQLRGQAHKPGASRSIQGLLGAEGVHSLDGREIDRQALQELTEVVSGTASYSGPKPSTQYGAPGHFAAPGGGGDNVIADDGFSTTDTDLKFKEWGAEPEEEKLGFGGWGRGNPTDMDPALDDPTTPKCKMRRCSICSPKPNTPKCAMCDGDSFPFACTGGEAKDGLREPETEKALSSSLHAPWTSAGPDRAAFPGPLLLPVH

SEQ ID NO: 920210 - protein, 262 aa, Homo sapiens
SLNISSGTLGAWSDMIAAAREAPRRRPAPPTPRPRPPRRPAPPLAPPTALPAQPGPGPANRGPLPRPPRPRPRPRRAPEAREPRAPCGTHHPAPATEGERRGAARPPVTPRASAASHGSGVAGAGSPLWPLRFRGRRSATRGPRGRGETSSPLGGAGVSRSRGGGELAGPSRRHMRLLGGGACARRRGGGALGPRVGAGAVLRPPRASWPWAEWDWVSRLFAVAASAAGPGVVPEPLWPSKARGPGLHRAGPGYAVTEFPRP

SEQ ID NO: 920211 - protein, 262 aa, Homo sapiens; identical to SEQ ID NO: 920210

SEQ ID NO: 920212 - protein, 262 aa, Homo sapiens; identical to SEQ ID NO: 920210

SEQ ID NO: 920213 - protein, 186 aa, Homo sapiens
MRPRCKLFFRCLETTTAMMISFPDKTISFLQGFKGFDLNMYYPNHEDSDGRVINDDDLGGNGLEIQADMAASPSYKGRDKTPRGKKCRVIGFGTEERTTENVHVLVADRGYGGGVFKSIKEKISNILIFDIKYQNLPWCPAWFKIISVKHIRARIFCSICNIFWQPCPFSVLDDYNNKQLLPRHCC

SEQ ID NO: 920214 - protein, 152 aa, Homo sapiens
MRPRCKLFFRCLETTTAMMISFPDKTISFLQGFKGFDLNMYYPNHEDSDGRVINDDDLGGNGLEIQADMAASPSYKGRDKTPRGKKCRVIGFGTEERTTENVHVLVADRGYGGGVFKSIKEKISNILIFDIKYQNLPWCPAWFKIISVKHIR

SEQ ID NO: 920215 - protein, 152 aa, Homo sapiens
MFLPGLWEPLSLPAGTFYCQVLRMLSSSPPCTVWPQHFLPLLLGSGGSPPVKLSKMPCTDSGAPQRSPFCQVPLPLPGSPAAWLPSASIPAAEAWNARDTRATLPSMLKKEDESDGGGSGPETNLRERIAVSPARQRSGCWVSSPFWLSLSR

SEQ ID NO: 920216 - protein, 169 aa, Homo sapiens
MSDLEAKPSTEHLGDKIKDEDIKLRVIGQDSSEIHFKVKMTTPLKKLKKSYCQRQGVPVNSLRFLFEGQRIADNHTPEELGMEEEDVIEVYQEQIGGHSTGVLVCPYPPSCGEALMQSVCGVSPGPLAGREPHVPPTFSCLAVTGASNHSNSVLTPGRLSYLNPRSVPL

SEQ ID NO: 920217 - protein, 191 aa, Homo sapiens
MCVCVCMYVLCVYWGRRPWLMQLDLFGGEKKATAGEKEEKETQFKSQNICDELRMQGSGGRKSEIRAASIGFWRGPSLWLQGVRLRPCQRLRAWEWVLPGHARVGVGQSAALGIQGTGDMGNRGPTNTTAAPAAAFAATVPAPTPAAANADAAAAATVYEAQAHLATRRRAKAPSRTPQLTITTADPQTRE

SEQ ID NO: 920218 - protein, 191 aa, Homo sapiens; identical to SEQ ID NO: 920217

SEQ ID NO: 920219 - protein, 148 aa, Homo sapiens
MGLVCDLRSLLFSGGDTGLRPSPTKPSSFLFNPSIPLGSCAGLGFQEPCLGVCVWLCDRQAGGHGCPTLRALTCWVPGSSSVRLPNAEQRAEAAWVAQPLPQPEVSQQHQVWKMRIPRNIKETLRITKKAALLRNKYINKNKKEKRSN

SEQ ID NO: 920220 - protein, 299 aa, Homo sapiens
WQGCRWQKPSSAMNLRSVTGFTLICETSTLTPRRSGPDHELTLDSGKVHLRRSLEVPGSTGGHPVMGDTFIRHIALLGFEKRFVPSQHYVYMFLVKWQDLSEKVVYRRFTEIYEFHKTLKEMFPIEAGAINPENRIIPHLPAPKWFDGQRAAENRQGTLTEYCGTLMSLPTKISRCPHLLDFFKVRPDDLKLPTDNQTKKPETYLMPKDGKSTATDITGPIILQTYRAIANYEKTSGSEMALSTGDVVEVVEKSESGQTSHLTGLLPLVLRNPQPQAPCQGSGSLAPGRTPALLGALNV

SEQ ID NO: 920221 - protein, 455 aa, Homo sapiens
WQGCRWQKPSSAMNLRSVTGFTLICETSTLTPRRSGPDHELTLDSGKVHLRRSLEVPGSTGGHPVMGDTFIRHIALLGFEKRFVPSQHYVYMFLVKWQDLSEKVVYRRFTEIYEFHKTLKEMFPIEAGAINPENRIIPHLPAPKWFDGQRAAENRQGTLTEYCGTLMSLPTKISRCPHLLDFFKVRPDDLKLPTDNQTKKPETYLMPKDGKSTATDITGPIILQTYRAIANYEKTSGSEMALSTGDVVEVVEKSESGWWFCQMKAKRGWIPASFLEPLDSPDETEDPEPNYAGEPYVAIKAYTAVEGDEVSLLEGEAVEVIHKLLDGWWVIRKDDVTGYFPSMYLQKSGQDVSQAQRQIKRGAPPRRSSIRNAHSIHQRSRKRLSQDAYRRNSVRFLQQRRRQARPGPQSPGSPLEEERQTQRSKPQPAVPPRPSADLILNRCSESTKRKLASAV

SEQ ID NO: 920222 - protein, 159 aa, Homo sapiens
HQVPLAGAMHVNAESAVGNVLGRESSRKSGGKSYRDGEECSIHSEGTEGEKDQRGREPSLEKELEGSQCVWGPWNEDRIGTEEQEIKAGPCEDRGFDSQPARSAHQGGHPQTRPSPAQGPARGAYTGGCSEQERKRSNLNPDPSPTEPESLNHQLDRPV

SEQ ID NO: 920223 - protein, 159 aa, Homo sapiens; identical to SEQ ID NO: 920222

SEQ ID NO: 920224 - protein, 155 aa, Homo sapiens
MYDKKPEEAMNFQIDVKEIHSVPWKWYGVESGERSKGSGNAWLVSGGEDSSNSSCFQVMSLGNQSWRKGAVADKNHWTWMELESIILSKLTQEQKTKQMLHVLTYMWELNNDNAWAQGGEQHTLGPVGGKGEVSKDPEQQKQSRERRTNLETSHF

SEQ ID NO: 920225 - protein, 129 aa, Homo sapiens
MKTYKNKHQGSMCQSSVGLVCFFTPSFKSYAALRKFSSQCVYASRSLTRIRCAYDTSRPATAALACAVPGAEHRPWYKVDVQCLTGKCKEIVITWTSGEKNSTWKYQVFWGRPGRGKQELDYLLVIPGG

SEQ ID NO: 920226 - protein, 129 aa, Homo sapiens; identical to SEQ ID NO: 920225

SEQ ID NO: 920227 - protein, 129 aa, Homo sapiens; identical to SEQ ID NO: 920225

SEQ ID NO: 920228 - protein, 278 aa, Homo sapiens
RLVTAELRAPSEGRAPCGYTLHPLKLALFSLGVHGMAASSSTTRWGLSGAEQGKDRFWLDPGKPTCRCGLYLCSSQWESGPQDPACHPPGSRGDFRISPLRNGDNSSLFIRFMVRATLIAWPWEQLLMSLARSRALVKDLHVLHSTLPATSHSQHVTVAHPKCQALRSSSGSWLLNVGTIGIWSQGTLSRGAVRNQTCSSVSGLYLLGPSPASNTHSNTGSQFNMGFGWGHRAKPYQGTSIYCTEFLVPSSVLRTGNSGAKTQIQALPSTSCLVPGSL

SEQ ID NO: 920229 - protein, 305 aa, Homo sapiens
PREWPNIAELMQEHGKQKAAGVFVLGGMVTLTSQTPPLWILQSYKDGPSTTRQAHSTTMNPLLILAFVGAAVAVPFDDDDKIVGGYTCEENSVPYQVSLNSGSHFCGGSLISEQWVVSAGHCYKPHIQVRLGEHNIEVLEGNEQFINAAKIIRHPKYNRITLNNDIMLIKLSTPAVINAHVSTISLPTAPPAAGTECLISGWGNTLSSGADYPDELQCLDAPVLTQAKCKASYPLKITSKMFCVGFLEGGKDSCQGDSGGPVVCNGQLQGIVSWGYGCAQKRRPGVYTKVYNYVDWIKDTIAANS

SEQ ID NO: 920230 - protein, 70 aa, Homo sapiens
WWNSFFRNSEWNQEVWLVEKIFGEWTKKGQPPCGFFLPPIPTAHIFWLRSRAILTSSQCPLAVSSFHLAC

SEQ ID NO: 920231 - protein, 217 aa, Homo sapiens
MDAPRRFPTLVQLMQPKAMPVEVLGHLPKRFSWFHSEFLKNPKVVRLEVWLVEKIFGRGGERIPHVQGMSQILIHVNRLDPNGEAEILVFGRPSYQEDTIKMIMNLADYHRQLQAKGSGKALAQDVATQKAETQRSSIEVREAGTQRSVEVREAGTQRSVEVQEVGTQGSPVEVQEAGTQQSLQAANKSGTQRSPEAASKAVTQRFREDARDPVTRL

SEQ ID NO: 920232 - protein, 159 aa, Homo sapiens
MAQPPVYNLDCHNIAALRCICEGYLLYYLCCAFNSSCPGYNLALIHKSGHLEISLCDDFGSIPTPTTLICQGRCYLCCDSDITWDPWLLFDLFFLPFILFQPLLGRPMEIESKYLLPGKGKLIKCYLLLGPNPELLYQINLIVTRTPFKQNTGLLYLGQ

SEQ ID NO: 920233 - protein, 415 aa, Homo sapiens
MAKVGSLCPGKDRDGWEVCRLPCDSPLTTACELDGEEFAEGVQWEPDGRPCTACVCQDGVPKCGAVLCPPAPCQHPTQPPGACCPSCDSCTYHSQVYANGQNFTDADSPCHACHCQDGTVTCSLVDCPPTTCARPQSGPGQCCPRCPDCILEEEVFVDGESFSHPRDPCQECRCQEGHAHCQPRPCPRAPCAHPLPGTCCPNDCSGCAFGGKEYPSGADFPHPSDPCRLCRCLSGNVQCLARRCVPLPCPEPVLLPGECCPQCPAAPAPAGCPRPGAAHARHQEYFSPPGDPCRRCLCLDGSVSCQRLPCPPAPCAHPRQGPCCPSCDGCLYQGKEFASGERFPSPTAACHLCLCWEGSVSCEPKACAPALCPFPARGDCCPDCDGCEYLGESYLSNQEFPDPREPCNLCTCLGG

SEQ ID NO: 920234 - protein, 471 aa, Homo sapiens
MAKVGSLCPGKDRDGWEVCRLPCDSPLTTACELDGEEFAEGVQWEPDGRPCTACVCQDGVPKCGAVLCPPAPCQHPTQPPGACCPSCDSCTYHSQVYANGQNFTDADSPCHACHCQDGTVTCSLVDCPPTTCARPQSGPGQCCPRCPVTTAPRPTTLGPPPPYPPASKWALVWRLWTPGLEGLSGFALIPAPTIHCPDCILEEEVFVDGESFSHPRDPCQECRCQEGHAHCQPRPCPRAPCAHPLPGTCCPNDCSGCAFGGKEYPSGADFPHPSDPCRLCRCLSGNVQCLARRCVPLPCPEPVLLPGECCPQCPAAPAPAGCPRPGAAHARHQEYFSPPGDPCRRCLCLDGSVSCQRLPCPPAPCAHPRQGPCCPSCDGCLYQGKEFASGERFPSPTAACHLCLCWEGSVSCEPKACAPALCPFPARGDCCPDCDGEGHGIGSCRGGMRETRGLGQNNLYCPRVDLKYLLQ

SEQ ID NO: 920235 - protein, 738 aa, Homo sapiens
MDVGADEFEESLPLLQELVQEADFVGEEPGIRGCAGQSPLPRASLRRGWRDGCQATGPQRGPREGQGGFLLQPRGGGTLSSKYTPSPTSLVGQSPVRPGAWLLLALVPPFSLPDLTWLLERRGLDIEFTGLRSNLSGPQQIRYIAHSCNFYLFPTTFGILDSEFSFQASSVQFLNQYGFNYNKFLKNGIPYMNEEQEKKIRHDILTGNWRVRSSPDKDQIKVVIDEVTRWLELAKEGDWMTLPGITGFQAFEVQLVLRQALPNIWTVLKDEGPLVGHNMMMDLLHLHEKFFRPLPESYDQFKQNIHSLFPVLIDTKSVTKDIWKEMNFPRVSNLSEVYEVLNRGTQSRQSVPSQQDEAREAIDPVPESSFPQYLDVLAPYVNQVNLIRAGVPKINFSGPDYPSIRPPILILSVKRWPGVSEQQVYHKFQNLCKFDVRRLTRSQFLLLTNKFKDARNILKEYRDHPTLCISLYRYWRHSPNVNCLLQLSSTCFPSFSPLLPGAQPVIRAPWLPSHSSMALGGAAPLDALPKSLVTLFSIALNSSPGPLDVGVQGPGTIRRDSAGPQHDSEDLFATATQFLAVYPEGVTRMLLVVVDERQEPALGPGGLQTLVLSCASSQVTNIPRIVALFLHLQQQQCGISLIDLSAVGTGHLWGAIILPATFSSDTLMKHLPRELPKPSSLLRPCPQPSGAAAVATACVTLLRPVLVVRWDVLNSWKPEVEGLSGFLHTPTAHSGYLL

SEQ ID NO: 920236 - protein, 893 aa, Homo sapiens
MEHFLLEVAAAPLRLIAAKNEKSRSELGRFLAKQVWTPQDRQCVLSTLAQLLLDKDCTVLVGRQLRPLLLDLLERNAEAIKAGGQINHDLHERLCVSMSKLIGNHPDVLPFALRYFKDTSPVFQRLFLESSDANPVRYGRRRMKLRDLMEAAFKFLQQEQSVFRELWDWSVCVPLLRSHDTLVRWYTANCLALVTCMNEEHKLSFLKKIFNSDELIHFRLRLLEEAQLQDLEKALVLANPEVSLWRKQKELQYLQGHLGGNRSSSREQELALRSYVLVESVCKSLQTLAMAVASQNAVLLEGPIGCGKTSLVEYLAAVTGRTKPPQLLKVQLGDQTDSKMLLGMYRCTDVPGEFVWQPGTLTQAATMGHWILLEDIDYAPLDVVSVLIPLLENGELLIPGRGDCLKVAPGFQFFATRRLLSCGGNWYRPLNSHATLLDKYWTKIHLDNLDKRELNEVLQSRYPSLLAVVDHLLDIYIQLTGEKHHSWSDSSVGCEQAPEEVSEARRENKRPTLEGRELSLRDLLNWCNRIAHSFDSSSLSASLNIFQEVKSYLLQAEFFCQLYKPEIVINELDLQVGRVRLLRKQSEAVHLQREKFTFAATRPSSVLIEQLAVCVSKGEPVLLGTLAQAVKKGEWILLDEINLAAPEILECLSGLLEGSSGSLVLLDRGDTEPLVRHPDFRLFACMNPATDVGKRNLPPGIRNRFTELYVEELESKEDLQVLIVDYLKGLSVNKNTVQGIINFYTALRKESGTKLVDGTGHRPHYSLRTLCRALRFAASNPCGNIQRSLYEGFCLGFLTQLDRASHPIVQKLICQHIVPGNVKSLLKQPIPEPKGGRLIQVEGYWIAVGDKEPTIDETYILTSSVKLNLRDIVRVVSAGCVGFFLAAPNLIQA

SEQ ID NO: 920237 - protein, 109 aa, Homo sapiens
SSSFNVESMQNKTACSTSGCFPTLCPSLKECTTVGYSLNFCVFQPIPEPKGGRLIQVEGYWIAVGDKEPTIDETYILTSSVKLNLRDIVRVVSAGCVGFFLAAPNLIQA

SEQ ID NO: 920238 - protein, 893 aa, Homo sapiens; identical to SEQ ID NO: 920236

SEQ ID NO: 920239 - protein, 287 aa, Homo sapiens
YEDKKRKDRKYLCSIVEGTLAQAVKKGEWILLDEINLAAPEILECLSGLLEGSSGSLVLLDRGDTEPLVRHPDFRLFACMNPATDVGKRNLPPGIRNRFTELYVEELESKEDLQVLIVDYLKGLSVNKNTVQGIINFYTALRKESGTKLVDGTGHRPHYSLRTLCRALRFAASNPCGNIQRSLYEGFCLGFLTQLDRASHPIVQKLICQHIVPGNVKSLLKQPIPEPKGGRLIQVEGYWIAVGDKEPTIDETYILTSSVKLNLRDIVRVVSAGCVGFFLAAPNLIQA

SEQ ID NO: 920240 - protein, 195 aa, Homo sapiens
MIGDTAGVGSIWKLSVLSARFFCRPKTILKKEDCSSSQSQIELNLEKASGGGNFGCGENFGGRGGYDGGAGSRDSCRGGDGEYNGFGSDGGNYGGGLGYSKIRGYGGGGPGHENQGGGYGGNGGGCDGCNEGGNFDSGNYDGGGKYSDFGNYSGQQQSNYGPMKGGFLGGRSSGSPYGGDYGSGGKSGGYNNRRF

SEQ ID NO: 920241 - protein, 166 aa, Homo sapiens
STLMHTLMTNVRVHGVALVPLSLTDHEAVVDVLRDSQLWPLRMHSPLLRHQSQPVAICSQQPAPHISTGRTAHCTSTTPWSKRTCPQQNNVVLSISTGKPASWCSQLLHDGRSHTSQPTESLLLVFGEGENCYDALPQPFLRPPQLLLHPPPPPPTTRRPLEALCL

SEQ ID NO: 920242 - protein, 166 aa, Homo sapiens; identical to SEQ ID NO: 920241

SEQ ID NO: 920243 - protein, 206 aa, Homo sapiens
MLFLTFVPKAILSDLQAGQMISVLSESNPTSPRVHWKEWEGDARKPGHAGEVVPAEVCLLGLYSVTAVKKSPSMEPLTVGPIVRFIQRNKVTRQYHFQGTDPEMSHTLFNIKKTVLLRTRIIDLDARKVRAGEQTYFYGKEAVPSSSNHRSCPPWQVQGLSRDFIVGNPKKTQLRVRSQRVACQDECLHHFPLTTMPMYKVYHRGK

SEQ ID NO: 920244 - protein, 364 aa, Homo sapiens
MRLQTYWGWQAMETVYDANPRLCEDVVITDEASGHSTARHGHATAAALSPVLCREPQWAGGWEIPSLLKAKSHLAEGRQVQTLGGGAGFEQGQAPGGAAVQPGRGCEAQRVFAALQARPSVSPQRPSGPADSLREGAWPGCGTGGSAAPLTMLFTPELNPQAAPYQALASCPSLAARAEAPERPVSFFLLSQCLPSWSFADARCEGSMCAQTDAGYEVSVCTDGRWVRGERVHGRTLGASVCARTDAGCEVSVCTDGRWVRGERVCTDGRWVRGERVCTDGRWVRGERVCTDGRWVRGERVCTDGRWVRGEPVCMDGRWLRGECVCMDTGCEGSVSMKVGMDVQGCECGSWGRAQQMPESRQSL

SEQ ID NO: 920245 - protein, 139 aa, Homo sapiens
MLRYCTSLPTFTLSLGSSSCVHFSFLPPYEEDSLLPLHLPPLFSRGTLSKEEQEAEVEEAENKRQETRGLERKKLPGPLTRMSARAQLTLDSTARCEGKQRSSYTVNKCPFCSLCIATFFIFLCFLLGISLFKMLPPAR

SEQ ID NO: 920246 - protein, 192 aa, Homo sapiens
EHRTPSSPAFGLLDLHQWFARGSRVFGHRLKAALPVSLLLRFWDSDWLPCSSVCRQPMVGLLLVIVSLYGMDVEGKFEASPNSFLLLEPGPFLGDLQEESVPGDCSSQPYLPFYFRAGTLVTFLGKSLDVTSMAGDRGLGLSLESFPASAFPLGALFPSWINGRGSITEVCGFNRHMRCCLQAKLRISSCSK

SEQ ID NO: 920247 - protein, 134 aa, Homo sapiens
MIIESSLWPLQMPHLSCVLVLVLLAGPFNERDIREENFLHQTRGCEPPLRHHRALGISGLSSPFSRASLGQGGLRKEIMINHQHRHHQMYSVGCKGMISKRPYLVFPWIASLTKHPLKPPPNMPTRHYRHILFY

SEQ ID NO: 920248 - protein, 118 aa, Homo sapiens
PQKFFRSPLELSRVDNPGIFVAIKGLSRLNANASRGLTQQFWNLSARTSLIYPRYQKREINDIFHSIGKNTRLVIVKGGGVIPAEALSHMTNDKARGKQKEEGLSCSAPTWPVEAVRS

SEQ ID NO: 920249 - protein, 562 aa, Homo sapiens
MVGLGVHVKVCFIDPKFISAHLISESDNPEDDKVYFFFRENAIDGEHSGKATHARIGQICKNDFGGHRSLVNKWTTFLKARLICSVPGPNGIDTHFDELQDVFLMNFKDPKNPVVYGVFTTSSNIFKGSAVCMYSMSDVRRVFLGPYAHRDGPNYQWVPYQGRVPYPRPGTCPSKTFGGFDSTKDLPDDVITFARSHPAMYNPVFPMNNRPIVIKTDVNYQFTQIVVDRVDAEDGQYDVMFIGTDVGTVLKVVSIPKETWYDLEEVLLEEMTVFREPTAISAMELSTKQQQLYIGSTAGVAQLPLHRCDIYGKACAECCLARDPYCAWDGSACSRYFPTAKRRTRRQDIRNGDPLTHCSDLHHDNHHGHSPEERIIYGVENSSTFLECSPKSQRALVYWQFQRRNEERKEEIRVDDHIIRTDQGLLLRSLQQKDSGNYLCHAVEHGFIQTLLKVTLEVIDTEHLEELLHKDDDGDGSKTKEMSNSMTPSQKVWYRDFMQLINHPNLNTMDEFCEQVWKRDRKQRRQRPGHTPGNSNKWKHLQENKKGRNRRTHEFERAPRSV

SEQ ID NO: 920250 - protein, 122 aa, Homo sapiens
QDNIFKLENSHFENGRGKSPYDPKLLTASLLIDGELYSGTAADFMGRDFAIFRTLGHHHPIRTEQHDSRWLNDPKFISAHLISESDNPEDDKVYFFFRENAIDGEHSGKATHARIGQICKVR

SEQ ID NO: 920251 - protein, 182 aa, Homo sapiens
MTATNSPLLGNDQPVPEEEEVPPGGLRALGQHHGAVKDRLSVLEGQAQLQGQLLEGHCGCQALPEGGGDGVGPAGGFAQRKCRRALLHGDLIFSPQNFTWEMIYNLPGISYPTLGWRWLGEPVVLPQQRSLQRQSASVHGEAQCLHGLPGSGSVWWVFTYLVCGRALPKILSSPAAGTEEQL

SEQ ID NO: 920252 - protein, 225 aa, Homo sapiens
MMHLRIKGSEKQKFYKLRQEERKMGPAELRNKAEEKNNSSTEMKGTLDKMKWKIDVDANKVRNMKDDLVRPRWFATAAVGDAVVVPKSMELCSQENYGCLCCVMQLVREVGESRQLQASTSSYATQKAGLTPTMPPRTPPNSKEFASRRWVSEAKNLPQATRVPAEKASKAFAPSCLLSLHTGFFFWQPSPRTPVRQIRNGFPGAQGADRAFPAASSTPVFHSAF

SEQ ID NO: 920253 - protein, 428 aa, Homo sapiens
DKVCPAASEEIDTSRLFEWHDGPLVQAMKEDGFFLLDEISLADDSVLERLNSVLEVEKSLVLAEKGSPEDKDSEIELLTAGKKFRILATMNPGGDFGKKELSPALRNRFTEIWCPQSTSREDLIQIISHNLRPGLCLGRIDPKGSDIPEVMLDFIDWLTHQEFGRKCVVSIRDILSWVNFMNKMGEEAALKRPEIISTVTSFVHAACLVYIDGIGSGVTSSGFGTALLARKECLKFLIKRLAKIVRLTEYQKNELKIYDRMKAKEFTGIDNLWGIHPFFIPRGPVLHRNNIADYALSAGTTAMNAQRLLRATKLKKPILLEGSPGVGKTSLVGALAKASGNTLVRINLSEQTDITDLFGADLPVEGGKGGEFAWRDGPLLAALKAGHWVVLDEVRGLFVMPKTVIMCVRSSHPFTAPFHNPFLSGRSR

SEQ ID NO: 920254 - protein, 189 aa, Homo sapiens
MGIIRLSWKSLYRQENYNLEKPSIEDFLAVLEERYMEVYGDFIGSIAGCIRRMVPASPSGESFRKFPLMVEGEGEQASHGKREEEGENMEEEEEEKRQKKGSSNVREARRIESINPKPQRMRTRTQYIVVNDSTGSVLHRDELDEATRGYVFLNEELNQERGRIGARQQERGKGNSQNDSRGSARTTAV

SEQ ID NO: 920255 - protein, 354 aa, Homo sapiens
SPGANGVMEPIGARLKAPPAEELPAPVVPCVQGGGDGGGASETPSPDAQLGDRPLSPKEEAAPQEQEELLECRRRCRARSFSLPADPILQAAKFLQQQQQQAVALGGEGAEDAQLGPGGCCAKCKKRVQFADTLGLSLASVKHFSEAEEPQVPPAVLSRLRSFPMRAEDLEQLGGLLAAAAVAAPLSAPPSRLRPLFQLPGPSAAAERLQRQRVCLERVQCSTASGAEVKGSGRVLSCPGPRAVTVRYTFTEWRSFLDVPAELQPEPLEPQQPEAPSGASEPGSGDAKKEPGAECFHFSLCLPPGLQPEDEEDADERGVAVHFAVCYRCAQGEYWDNNAGANYTLRYARPADAL

SEQ ID NO: 920256 - protein, 503 aa, Homo sapiens
YTSVFALPLYRLAVTQPFLAMRHSISHSLEDRKITCSSNGLTPMTLSGERAYVAFPDFFRNSTAAWWKKEIEELYANPREPEKSLKFDGLWIEITQHFPSDLESRDKGLSSKTLCMESQQILPDSSPVEHYNVHNLYGWSQTRPTYEAVQEVTGQRGVIITRSTFPSSGRWGGHRLGNNTAAWDQLGKSIIDFSESAPHEIPTSCSHYASSQTGADICGFFGDAEYEMCVRWMQLGAFYPFSRNHNNIGTRRQDPVAWNSTFEMLSRKVLETRYTLLPYLYTLMHKAHVEGSTVVRPLLHEFTDDRTTWDIDRQFMLGPAILISPVLETSTFEISAYFPRARWYDYSTGTSSTSTGQRKILKAPLDHINLHVRGGYILPWQEPAMNTHSSRQNFMGLIVALDDNGTAEGQVFWDDGQSIGAYTTRTLGFKHKTDGAWNTSETEPFTPLESQGAECPCSADPNPTEPSKLRSTGLKYSPPAQLSEVDVGSSSLVEGGASAITEA

SEQ ID NO: 920257 - protein, 439 aa, Homo sapiens
MAASWSLLVTLRPLAQSPLRGRCVGCGAWAAALAPLATAPGKPFWKAYTVQTSESMTPTATSETYLKALAVCHGPLDHYDFLIKAHELKDDEHQRRVIQCLQKLHEDLKGYNIEAEGLFSKAVNQRKDWLTYGPMQGCSCEHGSCSQKWTVSVVGTMSDQSSTMVIGIHRLKQSLPKRKPGFMAKSYDPIAPIAEEISEEACLLCFDEFQVTDIADAMILKQLFENLFKNGVVVVATSNRPPEDCYKSWQRVEAKLSGWRNDPFEVASGARVENLSPPLYLERMGVITCEMRLLKTTDGWVLFLYPTCHSLPWSVGYVLKCVFVVAGEWVLQMPGALPGHGAERVLLHYDLYPGSVGQLRLLNQMRGCSECLEICLVVRQRGPLHTRLSAQEEWGRSSCRSRLVTGESTIPAPTAEALSTVLDVEAPYPTLEQVFQSLA

SEQ ID NO: 920258 - protein, 196 aa, Homo sapiens
MRLSFIVLKPYHSVFLGTTLQVHFGFCMERSVLLPCPVERAASAYQPYRQTRYTLGPFWSYSGKSMGALLIPIKPLLTVSKFIDLVAMKYPGILCQLPTGQHTDAMLAADGYQTCASWQLQPQAIDQMEMEKTLLSILPAKPVLFSIQDWNSPNQVLVSRQPERNIILLWPHAVKLLRVTNFPKEPTVVFASIYLY

SEQ ID NO: 920259 - protein, 141 aa, Homo sapiens
MDELKLFTVSWNRRHLAGLALSCHSPKENFVSDSSFMLTFSMPGSLMDIIRVMVPHTMPSTQGKQQAFARGKGELENIHLSAHLAEENYRKDKQEANVIGYLQDMIGDGKEGRRKGGKEEERRKGRRKKGKKEGDREKGRK

SEQ ID NO: 920260 - protein, 369 aa, Homo sapiens
MSDASVNFDYKSPSPFDCSTDQEEKIEDVASHCLPQKDLYTAEEEAATLFPRKMTSHNGMEDSGGGGTGVKKKRKKKEPGDQEGAAKGSKDREPKPKRKREPKEPKEPRKAKEPKKAKEHKEPKQKDGAKKARKPREASGTKEAKEKRSCTDSAARTKSRKASKEQGPTPVEKKKKGKRKSETTVESLELDQGLTNPSLRSPEESTESTDSQKRRSGRQVKRRKYNEDLDFKVVDDDGETIAVLGAGRTSALSASTLAWQAEEPPEDDANIIEKILASKTVQEVHPGEPPFDLELFYVKYRNFSYLHCKWATMEELEKDPRIAQKIKRFRNKQAQMKHIFTEVKQYLLTHLTAAFLAAVNTVFTFLSPS

SEQ ID NO: 920261 - protein, 316 aa, Homo sapiens
MSDASVNFDYKSPSPFDCSTDQEEKIEDVASHCLPQKDLYTAEEEAATLFPRKMTSHNGMEDSGGGGTGVKKKRKKKEPGDQEGAAKGSKDREPKPKRKREPKEPKEPRKAKEPKKAKEHKEPKQKDGAKKARKPREASGTKEAKEKRSCTDSAARTKSRKASKEQGPTPVEKKKKGKRKSETTVESLELDQGLTNPSLRSPEESTESTDSQKRRSGRQVKRRKYNEDLDFKVVDDDGETIAVLGAGRTSALSASTLAWQAEEPPEDDANIIEKILASKTVQEVHPGEPPFDLELFYVKYRNLYVYLKYSLYLGFI

SEQ ID NO: 920262 - protein, 391 aa, Homo sapiens [sequence omitted]

SEQ ID NO: 920263 - protein, 110 aa, Homo sapiens
MRTWTSKWWMMMGKQLLFLELVEHLHSQPLHWPGRRRSLQKMMQTSLRRSWHLRLSRRFTQENLRSTWSCSTLSIEIFPTYIVNGPQWKSSKRILASHRRSSDLGINKPR

SEQ ID NO: 920264 - protein, 369 aa, Homo sapiens; identical to SEQ ID NO: 920260

SEQ ID NO: 920265 - protein, 365 aa, Homo sapiens
MSDASVNFDYKSPSPFDCSTDQEEKIEDVASHCLPQKDLYTAEEEAATLFPRKMTSHNGMEDSGGGGTGVKKKRKKKEPGDQEGAAKGSKDREPKPKRKREPKEPKEPRKAKEPKKAKEHKEPKQKDGAKKARKPREASGTKEAKEKRSCTDSAARTKSRKASKEQGPTPVEKKKKGKRKSETTVESLELDQGLTNPSLRSPEESTESTDSQKRRSGRQVKRRKYNEDLDFKVVDDDGETIAVLGAGRTSALSASTLAWQAEEPPEDDANIIEKILASKTVQEVHPGEPPFDLELFYVKYRNFSYLHCKWATMEELEKDPRIAQKIKRFRNKQAQMKHIFTEPDEDLFNPDYVEVDRILEVAHTK

SEQ ID NO: 920266 - protein, 251 aa, Homo sapiens
RQVKRRKYNEDLDFKVVDDDGKQLLFLELVEHLHSQPLHWPGRRSKEQGPTPVEKKKKGKRKSETTVESLELDQGLTNPSLRSPEESTESTDSQKRRSGRQVKRRKYNEDLDFKVVDDDGETIAVLGAGRTSALSASTLAWQAEEPPEDDANIIEKILASKTVQEVHPGEPPFDLELFYVKYRNFSYLHCKWATMEELEKDPRIAQKIKRFRNKQAQMKHIFTEVKQYLLTHLTAAFLAAVNTVFTFLSPS

SEQ ID NO: 920267 - protein, 160 aa, Homo sapiens
MPATLLGWPREMMQPHPVGAQRSADAARGSFFPRTLPGSGFPELRTETLSSLPLGLWALSIQSNWGSCKLCDLRNNGCYNFCKGSFTGMRPGQRAQPAGTPGLPLHPPYQLREAWCPRCQGLTPTGTPCGAAVGGGSAGRVSGGPGLFCLTPLPPSGCLP

SEQ ID NO: 920268 - protein, 152 aa, Homo sapiens
MMTMAVLWNRKGGKEELMARGDVYRCYFSPSQIKPVELTTHINLPLPPVAVQMSSSFLYTNNCHFDVTTLAKNSSDGLTNIFGNFSLKQSMTTQHSQQVNVNFDIGPLIALSFPRNSGVTTQPIPLSMRGHLLTANGGPQERPSRAEESTVA

SEQ ID NO: 920269 - protein, 152 aa, Homo sapiens; identical to SEQ ID NO: 920268

SEQ ID NO: 920270 - protein, 180 aa, Homo sapiens
MAVWPQPLCCTLLSSAQSKLSSLFSTVREKLTTEASVMVDTPSLTKLNHPRLTSDCCAGNDHSPLMTLLKIALFSQAGIGLTANTFLLFFCICTLPLDCRPKPTDLITCHLALVHLVMLLTVSFLASLDLFESQYFQNDFKCKVFFYMHRGMRALHLHHLPPECAPGCHHYPRHLLVGKN

SEQ ID NO: 920271 - protein, 180 aa, Homo sapiens; identical to SEQ ID NO: 920270

SEQ ID NO: 920272 - protein, 156 aa, Homo sapiens
EKPRMFFHICSWIRSVSFCPDPGPAPKEGSPSCRDSLALQQCGYVMGPHPKSTQPTPPAGQGQPLEEETGSGHEPTPGQPPGNVVRCDLFTDSGVLGSEQKRPGGPPGCLRGPGSMGQGEWLLPGLRLSGCPVSEAWQAIPDPTHRVYLWNSDCHD

SEQ ID NO: 920273 - protein, 146 aa, Homo sapiens [sequence omitted]

SEQ ID NO: 920274 - protein, 144 aa, Homo sapiens
MAEPGTLGPLAAAGRPGGRRRLAPSRAARLQAHSCTQLPRAALRCLPRTADSLARPPRLPGAGCVTSPIHGARLPRSAGAGRAVALTTQTPARTMTSSWSSPASLRAHSLACAGLQGARISCFKTAAFLEESPQLTTKQNPPGG

SEQ ID NO: 920275 - protein, 137 aa, Homo sapiens
MGKVLCKIFGNKEMWILMLRLDAAGKTTILTRSALSRHNYTGTQGLIFVVDCADCHRTDEACQELHHIINDREMRDAIILIFTNKQDLPDAMKPHKIQEKLGLTWIQDRNWYGQPSCATSGDGLCEGLTWLTSNYKS

SEQ ID NO: 920276 - protein, 266 aa, Homo sapiens
MRTEPLCGASPLLVPGDPYSVVVLLQGYAEPEGVGDAVRADGSVTLVLPQTRGPASSHRESPRGSGGAEAALEEAARGPILVDTGGPWAREALLGALAGQGVAPGDVTLVVGTHGHSDHIGNLGLFPGAALLVSHDFCLPGGRYLPHGLGEGQPLRLGPGLEVWATPGHGGQRDVSVVVAGTALGTVVVAGDVFERDGDEDSWQALSEDPAAQERSRKRVLVVADVVVPGHGPPFRVLREASQPETEGGGNSQQEPVVGDEEPALH

SEQ ID NO: 920277 - protein, 454 aa, Homo sapiens
MFTFLSSVTAAVSGLLVGYELGIISGALLQIKTLLALSCHEQEMVVSSLVIGALLASLTGGVLIDRYGRRTAIILSSCLLGLGSLVLILSLSYTVLIVGRIAIGVSISLSSIATCVYIAEIAPQHRRGLLVSLNELMIVIGILSAYISNYAFANVFHGWKYMFGLVIPLGVLQAIAMYFLPPSPRFLVMKGQEGAASKVLGRLRALSDTTEELTVIKSSLKDEYQYSFWDLFRSKDNMRTRIMIGLTLVFFVQITGQPNILFYASTVLKSVGFQSNEAASLASTGVGVVKVISTIPATLLVDHVGSKTFLCIGSSVMAASLVTMGIVNLNIHMNFTHICRSHNSINQSLDESVIYGPGNLSTNNNTLRDHFKGISSHSRSSLMPLRNDVDKRGETTSASLLNAGLSHTEYQIVTDPGDVPAFLKWLSLASLLVYVAAFSIGLGPRSRRQTNWLK

SEQ ID NO: 920278 - protein, 142 aa, Homo sapiens
MLGVQLSPTESRLEGTRLQACRSCISGWPRARPGPTAAPRTGFMPHAWLLTTTECLSRDWMEAEEVSLEASPTQTHGFLVEAVCTPALTWLCEESGEGLQGNILAPSQDPLRVPGPRGLHLSEAPSILPPASPRTLCMSLGR

SEQ ID NO: 920279 - protein, 156 aa, Homo sapiens
SHAVPSLAPPYPSEMGSQSASSAPDNLNLIQFPPPGSLPSPCCRPPMGPTESSAPTERPAFREVPAQGGASIKSQKLSIYGSQTEVLSKNPDSLSKKPPRNLDSAVLDAWYQHLLLMMAYGCFHSQQKVKQGDQADPALVLVKAETLSLGCSSLIT

SEQ ID NO: 920280 - protein, 137 aa, Homo sapiens
VNWEILNMDCRLDYIEIASLLGVTRALRTRRRMLIHRQKYVQGASWHLQLTNVPTAKKKVTGSAFGKTPTIGESGSSLLESKISSINSPWYKSRQEWKNGETPVCKKSEVTAIRNTYSKQQRGALTPQVLQVPQSCC

SEQ ID NO: 920281 - protein, 147 aa, Homo sapiens
WSRGTKGQAMKFPAGARVPPFHSQALWKADSQGHKQVFVCQEGPLLGLSVHTITHRLCPISEHNEEAMTTPTWAWAFTQEFGSHGKTPWKMPWGSTTTRIHIHSIALVGPPEHSCKRHVVSQIPGRGRASVTTTTSEEMKAQRSCET

SEQ ID NO: 920282 - protein, 173 aa, Homo sapiens [sequence omitted]

SEQ ID NO: 920283 - protein, 463 aa, Homo sapiens
MLKEHPEMAEAPQQQLGIPVVKLEKELPWGRGREDPSPETFRLRFRQFRYQEAAGPQEALRELQELCRRWLRPELHTKEQILELLVLEQFLTILPREFYAWIREHGPESGKALAAMVEDLTERALEAKAVGEEGIQLGPVEVKPEWGMPPGEGVQGPDPGTEEQLSQDPGDETRAFQEQGGGSKEKEAKPPQEDLKGALVALTSERFGEASLQGPGLGRVCEQEPGGPAGSAPGLPPPQHGAIPLPDEVKTHSSFWKPFQCPECGKGFSRSSNLVRHQRTHEEKSYGCVECGKGFTLREYLMKHQRTHLGKRPYVCSECWKTFSQRHHLEVHQRSHTGEKPYKCGDCWKSFSRRQHLQVHRRTHTGEKPYTCECGKSFSRNANLAVHRRAHTGEKPYGCQVCGKRFSKGERLVRHQRIHTGEKPYHCPACGRSFNQRSILNRHQKTQHRQEPLVQSNGYLVNS

SEQ ID NO: 920284 - protein, 289 aa, Homo sapiens
NASSVTICTSERSMESGLCCATVQCVEGAVQQLCSVETEYCYTMQGAEPTVCTGLITDIWYSMAELARAMMHHGSATSIMGMTQSCTRHTAPLQCIYWYTELRPRAPADDMFGVGNHKVNAETAKRKSIRRRHTLGGHRDATEISVLNFWKVHEQSGERESELSAVNRLKPKCSAQDLSISDWLARERLRTSTSDLSRGEIGDPQTEKPSTREIATTDTPLSLHCPTGSSSSILASTNRPLLSIPPQSPDQINGESFQNVSKNASSAANAQPHKLSETPGNKAEFHPCL

SEQ ID NO: 920285 - protein, 1704 aa, Homo sapiens
MKKMETEETFEIDGSSVQLVSLSAITLETGNTSRKTKKPLGPNGYHFVKQVKEGGPAFEAGLCTGDQIIKVNGESVIGKTYSQVISLIQNSDTTLELSVMPQYEDILQVAYSQDAYLKGNEAYSGNARNIPEPPPICYPWLPSAPSAMAQPVEIAPPDSSLSKQQTSTPVLTQPGRAYRMEIQVPPSPTDVAKSNTAVCVCNESVRTVIVPSEKVVDLLSNRNNHTGPSHRIEEVRYGVNEQTSLKTVSRTTSPPLSIPTTHLIHQPAGSRSLEPSGILLKSGNYSGHSDGISSSRSQAVEAPSVSVNHYLPNSHQHIDWKNYKTYKEYIDNRRLHIGCRTIQERLDSLRAASQSTMDYNQVVPNRTTLQGRRRSTSHDRVPQSVQIRQRSVSQERLEDSVLMKYCPRSASQGALTSPSVSFSNHRTRSWDYIEGQDETLENVNSGTPIPDSNGEKKQTYKWSGFTEQDDRRGIYERPRQQEIHKSFRGSNFTVAPSVVNSDNRRMSGRGVGSVSQFKKIPPDLKTLQSNRNFQTACGMSLPRGISQDRSPLVKVRSNSLKAPSTHVTKPSFNQKSFVSIKDQRPVNHLHQNSLLNQQTWSSENAGTSDLELPVSQRNQDLSLQEAEIEQSDTLDNKEAVILREKPPSGHQTPQPLRHQSYILAVNDQETRSDTTCWLPMMHLSHDHESVGPHSLNAQPNSKTERSKSYDEGLDDYREDVKLSFKHVSSLKGIKVADSQKSSEDSGSRKDSSSEAFSDAAKEGWLHFRSLVTDNGNETKRKNVFRLTTSDCECLFQAEDRDDMLAWIKTIQESSNLNEEDTGVTNRDLISRTIKEYNNLMSKAEQLPKTPRQSLSIRQTLPGAKSEPKTQSPHSPKEESERKLLSKDDTSPPKDESTWRKGIPSIMRKTFERKPTATGTFGVRLDDCPPAHTNRYIPLIVDICCKLVEERGLEYTRIYRVPGNNAAISSMQEELNKGMADIDIQDDKCSLLKCFSRKLPESLFTNDKYADFIEANRKEEPLDRLKTLKRLIHDLPEHHYETLKFLSAHLKTVAENSEKNKMEPGNLAIVFGPTLVRTSEDNMTHMVTHMPDQYKIVETLIQHHDWFFTEEGAEEPLTTVQEESTVDSQPVPNIDHLLTNIGRTGVSPGDVSDSATSDSTKSKGSWGSGKDQYSRELLVSSIFAAASRKRKKPKEKAQPSSSEDELDNVFFKKENVEQCHNDTKEESKKESETLGRKQKIIIAKENSTRKDPSTTKDEKISLGKESTPSEEPSSPHNSEHNKSPTLSCRFAILKDSPRSLLAQKSSHLEETGSDSGTLLSTEFLANVSTITSDYSTTSSAAYLTSLDSSRLSPEVQSAAESKGDEADDERSELISKGRPVETDSESEFPVFPTALTSERLFRGKLQEVTKSSRRNSEGSELSCTEGSLTSSLDSRRQLFSSHKLIECDTLSRKKSARFKSDSGSLGDAKNEKEAPSLTKVFDVMKKGKSTGSLLTPTRGESEKQEPTWKTKTADRLKLRPRAPADDMFGVGNHKVNAETAKRKSIRRRHTLGGHRDATEISVLNFWKVHEQSGERESELSAVNRLKPKCSAQDLSISDWLARERLRTSTSDLSRGEIGDPQTEKPSTREIATTDTPLSLHCPTGSSSSILASTNRPLLSIPPQSPDQINGESFQNVSKNASSAANAQPHKLSETPGNKAEFHPCL

SEQ ID NO: 920286 - protein, 205 aa, Homo sapiens
MAVCTINHVMKHPGPTRWLLKTAERQNLVLSGQGHLVGHPAAILAKWVLLGRKLVVEHHEGINISGNFWRNKLKYLAFLCKQMSTNPSQGPPAPPFLGPQRIFWWPCRTKKKKQLMRLQKQATKNVEKTNDKYTEVLRPRDSLFETRKDCLFLMLGLAYPSAIATLGYGGAYPSCITALGCGGSKGSNIGAMGSLGLKLGAREGP

SEQ ID NO: 920287 - protein, 174 aa, Homo sapiens
MGYTTTMPLLQRQFPDPSPRDIVKIYRLFFTFTSLLRAVTLTVKVRGFLKLEKARTRRQLHNRLQGSVAGTGASAAFAGQLKLPVCVGLGPTGSRRPALPTGSAVPRHSTDPKALRSISPGALAATPGTRARDPHPAMPASQPTPCRGLLCGRSLPNERRPLLSGARSHRPPKG

SEQ ID NO: 920288 - protein, 335 aa, Homo sapiens
MCHNHDAQLRFFLVVQVVDLDRGLVLNAEGRYLQDSHGNPLRIKLGGDGRTIVDLEGTPVVSPDGLPLFGQGRHGTPLANAQDKPILSLGGKPLVGLEVIKKTTHPPTTTMQPTTTTTPLPTTTTPRPTTATTRRTTTTRRTTTRRPTTTVRTTTRTTTTTTPTPTTPIPTCPPGTLERHDDDGNLIMSSNGIPECYAEEGNCLCSNANYLPGTLARRNSEQGGRACRGGMSTVHSKAATRCIFGPSSPPLENANPHVAGLPVGVWAFHWVRMHHFPFSADLHYPAAPDVIVEPVYQYISIFSAQSPAQAALEEVILDLHQAWRREIHLLSLSLK

SEQ ID NO: 920289 - protein, 172 aa, Homo sapiens
PIRPSWLHPLEKSSMQKNSKCILPLLKCGLTMVTSFKERYIDDSFSSLIKRILSFLLLHYDKKRNKLMLPCFKIIEVYSTFKKYFTRKIWRIHFIIDKLTKNTGKKKDNQGHYKGALCQKLGLKNKYRTNYSSSTPTARILRTLSQDKDLRVTRCTLLASAGFSQGQVPIPT

SEQ ID NO: 920290 - protein, 172 aa, Homo sapiens; identical to SEQ ID NO: 920289

SEQ ID NO: 920291 - protein, 727 aa, Homo sapiens
MRGLFGVMDVTDDMRGLFGVMDVTDDMRDLFGVTDAVDDMRDLFGVMDVTDMRDLFGVMDVTDMRDLFGVMDVTDDMRDLFGVMDVTDDMRGLFGVMDVTDDMRDLFGVMDVTDDMRGLFGVTDVTDDLRGLFGVMDVTDDMRGLFGVMDVTDVRDLFGVWMLQILHPPPSMPSTLLTNSPSTFSQLAQLKGQPPASKAVRASSSGTTWEKVTVASGKASWLRLLGPGTLIPGGQHSNVRWASDLEDRAPRHSPWLRVKKRRPHGGPSTKRPVNEVCLYGRASSRRDPHHRETILWAHRRTHCAHSGALWGGSSEHSGEPLAAVVTGGQPIAKRLALCPHPASTRLDSPQRLHGGLGSCDGRGPHRRGPKSAPGSALDRLWVLERLAQPCAALSHADPVGRTPYCRSLTESYKKEPQRTEPLAPQPLWKDMVCVPGKRCKAVVPVTSSDSHPNAGDCTFVFSPVHRLKALPPVQLCLDLGLWEVMMVCVLLVAAAAALRHWPHLVSPQPLQPRGEGHPLAFKHRCTHRGTTATVELWNVPVTHSPPLSHCRHPQPCPDPQPASQSLPITHSPASQSLPVTHSPASQSLPSPTALPLSHCPSPTALPLSHCPSPTALPLSHCPSPTALPLSPCRHPQPCLSVTARHPQPCLSVPAVTLAAPGVAQKWNCVLGCLRAQPLSLRDSSLLLCGAVVGRSQLGRARPGNRPLLLRWFPRWWTGLSAHFSCHQ

SEQ ID NO: 920292 - protein, 208 aa, Homo sapiens
MIFSAAASTYRCSLPQSLQTDNDDLTHPLPPPGSPGFSGPQCATDACFKGVPRCYAGESGFTVATTNYSTFNTICECWVWPGKISEPPGTQTRKLQCQRRSHLPMRANASNVCRIPESSQELRLNIPEPAVETLESDPGRGTHQDDNWQPSEMTEMQDFESKDAFRLLGPGDEVNTSHPGSPSASWGRFWRPEAQNQGAGRVGSSCKL

SEQ ID NO: 920293 - protein, 208 aa, Homo sapiens; identical to SEQ ID NO: 920292

SEQ ID NO: 920294 - protein, 208 aa, Homo sapiens; identical to SEQ ID NO: 920292

SEQ ID NO: 920295 - protein, 185 aa, Homo sapiens
MDQYTKLVSEEWGVAEKIPENVETILELGNRQRLERFGGSQNGRSTDSLHHVPGKATDTQCQPVKAAGRKAVPCKATGEELPNTMGTHLLHQHDLDEVTAPKFITTFPHLDLQKAKLMFVKSGQYPRGVYVNPKPHDFRQLMDQNSIGLPELWPECSSPVHFPVRTLMNSGTFLDSTEICTLPEA

SEQ ID NO: 920296 - protein, 160 aa, Homo sapiens
LTKYLLSFSPEITSSCKVSWAQVGMQAFSIPRDRKWLFWTSPAIKPLSHDFPNSKPQLGYQGMALSVFNGLQLKQVQKCEDCKLESNSADAAHRGRMIQGAKLCLIKSENFLQMNFSRIMPKHWQTHAQKCTEKEYPNIEHQRPSDFGASILKWFATITN

SEQ ID NO: 920297 - protein, 209 aa, Homo sapiens
RNLTLLPRLECSVVPGVKAERFEEGMTVKHCALSLVGEPIMYPEINRFLKLLHQCKISSFLVTNAQFPAEIRRLPSVIDGGRWPSSTDPMWNLEPVTQLYVSVDASTKDSLKKIDRPLFKDFWQQFLDSLKALAVKPISDLVLPKEEDGMTQEVPKEGKEGACGNKSVEDFNVKHIESESGKNLIKILVQFHATQGNSEFPERLPSKGF

SEQ ID NO: 920298 - protein, 134 aa, Homo sapiens
MAMNGGRGVLGNHYWLQPDEIPSYPLLYGTCSSWVFLGMGLGQVGIHVLGLHGLHCLQPGCLGLGKSPRLKDGWRLCPPFWENNLQEFQRDGGWHNEMKAAASEKQKEESGLNAHLAFPPWGSHPSPAKCATVW

SEQ ID NO: 920299 - protein, 848 aa, Homo sapiens
METKDMLYIVTEFAKNGEMFDYLTSNGHLSENEARKKFWQILSAVEYCHDHHIVHRDLKTENLLLDGNMDIKLAGTEDFGFGNFYKSGEPLSTWCGSPPYAAPEVFEGKEYEGPQLDIWSLGVVLYVLVCGSLPFDGPNLPTLRQRVLEGRFRIPFFMSQDCESLIRRMLVVDPARRITIAQIRQHRWMRAEPCLPGPACPAFSAHSYTSNLGDYDEQALGIMQTLGVDRQRTVESLQNSSYNHFAAIYYLLLERLKEYRNAQCARPGPARQPRPRSSDLSGLEVPQEGLSTDPFRPALLCPQPQTLVQSVLQAEMDCELQSSLQWVSAHSGCAEGSPQPSPGAPGVPGCSGVFRPRPVSPSSLLDTAISEEARQGPGLEEEQDTQESLPSSTGRRHTLAEVSTRLSPLTAPCIVVSPSTTASPAEGTSSDSCLTFSASKSPAGLSGTPATQGLLGACSPVRLASPFLGSQSATPVLQAQGGLGGAVLLPVSFQEGRRASDTSLTQVRDFVRDGRWHPLFSTGPGWDPQCSGQAGVLSALVARGVTACWDRHTWVPEHAASMAGSESTGDDSVLAAPPDLEEGGPLAAGCLHAILGLRCQTPVQTCLCHPSFPYPQPEAWKPLKPRAVDAGLRAGWPLTSCFILPAGLKAFRQQLRKTTRTKGFLGLNKIKGLARQVCQAPASRASRGGLSPFHAPAQSPGLHGGAAGSREGWSLLEEVLEQQRLLQLQHHPAAAPGCSQAPQPAPAPFVIAPCDGPGAAPLPSTLLTSGLPLLPPPLLQTGASPVASAAQLLDTHLHIGTGPTALPAVPPPRLARLAPGCEPLGLLQGDCEMEDLMPCSLGTFVLVQ

SEQ ID NO: 920300 - protein, 536 aa, Homo sapiens
SVEPGERGVTITTVMQAMGSGINTDEASLGHLPLTFCCVAWFLTGHGPVLAHGLGVNFVVCQLVALFAAFWFRIYLRPGTTSSDVRHAVATIFGIYFVIFCFGCNGISYNMPHQPNIHLPLWNSHYGFFWDWMIVFHTDEGGSSLFSPWIQMLISFGNPHRPLMIVTQKITTLAFQVHDGKNSSPPFGSQRLGRRAEDLSAEQHRLAIKNSGLVAKADNRLLLRFFCVASFSGNCVIAGPCNNFKDYIAFIEGKHIHMKLLEVNWKRKGFHSLPEPSPTGAVIHKLGITLVSLLLFLTLTKTFPVTCLVDDWFVHKASFPARLCYLYVVMQASKPKYYFAWTLADAVNNAAGFGFSGVDKNGNFCWDLLSNLNIWKIETATSFKMYLENWNIQTATWLKCVCYQRVPWYPTVLTFILSALWHGVYPGYYFTFLTGILVTLAARAVRNNYRHYFLSSRALKAVYDAGTWAVTQLAVSYTVAPFVMLAVEPTISLYKSMYFYLHIISLLIILFLPMKPQAHTQRRPQTLNSINKRKTD

SEQ ID NO: 920301 - protein, 143 aa, Homo sapiens
MIEPCPWEEAVCFDSELDEHIKWFQQEYVKTEKDWREIDKRMSQTLEIRRKMIGSRTPLKDILKLFPFLKCPYQNKGCGIFEVSSLLADLAGTGPDVCDLCSSATASRLGNTVTHPACPTGYCPESSSICSALNNGCISTFWV

SEQ ID NO: 920302 - protein, 122 aa, Homo sapiens
PTLMDLFKGPVSKYSHILRYWELGLQDTNFREAHSSPSQRHKGPEREASLLMRKNRHSQRTRSTCQAATAQHTLESEVGVSCEEREEGRKRIRCAPTTGQGTKKRGKENSWALRLIPVIPAL

SEQ ID NO: 920303 - protein, 129 aa, Homo sapiens
PTLMDLFKGPVSKYSHILRYWELGLQDTNFREAHSSPSQRHKGPEREASLLMRKNRHSQRTRSTCQAATAQHTLESEVGVSCEEREEGRKRIRCAPTTGQGQKTVFTKSLPKILANAHNLKVFLRALPI

SEQ ID NO: 920304 - protein, 139 aa, Homo sapiens
MDRKITVFSLLSTLSHSVQHFCHQLYRGFPHMKQFLPHMKQFHVLSVSSRHLHVFTYVEAPQTQLQNVLDGGCSFSKDPSQDDRDTKQSSWLTSKGHLADIMAKTLGNFPETDSFVLGNLPALSAMALAGFYTSLVQRK

SEQ ID NO: 920305 - protein, 357 aa, Homo sapiens
MSGKTKARRAAMFFRRCSEDASGSASGNALLSEDENPDANGVTRSWKIILSTMLTLTFLLVGLLNHQWLKETDVPQKSRQLYAIIAEYGSRLYKYQARLRMPKEQLELLKKESQNLENNFRQILFLIEQIDVLKALLRDMKDGMDNNHNWNTHGDPVEDPDHTEEVSNLVNYVLKKLREDQVEMADYALKSAGASIIEAGTSESYKNNKAKLYWHGIGFLNHEMPPDIILQPDVYPGKCWAFPGSQGHTLIKLATKIIPTAVTMEHISEKVSPSGNISSAPKEFSVYGITKKCEGEEIFLGQFIYNKTGTTVQTFELQHAVSEYLLCVKLNIFSNWGHPKYTCLYRFRVHGTPGKHI

SEQ ID NO: 920306 - protein, 416 aa, Homo sapiens
SGWEPQLLNFMVRGLMFKSFIYFKDDATEESEAFQNSVFKKKHPWRKKTLYKTNLETGIMSGKTKARRAAMFFRRCSEDASGSASGNALLSEDENPDANGVTRSWKIILSTMLTLTFLLVGLLNHQWLKETDVPQKSRQLYAIIAEYGSRLYKYQARLRMPKEQLELLKKESQNLENNFRQILFLIEQIDVLKALLRDMKDGMDNNHNWNTHGDPVEDPDHTEEVSNLVNYVLKKLREDQVEMADYALKSAGASIIEAGTSESYKNNKAKLYWHGIGFLNHEMPPDIILQPDVYPGKCWAFPGSQGHTLIKLATKIIPTAVTMEHISEKVSPSGNISSAPKEFSVYGITKKCEGEEIFLGQFIYNKTGTTVQTFELQHAVSEYLLCVKLNIFSNWGHPKYTCLYRFRVHGTPGKHI

SEQ ID NO: 920307 - protein, 407 aa, Homo sapiens
SGWEPQLLNFMVRGLMFKSFIYFKDDATEESEAFQNSVFKKKHPWRKKTLYKTNLETGIMSGKTKARRAAMFFRRCSEDASGSASGNALLSEDENPDANGVTRSWKIILSTMLTLTFLLVGLLNHQWLKETDVPQKSRQLYAIIAEYGSRLYKYQARLRMPKEQLELLKKESQNLENNFRQILFLIEQIDVLKALLRDMKDGMDNNHNWNTHGDPVEDPDHTEEVSNLVNYVLKKLREDQVEMADYALKSAGASIIEAGTSESYKNNKAKLYWHGIGFLNHEMPPDIILQPDVYPGKCWAFPGSQGHTLIKLATKIIPTAVTMEHISEKVSPSGNISSAPKEFSVYGITKKCEGEEIFLGQFIYNKTGTTVQTFELQGPWHTRQAHLEELVQKAMPHVQNIQECLFS

SEQ ID NO: 920308 - protein, 197 aa, Homo sapiens
PFQLSTHHFHSVESRMQVRPRPVVEILECSCQMKRKTRDKRGGAGKRKEKTCLPAHRYDPGALGEKRKQALSHHYGCTTAAIPTGLQGAPLTLGQTSCSTKFLSKLKGKNEWAACSQPPGTGKRGSFSFRSIPSTKKGVEGAENVPHSEALLPRGPPFGEEHGWNESEVRRSQPNVTVAEGEGKVGKGEGDGGQETC

SEQ ID NO: 920309 - protein, 132 aa, Homo sapiens
MLIGLGEQEVAGTLDVIVKHMKVKHKSFTVSKSCHIGEDFRSPMVCSILRAFSEDFSAHLAQDQHSPEVQGHYHARGNPPAVGDTSLWMKVPTSHHSDEKHQEASCTFLRGHSRINPPLHTAAISIMHHSIS

SEQ ID NO: 920310 - protein, 138 aa, Homo sapiens
MESFHTRFSAWTPFSNKSLNRQLFQERVALISHWFDLWTNKQRQEFLFAIFLRCTKSQLRRKHRMKLAEDSKADVTENLGDSYRDCCMGSRERDWAQLQMQHGRIAKEQDGAQWMENYSRKHQGEERGVFKVKVYTCI

SEQ ID NO: 920311 - protein, 137 aa, Homo sapiens
MRPSSFGIQYSIVNHGHLGQRSPETEFASTLIVDFQPPEQREESLLDTKPVTWGRCHLKACVAGSVTVDTKPVTWGRCHLKACVAGSLYKRRQNFLPQSRCWCVAGPKQAPTDSSATGPPGGTAGVGSSPGLEEQRF

SEQ ID NO: 920312 - protein, 137 aa, Homo sapiens; identical to SEQ ID NO: 920311

SEQ ID NO: 920313 - protein, 153 aa, Homo sapiens
SPPLPQGNGSMEHATPSLLERLDLKKISSSFWNLQGLGNLKDSGELVRLPKLVGFSDPFFFPAAVHIHVHIFVWTPVFSSTGSTQESDGYMVTQSSGQAQEQNHRTVTRSLGSTEESNGHMATRSLGNGSFSSSSTRSQATLPLSSKCLPAFS

SEQ ID NO: 920314 - protein, 158 aa, Homo sapiens
MTEIEFRIWIRMKIIELQEYVETQCKEVKNHDKTMPELTDNNGQYRKDSRLIKKKREKIQMKTIRNDERDIITDLTEIQTTTRDYYEHFYAHKLENLEVDKFLDPFTLPKLNQEEIERYTKKRKLQTNIFDEHQCKNSQQNTGKPNPATSESLSTTIK

SEQ ID NO: 920315 - protein, 66 aa, Homo sapiens
MVEKTLNDLMELKTMARTSCLRFLTSSGIPRGLETQNLKSLQSDFSLTIPAHCLLWTNTEHETLLT

SEQ ID NO: 920316 - protein, 139 aa, Homo sapiens
MRSHSSTLGRSMGLGAMKQGAALVWEAQAAQEPMEGVGGSGMAGCRSRALPCGKAAKAQVRNRAQRQWAGTAGGPSTPSAATGQGAKPLTARGRQGRPAAPSAGPAKPTPTQNSSWPASAERSPQNWRRKSQGSQRTAR

SEQ ID NO: 920317 - protein, 174 aa, Homo sapiens
IHGYSKYMHAICMYMFYTQILRERLRESIHNVQYVEPPFDDSIADIGKEWKSALAKLKFANSYRMEPLKKFQAHSVETKVQQILTESLKDVKYDDKVFSHLSLELADRILLAVKEFGYHRYKFIIKVLFIQKTGQAINIASRWIWDIAWDSWVAAKHEAESYVALVLVFALYYE

SEQ ID NO: 920318 - protein, 142 aa, Homo sapiens
MGRVDSHEDYDYSQHEWHPQALCLQTYSELGNASTSDTQENRVWSGPPANSSRPAEQGPDCEKKTNKHKAIASTSTKRTTMQKLHLKVPTAKTKAAREQNWMENEFDELTEVGFRRWVIINYSELKEQVLTQCKEAKNLEKG

SEQ ID NO: 920319 - protein, 178 aa, Homo sapiens
YKDTPSPMSPSGESQSLKVKGPQEFHKSQCKEVGKAPKCFCGGSGFLWQGQAQEEEAGERQRQHLLPAVTSEPYQPALLPACFWNECIPGWWNRRRLPLSSQKLPTTSRASQSPSLFLPNHYHLQTRRGPLPGFQAYSQTSEMSSLPPDPFMVRGAALTVSIPCIEKGVIAIRTLALI

SEQ ID NO: 920320 - protein, 985 aa, Homo sapiens
MAASVAAAARRLRRAIRRSPAWRGLSHRPLSSEPPAAKASAVRAAFLNFFRDRHGHRLVPSASVRPRGDPSLLFVNAGMNQFKPIFLGTVDPRSEMAGFRRVANSQKCVRAGGHHNDLEDVGRDLSHHTFFEMLGNWAFGGEYFKEEACNMAWELLTQVYGIPEERLWISYFDGDPKAGLDPDLETRDIWLSLGVPASRVLSFGPQENFWEMGDTGPCGPCTEIHYDLAGGVGAPQLVELWNLVFMQHNREADGSLQPLPQRHVDTGMGLERLVAVLQGKHSTYDTDLFSPLLNAIQQGCRAPPYLGRVGVADEGRTDTAYRVVADHIRTLSVCISDGVFPGMSGPPLVLRRILRRAVRFSMEILKAPPGFLGSLVPVVVETLGDAYPELQRNSAQIANLVSEDEAAFLASLERGRRIIDRTLRTLGPSDMFPAEVAWSLSLCGDLGLPLDMVELMLEEKGVQLDSAGLERLAQEEAQHRARQAEPVQKQGLWLDVHALGELQRQGVPPTDDSPKYNYSLRPSGSYEFGTCEAQVLQLYTEDGTAVASVGKGQRCGLLLDRTNFYAEQGGQASDRGYLVRAGQEDVLFPVARAQVCGGFILHEAVAPECLRLGDQVQLHVDEAWRLGCMAKHTATHLLNWALRQTLGPGTEQQGSHLNPEQLRLDVTTQTPLTPEQLRAVENTVQEAVGQDEAVYMEEVPLALTAQVPGLRSLDEVYPDPVRVVSVGVPVAHALDPASQAALQTSVELCCGTHLLRTGAVGDLVIIGDRQLSKGTTRLLAVTGEQAQQARELGQSLAQEVKAATERLSLGSRDVAEALRLSKDIGRLIEAVETAVMPQWQRRELLATVKMLQRRANTAIRKLQMGQAAKKTQELLERHSKGPLIVDTVSAESLSVLVKVVRQLCEQAPSTSVLLLSPQPMGKVLCACQVAQGAMPTFTAEAWALAVCSHMGGKAWGSRVVAQGTGSTTDLEAALSIAQTYALSQL

SEQ ID NO: 920321 - protein, 985 aa, Homo sapiens; identical to SEQ ID NO: 920320

SEQ ID NO: 920322 - protein, 951 aa, Homo sapiens
MAASVAAAARRLRRAIRRSPAWRGLSHRPLSSEPPAAKASAVRAAFLNFFRDRHGHRLVPSASVRPRGDPSLLFVNAGMNQFKPIFLGTVDPRSEMAGFRRVANSQKCVRAGGHHNDLEDVGRDLSHHTFFEMLGNWAFGGEYFKEEACNMAWELLTQVYGIPEERLWISYFDGDPKAGLDPDLETRDIWLSLGVPASRVLSFGPQENFWEMGDTGPCGPCTEIHYDLAGGVGAPQLVELWNLVFMQHNREADGSLQPLPQRHVDTGMGLERLVAVLQGKHSTYDTDLFSPLLNAIQQGCRAPPYLGRVGVADEGRTDTAYRVVADHIRTLSVCISDGVFPGMSGPPLVLRRILRRAVRFSMEILKAPPGFLGSLVPVVVETLGDAYPELQRNSAQIANLVSEDEAAFLASLERGRRIIDRTLRTLGPSDMFPAEVAWSLSLCGDLGLPLDMVELMLEEKGVQLDSAGLERLAQEEAQHRARQAEPVQKQGLWLDVHALGELQRQGVPPTDDSPKYNYSLRPSGSYEFGTCEAQVLQLYTEDGTAVASVGKGQRCGLLLDRTNFYAEQGGQASDRGYLVRAGQEDVLFPVARAQVCGGFILHEAVAPECLRLGDQVQLHVDEAWRLGCMAKHTATHLLNWALRQTLGPGTEQQGSHLNPEQLRLDVTTQTPLTPEQLRAVENTVQEAVGQDEAVYMEEVPLALTAQVPGLRSLDEVYPDPVRVVSVGVPVAHALDPASQAALQTSVELCCGTHLLRTGAVGDLVIIGDRQLSKGTTRLLAVTGEQAQQARELGQSLAQEVKAATERLSLGSRDVAEALRLSKDIGRLIEAVETAVMPQWQRRELLATVKMLQRRANTAIRKLQMGQAAKKTQELLERHSKGPLIVDTVSAESLSVLVKVVRQLCEQAPSTSVLLLSPQPMGKVLCACQVAQVREVGEQPTAPINTHPGPAL

SEQ ID NO: 920323 - protein, 519 aa, Homo sapiens
MAASVAAAARRLRRAIRRSPAWRGLSHRPLSSEPPAAKASAVRAAFLNFFRDRHGHRLVPSASVRPRGDPSLLFVNAGMNQFKPIFLGTVDPRSEMAGFRRVANSQKCVRAGGHHNDLEDVGRDLSHHTFFEMLGNWAFGGEYFKEEACNMAWELLTQVYGIPEERLWISYFDGDPKAGLDPDLETRDIWLSLGVPASRVLSFGPQENFWEMGDTGPCGPCTEIHYDLAGGVGAPQLVELWNLVFMQHNREADGSLQPLPQRHVDTGMGLERLVAVLQGKHSTYDTDLFSPLLNAIQQGCRAPPYLGRVGVADEGRTDTAYRVVADHIRTLSVCISDGVFPGMSGPPLVLRRILRRAVRFSMEILKAPPGFLGSLVPVVVETLGDAYPELQRNSAQIANLVSEDEAAFLASLERGRRIIDRTLRTLGPSDMFPAEVAWSLSLCGDLGLPLDMVELMLEEKGVQLDSAGLERHSKGPLIVDTVSAESLSGCGNCCDAPVAAAGAAGHSEDAAAACQHCHP

SEQ ID NO: 920324 - protein, 223 aa, Homo sapiens
GDARWLLPSLLSCPDFLFTPSSHRHLLRTGAVGDLVIIGDRQLSKGTTRLLAVTGEQAQQARELGQSLAQEVKAATERLSLGSRDVAEALRLSKDIGRLIEAVETAVMPQWQRRELLATVKMLQRRANTAIRKLQMGQAAKKTQELLERHSKGPLIVDTVSAESLSVLVKVVRQLCEQAPSTSVLLLSPQPMGKVLCACQVAQVREVGEQPTAPINTHPGPAL

SEQ ID NO: 920325 - protein, 625 aa, Homo sapiens
MAASVAAAARRLRRAIRRSPAWRGLSHRPLSSEPPAAKASAVRAAFLNFFRDRHGHRLVPSASVRPRGDPSLLFVNAGMNQFKPIFLGTVDPRSEMAGFRRVANSQKCVRAGGHHNDLEDVGRDLSHHTFFEMLGNWAFGGEYFKEEACNMAWELLTQVYGIPEERLWISYFDGDPKAGLDPDLETRDIWLSLGVPASRVLSFGPQENFWEMGDTGPCGPCTEIHYDLAGGVGAPQLVELWNLVFMQHNREADGSLQPLPQRHVDTGMGLERLVAVLQGKHSTYDTDLFSPLLNAIQQGCRAPPYLGRVGVADEGRTDTAYRVVADHIRTLSVCISDGVFPGMSGPPLVLRRILRRAVRFSMEILKAPPGFLGSLVPVVVETLGDAYPELQRNSAQIANLVSEDEAAFLASLERGRRIIDRTLRTLGPSDMFPAEVAWSLSLCGDLGLPLDMVELMLEEKGVQLDSAGLERLAQEEAQHRARQAEPVQKQGLWLDVHALGELQRQGVPPTDDSPKYNYSLRPSGSYEFGTCEAQVLQLYTEDGTAVASVGKGQRCGLLLDRTNFYAEQGGQASDRGYPPSSTLSHSLTAGMGALSFPGAHVLGPDSPVSRKGQKQHREVRHHPKY

SEQ ID NO: 920326 - protein, 985 aa, Homo sapiens; identical to SEQ ID NO: 920320

SEQ ID NO: 920327 - protein, 670 aa, Homo sapiens
GVNRHRRVVADHIRTLSVCISDGVFPGMSGPPLVLRRILRRAVRFSMEILKAPPGFLGSLVPVVVETLGDAYPELQRNSAQIANLVSEDEAAFLASLERGRRIIDRTLRTLGPSDMFPAEVAWSLSLCGDLGLPLDMVELMLEEKGVQLDSAGLERLAQEEAQHRARQAEPVQKQGLWLDVHALGELQRQGVPPTDDSPKYNYSLRPSGSYEFGTCEAQVLQLYTEDGTAVASVGKGQRCGLLLDRTNFYAEQGGQASDRGYLVRAGQEDVLFPVARAQVCGGFILHEAVAPECLRLGDQVQLHVDEAWRLGCMAKHTATHLLNWALRQTLGPGTEQQGSHLNPEQLRLDVTTQTPLTPEQLRAVENTVQEAVGQDEAVYMEEVPLALTAQVPGLRSLDEVYPDPVRVVSVGVPVAHALDPASQAALQTSVELCCGTHLLRTGAVGDLVIIGDRQLSKGTTRLLAVTGEQAQQARELGQSLAQEVKAATERLSLGSRDVAEALRLSKDIGRLIEAVETAVMPQWQRRELLATVKMLQRRANTAIRKLQMGQAAKKTQELLERHSKGPLIVDTVSAESLSVLVKVVRQLCEQAPSTSVLLLSPQPMGKVLCACQVAQGAMPTFTAEAWALAVCSHMGGKAWGSRVVAQGTGSTTDLEAALSIAQTYALSQL

SEQ ID NO: 920328 - protein, 257 aa, Homo sapiens
GDARWLLPSLLSCPDFLFTPSSHRHLLRTGAVGDLVIIGDRQLSKGTTRLLAVTGEQAQQARELGQSLAQEVKAATERLSLGSRDVAEALRLSKDIGRLIEAVETAVMPQWQRRELLATVKMLQRRANTAIRKLQMGQAAKKTQELLERHSKGPLIVDTVSAESLSVLVKVVRQLCEQAPSTSVLLLSPQPMGKVLCACQVAQGAMPTFTAEAWALAVCSHMGGKAWGSRVVAQGTGSTTDLEAALSIAQTYALSQL

SEQ ID NO: 920329 - protein, 81 aa, Homo sapiens
YLAGSLEVPYTSLNSHCLKGHPGSKSGHLHCHECSDRLCVPGNSGQTKGSLATGKIQNHPVKIISALETFFAITSFINNDL

SEQ ID NO: 920330 - protein, 390 aa, Homo sapiens
  misc_feature (1)..(1): Xaa can be any naturally occurring amino acid
XGYGFHDFSSRYHYLENCGVNELKVNLLQSLPFHLHQQGLVEGEHPLLGSHHTAFQHDKVIGHFTIVDKATQRIGALVRQVRVSGGIVLDQLAILDKVALANLIDLLVDLSAVTVAFLPSTCHREGHTSRMPCPNTGHLAQASVGLAGQLLGVPTTGDPFVAFALGHPNDVDHLILPKHLVHIYLLLEPLADPVQLLSHGASVHLDLHQVGLLLAQRKQAHLGVGNDADDVAVFLHAAEVLLQLLLDILILPFLAVLRKGLLFRFMPVLIETPLAFITDVLSEDSLEGPEASRGFHIAHNAHNHHGWRLHNGHSLHHLLLVHLGCWAVDFPHDVGHASFVSQEGCEVDRLGRIILREALHLPTMPAAALLRQEAEGPMSGSRKLSPLRLA

SEQ ID NO: 920331 - protein, 431 aa, Homo sapiens
ESALASGHNHLPRTAQMNLKSTGFCASEKETEAGHLNPWSHECFLLLHGLEAAMAKLGGGVNELKVNLLQSLPFHLHQQGLVEGEHPLLGSHHTAFQHDKVIGHFTIVDKATQRIGALVRQVRVSGGIVLDQLAILDKVALANLIDLLVDLSAVTVAFLPSTCHREGHTSRMPCPNTGHLAQASVGLAGQLLGVPTTGDPFVAFALGHPNDVDHLILPKHLVHIYLLLEPLADPVQLLSHGASVHLDLHQVGLLLAQRKQAHLGVGNDADDVAVFLHAAEVLLQLLLDILILPFLAVLRKGLLFRFMPVLIETPLAFITDVLSEDSLEGPEASRGFHIAHNAHNHHGWRLHNGHSLHHLLLVHLGCWAVDFPHDVGHASFVSQEGCEVDRLGRIILREALHLPTMPAAALLRQEAEGPMSGSRKLSPLRLA

SEQ ID NO: 920332 - protein, 481 aa, Homo sapiens
MCFSSHWYKDAISISRLQNPRYKVLASGGLRIQKLRPEDSGIFQCFASNEGGEIQTHTYLDVTSEYTQAHSYLTWTYPLPDLDVSSEYTQLHGYLDVTTGYTQAHSYLTWTYPLPDLDVSSEYTQPHGYLDVTSGYTQAHSYLIWTYPLPDLDVSSEYIQPHGYLDVTSGYTQAHSYLTWTYPLPDLDVSSEHTQADGYPDVSSGYTHAHGYPDVSSGYTLAHSYLDVSSGTPEAFVGPVGKLLRPTSSTDGCHSPALVPSSSQGQRVCREEKGSEGRDDSSQPGVLQKRGADIAPVFTQRPVDTTVTDGMTAILRCEVSGAPKPAITWKRENHILASGSVRIPRFMLLESGGLQIAPVFIQDAGNYTCYAANTEGSLNASATLTVWNRTSIVHPPEDHVVIKGTTATLHCGATHDPRVSLRYVWKKDNVALTPSSTSRIVVEKDGSLLISQTWSGDIGDYSCEIVSEGGNDSRMARLEVM

SEQ ID NO: 920333 - protein, 401 aa, Homo sapiens
MSVCSSDLSYSSRVCLPGSCDSCSDSWQVDDCPESCCEPPCCAPSCCAPAPCLSLVCTPVSRVSSPCCPVTCEPSPCQSGCTSSCTPSCCQQSSCQLACCASSPCQQACCVPVCCKTVCCKPVCCVPVCCGDSSCCQQSSCQSACCTSSPCQQACCVPICCKPVCSGISSSCCQQSSCVSCVSSPCCQAVCEPSPCQSGCISSCTPSCCQQSSCQPACCTSSSCQQACCVPVCCKTVCCKPVCSEDSSSCCQQSSCQPACCTSSPCQQACCVPVCCKPVCCKPVCSVPICSGASSLCCQQSSCQPACCTSSQSQQGCCVPVCCKPVSCVPVCSGASSSCCQQSSCQPACCTTSCCRPSSSVSLLCRPVCRPACCVPVPSCCAPTSSCQPSCCRPASCVSLL

SEQ ID NO: 920334 - protein, 219 aa, Homo sapiens
DKQTSAMGNAHGLCGNKKSKHQTLQGLWVCHKCHCRGGGCSPELKATKGGGKSCGSKEGQLKRRFSKPGTHPTVKKIFVGAIKEHTEEHYLRDYLEQCGKIKLIKIITDRGSETDSVEVHVLLPQGMEQEGQENGAGRMQSMRVAAALGGSGARPWVQITSLSSGQDCFYYHEDFKAAFNICINTEDGEDIVSLAAQNLVLCMVTRSATRAGSAGFQYV

SEQ ID NO: 920335 - protein, 443 aa, Homo sapiens
RQPGGGRLWAAARGARGRAHKPKTEWAEHSGHAFRGQVIMAATEISVLSEQFTKIKELELMPEKGLKEEEKDGVCREKDHRSPSELEAERTSGAFQDSVLEEEVELVLAPSEESEKYILTLQTVHFTSEAVELQDMSLLSIQQQEGVQVVVQQPGPGLLWLEEGPRQSLQQCVAISIQQELYSPQEMEVLQFHALEENVMVASEDSKLAVSLAETTGLIKLEEEQEKNQLLAERTKEQLFFVETMSGDERSDEIVLTVSNSNVEEQEDQPTAGQADAEKAKSTKNQRKTKGAKGTFHCDVCMFTSSRMSSFNRHMKTHTSEKPHLCHLCLKTFRTVTLLRNHVNTHTGTRPYKCNDCNMAFVTSGELVRHRRYKHTHEKPFKCSMCKYASVEVKPFLDLKLHGILVEAAVQVTPSVTNSRICYKQAFYYSYKIYAGNNMHSLL

SEQ ID NO: 920336 - protein, 179 aa, Homo sapiens
MRWWEAVVMFTRLGATPKNNIFTKASNRELLFEALFPVRLYADSLDHAEKGVPEPCPKYNSTVQCAKILRSPLSHTAHKHPVHMREVQAPPVGGKQYSEDDGCQGGLTCQSGPPTVQRHKDTVRSKMTGSRSSCCSCHLEYVTCLHGASLIGLTTACARQPGGTEGWLTVPRVHKINTD

SEQ ID NO: 920337 - protein, 166 aa, Homo sapiens
FEGALNGVQQMVPSPSSRRVSKVEMSLPQYQTEGDLTPGYFANLPPKVISYWGRSNTQQLRDLIRSSPDRLVSQSYAERPKAPLENCAFSSEKPFILPSLPSEWITGWVGKGVALLEHRSKGPELNTVQEQTFPHQPWGKASNAELLLDPIRWNFQQVLSSHFLGG

SEQ ID NO: 920338 - protein, 615 aa, Homo sapiens
WQGCRWQKPSSAMNLRSVTGFTLICEEAVASVDTTAPSFFFWPAEDELQSHGGDKVVLLHDGALRCLCAWVTPHRESHVYRSHLSAVHLRRSLEVPGSTGGHPVMGDTFIRHIALLGFEKRFVPSQHYDNRKDGPHPNPLGFLQWVYMFLVKWQDLSEKVVYRRFTEIYEFHKTLKEMFPIEAGAINPENRIIPHLPAPKWFDGQRAAENRQGTLTEYCSTLMSLPTKISRCPHLLDFFKVRPDDLKLPTDNQTKKPETYLMPKDGKSTATDITGPIILQTYRAIANYEKTSGSEMALSTGDVVEVVEKSESGQTSHLTGLLPLVLRNPQPQAPCQGSGSLAPGRTPALLGALNVLPTLWVAFCLSVHPVVAVGICAWQAGAGHVCVFCLDGVVKVTFPNLSIGHQCVCVPVSSPSLMAAGSRWALPLSHIPAPLAQPLDSPDETEDPEPNYAGEPYVAIKAYTAVEGDEVSLLEGEAVEVIHKLLDGWWVIRKDDVTGYFPSMYLQKSGQDVSQAQRQIKRGAPRRSSIRNAHSIHQRSRKRLSQDAYRRNSVRFLQQRRRQARPGPQSPGSPLEEERQTQRSKPQPAVPPRPSADLILNRCSESTKRKLASAV

SEQ ID NO: 920339 - protein, 215 aa, Homo sapiens
LTLQMKLQLHMMVVFLVVVALAVPAVLVVVVVLVMLLFVVLLFVLLLVALAVLVLVLVVALAVLVVLMLVALAVPAVLVSVVVFVMLASVVLLFVLLGVALAVLVVLMGVALAVLVVLMVVVVFVMLVFVVVLFVLWVVVLVMFMWLLLMVVVVALVVVVMVVTCGSTGPTERQGSAWLQTELASDSVACSWPGASGVSDPFTAIHESLPAGMTA

SEQ ID NO: 920340 - protein, 126 aa, Homo sapiens
MLSGRRSKFLPVETLALPQTLEEDLPWTVGIYRKFSSFPSDPFTPRYRRRIFCGLLESTRQSQMFRSHWGFPLRCRCGECVWCRVSVMHLCDLLPLLSSQQDSVTFALSKCTAAENTVVRKAGKVD

SEQ ID NO: 920341 - protein, 1393 aa, Homo sapiens
ETFAGSARNTAISWGDQAIDSLCNMAVFVQHYKRLLSLSNPSVCKKLWELFCILTTTNSGMYGLLCGRVLCQDCKVPPHVKASKQTSHIFPLDIMIECVKNSLVSSSPFLCSFDVPATKNSVGFHIAWSRLSSQEVKEELTQETTVQAFSLLELDGINLRLGDRNPHVQSVAIESQEFFAGFKLQPELSTISEDGKEYYLRIESTVPIICSEFSELDQECKISLKLKTIGQGNILTLFYLIIRLQTIMLFFPVGKVTGVYSYNKSCCMLTSNFSPIILLILGQTDDCQSNSHFFFLAESIHFKKRKKIVNNLLFIWFSSGAFIRADLGEWGMSLTIRAPSVDYRNTLGLCGTFDENPENDFHDKNGMQIDQNFNNYVAFINEWRKQMFMYKITILSCFPSGRILPGKSMSDTLPVSMTSPGKPSYCSCSLDTAAYPSSEDLDSVSRSEIALGCKDLNHVSLSSLIPELDVTSEYINSDTLVREINKHTSPEEYNLNLFLQEKKHINLTKLGLNVQKHPGNEKEDSLQYLANKKYTQGRGSHSQEMRYNRQNRWKRQNFHEFPPLFAFPSLSQTDLEELTYFFPEDHAEDVQQEFFPSWPTPSGLTEYSTLTLCQETLANSSIGRLCLAFLGKRLDSVIEMCVKDVLLKDDLSWAEAGVALLENECEKRIVEEGKYNTEEYGTSIEDILSVLKCPNLCSGNGQCMEWGCACSPSFSSYDCSDSYDKAPEITELGNAGFCDVQKYNCMMVRVFGKGFKELPSIKCEVTKLQYNSSEWMPGEPIYTQTVFHNSRAVDCQLPTDVQQFDTMDLVGGKPTGKWQLKVSNDGYKFSNPKITVIYDGACQVCGLYKNDSCTIKENVCIIDGLCYVEGDKNPTSPCLICRPKISRFTWSFLENNQPPVIQALQDKLQTFYGENFEYQFVAFDPEGSDIHFTLDSGPEGASVSSAGLFMWKTDLLTTQQITVRLNDDCDAETRVTIEVTVKSCDCLNGGSCVSDRNFSPGSGVYLCVCLPGFHGSLCEVDISGCQSNPCGLGSYISGFHSYSCDCPPELKVETQFVNQFTTQTVVLTRSDKSVNKEEDDKNAQGRKRHVKPTSGNAFTICKYPCGKSRECVAPNICKCKPGYIGSNCQTALCDPDCKNHGKCIKPNICQCLPGHGGATCDEEHCNPPCQHGGTCLAGNLCTCPYGFVGPRCETMVCNRHCENGGQCLTPDICQCKPGWYGPTCSTALCDPVCLNGGSCNKPNTCLCPNGFFGEHCQNAFCHPPCKNGGHCMRNNVCVCREGYTGRRFQKSICDPTCMNGGKCVGPSTCSCPSGWSGKRCNTPICLQKCKNGGECIAPSICHCPSSWEGVRCQIPICNPKCLYGGRCIFPNVCSCRTEYSGVKCEKKIQIRRH

SEQ ID NO: 920342 - protein, 148 aa, Homo sapiens
MASPGIRRRHMVPALLRLACSSQALEQLSPAALSLAGHGCFFTISEDGSFTQQLCLFTDLEMNAGHIRLIQRNSQDTVIAKRTSAGCTSASHGGLNIKPTIKIPSSNILLSPGEELREYGQKINMLIRHIMGTGKTLKMRGHTLRHAH

SEQ ID NO: 920343 - protein, 163 aa, Homo sapiens
TEWGTGTGKIHSLQMGEIGQNEGATGLKQVQNPVRQSNHKGPNDLLYLHVSHPGHADAKGAQGKLSVGLPFWGLEDSDPLLTAPLGSVPVETLCGGSNPTFPFCTALAKVCHEGSTPAANFCLDIQAFPYVLSNLGGGSQTSVLYFYAPTGSKPRGSCQGLEL

SEQ ID NO: 920344 - protein, 238 aa, Homo sapiens
ILGVMSSSPNLDVSNEITEGVYTPCDIGSNMILSPTGYWERYHSAGVLYNYFDIGRNIILYFPGYWAQKHKRVYNPCDVSKTHRATESHRCLRIPPPGTLRGSRTAAGPRFALPVPVHVSGHGAEEPAQHPGCQLCLSPPHPHLCWADIGFTLATVPKMIVDMQSHSRVISHAGCLTQMSFFILFACIEGMLLTVMAYDCFVAICRPLHYPVIVNPHLCVFFVLVSFFLSLLDSQLHS

SEQ ID NO: 920345 - protein, 161 aa, Homo sapiens
HCPASPSEMNKVYLMLYYALALNILSQLSVQYASLDLVSTYFGSSMIFVPIHILNSISVISAISAWFRTPAREVMQLFGAAVVGQLQQSASGCRGSCLSVGVHHGSRGNTAWGPLLVIVCVVFLEAMLAPVGCGTGRCRSECLLCASQERVVTQDGYLAKY

SEQ ID NO: 920346 - protein, 161 aa, Homo sapiens; identical to SEQ ID NO: 920345

SEQ ID NO: 920347 - protein, 181 aa, Homo sapiens [sequence omitted]

SEQ ID NO: 920348 - protein, 179 aa, Homo sapiens
FVASRMLYAMLCPQNAYPKGKTLSSNIKVQDEATSADGEAAANCPEDPGPPVNTKIHRCSSRWYTMESCNNIYCIPTLYEGARLQLVSAQRYDLNPFSFALLPKEEGYWRWALCSCKSQNNNPPTGRGNERRCFLSDWNCCCPDWHKPVVQELLDAGEDIISTYIFSAYVVNGLIYADD

SEQ ID NO: 920349 - protein, 161 aa, Homo sapiens
FLICSTRERNGLRLAMVLSGTGVGASVGKFSLNSEVFGTGAGHLDPRKHWQTHAQKCTEKEYPNIEHQRPSDFGASILKQVTENPDDCSLQSKDISLPLQEAWRKHVVEAQCCHRGPRTLPPSYAAISVLGDDFPHGCKKVTETPSIMSLPHVAPRFTVRG

SEQ ID NO: 920350 - protein, 131 aa, Homo sapiens
MKRKPGKGIPDLGRAGTKVQREEIAVRVQLAIAAAKTVTREALRDRTGKKHDTWRSAPEGTVILYDLPAFSEVLKMTERFSTRILNQGAENRLTHNPGQSLTLNPDLRPLILTTDWPNPAEIVHDPDHRLT

SEQ ID NO: 920351 - protein, 131 aa, Homo sapiens; identical to SEQ ID NO: 920350

SEQ ID NO: 920352 - protein, 173 aa, Homo sapiens
MECSVPGTEVAIAESPGVTRTPVWGPRVAVTHVTQVQKTSSHSQSETAGNEAGAERYLYKDTYQHRYQQTSVSREMARPGPASWASDPCSHTGPDTQNQGLVRGPFKDGTLTISGDIFGFTTECGDVSLASGGQKPGLLPNALLCPGWPLTPENEPPPKVTTAEARKPKPCLK

SEQ ID NO: 920353 - protein, 149 aa, Homo sapiens
SKSTCRIMCQDCPLPYKPFQDLAGCAGCRHRNKLYAGPIARLGMSPQGECGSDHARVTVTLKPQKGVLRCSFSSAVHGWWRLWTVKRHAAPRQGRGECYKQTLATEKQDKAKASLSPPDVSLGDKSLRGQLKRKIGIFIYNSSSSIEQH

SEQ ID NO: 920354 - protein, 161 aa, Homo sapiens
MSARPALLNDPRRGYSDRRPARRPCGPRCCCCCCCSRPPRSPPPKPLPTRMLTPRKAFRTCSKESGLAETESCGQTHTWPRALAVLMGLWWPRDQKAGEEDLRFRERRPGLQATATGSGEHGAFPVHSQGVWASTHWQGTAVCPLQTPPPDAFIRNNKVLS

SEQ ID NO: 920355 - protein, 151 aa, Homo sapiens
MLENYSHLVSVGYDTTKPNVIIKLEQGEEPWIMGGEFPCQHSPEAWRVDDLIERIQENEDKHSEPPCPQAMWPPLLLLLLLLPAAPVPTAKAAPHPDANTQEGLQNLLQGVGAGGDGELRADSHLAPGSGCIDGAVVATRPESRGGRPAVP

SEQ ID NO: 920356 - protein, 151 aa, Homo sapiens
MLENYSHLVSVGYDTTKPNVIIKLEQGEEPWIMGGEFPCQHSPEAWRVDDLIERIQENEDKHFKPPCPQAMWPPLLLLLLLLPAAPVPTAKAAPHPDANTQEGLQNLLQGVGAGGDGELRADSHLAPGSGCIDGAVVATRPESRGGRPAVP

SEQ ID NO: 920357 - protein, 115 aa, Homo sapiens
HPSSLVGESSLRRRRARMQARLGGPLYGEPPGPSSAAPGVPLWFFLSLVGRGRCTRAVRLREVTPGQGRKECSGCHGARSCSFGGVSGVVAKVAEPAWLAGELSGDSFETDGHHV

SEQ ID NO: 920358 - protein, 115 aa, Homo sapiens; identical to SEQ ID NO: 920357

SEQ ID NO: 920359 - protein, 115 aa, Homo sapiens; identical to SEQ ID NO: 920357

SEQ ID NO: 920360 - protein, 115 aa, Homo sapiens; identical to SEQ ID NO: 920357

SEQ ID NO: 920361 - protein, 115 aa, Homo sapiens; identical to SEQ ID NO: 920357

SEQ ID NO: 920362 - protein, 115 aa, Homo sapiens; identical to SEQ ID NO: 920357

SEQ ID NO: 920363 - protein, 207 aa, Homo sapiens
MLENYSHLVSVGYDTTKPNVIIKLEQGEEPWIMGGEFPCQHSPEAWRVDDLIERIQENEDKHSSRPARRPCGPRCCCCCCCSRPPRSPPPKPLPTRMLTPRKAFRTCSKESGLAETESCGQTHTWPRALAVLMGLWWPRDQKAGEEDLRFRERRPGLQATATGSGEHGAFPVHSQGVWASTHWQGTAVCPLQTPPPDAFIRNNKVLS

SEQ ID NO: 920364 - protein, 646 aa, Homo sapiens
MGGEFPCQHSPEAWRVDDLIERIQENEDKHSRQAACINSKTLTEEKENTFSQIYMETSLVPSSIIAHNCVSCGKNLESISQLISSDGSYARTKPDECNECGKTYHGEKMCEFNQNGDTYSHNEENILQKISILEKPFEYNECMEALDNEAVFIAHKRAYIGEKPYEWNDSGPDFIQMSNFNAYQRSQMEMKPFECSECGKSFCKKSKFIIHQRAHTGEKPYECNVCGKSFSQKGTLTVHRRSHLEEKPYKCNECGKTFCQKLHLTQHLRTHSGEKPYECSECGKTFCQKTHLTLHQRNHSGERPYPCNECGKSFSRKSALSDHQRTHTGEKLYKCNECGKSYYRKSTLITHQRTHTGEKPYQCSECGKFFSRVSYLTIHYRSHLEEKPYECNECGKTFNLNSAFIRHRKVHTEEKSHECSECGKFSQLYLTDHHTAHLEEKPYECNECGKTFLVNSAFDGHQPLPKGEKSYECNVCGKLFNELSYYTEHYRSHSEEKPYGCSECGKTFSHNSSLFRHQRVHTGEKPYECYECGKFFSQKSYLTIHHRIHSGEKPYECSKCGKVFSRMSNLTVHYRSHSGEKPYECNECGKVFSQKSYLTVHYRTHSGEKPYECNECGKKFHHRSAFNSHQRIHRRGNMNVLDVENL

SEQ ID NO: 920365 - protein, 115 aa, Homo sapiens; identical to SEQ ID NO: 920357

SEQ ID NO: 920366 - protein, 111 aa, Homo sapiens
MLTPRKAFRTCSKESGLAETESCGQTHTWPRALAVLMGLWWPRDQKAGEEDLRFRERRPGLQATATGSGEHGAFPVHSQGVWASTHWQGTAVCPLQTPPPDAFIRNNKVLS

SEQ ID NO: 920367 - protein, 678 aa, Homo sapiens
MLENYSHLVSVGYDTTKPNVIIKLEQGEEPWIMGGEFPCQHSPEAWRVDDLIERIQENEDKHSRQAACINSKTLTEEKENTFSQIYMETSLVPSSIIAHNCVSCGKNLESISQLISSDGSYARTKPDECNECGKTYHGEKMCEFNQNGDTYSHNEENILQKISILEKPFEYNECMEALDNEAVFIAHKRAYIGEKPYEWNDSGPDFIQMSNFNAYQRSQMEMKPFECSECGKSFCKKSKFIIHQRAHTGEKPYECNVCGKSFSQKGTLTVHRRSHLEEKPYKCNECGKTFCQKLHLTQHLRTHSGEKPYECSECGKTFCQKTHLTLHQRNHSGERPYPCNECGKSFSRKSALSDHQRTHTGEKLYKCNECGKSYYRKSTLITHQRTHTGEKPYQCSECGKFFSRVSYLTIHYRSHLEEKPYECNECGKTFNLNSAFIRHRKVHTEEKSHECSECGKFSQLYLTDHHTAHLEEKPYECNECGKTFLVNSAFDGHQPLPKGEKSYECNVCGKLFNELSYYTEHYRSHSEEKPYGCSECGKTFSHNSSLFRHQRVHTGEKPYECYECGKFFSQKSYLTIHHRIHSGEKPYECSKCGKVFSRMSNLTVHYRSHSGEKPYECNECGKVFSQKSYLTVHYRTHSGEKPYECNECGKKFHHRSAFNSHQRIHRRGNMNVLDVENL

SEQ ID NO: 920368 - protein, 115 aa, Homo sapiens; identical to SEQ ID NO: 920357

SEQ ID NO: 920369 - protein, 115 aa, Homo sapiens; identical to SEQ ID NO: 920357

SEQ ID NO: 920370 - protein, 151 aa, Homo sapiens; identical to SEQ ID NO: 920355

SEQ ID NO: 920371 - protein, 105 aa, Homo sapiens
MSARPALLNDPRRGYSDLPPCPQAMWPPLLLLLLLLPAAPVPTAKAAPHPDANTQEGLQNLLQGVGAGGDGELRADSHLAPGSGCIDGAVVATRPESRGGRPAVP

SEQ ID NO: 920372 - protein, 115 aa, Homo sapiens; identical to SEQ ID NO: 920357

SEQ ID NO: 920373 - protein, 115 aa, Homo sapiens; identical to SEQ ID NO: 920357

SEQ ID NO: 920374 - protein, 115 aa, Homo sapiens; identical to SEQ ID NO: 920357

SEQ ID NO: 920375 - protein, 172 aa, Homo sapiens
MPPRYSRLQYSVQSHAARVFRYTNATPLQIILPNERCQMKKSTQYNPVYPESYSKLTNSGRKQTCACCRCRTGSCEDSRLVVDRCLHLLGTHLEGALLGHRVDIRLALLEIVKMIFKVIVPFTLPQQHTELPTAPRPRRLTLGIVSLFNVRHPGGGVVVSHCGVNLHSSDEC

SEQ ID NO: 920376 - protein, 172 aa, Homo sapiens; identical to SEQ ID NO: 920375

SEQ ID NO: 920377 - protein, 144 aa, Homo sapiens
MQTGKSSAAVLSSDCPLPNPPWRPCYSIIDGLPASVSVFFCQCVPLDVQLLVCAGHETVGQEIFCVAALVDYEYRILPLTTKAIEEKPCGKESKSENSNCEKADLELYQLLTLNCVLIFEKKLGKSPFNRIYYLKIVGKPSLIP

SEQ ID NO: 920378 - protein, 720 aa, Homo sapiens
RALLKPRSTRRQLLLANHAPSTPTATSTSPSVPPCGSEALCRRPLLTSSSLGMDPSYCPAHGFPSQDALWPLSSQQWSSAHYSEPAAGGCDGTEAMNGAGPGPAAAAPVPVPVPVPDWRQFCELHAQAAAVDFAHKFCRFLRDNPAYDTPDAGASFSRHFAANFLDVFGEERRGHGAGARGHLCTQGGAYGHSRSSEDVSTHAATKARVRKGFSLRNMSLCVVDGVRDMWHRRASPEPDAAAAPRTAEPRDKWTRRLRLSRTLAAKVELVDIQREGALRFMVADDAAAGSGGSAQWQKCRLLLRRAVAEERFRLEFFVPPKASRPKVSIPLSAIIEVRTTMPLEMPEKDNTFVLKVENGAEYILETIDSLQKHSWVADIQGCVDPGRCEGEPHLVEFSSWQGPRHLMSQIGRETFPPSEGLHGIPGGAQPLKDSGQGSWALSGDCPLSGEQGAETDPEAEPELELSDYPWFHGTLSRVKAAQLVLAGGPRNHGLFVIRQSETRPGEYVLTFNFQGKAKASVPSPGPAPDHTHLYPQHLRLSLNGHGQCHVQHLWFQSVLDMLRHFHTHPIPLESGGSADITLRSYVRAQDPPPGCGQPRSPLTPCRRLVAEPGPTPPAAPASPACWSDSPGQHYFSSLAAAACPPASPSDAAGASSSSASSSSAASGPAPPRPVEGQLSARSRSNSAERLLEAVAATAAEEPPEAAPGRARAVENQYSFY

SEQ ID NO: 920379 - protein, 661 aa, Homo sapiens
GPGSPAAVRAALSRRPSPLGRSCAPVAAGGCDGTEAMNGAGPGPAAAAPVPVPVPVPDWRQFCELHAQAAAVDFAHKFCRFLRDNPAYDTPDAGASFSRHFAANFLDVFGEERRGHGAGARGHLCTQGGAYGHSRSSEDVSTHAATKARVRKGFSLRNMSLCVVDGVRDMWHRRASPEPDAAAAPRTAEPRDKWTRRLRLSRTLAAKVELVDIQREGALRFMVADDAAAGSGGSAQWQKCRLLLRRAVAEERFRLEFFVPPKASRPKVSIPLSAIIEVRTTMPLEMPEKDNTFVLKVENGAEYILETIDSLQKHSWVADIQGCVDPGRCEGEPHLVEFSSWQGPRHLMSQIGRETFPPSEGLHGIPGGAQPLKDSGQGSWALSGDCPLSGEQGAETDPEAEPELELSDYPWFHGTLSRVKAAQLVLAGGPRNHGLFVIRQSETRPGEYVLTFNFQGKAKASVPSPGPAPDHTHLYPQHLRLSLNGHGQCHVQHLWFQSVLDMLRHFHTHPIPLESGGSADITLRSYVRAQDPPPGCGQPRSPLTPCRRLVAEPGPTPPAAPASPACWSDSPGQHYFSSLAAAACPPASPSDAAGASSSSASSSSAASGPAPPRPVEGQLSARSRSNSAERLLEAVAATAAEEPPEAAPGRARAVENQYSFY

SEQ ID NO: 920380 - protein, 162 aa, Homo sapiens
MGGWDLPQGLSKETRPLCNASASDHLRPRPKTPNHSPSSPASQTAGFSKPSGVPRGAPLGTLLILGVQLTAGRDLSRNLSPLTEPSLRSVHGLLLDTARIQKSMLSILKPRRSQEWRTALRRYCCPTDLQAPRSPVPPIRKVGISDVIVHANLATSLKKKHM

SEQ ID NO: 920381 - protein, 146 aa, Homo sapiens
ILLGSLMQQQSAVGSLGVTSLGQLAGLGLPLHVAFYPGLLHSTMVSGFQEDRPQHTGAYQTSAFVTLADVLLAKAHLLMSHWPESVWEGMTQGRGYRKVWFTGHCHHSNLPCSLDPENKAQGAQLTHTQRWHLNPTHHKASGPVSK

SEQ ID NO: 920382 - protein, 146 aa, Homo sapiens; identical to SEQ ID NO: 920381

SEQ ID NO: 920383 - protein, 171 aa, Homo sapiens
MRNPLHFLACLASGVSYMRSSHQGKTPDPGLSLLQTPAPTHCGQYTLEQWFPTPRPMDLHRSAAVSDSHRSTNPIVNCSCEGSGLHSPYKNLMPDDQRWNSSIPKPSFSRTTGPWENCLPQNRSLVPKRIDLRAEHFHCVFKPCTDGRVHVQPSLAAPEAANSSPGPSHLS

SEQ ID NO: 920384 - protein, 857 aa, Homo sapiens
KTILSPSDMFLNEVLVEFCLCEEIGMEYGACYCRFISSSSLAGYAQEEQLKEEEEIKEEEEEEDSGSVAQLQGGNDTGTDEELETGPEQKGCFSYQNSPGSHLSNQDAENESLLSDASDQVSDIKSVCGRDASDKKAHTHVRLPNEAHNCMDKMTAVYANILSDSYWSGLGLGFKLSNSERRNCDTRNGSNKSDFDWHQDALSKSLQQNLPSRSVSKPSLFSSVQLYRQSSKMCGTVFTGASRFRCRQCSAAYDTLVELTVHMNETGHYQDDNRKKDKLRPTSYSKPRKRAFQDMDKEDAQKVLKCMFCGDSFDSLQDLSVHMIKTKHYQKVPLKEPVPTISSKMVTPAKKRVFDVNRPCSPDSTTGSFADSFSSQKNANLQLSSNNRYGYQNGASYTWQFEACKSQILKCMECGSSHDTLQQLTTHMMVTGHFLKVTSSASKKGKQLVLDPLAVEKMQSLSEAPNSDSLAPKPSSNSASDCTASTTELKKESKKERPEETSKDEKVVKSEDYEDPLQKPLDPTIKYQYLREEDLEDGSKGGGDILKSLENTVTTAINKAQNGAPSWSAYPSIHAAYQLSEGTKPPLPMGSQVLQIRPNLTNKLRPIAPKWKVMPLVSMPTHLAPYTQVKKESEDKDEAVKECGKESPHEEASSFSHSEGDSFRKSETPPEAKKTELGPLKEEEKLMKEGSEKEKPQPLEPTSALSNGCALANHAPALPCINPLSALQSVLNNHLGKATEPLRSPSCSSPSSSTISMFHKSNLNVMDKPVLSPASTRSASVSRRYLFENSDQPIDLTKSKSKKAESSQAQSCMSPPQKHALSDIADMVKVPPQSHHPKASLLLQGPPHEAGNGCQAL

SEQ ID NO: 920385 - protein, 150 aa, Homo sapiens
MSRGGTRRRPAPAASPASGSGTTACPQGDADQGGPPAAPTSASGAPRTLACPSRDQKHPRNSPGEEGHHARTRQRSGRSHGPGAPDAKQAEPAGGGVQAPALRGVCGGAVLVHHGCPAEEPADVSGTHSGSRLGVASVPRVVVSQDKIIS

SEQ ID NO: 920386 - protein, 99 aa, Homo sapiens
KLRLETLNVFPLLSPGHHARTRQRSGRSHGPGAPDAKQAEPAGGGVQAPALRGVCGGAVLVHHGCPAEEPADVSGTHSGSRLGVASVPRVVVSQDKIIS

SEQ ID NO: 920387 - protein, 146 aa, Homo sapiens
LLSCQSTMWHPDRGSWHRNEQEGKDGYRGTNLERDGGLHFLCSVINRCPFPACSRPGSGPALINHFLPNVVKATKDLCELSHPSFLQMLASPQGRGIRCLTVPARGGGRKSHAAPEVWDGLSFPLSRTQCPGEPIFPDSAPVPPPL

SEQ ID NO: 920388 - protein, 284 aa, Homo sapiens
MHRRSQLQHRPMLRVPALVPAHPRPGSAFLGQERVCGADAGDGQWSGAAARCREHQGLATSQQGHTNANAVLFSQVKVTPETHMLQQQQQAQQQQQQHPVLHLQPQQIMQLQQQQQQQISQQPYPQQPPHPFSQQQQQQQQAHPHQFSQQQLQFPQQQLHPPQQLHRPQQQLQPFQQQHALQQQFHQLQQHQLQQQQLAQLQQQHSLLQQQQQQQIQQQQLQRMHQQQQQQQMQSQTAPHLSQTSQALQHQVPPQQPPQQQQQQQPPPSPQQHQLFGHDPAVES

SEQ ID NO: 920389 - protein, 942 aa, Homo sapiens
CQLTLNKKCTHLIVPEPKGEKYECALKRASIKIVTPDWVLDCVSEKTKKDEAFYHPRLIIYEEEEEEEEEEEEVENEEQDSQNEGSTDEKSSPASSQEGSPSGDQQFSPKSNTEKSKGELMFDDSSDSSPEKQERNLNWTPAEVPQLAAAKRRLPQGKEPGLINLCANVPPVPGNILPPEVRGNLMAAGQNLQSSERSEMIATWSPAVRTLRNITNNADIQQMNRPSNVAHILQTLSAPTKNLEQQVNHSQQGHTNANAVLFSQVKVTPETHMLQQQQQAQQQQQQHPVLHLQPQQIMQLQQQQQQQISQQPYPQQPPHPFSQQQQQQQQAHPHQFSQQQLQFPQQQLHPPQQLHRPQQQLQPFQQQHALQQQFHQLQQHQLQQQQLAQLQQQHSLLQQQQQQQIQQQQLQRMHQQQQQQQMQSQTAPHLSQTSQALQHQVPPQQPPQQQQQQQPPPSPQQHQLFGHDPAVEIPEEGFLLGCVFAIADYPEQMSDKQLLATWKRIIQAHGGTVDPTFTSRCTHLLCESQVSSAYAQAIRERKRCVTAHWLNTVLKKKKMVPPHRALHFPVAFPPGGKPCSQHIISVTGFVDSDRDDLKLMAYLAGAKYTGYLCRSNTVLICKEPTGLKYEKAKEWRIPCVNAQWLGDILLGNFEALRQIQYSRYTAFSLQDPFAPTQHLVLNLLDAWRVPLKVSAELLMSIRLPPKLKQNEVANVQPSSKRARIEDVPPPTKKLTPELTPFVLFTGFEPVQVQQYIKKLYILGGEVAESAQKCTHLIASKVTRTVKFLTAISVVKHIVTPEWLEECFRCQKFIDEQNYILRDAEAEVLFSFSLEESLKRAHVSPLFKAKYFYITPGICPSLSTMKAIVECAGGKVLSKQPSFRKLMEHKQNSSLSEIILISCENDLHLCREYFARGIDVHNAEFVLTGVLTQTLDYESYKFN

SEQ ID NO: 920390 - protein, 928 aa, Homo sapiens
CQLTLNKKCTHLIVPEPKGEKYECALKRASIKIVTPDWVLDCVSEKTKKDEAFYHPRLIIYEEEEEEEEEEEEVENEEQDSQNKGLLQVTSSSSPKSNTEKSKGELMFDDSSDSSPEKQERNLNWTPAEVPQLAAAKRRLPQGKEPGLINLCANVPPVPGNILPPEVRGNLMAAGQNLQSSERSEMIATWSPAVRTLRNITNNADIQQMNRPSNVAHILQTLSAPTKNLEQQVNHSQQGHTNANAVLFSQVKVTPETHMLQQQQQAQQQQQQHPVLHLQPQQIMQLQQQQQQQISQQPYPQQPPHPFSQQQQQQQQAHPHQFSQQQLQFPQQQLHPPQQLHRPQQQLQPFQQQHALQQQFHQLQQHQLQQQQLAQLQQQHSLLQQQQQQQIQQQQLQRMHQQQQQQQMQSQTAPHLSQTSQALQHQVPPQQPPQQQQQQQPPPSPQQHQLFGHDPAVEIPEEGFLLGCVFAIADYPEQMSDKQLLATWKRIIQAHGGTVDPTFTSRCTHLLCESQVSSAYAQAIRERKRCVTAHWLNTVLKKKKMVPPHRALHFPVAFPPGGKPCSQHIISVTGFVDSDRDDLKLMAYLAGAKYTGYLCRSNTVLICKEPTGLKYEKAKEWRIPCVNAQWLGDILLGNFEALRQIQYSRYTAFSLQDPFAPTQHLVLNLLDAWRVPLKVSAELLMSIRLPPKLKQNEVANVQPSSKRARIEDVPPPTKKLTPELTPFVLFTGFEPVQVQQYIKKLYILGGEVAESAQKCTHLIASKVTRTVKFLTAISVVKHIVTPEWLEECFRCQKFIDEQNYILRDAEAEVLFSFSLEESLKRAHVSPLFKAKYFYITPGICPSLSTMKAIVECAGGKVLSKQPSFRKLMEHKQNSSLSEIILISCENDLHLCREYFARGIDVHNAEFVLTGVLTQTLDYESYKFN

SEQ ID NO: 920391 - protein, 473 aa, Homo sapiens
CQLTLNKKCTHLIVPEPKGEKYECALKRASIKIVTPDWVLDCVSEKTKKDEAFYHPRLIIYEEEEEEEEEEEEVENEEQDSQNEGSTDEKSSPASSQEGSPSGDQQFSPKSNTEKSKGELMFDDSSDSSPEKQERNLNWTPAEVPQLAAAKRRLPQGKEPGLINLCANVPPVPGNILPPEVRGNLMAAGQNLQSSERSEMIATWSPAVRTLRNITNNADIQQMNRPSNVAHILQTLSAPTKNLEQQVNHSQQGHTNANAVLFSQVKVTPETHMLQQQQQAQQQQQQHPVLHLQPQQIMQLQQQQQQQISQQPYPQQPPHPFSQQQQQQQQAHPHQFSQQQLQFPQQQLHPPQQLHRPQQQLQPFQQQHALQQQFHQLQQHQLQQQQLAQLQQQHSLLQQQQQQQIQQQQLQRMHQQQQQQQMQSQTAPHLSQTSQALQHQVPPQQPPQQQQQQQPPPSPQQHQLFGHDPAVES

SEQ ID NO: 920392 - protein, 942 aa, Homo sapiens; identical to SEQ ID NO: 920389

SEQ ID NO: 920393 - protein, 818 aa, Homo sapiens
CQLTLNKKCTHLIVPEPKGEKYECALKRASIKIVTPDWVLDCVSEKTKKDEAFYHPRLIIYEEEEEEEEEEEEVENEEQDSQNEGSTDEKSSPASSQEGSPSGDQQFSPKSNTEKSKGELMFDDSSDSSPEKQERNLNWTPAEVPQLAAAKRRLPQGKEPGLINLCANVPPVPGNILPPEVRGNLMAAGQNLQSSERSEMIATWSPAVRTLRNITNNADIQQMNRPSNVAHILQTLSAPTKNLEQQVNHSQQGHTNANAVLFSQVKVTPETHMLQQQQQAQQQQQQHPVLHLQPQQIMQLQQQQQQQISQQPYPQQPPHPFSQQQQQQQQPPPSPQQHQLFGHDPAVEIPEEGFLLGCVFAIADYPEQMSDKQLLATWKRIIQAHGGTVDPTFTSRCTHLLCESQVSSAYAQAIRERKRCVTAHWLNTVLKKKKMVPPHRALHFPVAFPPGGKPCSQHIISVTGFVDSDRDDLKLMAYLAGAKYTGYLCRSNTVLICKEPTGLKYEKAKEWRIPCVNAQWLGDILLGNFEALRQIQYSRYTAFSLQDPFAPTQHLVLNLLDAWRVPLKVSAELLMSIRLPPKLKQNEVANVQPSSKRARIEDVPPPTKKLTPELTPFVLFTGFEPVQVQQYIKKLYILGGEVAESAQKCTHLIASKVTRTVKFLTAISVVKHIVTPEWLEECFRCQKFIDEQNYILRDAEAEVLFSFSLEESLKRAHVSPLFKAKYFYITPGICPSLSTMKAIVECAGGKVLSKQPSFRKLMEHKQNSSLSEIILISCENDLHLCREYFARGIDVHNAEFVLTGVLTQTLDYESYKFN

SEQ ID NO: 920394 - protein, 658 aa, Homo sapiens
  misc_feature (2)..(2): Xaa can be any naturally occurring amino acid
SXPVLNVRSPAGEAGQEAGVAGGGGSQPYPQQPPHPFSQQQQQQQQAHPHQFSQQQLQFPQQQLHPPQQLHRPQQQLQPFQQQHALQQQFHQLQQHQLQQQQLAQLQQQHSLLQQQQQQQIQQQQLQRMHQQQQQQQMQSQTAPHLSQTSQALQHQVPPQQPPQQQQQQQPPPSPQQHQLFGHDPAVEIPEEGFLLGCVFAIADYPEQMSDKQLLATWKRIIQAHGGTVDPTFTSRCTHLLCESQVSSAYAQAIRERKRCVTAHWLNTVLKKKKMVPPHRALHFPVAFPPGGKPCSQHIISVTGFVDSDRDDLKLMAYLAGAKYTGYLCRSNTVLICKEPTGLKYEKAKEWRIPCVNAQWLGDILLGNFEALRQIQYSRYTAFSLQDPFAPTQHLVLNLLDAWRVPLKVSAELLMSIRLPPKLKQNEVANVQPSSKRARIEDVPPPTKKLTPELTPFVLFTGFEPVQVQQYIKKLYILGGEVAESAQKCTHLIASKVTRTVKFLTAISVVKHIVTPEWLEECFRCQKFIDEQNYILRDAEAEVLFSFSLEESLKRAHVSPLFKAKYFYITPGICPSLSTMKAIVECAGGKVLSKQPSFRKLMEHKQNSSLSEIILISCENDLHLCREYFARGIDVHNAEFVLTGVLTQTLDYESYKFN

SEQ ID NO: 920395 - protein, 932 aa, Homo sapiens
CQLTLNKKCTHLIVPEPKGEKYECALKRASIKIVTPDWVLDCVSEKTKKDEAFYHPRLIIYEEEEEEEEEEEEVENEEQDSQNEGSTDEKSSPASSQEGSPSGDQQFSPKSNTEKSKGELMFDDSSDSSPEKQERNLNWTPAEVPQLAAAKRRLPQGKEPGLINLCANVPPVPGNILPPEVRGNLMAAGQNLQSSERSEMIATWSPAVRTLRNITNNADIQQMNRPSNVAHILQTLSAPTKNLEQQVNHSQQGHTNANAVLFSQVKVTPETHMLQQQQQAQQQQQQHPVLHLQPQQIMQLQQQQQQQISQQPYPQQPPHPFSQQQQQQQQAHPHQFSQQQLQFPQQQLHPPQQLHRPQQQLQPFQQQHALQQQFHQLQQHQLQQQQLAQLQQQHSLLQQQQQQQIQQQQLQRMHQQQQQQQMQSQTAPHLSQTSQALQHQVPPQQPPQQQQQQQPPPSPQQHQLFGHDPAVEIPEEGFLLGCVFAIADYPEQMSDKQLLATWKRIIQAHGGTVDPTFTSRCTHLLCESQVSSAYAQAIRERKRCVTAHWLNTVLKKKKMVPPHRALHFPVAFPPGGKPCSQHIISVTGFVDSDRDDLKLMAYLAGAKYTGYLCRSNTVLICKEPTGLKYEKAKEWRIPCVNAQWLGDILLGNFEALRQIQYSRYTAFSLQDPFAPTQHLVLNLLDAWRVPLKVSAELLMSIRLPPKLKQNEVANVQPSSKRARIEDVPPPTKKLTPELTPFVLFTGFEPVQVQQYIKKLYILGGEVAESAQKCTHLIASKVTRTVKFLTAISVVKHIVTPEWLEECFRCQKFIDEQNYILRDAEAEVLFSFSLEESLKRAHVSPLFKAKYFYITPGICPSLSTMKAIVECAGGKVLSKQPSFRKLMEHKQNSVGRVESASESVIALYHIQRSVTEKLIFFSLEFVGNNFNIL

SEQ ID NO: 920396 - protein, 189 aa, Homo sapiens
MKCDQVMTGDGGTETAAQKGGPQDPQSKEARFPRYLPGFSKESRKSITADVRGRDKEGHDDSAGDPQDGITEGGMPELRFGYTAQEAGQGIPGRGTTCAKAEGQASLNPYQYHSLLLMDAIVSLSVLARKMGLTTTTSKKDHDAEMTQNSAWSGRAAGKIITAISTSVMPVLFDLRNSSAFNTIKLGYW

SEQ ID NO: 920397 - protein, 99 aa, Homo sapiens
GAVAQRGRLALELAEDVPGAARQGCYEAQRNGCCEKTCFAIYEALDKHQERYKSMLLTQEILVECLCVGHWLEIRVSYGQKCGQGALFLPDVTLPQPTC

SEQ ID NO: 920398 - protein, 163 aa, Homo sapiens
MNGIQSLNSRSTSSESQRAGGSVWEKKENSAPNGKTLKVCIVLLVGKNTGRRREERWQAAPTLAEIPRVLQTDRPEVSKTVTTICPNLYSPLAFPTGYLPVTVFPRTWLSSVYSAPGSPKQTDTDRQKEQTRGLSNSHPPRPANFVFLVEMDFTMLARLVLNS

SEQ ID NO: 920399 - protein, 254 aa, Homo sapiens
MVSETHTVWLEDSTVTSQAQPSASPPLAALGCWPSSDGSRAQSAVSQEKPASSLRGLEEPFSLSLVFDASAPAHCGVRVGLSAQPCPNKSSKALFHLQSLESFVACVIEHLSSPQLFTLKFPPKHFAKPNLNQQKVMVPVWWSAAGLIHYSFLNPGETITSEKYAQQIDEMHKNLQHRQPALVNRKGPILLHNNAPLHITQPTLQNMPESSMQNDGLQPWDRVIELVTNQPPKLYSSILSIKVLGFVVFVCMLG

SEQ ID NO: 920400 - protein, 163 aa, Homo sapiens; identical to SEQ ID NO: 920398

SEQ ID NO: 920401 - protein, 172 aa, Homo sapiens; identical to SEQ ID NO: 844543

SEQ ID NO: 920402 - protein, 142 aa, Homo sapiens
MGTPAHRPSVLGGSFIDHGQSLAAEQNPHPGANHNSGLLPGIAKKGFGSGRTEGAGRFSSRSSARPPRSGKWRNRPSLPFTERHWLLVPLPRPQSRSRKIQSQNCSYTEDSSAPYPPWVARPAVPHPILSLTPSLCTFAFGF

SEQ ID NO: 920403 - protein, 573 aa, Homo sapiens
MTPESRDTTDLSPGGTQEMEGIVIVKVEEEDEEDHFQKERNKVESSPQVLSRSTTMNERALLSSYLVAYRVAKEKMAHTAAEKIILPACMDMVRTIFDDKSADKLRTIPLSDNTISRRICTIAKHLEAMLITRLQSGIDFAIQLDESTDIASCPTLLVYVRYVWQDDFVEDLLCCLNLNSHITGLDLFTELENCLLGQYKLNWKHCKGISSDGTANMTGKHSRLTEKLLEATHNNAVWNHCFIHREALVSKEISPSLMDVLKNAVKTVNFIKGSSLNSRLLEIFCSEIGVNHTHLLFHTEVRWLSQGKVLSRVYELRNEIYIFLVEKQSHLANIFEDDIWVTKLAYLSDIFGILNELSLKMQGKNNDIFQYLEHILGFQKTLLLWQARLKSNRPSYYMFPTLLQHIEENIINEDCLKEIKLEILLHLTSLSQTFNYYFPEEKFESLKENIWMKDPFAFQNPESIIELNLEPEEENELLQLSSSFTLKNYYKILSLSAFWIKIKDDFPLLSRKSILLLLPFTTTYLCELGFSILTRLKTKKRNRLNSAPDMRVALSSCVPDWKELMNRQAHPSH

SEQ ID NO: 920404 - protein, 138 aa, Homo sapiens
MYTLEISLWQQLKYSWKWEKLEMITLTCSSLDPRMAQGKLRMEIGTKLRCLIWTVHKGVHWVTFWWVERSQTGNLEVRRLWLGLLTHLHSGVNCEFALLDHSADRYIKNAPPVPRAPSELSLKTRLKCSPQLNLRRPP

SEQ ID NO: 920405 - protein, 151 aa, Homo sapiens
MSDPADACKWCQQRRRFLPWEKRGNPREACGSATGIWWVEARDTAKHPTTNRTAHNKHWGQSRAVVLSIEQHQNTPEGSCATRASLTCRVLSCMSQQSGLEELGRSMQGRCGGLPPCAKGESERRDVLYITLMVVDGPEPRVPGQRPFHAH

SEQ ID NO: 920406 - protein, 501 aa, Homo sapiens
MQDTVTTSALLDPSHSSVSTQDNSSTGGHTSSTSPQLSKPSITPVPAKSRNPHPRANIRRMRRIIAEDPEWSLAIVPLLTELCIQHIIRNFQKNPILKQMLPEHQQKVLNHLSPDLPLAVTANLIDSENYWLRCCMHRWPVCHVAHHGGSWKRMFFERHLENLLKHFIPGTTDPAVILDLLPLCRNYVRRVHVDQFLPPVQLPAQLRPGDQSDSGSEGEMEEPTVDHYQLGDLVAGLSHLEELDLVYDVKDCGMNFEWNLFLFTYRDCLSLAAAIKACHTLKIFKLTRSKVDDDKARIIIRSLLDHPVLEELDLSQNLIGDRGARGAAKLLSHSRLRVLNLANNQVRAPGAQSLAHALAHNTNLISLNLRLNCIEDEGGQALAHALQTNKCLTTLHLGGNELSEPTATLLSQVLAINTTLTSINLSCNHIGLDGGKQLLEGMSDNKTLLEFDLRLSDVAQESEYLIGQALYANREAARQRALNPSHFMSTITANGPENSVG

SEQ ID NO: 920407 - protein, 501 aa, Homo sapiens; identical to SEQ ID NO: 920406

SEQ ID NO: 920408 - protein, 351 aa, Homo sapiens
MQDTVTTSALLDPSHSSVSTQDNSSTGGHTSSTSPQLSKPSITPVPAKSRNPHPRANIRRMRRIIAEDPEWSLAIVPLLTELCIQHIIRNFQKNPILKQMLPEHQQKVLNHLSPDLPLAVTANLIDSENYWLRCCMHRWPVCHVAHHGGSWKRMFFERHLENLLKHFIPGTTDPAVILDLLPLCRNYVRRVHVDQFLPPVQLPAQLRPGDQSDSGSEGEMEEPTVDHYQLGDLVAGLSHLEELDLVYDVKDCGMNFEWNLFLFTYRDCLSLAAAIKACHTLKDGGKQLLEGMSDNKTLLEFDLRLSDVAQESEYLIGQALYANREAARQRALNPSHFMSTITANGPENSVG

SEQ ID NO: 920409 - protein, 134 aa, Homo sapiens
MNTLQGPVSFKDVAVDFTQEEWQQLDPDEKIAYGDVMLENYSHLVSVGYDYHQAKHHHGVEVKEVEQGEEPWIMEGEFPCQHSPECLMINCAHSKIMNSVYLPHLPVFDCLIKSQYSCEKVPFSLNITTLIPSI

SEQ ID NO: 920410 - protein, 213 aa, Homo sapiens
MFLFQQHNWSLSPSWSLSLPLASRTSVFCLQPAPPLLDPTAYSVFPPGGAMGISNFPGPDQAPLALHRCLHSPLYLRKWQHHPSSHSDQKLGAILDPFLKLPINNRFIAAFRMDLSTSHTTPEGPCAISSLTWASTRSLETLCLVLTAGRLLSSLQLLVTADGTRHTVLLDEERQAMAKSRRLERSTNSFSYSSYHTLEERVIFKEIWKPEFR

SEQ ID NO: 920411 - protein, 177 aa, Homo sapiens
LAAFVKVLDMMNKVLSTYVFVWKYVLFGQRYLLMTRKILQLGMENAMIMMMMMMIMIVSNLDSISCDLHAENLVGPWSTHGSLVNVPKTRRTFCKKCGKHQPHKVTQYKKGKDYLYAHGKRRYDRKQSGYGGQTKLIFQKKAKATKKIVLRLEKRNNSFKGKDSLKRINAFNTAAGQ

SEQ ID NO: 920412 - protein, 303 aa, Homo sapiens
FNPKQGPCLLANMHMLLLAAAAAAAAVAGFSMWCVFKPHSLILSFPNIQHPCTLLTSRFFKRLEISSGGPQSDWQTWYKQPMGVADPPQYFWTNSLLTQSPCELRGLYWRLSMGEKMDECVPPPDGRFVDMGMRPLRPQNYLFSCELKANKDYHFKVDNNENEHQLPLTTINLGAGAMDELDIVEAEAMNYEGSPIKVILATLKMSVQPTVSLGGFEITPPVVLQLKCGSGPVHTSGQHLVAVEEEAESEDEDKEVVKLLSISGKQSAPGGGSKLPQKKVKLAADEDDDGDDFDDKETEEKHQ

SEQ ID NO: 920413 - protein, 137 aa, Homo sapiens
MDQGLKTTGGDATSEEGQGQSERMTFELRSEQSWKKALLGMGTASANKGPEVGQRTFCIISLCTCVAGINFELSRYPRYLYGLPDDISHGYGWSMFCAWGGLGLTLISGFFCTLAPSVQPVPRTNYPKSRPENGTVC

SEQ ID NO: 920414 - protein, 373 aa, Homo sapiens
AKLMIRHEHEEAIFLAHGPSFKEKTEVEPFENIEVYNLMCEYSAGTSESDAKSHPRRKTLQNKLTEVPEHKDFIANIQKGTAEERGPLSPLPQGICQWIWKSYEDAHVEFIHSPPVDKGCYRCYTGAKEEHIVFYLEKMENVYRPIGQLGDTSPLPPTVPDCLRADVRVPPSESQKCSFYLADKNITHGFLYPPASNRTSDSQYDALITSNLVPMYEEFRKMWDYFHSVLLIKHATERNGVNVVSGPIFDYNYDGHFDAPDEITKHLANTDVPIPTHYFVVLTSCKNKSHTPENCPGWLDVLPFIIPHRPTNVESCPEGKPEALWVEERFTAHIARVRDVELLTGLDFYQDKVQPVSEILQLKTYLPTFETTI

SEQ ID NO: 920415 - protein, 373 aa, Homo sapiens; identical to SEQ ID NO: 920414

SEQ ID NO: 920416 - protein, 1580 aa, Homo sapiens
MPSTAKEVLAFEGRGPKEKEGATCVDVYGRSISGHGNSKCKGPEARVCMEGTRRPKTPASSDFSDLNTQTNWTKSLPLPTPEEKMRQQAQTVQADVVPINITGENFDRQASLRRSLIYTDTLVRRPKKVKRRKTITGVPDNIQKELGSHSDPDGIQVFALFYHGLVYYKQRQDCSSSRGIVKSVFGNKPLSALSPASGTGQDDADGHSVYTPDHYSTLGRFNSCRSAGQRSETRDSSCQTEDVKVVPPSMRRIRAQKGQGIAAQMGHFSGSSGNMSVLSDSAGIVFPSRLDSDAGFHSLPRSGARANIQSLEPRLGALGPAGDMNGTFLYQRGHPQADENLGHLGGASGTGTLLRPKSQELRHFESENIMSPACVVSPHATYSTSIIPNATLSSSSEVIAIPTAQSAGQRESKSSGSSHARIKSRDHLISRHAVKGDPQSPGRHWNEGHATILSQDLDPHSPGEPALLSLCDSAVPLNAPANRENGSQAMPYNCRNNLAFPAHPQDVDGKSESSYSGGGGHSSSEPWEYKSSGNGRASPLKPHLATPGYSTPTSNMSSCSLDQTSNKEDAGSLYSEDHDGYCASVHTDSGHGSGNLCNSSDGFGNPRHSVINVFVGRAQKNQGDRSNYQDKSLSRNISLKKAKKPPLPPSRTDSLRRIPKKSSQCNGQVLNESLIATLQHSLQLSLPGKSGSSPSQSPCSDLEEPWLPRSRSQSTVSAGSSMTSATTPNVYSLCGATPSQSDTSSVKSEYTDPWGYYIDYTGMQEDPGNPAGGCSTSSGVPTGNGPVRHVQEGSRATMPQVPGGSVKPKIMSPEKSHRVISPSSGYSSQSNTPTALTPVPVFLKSVSPANGKGKPKPKVPERKSSLISSVSISSSSTSLSSSTSTEGSGTMKKLDPAVGSPPAPPPPPVPSPPFPCPADRSPFLPPPPPVTDCSQGSPLPHSPVFPPPPPEALIPFCSPPDWCLSPPRPALSPILPDSPVSLPLPPPLLPSSEPPPAPPLDPKFMKDTRPPFTNSGQPESSRGSLRPPSTKEETSRPPMPLITTEALQMVQLRPVRKNSGAEAAQLSERTAQEQRTPVAPQYHLKPSAFLKSRNSTNEMESESQPASVTSSLPTPAKSSSQGDHGSAAERGGPVSRSPGAPSAGEAEARPSPSTTPLPDSSPSRKPPPISKKPKLFLVVPPPQKDFAVEPAENVSEALRAVPSPTTGEEGSVHSREAKESSAAQAGSHATHPGTSVLEGGAAGSMSPSRVEANVPMVQPDVSPAPKQEEPAENSADTGGDGESCLSQQDGAAGVPETNAAGSSSEACDFLKEDGNDEVMTPSRPRTTEDLFAAIHRSKRKVLGRRDSDDDHSRNHSPSPPVTPTGAAPSLASPKQVGSIQRSIRKSSTSSDNFKALLLKKGSRSDTSARMSAAEMLKNTDPRFQRSRSEPSPDAPESPSSCSPSKNRRAQEEWAKNEGLMPRSLSFSGPRYGRSRTPPSAASSRYSMRNRIQSSPMTVISEGEGEAVEPVDSIARGALGAAEGCSLDGLAREEMDEGGLLCGEGPAASLQPQAPGPVDGTASAEGREPSPQCGGSLSEES

SEQ ID NO: 920417 - protein, 270 aa, Homo sapiens
LLFSPLLFLSQGCWMATHRDSEATQDNNRSLKMTKDRKERHDTAKCQEHQEEEFDGVLREEAVAKALHHLGRSGSGTEQVYLNLTLSGCNLIDVSILCGYVHLQKLDLSANKIEELNASQNNLTTFFNFKPPKNLKKADFSHNQISEICDLSAYHALTKLILDGNEIEEISGLEMCNNLIHLSLANNKITTINGLNKLPIKILCLSNNQIEMITGLEDLKALQNLDLSHNQISSLQGLENHDLLEVINLEDNKKQDISLGVTSKNAVLLL

SEQ ID NO: 920418 - protein, 117 aa, Homo sapiens [sequence omitted]

SEQ ID NO: 920419 - protein, 130 aa, Homo sapiens
PLTPTRWVMCLCEMLEMVHLPNTCTRTHSNAQFDAKVTVNCNVVWAKSVFTLQLGMNEFPLKRRGGSKNATNGSPCRVLDAQGSKKPQARGSQCYDQAREKMHGIGNFWQDWEMSPDFSPLYSAWSLQLH

SEQ ID NO: 920420 - protein, 157 aa, Homo sapiens
APGVSLLDLLSPRMQSALQIPDLFSNYLFIVSKSAVTADATFVRSPTECAAPCNLNYCNSPFHLKLHSLTFKASFDSSLLLQPTSDTANIPKHPTTYKALDACRMHFYVTVTIAMITFVHPTHIECLLCVRPPSSLQGDSREQSLCSCGLTLGRRLL

SEQ ID NO: 920421 - protein, 479 aa, Homo sapiens
RAPHPHRYVASHWSPNHPTPLLLTIGNAGGAGAPGQSSLVLVAGLEWGCLEPVLGWKCPQQQCQGNSHWGLPWEPRGTLVSSALTLSHPWASGHIVMTLESDGCREAVGTGARRLQAGRLQSTEARFEEVTVDRPVNIPLLLEPGEAAGGVLGCSIPGAGACLPACWRENDFLAATITTAMTITITITTTATIAITITTTATTITITTTTTAVTITITITTTATTAITITTTVTTITITITITTTAMTITITTTTTAMTITITITTTTAMTITITITTTAMTITITITTTAMTITITITTTAMTITITITTTAMTITITITTTAMTITITITTTAITIAITITTTATIAITTTITVTITITITTIAITITITTTTTAITITITTTTTAITITITITAITITITITTTATTAITITITITTTAMTITITTTATTAITITITITTTTMTIIITTTTTATTAITITTITDHHHHHLHCHHHY

SEQ ID NO: 920422 - protein, 277 aa, Homo sapiens
QRRQGMRMAVGSVKMQPPCESPALAAAAAVVAADGPLRRSPSAREPEREQPPASLRPRLRDLPALLRSGLTLRRKRSAAGGRTLSRRISNPYLEHTPSQIYGENSSCAGRALRNIIIVQAADLIKDRVNLKGFYRRSCVGSELVDWLLEHCPFVQCRSMAIGVWQLLLDMGIMLSVDQHLYFQDTYVFYQFSSDECSYLYCEFEREEEWQNGVKLLLQLVPLIPARGGICELSHQKIEDSEESSDEILVRLTSAVQRELAAVIALKARKSAIEQDEE

SEQ ID NO: 920423 - protein, 180 aa, Homo sapiens
QRRQGMRMAVGSVKMQPPCESPALAAAAAVVAADGPLRRSPSAREPEREQPPASLRPRLRDLPALLRSGLTLRRKRSAAGGRAAPDLTPGPPDSGCGTGHRLKTSCLPLLGGEAAGVQRPTASQPCPNRKLQAPRAASLFAGRMRRVCLFWRCCCKLWASRLVLVVSTAEGQTQESEALG

SEQ ID NO: 920424 - protein, 132 aa, Homo sapiens
QRRQGMRMAVGSVKMQPPCESPALAAAAAVVAADGPLRRSPSAREPEREQPPASLRPRLRDLPALLRSGLTLRRKRSAAGGRTLSRRISNPYLEHTPSQIYGENSSCAGRALRNIIIAQAILLPQPPKALGL

SEQ ID NO: 920425 - protein, 101 aa, Homo sapiens
RSHGAALPAQPRLAQLSHTCAMKYPLMPLVNDLTFSFLVFWFCLPVGLLLLLIIWLRFLLSQDSEENDSSVCLDWEPWSKGPAEFCWKGTLHGQEKERPCW

SEQ ID NO: 920426 - protein, 80 aa, Homo sapiens
RSHGAALPAQPRLAQLSHTCAMKYPLMPLVNDLTFSFLVFWFCLPVGLLLLLIIWLRFLLSQDILQVRRYRYDANILTAS

SEQ ID NO: 920427 - protein, 218 aa, Homo sapiens
RSHGAALPAQPRLAQLSHTCAMKYPLMPLVNDLTFSFLVFWFCLPVGLLLLLIIWLRFLLSQDSEENDSSVCLDWEPWSKGPAEFCWKGTLHGQEKERPCCLVFLESAGQWQWQKWMGETCQGGKRTLATVVPPWNPQLISSSDRHVKASRGPSPSPASQMTSSPAGSRSSLGGHGSSEQAHGEKLANLIQRGLKAGLGRRVWVHIKEARVFPYPGDP

SEQ ID NO: 920428 - protein, 208 aa, Homo sapiens
EVLGFGSCFFGFQSLAPVKKLPHKMVRKDLKNVFPPEVAVFEPSEAEISHTQKATLVCLATGFYPDHVELSWWVNGKEVHSGVSTDPQPLKEQPALNDSRYCLSSRLRVSATFWQNPRNHFRCQVQFYGLSENDEWTQDRAKPVTQIVSAEAWGRAVCVLSTESYQQGVLSATILYEILLGKATLYAVLVSALVLMAMGKQHSLGHLK

SEQ ID NO: 920429 - protein, 106 aa, Homo sapiens [sequence omitted]

SEQ ID NO: 920430 - protein, 138 aa, Homo sapiens
KGNGWALENQQDEDREEGTQQTIKPLPSAGQRMLLSPVHPDGSPQTPFPYPGILGPHWRVSLKGNGWALENQQDEDREEGTQQTISPYPVQDRGCGQTYGLQCLVISQFQIKLSPVLPLVLLVCSLNTSSFSCFRIWA

SEQ ID NO: 920431 - protein, 631 aa, Homo sapiens
GGGADQEQELESEPVVAAEAVMSVQVVSAAAAAKVPEVELKDLSPSEAESQLGLSTAAVGAMAPPAGGGDPEAPAPAAERPPVPGPGSGPAAALSPAAGKVPQASAMKRSDPHHQHQRHRDGGEALVSPDGTVTEAPRTVKKIQFADQKQEFNKRPTKIGRRSLSRSISQSSTDSYSSAASYTDSSDDETSPRDKQQKNSKGSSDFCVKNIKQAEFGRREIEIAEQEMPALMALRKRAQGEKPLAGAKIVGCTHITAQTAVLMETLGALGAQCRWAACNIYSTLNEVAAALAESGFPVFAWKGESEDDFWWCIDRCVNVEGWQPNMILDDGGDLTHWIYKKYPNMFKKIKGIVEESVTGVHRLYQLSKAGKLCVPAMNVNDSVTKQKFDNLYCCRESILDGLKRTTDMMFGGKQVVVCGYGEVGKGCCAALKAMGSIVYVTEIDPICALQACMDGFRLVKLNEVIRQVDIVITCTGNKNVVTREHLDRMKNSCIVCNMGHSNTEIDVASLRTPELTWERVRSQVDHVIWPDGKRIVLLAEGRLLNLSCSTVPTFVLSITATTQALALIELYNAPEGRYKQDVYLLPKKMDEYVASLHLPTFDAHLTELTDEQAKYLGLNKNGPFKPNYYRY

SEQ ID NO: 920432 - protein, 631 aa, Homo sapiens; identical to SEQ ID NO: 920431

SEQ ID NO: 920433 - protein, 509 aa, Homo sapiens
MEKWDGNEGTSAFHMPELDEIQFADQKQEFNKRPTKIGRRSLSRSISQSSTDSYSSAASYTDSSDDETSPRDKQQKNSKGSSDFCVKNIKQAEFGRREIEIAEQEMPALMALRKRAQGEKPLAGAKIVGCTHITAQTAVLMETLGALGAQCRWAACNIYSTLNEVAAALAESGFPVFAWKGESEDDFWWCIDRCVNVEGWQPNMILDDGGDLTHWIYKKYPNMFKKIKGIVEESVTGVHRLYQLSKAGKLCVPAMNVNDSVTKQKFDNLYCCRESILDGLKRTTDMMFGGKQVVVCGYGEVGKGCCAALKAMGSIVYVTEIDPICALQACMDGFRLVKLNEVIRQVDIVITCTGNKNVVTREHLDRMKNSCIVCNMGHSNTEIDVASLRTPELTWERVRSQVDHVIWPDGKRIVLLAEGRLLNLSCSTVPTFVLSITATTQALALIELYNAPEGRYKQDVYLLPKKMDEYVASLHLPTFDAHLTELTDEQAKYLGLNKNGPFKPNYYRY

SEQ ID NO: 920434 - protein, 474 aa, Homo sapiens [sequence omitted]

SEQ ID NO: 920435 - protein, 283 aa, Homo sapiens
MSWCFLFLASLILRLYQLSKAGKLCVPAMNVNDSVTKQKFDNLYCCRESILDGLKRTTDMMFGGKQVVVCGYGEVGKGCCAALKAMGSIVYVTEIDPICALQACMDGFRLVKLNEVIRQVDIVITCTGNKNVVTREHLDRMKNSCIVCNMGHSNTEIDVASLRTPELTWERVRSQVDHVIWPDGKRIVLLAEGRLLNLSCSTVPTFVLSITATTQALALIELYNAPEGRYKQDVYLLPKKMDEYVASLHLPTFDAHLTELTDEQAKYLGLNKNGPFKPNYYRY

SEQ ID NO: 920436 - protein, 631 aa, Homo sapiens; identical to SEQ ID NO: 920431

SEQ ID NO: 920437 - protein, 631 aa, Homo sapiens; identical to SEQ ID NO: 920431

SEQ ID NO: 920438 - protein, 401 aa, Homo sapiens
GGGADQEQELESEPVVAAEAVMSVQVVSAAAAAKVPEVELKDLSPSEAESQLGLSTAAVGAMAPPAGGGDPEAPAPAAERPPVPGPGSGPAAALSPAAGKVPQASAMKRSDPHHQHQRHRDGGEALVSPDGTVTEAPRTVKKIQFADQKQEFNKRPTKIGRRSLSRSISQSSTDSYSSAASYTDSSDDETSPRDKQQKNSKGSSDFCVKNIKQAEFGRREIEIAEQEMPALMALRKRAQGEKPLAGAKIVGCTHITAQTAVLMETLGALGAQCRWAACNIYSTLNEVAAALAESGFPVFAWKGESEDDFWWCIDRCVNVEGWQPNMILDDGGDLTHWIYKKYPNMFKKIKGIVEESVTGVHRLYQLSKAGKLCVPAMNVNDSVTKQKFDNLYCCRESILDG

SEQ ID NO: 920439 - protein, 117 aa, Homo sapiens
HRVSWSLPLPMASPNTCLLRILKRFCRAQFENHWLKSFPLYFLIVKYINFISLTSCLAQACSYPALSLIQVLMETLGALGAQCRWAACNIYSTLNEVAAALAESEVVRAYSLCLWLK

SEQ ID NO: 920440 - protein, 283 aa, Homo sapiens; identical to SEQ ID NO: 920435

SEQ ID NO: 920441 - protein, 509 aa, Homo sapiens; identical to SEQ ID NO: 920433

SEQ ID NO: 920442 - protein, 404 aa, Homo sapiens
MPALMALRKRAQGEKPLAGAKIVGCTHITAQTAVLMETLGALGAQCRWAACNIYSTLNEVAAALAESGFPVFAWKGESEDDFWWCIDRCVNVEGWQPNMILDDGGDLTHWIYKKYPNMFKKIKGIVEESVTGVHRLYQLSKAGKLCVPAMNVNDSVTKQKFDNLYCCRESILDGLKRTTDMMFGGKQVVVCGYGEVGKGCCAALKAMGSIVYVTEIDPICALQACMDGFRLVKLNEVIRQVDIVITCTGNKNVVTREHLDRMKNSCIVCNMGHSNTEIDVASLRTPELTWERVRSQVDHVIWPDGKRIVLLAEGRLLNLSCSTVPTFVLSITATTQALALIELYNAPEGRYKQDVYLLPKKMDEYVASLHLPTFDAHLTELTDEQAKYLGLNKNGPFKPNYYRY

SEQ ID NO: 920443 - protein, 631 aa, Homo sapiens; identical to SEQ ID NO: 920431

SEQ ID NO: 920444 - protein, 631 aa, Homo sapiens; identical to SEQ ID NO: 920431

SEQ ID NO: 920445 - protein, 233 aa, Homo sapiens
MGSRWYQQPAYCRTRPPGEAREPRPPTSFIPGLMRISGSLEHKTQTPPVEENVTQKISDLEICADEFPGSSATYRILETNSEYDPSRCFAFVHDLCDEEKSYPVPKGSLDIIILIFVLSAIVPDKMQKAINRLSRLLKPGGMVLLRDYGRYDMAQLRFKKGQCLSGNFYVRGDGTRVYFFTQEELDTLFTTAGLEKVQNLVDRRLQVNRGKQLTMYRVWIQCKYCKPLLSSTS

SEQ ID NO: 920446 - protein, 162 aa, Homo sapiens
TAIELVQTNSEYDPSRCFAFVHDLCDEEKSYPVPKGSLDIIILIFVLSAIVPDKMQKAINRLSRLLKPGGMVLLRDYGRYDMAQLRFKKGQCLSGNFYVRGDGTRVYFFTQEELDTLFTTAGLEKVQNLVDRRLQVNRGKQLTMYRVWIQCKYCKPLLSSTS

SEQ ID NO: 920447 - protein, 162 aa, Homo sapiens; identical to SEQ ID NO: 920446

SEQ ID NO: 920448 - protein, 162 aa, Homo sapiens; identical to SEQ ID NO: 920446

SEQ ID NO: 920449 - protein, 223 aa, Homo sapiens
GAQDLTLEMSAVESEKTSPSVGHLTALLKSSVALVPMIHGTEAAPAVSAGLCTARHEPRGTGPVEHHSRKPFPWGQMASTMDSSSPAFAEPPPERQGEDTREARRGYGRTLGRPREATGGCLGGHERLWEDAQDKESRKWETVLASASREPQSPHKVSIALDAGVTGNTFAPIGNSTCSSRAQSPGSPSIHRDIHGWKDVVLRTMGGSSATFAGTCPKDIFNF

SEQ ID NO: 920450 - protein, 131 aa, Homo sapiens
MGQHLFSNPAPGQQVAIPPKPDFQFLLRSTPMQKIPGLMDLFFRHKRFPHHAVGKSKPIRVCDELYEDVHGIQYVCQDTVFAIITDNLQERVRRDGRPYWVSWEVAQDIFTASGCRKGWHETPEGGMETAP

SEQ ID NO: 920451 - protein, 159 aa, Homo sapiens
FPGLSVTMLLPSASFCINTHIMQVLGPVPAPLTSGLHYYTTLEELWKSFDLCEDYFKPPFGPYPEKSGKDSLVSMKCSLFRFCPWSKELPFQPPEGSISSHLGSGASDSETEETRKALPIQSFSHEKESHQHRQHSVPVISRPGSNVKPTLPPIPQGRR

SEQ ID NO: 920452 - protein, 253 aa, Homo sapiens
MSFSVHNQKGSKRPLPLEPLLFLQVPRSNYLHFQEEKQRLHLKKFLLDRMFLVAKIQANVERKDVADYYEQMFQSVLKHHLGEAVTGLLLIYPTSILHILESSSDTLYKVLLDYIGHVKDETVFFIQQMKIIVISHNIPMRLFMQWHVSVIKVPVMYLDDVTQSQSLKEVITDFLTQTHKLSLYLCQTMKVGTKGPGDNLHQVAPDLLLPEQIIKYLCKSEEFMDPATFINMYNRPIHITLDSEVVWPAPSRF

SEQ ID NO: 920453 - protein, 136 aa, Homo sapiens
MHFPGFSNIMDITEELGLDIKSSGSGCVEVQSIEGDNCKIETEHGTSILQSVKGQKLHVQTKGGKVICLGTVYGNIDIHASDKSAVTIDKLQGSSVTVSTEDGLLKAKYLYTESSFLSSAAGDITLGSVHGKLTKA

SEQ ID NO: 920454 - protein, 142 aa, Homo sapiens
MHFPGFSNIMDITEELGLDIKSSGSGCVEVQSIEGDNCKIETEHGTSILQSVKGQKLHVQTKGGKVICLGTVYGNIDIHASDKSAVTIDKLQGSSVTVSTEDGLLKAKYLYTESSFLSSAAGDITLGSVHGGISRRRGRQFN

SEQ ID NO: 920455 - protein, 876 aa, Homo sapiens
FYNFLFPFVSLALGIVTASCSKYLKMMRKTSHISGERVFLAEKTASIKALRQEHACCVQEMKECQDPDLLHNWPDAFTLRGNNASKVANPFWNQLSASNPFLDDITQLRNNRKRNNISILKEDPFLFCREIENGNSFDSSGDELDVHQLLRQTSSRNSGRSKSVSELLDILDDTAHAHQSIHNSDQILLHDLEWLKNDREAYKMAWLSQRQLARSCLDLNTISQSPGWAQTQLAEVTIACKVNHQGGSVQLPESDITVHVPQGHVAVGEFQEVSLRAFLDPPHMLNHDLSCTVSPLLEIMLGNLNTMEALLLEMKIGAEVRKDPFSQVMTEMVCLHSLGKEGPFKVLSNCYIYKDTIQVKLIDLSQVMYLVVAAQAKALPSPAATIWDYIHKTTSIGIYGPKYIHPSFTVVLTVCGHNYMPGQLTISDIKKGGKNISPVVFQLWGKQSFLLDKPQDLSISIFSCDPDFEVKTEGERKEIKQKQLEAGEVVHQQFLFSLVEHREMHLFDFCVQVEPPNGEPVAQFSITTPDPTPNLKRLSNLPGYLQKKEEIKSAPLSPKILVKYPTFQDKTLNFSNYGVTLKAVLRQSKIDYFLEYFKGDTIALLGEGKVKAIGQSKVKEWYVGVLRGKIGLVHCKNVKVISKEQVMFMSDSVFTTRNLLEQIVLPLKKLTYIYSVVLTLVSEKVYDWKVLADVLGYSHLSLEDFDQIQADKESEKVSYVIKKLKEDCHTERNTRKFLYELIVALLKMDCQELVARLIQEAAVLTSAVKLGKGWRELAEKLVRLTKQQMEAYEIPHRGNTGDVAVEMMWKPAYDFLYTWSAHYGNNYRDVLQDLQSALDRMKNPVTKHWRELTGVLILVNSLEVLRVTAFSTSEEV

SEQ ID NO: 920456 - protein, 686 aa, Homo sapiens
FYNFLFPFVSLALGIVTASCSKYLKMMRKTSHISGERVFLAEKTASIKALRQEHACCVQEMKECQDPDLLHNWPDAFTLRGNNASKVANPFWNQLSASNPFLDDITQLRNNRKRNNISILKEDPFLFCREIENGNSFDSSGDELDVHQLLRQTSSRNSGRSKSVSELLDILDDTAHAHQSIHNSDQILLHDLEWLKNDREAYKMAWLSQRQLARSCLDLNTISQSPGWAQTQLAEVTIACKVNHQGGSVQLPESDITVHVPQGHVAVGEFQEVSLRAFLDPPHMLNHDLSCTVSPLLEIMLGNLNTMEALLLEMKIGAEVRKDPFSQVMTEMVCLHSLGKEGPFKVLSNCYIYKDTIQVKLIDLSQVMYLVVAAQAKALPSPAATIWDYIHKTTSIGIYGPKYIHPSFTVVLTVCGHNYMPGQLTISDIKKGGKNISPVVFQLWGKQSFLLDKPQDLSISIFSCDPDFEVKTEGERKEIKQKQLEAGEVVHQQFLFSLVEHREMHLFDFCVQVEPPNGEPVAQFSITTPDPTPNLKRLSNLPGYLQKKEEIKSAPLSPKILVKYPTFQDKTLNFSNYGVTLKAVLRQSKIDYFLEYFKGDTIALLGEGKVKAIGQSKVKEWYVGVLRGKIGLVHCKNVKVISKEQVMFMSDSVFTTRNLLEQIVLPLKKLTYIYQEAEAGEWREPG

SEQ ID NO: 920457 - protein, 151 aa, Homo sapiens
CLGYESYDSDRVRDRYRDGYRDGPRRDMDRYGGRDRYDDRGSRDYDRGYDSRIGSGRRAFGSGYRRDDDYREGRDCYEDQYDRRDDRPKLNLKPRSTPKEDDSSASNSQSTRAASIFGGAKPVDTAAREREVEERLRRNKRSCSVSWMGQN

SEQ ID NO: 920458 - protein, 424 aa, Homo sapiens
SLLKLPLACCDGLASAMWKMASSAPVCAPTDWFLEHKHRAIMTVDLITEIPTKWLRAGSIYGMDQLDKGMIPNPDFLAEDGGTGGGSTYVSKPVSWADETDDLEGDVSTTWHSNDDDVYRAPPIDRSILPTAPRAAREPNIDRSRLPKSPPYTAFLGNLPYDVTEESIKEFFRGLNISAVRLPREPSNPERLKGFGYAEFEDLDSLLSALSLNEESLSNRRIRVDVADQALDKDRDDPPFGRDRNRDSDKTDTDWRARPATDTFDDYPPRRGDDSFGDKYRDRYDSDRYRDGYRDGPRRDMDRYGGRDRYDDRGSRDYDRGYDSRIGSGRRAFGSGYRRDDDYREGRDCYEDQYDRRDDRPKLNLKPRSTPKEDDSSASNSQSTRAASIFGGAKPVDTAAREREVEERLRRNKRSCSVSWMGQN

SEQ ID NO: 920459 - protein, 114 aa, Homo sapiens
MCKQRQRRFRGEANAIKRGTGVSQSRWCECVSPEAYGAMAKPTMVSRHVSGGRADQVTFPSMLRKIKEHLGTRRGPVPESKPHFEMPAGGLKRFLQNSPHPQPSTAKVALTQPS

SEQ ID NO: 920460 - protein, 231 aa, Homo sapiens
MKGLVTRQWWLHCDKKAACSNPLQHANSLEHRAFMSHLRGRVSQEKEEFQDCEVGSGDCSSDSIPKRGCVHELGLLGMGIKSESSSTNWETFSVEDFEPDPEKPQVHEEHGSQTEPDLGNSRPTRNMEVRKRGGQCGGHIQPSINPSHSHVAPGMKAQFWSWPEGLQFAIQLFPARLSHPTWAPGHAVDCAMKGIRGCSWKQLLCHLSAPFLQVKVRDPIHTSTDSILTPI

SEQ ID NO: 920461 - protein, 504 aa, Homo sapiens
NSWLRMRMNHIKSISPESGGRVGPTESHNDVGGQRSLINKWTTFLKARLICSIPGSDGADTYFDELQDIYLLPTRDERNPVVYGVFTTTSSIFKGSAVCVYSMADIRAVFNGPYAHKESADHRWVQYDGRIPYPRPGTCPSKTYDPLIKSTRDFPDDVISFIKRHSVMYKSVYPVAGGPTFKRINVDYRLTQIVVDHVIAEDGQYDVMFLGTDIGTVLKVVSISKEKWNMEEVVLEELQIFKQQLYIGSRDGLVQLSLHRCDTYGKACADCCLARDPYCAWDGNACSRYAPTSKRRARRQDVKYGDPITQCWDIEDSISHETADEKVIFGIEFNSTFLECIPKSQQATIKWYIQRSGDEHREELKPDERIIKTEYGLLIRSLQKKDSGMYYCKAQEHTFIHTIVKLTLNVIENEQMENTQRAEHEEGKVKDLLAESRLRYKDYIQILSSPNFSLDQYCEQMWHREKRRQRNKGGPKWKHMQEMKKKRNRRHHRDLDELPRAVAT

SEQ ID NO: 920462 - protein, 416 aa, Homo sapiens
MPSQWSSAWHNHPCQLAPKRAPELAPPGHTAAGPKGQVCRSPPCSSHQHWGLSSVPREQRPGAEEASEEVMQAGPGRIPQSPHGRRHQVCVQWKSHCNGPSRYAFAWSRGSQSRADPQQARKAPENHKALSGSSYSETTPPQTRPLHPTHPSILAHQGVGALVTAGALCGQLPCCPNHGVWPLSLTSTSRKQLRLPGTGREHPMAGIFDSRYARIYSDVVYTRKTRQAVPDKGGQLGCEEEFEKNLKKGVGGDQGSCRQPLAGSTWQPSGASAGLKHLSKKRAACGPPYASLEPRLGWEVRGTRAMADEEMLPTVLCRSLSAKFSGMHHADMVFCESTAKTLSHRRLESSAQIMWVACFGGSSHHARRMLKQPQGEGHAERTEAASDNLPDTGCAPLEMDSPAPIGPLDDVASADI

SEQ ID NO: 920463 - protein, 243 aa, Homo sapiens
MRIGGSRRQGIMRFQGTGLEGTPKMMKLQSCLLAKPSEVLPELDSDSPSDGANGRIVNLGLSKGRQLPISGASVKLSNQVRSYRGRGGLFNMAGPLSPSFRALILDYTKSDPKPAQDWLSHKAHSDHYLATTDVHSRPKFSSESLHMAAAAWIALYWVSPAEGLQQVTAYWLLLMFIQGPRALYSAGDECCQNWYLPFKAVCSLLAQAMLFELSATYEAKVSPGSITSAFRYIHERHILKKQV

SEQ ID NO: 920464 - protein, 1107 aa, Homo sapiens
MLQILGHILSTQTLTLSDLKPSRGPMSGGTQVTITGTNLNAGSNVVVMFGKQPCLFHRRSPSYIVCNTTSSDEVLEMKVSVQVDRAKIHQDLVFQYVEDPTIVRIEPEWSIVSPPGGHSPLQYCPPLYAHFSAALRIGTGIQVSFERLHKMKLLGPPCQQSCALPLSSPVSSLSVVLGNTPIAVWGTHLDLIQNPQIRAKHGGKEHINICEVLNATEMTCQAPALALGPDHQSDLTERPEEFGFILDNVQSLLILNKTNFTYYPNPVFEAFGPSGILELKPGTPIILKGKNLIPPVAGGNVKLNYTVLVGEKPCTVTVSDVQLLCESPNLIGRHKVMARVGGMEYSPGMVYIAPDSPLSLPAIVSIAVAGGLLIIFIVAVLIAYKRKSRESDLTLKRLQMQMDNLESRVALECKEERNMVTALVLCNSLRLYCMLTFLGVLATLFIWRPELPPHTAVPTCRLLFVPAFAELQTDIHELTSDLDGAGIPFLDYRTYTMRVLFPGIEDHPVLRDLEVPGYRQERVEKGLKLFAQLINNKVFLLSFIRTLESQRSFSMRDRGNVASLIMTVLQSKLEYATDVLKQLLADLIDKNLESKNHPKLLLRSPRALTSCFFLCLVPLVPSVTADRTESVAEKMLTNWFTFLLYKFLKECAGEPLFSLFCAIKQQMEKGPIDAITGEARYSLSEDKLIRQQIDYKTLVLSCVSPDNANSPEVPVKILNCDTITQVKEKILDAIFKNVPCSHRPKAADMDLEWRQGSGARMILQDEDITTKIENDWKRLNTLAHYQVPDGSVVALVSKQVTAYNAVNNSTVSRTSASKYENMIRYTGSPDSLRSRTPMITPDLESGVKMWHLVKNHEHGDQKEGDRGSKMVSEIYLTRLLATKNYVSRAVSGRILPLQGTLQKFVDDLFETIFSTAHRGSALPLAIKYMFDFLDEQADKHGIHDPHVRHTWKSNCLPLRFWVNMIKNPQFVFDIHKNSITDACLSVVAQTFMDSCSTSEHRLGKDSPSNKLLYAKDIPSYKNWVERYYSDIGKMPAISDQDMNAYLAEQSRMHMNEFNTMSALSEIFSYVGKYSEEILGPLDHDDQCGKQKLAYKLEQVITLMSLDS

SEQ ID NO: 920465 - protein, 189 aa, Homo sapiens
MALEHLVVWHVHSEDQSFVVLKTDLGRRGCRPLRKTAPKAKEAPAPPKAEAKVKALKAKKAVLKGVRSHTQKRRSACHSPSGGPRHCDSGGSPDILGRAPPGETSLATMLSMGRKKIEENNMLVFFVDVKANKHQIKQAVKKLYDSDVAKVTTLIFPDKENKAYVRLAPDYEALDVATKLGSSKLSPAG

SEQ ID NO: 920466 - protein, 384 aa, Homo sapiens
MGGRLRSISGRRGTPRRQEGGCRACDIRGDQQTPGVEDAAGRELRGWVWPQKAEGTHPSGPRLRRIRFRVNKKRRARGGARTCREGRQRKRRGRAGAGSRAGAGSLPTSRPRCARFWPCQCLRRLKARVCVGFCWSAFGVPWVRAASTQLPVRVSLLSQWHGLASLRPLLPGFKDSPASVSQVAGITGPTRGRVTMALEHLVVWHVHSEDQSFVVLKTDLGRRGCRPLRKTAPKAKEAPAPPKAEAKVKALKAKKAVLKGVRSHTQKRRSACHSPSGGPRHCDSGGSPDILGRAPPGETSLATMLSMGRKKIEENNMLVFFVDVKANKHQIKQAVKKLYDSDVAKVTTLIFPDKENKAYVRLAPDYEALDVATKLGSSKLSPAG

SEQ ID NO: 920467 - protein, 159 aa, Homo sapiens
MSAGGNLKDCFSVLECKHKAVQLDLGVCLLEVAPEGCFLAHLKASPGEEACGVVSQSQGMAAQLLMQPRACLPGAAHSFSCKRGFPIRPPPPLSPHSRRSRNLIVNCACKGSRLHAPYGPHCPAPPPPPSPPLSMEKLSSTKSVPGAKRFRITVVRYAC

SEQ ID NO: 920468 - protein, 170 aa, Homo sapiens
MPRVLGFLLQGAPHPPCSPLKPASSEGNPEIPQISYASTAPDLSDNSRYDFFSRVVPSDTYQAQAMVDIVRALKWNYVSTVASEGSYGESGVEAFIQKSREDGVPSDKWLSDNKGYPLGSSSNVPGTSSPQGLCTGWSSCGKASPACPHGLHSWCLQLYRQHAANTSGDL

SEQ ID NO: 920469 - protein, 374 aa, Homo sapiens
EGWGMGGRPLQPPCLQQQLGWSWELKSWELSASSWLWGWVWLDLPYHWVKPVPTSAHYCAWPRDRQTDRQTDRQTDKPGKPPAQGLGVELRNRMVPAAGVDPPESAGTEQAAMGPCLSFWTQQYEHTALSAFAHCGLLGLEGVEAYHEYLYVGPFLQTPPEIRSEQGAASVQGQPWEAARNQAKIPWALLGKGGMAVPLGAPCWASALPAWAPPGLPHRSLLTRLLSQHVKPAKIPQISYASTAPDLSDNSRYDFFSRVVPSDTYQAQAMVDIVRALKWNYVSTVASEGSYGESGVEAFIQKSREDGVPSDKWLSDNKGYPLGSSSNVPGTSSPQGLCTGWSSCGKASPACPHGLHSWCLQLYRQHAANTSGDL

SEQ ID NO: 920470 - protein, 777 aa, Homo sapiens
MEEPGATPQPYLGLVLEELRRVVAALPESMRPDENPYGFPSELVVCAAVIGFFVVLLFLWRSFRSVRSRLYVGREQKLGATLSGLIEEKCKLLEKFSLIQKEYEGYEVESSLEDASFEKAAAEEARSLEATCEKLNRSNSELEDEILCLEKDLKEEKSKHSQQDELMADISKSIQSLEDESKSLKSQIAEAKIICKTFKMSEERRAIAIKDALNENSQLQTSHKQLFQQEAEVWKGQVSELNKQKITFEDSKVHAEQVLNDKENHIKTLTGHLPMMKDQAAVLEEDTTDDDNLELEVNSQWENGANLDDPLKGALKKLIHAAKLNVSLKSLEGERNHIIIQLSEVDKTKEELTEHIKNLQTQQASLQSENIYFESENQKLQQKLKIMTEFYQENEMKLYRKLTVEENYRIEEEEKLSRVEEKLSRATEQLETYRKLAKDLEEELERTVHFYQKQVISYEKRGHDNWLAARTAERNLSDLRKENAHNKQKLTETELKFELLEKDPNALDVSNTAFGREHAPNGPAPLGQRSSETRAFLSPQTLLEDPLGLSPVLPEGGGRGPRGPGNPLDHQITNERGEPSCDRLTDPHRAPSDTGSLSSPVEQDCKMMFPPPGQSYPDSALPPQREDRFYSNSERLSGSAEPRSFKMTSLDKMDGSMPSEMESSRNDAKDDLGNLNVPDSSLPAENEATGPGFIPPPLAPVRGPLFPVDTRGPFMRRGPPFPPPPPGTMFGASRGYFPPRDFPGPPHAPFAMRNIYPPRGLPPYFHPRPGFYPNPAF

SEQ ID NO: 920471 - protein, 142 aa, Homo sapiens
MNMSTKKKTKKCLKMYEIIVVADDKVEYCLICYFSRMIACIPGTGWYPLFPECPCDIRIIWIYNCIISVQLHALNRYLLHYASIPGEGGEGVISNSAGGCVAAVSPPSPQWNTKKHPDPAWIEARAAEARGYDKSRWKETVI

SEQ ID NO: 920472 - protein, 126 aa, Homo sapiens
MTLFLVFILFGGVWVVTIRHSKALSLGVAQCSWLLKQQVISDDKTKYKQQSSPCCCSAYGVAILYFFTFLITYLLSLYSMDLPQILSCGRSKNTLLGSGSGPLSYNTTTCFLGSPACRWQIVGLTS

SEQ ID NO: 920473 - protein, 262 aa, Homo sapiens
VKWFNVRNGYGFINRNDTKEDVFVHQTAIKKNNPRKYLRSVGDEETVEFDVVKEKRVRRQQMLQILVVFEFKAQNYQNSESGEKTEGSENAPEGQAQQCRPYRRQRFPPYYMRRPYGCRPQYSSPPVQGEVMEGADNQGAGEQGRPVRQNMYRGYRPRFRRGPPCQRQPREYGNEEDKIKEMRPRVSSHLNACHVTAPGRGRQSRTAETPGSRLATAGRGAMETSSRELQAAEYLEKHQIKEVVSYLTSALLFFRPVFYSII

SEQ ID NO: 920474 - protein, 291 aa, Homo sapiens
EPRASGGLKVSSDSKPVIYNCPHQAQQKLLVNPGEASAMLACMVLPSMCGKRSEDELNPFLCGRLHQAPPQETVPCAAAQPIPGGGGPKLHAHRAQRQPKQKFAGRAPPAPAIAMWLPQGFRSSAVFAEGFRSSAVFAEGFRSSPVFAEGFRSSPVFAEGFHSSAVFAEGFRWSAVFAEGFRWSPVFAEGFRSSPVFAEGFRSSPVFAEGFRSSAVFAEGSCSSAGSTVLSSRATLCQGPWARHLPGMLLQQQEHWLGPSERSCEDVPWGITWKCFQLSLHSPADLSEAQA

SEQ ID NO: 920475 - protein, 138 aa, Homo sapiens
MFTIWVTGSLEAQTSASCNMPVLGHGRTDGGVIHRKSARTAERSSPVDAFSDLSFLHAVGKTGPKSNGKDIRDHRHRKSRNGHGRSSRDKATPQTTEGTSHTVSLKELVVVVRKNRECSFQDSQQKYCKCECVPFACV

SEQ ID NO: 920476 - protein, 189 aa, Homo sapiens
MALPQGIPEAFFSPGLGSGSAQSDFISQETQCQGVNQGPTSPVGFARGEERQGYSDTGSSLAAAVITSYSWRLEGESARCWGTLQASRAPFLHLQSQHCTSQCCSHSSIPLAPSDPASLLPSAYENHGDHGGPTWVTEYNLNFQDGILSTQVWSPHTTSPEPELATGTMEKLRVKLMLKKLRTGSRRKS

SEQ ID NO: 920477 - protein, 148 aa, Homo sapiens
NSQRNMNGWQQKMILEHWESAVLHRKRWEILFTVVCLKLGQKNKQDEFGALESVKAASELYSPLSGEVQSYPGGLQALLQLRPHSLTRHWSDVVAIGVHVICELYAVGCASVADGRGQKMTPATSRRQVEDIITYCWAQNQGDVKSSD

SEQ ID NO: 920478 - protein, 164 aa, Homo sapiens
RAKPAAGERQRGPSGVWVILDTGKMYLLQNCLVGSLSLILQHEWAGVRPLLAVAAAGLFLGAESRSRRAMLRPFVMLGETTHTHPDPRSRKTPGKKTKITMKAHVDATGGRYPKQINAGTENEILYVPTNSCAFPAGTEQGQCVHMWECQKHQRNPDVPRPICA

SEQ ID NO: 920479 - protein, 141 aa, Homo sapiens
MRLWGSRRVICGPFGIFHPGPVSLLFFPSGSRRLKSSKKCSCFRDKRELSSSDSGDILWPRLPGQQQALLNGQALGGRPEVWLLESHSCCCVLQLQPVLLLSPIPGWGETEGRCRGERQRRGKERGEEKGRGEYCSKIWQP

SEQ ID NO: 920480 - protein, 141 aa, Homo sapiens; identical to SEQ ID NO: 920479

SEQ ID NO: 920481 - protein, 459 aa, Homo sapiens
MVTNALTLPVLQADGGVLRVTCLPLTLGAQVKMSTPTGLGSKQHRSPRDIVEAMEWVLVIHEEHFCRPSGIPGFKSITHWAEGAAGGRRSLAKRFISLSATWMPEAHVPARPLQYPKCLRAKTFKLLAVTSLGWDTNRKVVSNMSSDFEPRYQSLLCENLHITIEVCNTPNPTTLLLVSESPVEHNCVEVLDSVYSSRPDLRDHLWTSVDWELYVDGSSFINPQGERCAGYAVVILDAVIEAKSLPQGTSAQKAELIALIWALELSEGKTVNIYTDSRQGPTVLSGIQAYGEAPFEDLNIDFTKMPKCGSNKYLLVPVCTYSGWVEAYPTRTKKARVLLRDLIARFGLPLWIGSENGPAFVADLVQKTAKVMSVDQRLERSPLAATVERTPDCHLDHSHSCEGRGNPSLGPPQLRKTCSTGDLVGETKPRQPLQSDSEEVDKPCSSHTRKPTGPLMAEA

SEQ ID NO: 920482 - protein, 106 aa, Homo sapiens
MAEKGPGVLGERALGAAAPVDAKGFGIRESPPRLPARLRIAMPAKGKKGKGQGKSHGKKQKKPEVDILSPAAMLNLYYIAHNVADCLHLRGFHWPGAPKGKKGRSK

SEQ ID NO: 920483 - protein, 139 aa, Homo sapiens
MGGWDLPQGLSKETRPLCAPLETLLILGVRLTAGRDLSRNLSPLTEPSLRSVHGLLLDTARIQKSMLSILKPRRSQEWRTALRRYCCPTDLQAPRSPVPPIRKVGISDVIVHANLATSLKKNTCNCQADLLSWRSWVND

SEQ ID NO: 920484 - protein, 134 aa, Homo sapiens
MVKHQTVCLKSQTKWEGAETSEAPRGHSCDRHKDVPQGQGRTCSPALGSVVSRQPLAVRNFKVSLSCRELLPRWRCLSQSEPWPCSDPQPQSNMKMVQETLDQGSAFQSQIQEHERSCVVMDRTHPSHSVFSLS

SEQ ID NO: 920485 - protein, 142 aa, Homo sapiens
MLKGSCFQFALIKQTFQTTSSQSDHCSSFHGTRSPGNHSSLSGAGGRPLTVLASPRIFRHVLLGAEGPPRAELSQHHPAHSSVKCPWHDAPREPKDAPRMLPATTEGALLGDPQNCQCLVGQQPHAPSVLESRPGADGPDGL

SEQ ID NO: 920486 - protein, 187 aa, Homo sapiens
GYPGKLKMHLSSSAVTDRPCRPALPSTNLLQPVLLQHEAAESVVKIEAFYRLLKLVSYGGLDLNSDCLAPFEISVLGGDQLRCTTNSKRSEWDSSEVFESNSRMAVALHRMANPAHCTETIDAALEGSKLALPWYVDAGGMELQFVSLKQIKHCLPQPVLTIFSLVNSPWKNKQSTQALRKQKFHDS

SEQ ID NO: 920487 - protein, 132 aa, Homo sapiens
MFPFDATSDSTYSPPNSVIACSGPMRLAQAFFSSYMTHYDLNLQVCISVVQPGCLCCKNSKAETLDAISPQRVPAGHQCSSVLVMCQPPSLCHRILPTPSCEAGISIPVYSTYLVVTERFFYTGSIIYVMFN

SEQ ID NO: 920488 - protein, 686 aa, Homo sapiens
MQFVSTRPQPQQLGIQGLGLDSGSWSWAQALPPEEVCHQEPALRGEMAEGMPPMQAQEWDMDARRPMPFQFPPFPDRAPVFPDRMMREPQLPTAEISLWTVVAAIQAVERKVDAQASQLLNLEGRTGTAEKKLADCEKTAVEFGNHMESKWAVLGTLLQEYGLLQRRLENLENLLRNRNFWVLRLPPGSKGEAPKVPVTFVDIAVYFSEDEWKNLDEWQKELYNNLVKENYKTLMSLDAEGSVPKPDAPVQAEPREEPCVWEQRHPEEREIPMDPEAGDGSRRECGVQGRAREDSRLSAHCCREAPLCVHHGARVLGGSQGPVLPESKFGGAEPLVPAQDASSQVKREDTLCVRGQRGLEERAIPTESITDSPISAQDLLSRIKQEEHQCVWDQQDLADRDIPTDPNSGDSLLMVKNPPPAPPQPQPQPQPPQPQLQSQPQPQSLPPIAVAENPGGPPSRGLLDDGFQVLPGERGSGEAPPGGDRSTGGGGGDGGGGGGGAEAGTGAGGGCGSCCPGGLRRSLLLHGARSKPYSCPECGKSFGVRKSLIIHHRSHTKERPYECAECEKSFNCHSGLIRHQMTHRGERPYKCSECEKTYSRKEHLQNHQRLHTGERPFQCALCGKSFIRKQNLLKHQRIHTGERPYTCGECGKSFRYKESLKDHLRVHSGGPGPGAPRQLPPPPERD

SEQ ID NO: 920489 - protein, 686 aa, Homo sapiens; identical to SEQ ID NO: 920488

SEQ ID NO: 920490 - protein, 408 aa, Homo sapiens
MQFVSTRPQPQQLGIQGLGLDSGSWSWAQALPPEEVCHQEPALRGEMAEGMPPMQAQEWDMDARRPMPFQFPPFPDRAPVFPDRMMREPQLPTAEISLWTVVAAIQAVERKVDAQASQLLNLEGRTGTAEKKLADCEKTAVEFGNHMESKWAVLGTLLQEYGLLQRRLENLENLLRNRNFWVLRLPPGSKGEAPKVPVTFVDIAVYFSEDEWKNLDEWQKELYNNLVKENYKTLMSLDAEGSVPKPDAPVQADPTLCPECGKSFGVRKSLIIHHRSHTKERPYECAECEKSFNCHSGLIRHQMTHRGERPYKCSECEKTYSRKEHLQNHQRLHTGERPFQCALCGKSFIRKQNLLKHQRIHTGERPYTCGECGKSFRYKESLKDHLRVHSGGPGPGAPRQLPPPPERD

SEQ ID NO: 920491 - protein, 686 aa, Homo sapiens; identical to SEQ ID NO: 920488

SEQ ID NO: 920492 - protein, 145 aa, Homo sapiens
MQFVSTRPQPQQLGIQGLGLDSGSWSWAQALPPEEVCHQEPALRGEMAEGMPPMQAQEWDMDARRPMPFQFPPFPDRAPVFPDRMMREPQLPTAEISLWTVVAAIQAVERKVDAQASQLLNLEGRTGTAEKKLADCEKKKEKGKW

SEQ ID NO: 920493 - protein, 53 aa, Homo sapiens
MDARRPMPFQFPPFPDRAPVFPDRMMREPQLPTAEISLWTVVAAIQAVERKVD

SEQ ID NO: 920494 - protein, 671 aa, Homo sapiens
MQFVSTRPQPQQLGIQGLGLDSGSWSWAQALPPEEVCHQEPALRGEMAEGMPPMQAQEWDMDARRPMPFQFPPFPDRAPVFPDRMMREPQLPTAEISLWTVVAAIQAVERKVDAQASQLLNLEGRTGTAEKKLADCEKTAVEFGNHMESKWAVLGTLLQEYGLLQRRLENLENLLRNRNFWVLRLPPGSKGEAPKVPVTFVDIAVYFSEDEWKNLDEWQKELYNNLVKENYKTLMSLDAEGSVPKPDAPVQAEPREEPCVWEQRHPEEREIPMDPEAGAEPLVPAQDASSQVKREDTLCVRGQRGLEERAIPTESITDSPISAQDLLSRIKQEEHQCVWDQQDLADRDIPTDPNSESLISAHDILSWIKQEEQPYPWGPRDSMDGELGLDSGPSDSLLMVKNPPPAPPQPQPQPQPPQPQLQSQPQPQSLPPIAVAENPGGPPSRGLLDDGFQVLPGERGSGEAPPGGDRSTGGGGGDGGGGGGGAEAGTGAGGGCGSCCPGGLRRSLLLHGARSKPYSCPECGKSFGVRKSLIIHHRSHTKERPYECAECEKSFNCHSGLIRHQMTHRGERPYKCSECEKTYSRKEHLQNHQRLHTGERPFQCALCGKSFIRKQNLLKHQRIHTGERPYTCGECGKSFRYKESLKDHLRVHSGGPGPGAPRQLPPPPERD

SEQ ID NO: 920495 - protein, 496 aa, Homo sapiens
RGGGGEEQAGGARLTACWLQVPVTFVDIAVYFSEDEWKNLDEWQKELYNNLVKENYKTLMSLDAEGSVPKPDAPVQAEPREEPCVWEQRHPEEREIPMDPEAGAEPLVPAQDASSQVKREDTLCVRGQRGLEERAIPTESITDSPISAQDLLSRIKQEEHQCVWDQQDLADRDIPTDPNSESLISAHDILSWIKQEEQPYPWGPRDSMDGELGLDSGPSDSLLMVKNPPPAPPQPQPQPQPPQPQLQSQPQPQSLPPIAVAENPGGPPSRGLLDDGFQVLPGERGSGEAPPGGDRSTGGGGGDGGGGGGGAEAGTGAGGGCGSCCPGGLRRSLLLHGARSKPYSCPECGKSFGVRKSLIIHHRSHTKERPYECAECEKSFNCHSGLIRHQMTHRGERPYKCSECEKTYSRKEHLQNHQRLHTGERPFQCALCGKSFIRKQNLLKHQRIHTGERPYTCGECGKSFRYKESLKDHLRVHSGGPGPGAPRQLPPPPERD

SEQ ID NO: 920496 - protein, 686 aa, Homo sapiens; identical to SEQ ID NO: 920488

SEQ ID NO: 920497 - protein, 466 aa, Homo sapiens
MQFVSTRPQPQQLGIQGLGLDSGSWSWAQALPPEEVCHQEPALRGEMAEGMPPMQAQEWDMDARRPMPFQFPPFPDRAPVFPDRMMREPQLPTAEISLWTVVAAIQAVERKVDAQASQLLNLEGRTGTAEKKLADCEKTAVEFGNHMESKWAVLGTLLQEYGLLQRRLENLENLLRNRNFWVLRLPPGSKGEAPKVPVTFVDIAVYFSEDEWKNLDEWQKELYNNLVKENYKTLMSLDAEGSVPKPDAPVQAEPREEPCVWEQRHPEEREIPMDPEAGAEPLVPAQDASSQVKREDTLCVRGQRGLEERAIPTESITDSPISAQDLLSRIKQEEHQCVWDQQDLADRDIPTDPNSPREAPKGFPFTLVHLLHSSGRCVPRGHSLHFSVLHGLAPGGVVCPRTLVCVKNDFPCPCRGSGVPPSRDHSGQPAPGTTLASVLLPPSPSSTLLRFPQTPFCRAKGILDIK

SEQ ID NO: 920498 - protein, 676 aa, Homo sapiens
VQESASVEALKMSTQEELQELRERYHFLNEEYRALQESNSSLTGQLADLEKPDPEMQLLRQQLRDAEEQMHGMKNKVSEEEQRRLQRELKCAQNEVLRFQTSHSVTQNEELKSRLCTLQKKYDTSQDEQNELLKMQLQLQTELRQLKVMKSTLVENQSEKELLCRLQKLHLQHQNVTCEKEKLLERQQQLQEELQCHEAELQHLRDTVASFKESNEKDTETHAQLQEMKQLYQASKDELERQKHMYDQLEQDLLLCQLELKELKASHPIPEDKGKCANKEKYKASQKEMGQLQMEQCELLEDQRRMQEEQGQLQEELHRLTLPLPKSGLLLKSQELLTKLEDLCELQLLYQGMQEEQKKLIQNQDCVLKEQLEIHEELRRFKESHFQEVLENPDDSKLAKSSKCNRNKQSKLLMEQMQALQVMYDAGQAKQELLQQEQGRLLEERKRLQADLQLCLEEMQLLQVQSPSIKMSLESYGKSYGSMVPSNENCRKTYDTTVDDNESYYKSYTSTQTSSKSFLKSYDSSTSASEAYGKSYCTTSNSSITYKKSYGSTSSSDTCQKSFVSSCTDEEPAEPEDMERFEEMVVKVLIKLQAVQAMYQISQEEHSQLQEQMEKLLAKQKDLKEELDACEREFKECMECLEKPMAPQNDKNEVTTVREAGFPLAAPGAIEVMATS

SEQ ID NO: 920499 - protein, 392 aa, Homo sapiens
MIPIAEGWGHCRDSLSGNPLISYSPRSHPSSSPLPWVCILRPDTDADGDGDAADGGDGDAAADDDGGDNDGDAADGDGGDDDGDAADGVDGDAADGDDGGDYDGDAAAAAGGDPADGFDGYDDGDAADGDDGDDDDGNDDDGEGNNGNDGDGDDGDNNDDADGDDNDGDATAVATDDGDDAKSLTSLIFTIIQYLSLGNDGDDGSSRVATSVHQCPLYLPWSTYKPFGPPSKIYSNPSTSLLCSYYHPNPNYYHLDALDNSDHDGGGGSGVDDGDGNGDDGGGGDGNDDVSCGVDDGNDNDCDGGVGGAGDDNDGGGGGGDDGGGGDGNDDDVSCGVDDGNDNDCDDGGGGGDDGDDDYDGGVGGAADDNHGGSGGDDGGGGGGDDGGGGGD

SEQ ID NO: 920500 - protein, 98 aa, Homo sapiens
ARALVFSTSVSVSHRPWASQGKGGVTFLARHLPSAELSSPAKEVAVSCSSQDAYSQGTVHCLVKGSVQGNSISYSLPLNLLHPFFPQMSIAWTQMPTS

SEQ ID NO: 920501 - protein, 392 aa, Homo sapiens; identical to SEQ ID NO: 920499

SEQ ID NO: 920502 - protein, 152 aa, Homo sapiens
MHYTHTFDNLEDMNKFLDIYKLIVGLAILPSMTFPLIISYLSNFKLTHMRPSILWYFTCISRASQQLILPWKPFMNLNYQVEIKLVLDLELCSVKVFSLGKLAFIMIKFLGILHNDYSSLPNRAMRSSLDLHCEKPVVFLEDIHPWNQDTIL

SEQ ID NO: 920503 - protein, 170 aa, Homo sapiens
LSLLQSLNINCEDFMDTYHFPSQYSCDFLCLKNNHSPLFALTWHAINHILIYSCIPPGSANDLVFVVLISVSLEPIDIHVISCWEQFLMNESLNEPFKTPSASKFICVALKVNQKQEAKDLSPLMHPDLGYFMSGSVQSKPRQPTCLEDTSCSGTYSSFQKAMKIELHGM

SEQ ID NO: 920504 - protein, 111 aa, Homo sapiens
MILFSACCICGLIGGILNFQFLRAVTKKTSSLYPLHLASMSLACIGIGGCTLSSWLTCRLASYEQRRMFSEREHSLHHSHEMAEKRLRAIEITDLPSCPVVPPTPELPTRK

SEQ ID NO: 920505 - protein, 138 aa, Homo sapiens
  misc_feature (18)..(18): Xaa can be any naturally occurring amino acid
AHIHSLPHHTHTSMNTLXGIFVEYCRAKKKSGLVMILFSACCICGLIGGILNFQFLRAVTKKTSSLYPLHLASMSLACIGIGGCTLSSWLTCRLASYEQRRMFSEREHSLHHSHEMAEKEITDNMSNGGPQLIFNGRV

SEQ ID NO: 920506 - protein, 182 aa, Homo sapiens
MKENQLERKEEEEDDDEGEETQTERGHQTRSLFLATKQLQGATLDSAWGARLGAPWAPPGFPLLKSPGTGRSFYDPYLNVPGGGAAPLPLAQPGKVFVSGNPALVDNASLLKKEKFWDLVGGGRGKEDSGRKKGRWLISLSDLKEDDRGRMCTSGQIIGSLLVLSVLEIGLGVSSVAVGAPQ

SEQ ID NO: 920507 - protein, 138 aa, Homo sapiens; identical to SEQ ID NO: 920505
  misc_feature (18)..(18): Xaa can be any naturally occurring amino acid

SEQ ID NO: 920508 - protein, 169 aa, Homo sapiens
MSACVRSRFRGRGDGQEESDLVAFMASQKHQLHFNVAAIGHLWLLGAWNVAGLNCDVVERALGGGALNIIQSGTRGWDPSNQARSWSGQDGFRDLAGPLSLAAAGAPGLVFTALTTWKPRNGESAVRHPERGGGAGWNRSEVAVAGLQAPSTGLQNPRPELSLAQLGPQ

SEQ ID NO: 920509 - protein, 263 aa, Homo sapiens
VPSHLYPFKHGLFSEQGVIMGDLFSLFWEVDPPPIPVNCAIPNQDYECWKDDSCGTIGSFLLWYFVIVFVLMFFSRASVWMSEDKKDEGSGTSTSVRKASKETSCKRQSKDSAWDPSQTMKKPKQNQLTPVTNSEVALVNAYPEQRRARRQSQFNEVNQNQHDSDTTEYGSEESNSEASSWKESESEHHPSPDSIKRRKMAQRQRNLGSYQMSERHCLHCKALRTNEWLAHHSRQKPSVTPPMKRDSQEESSISDINKKFSKF

SEQ ID NO: 920510 - protein, 900 aa, Homo sapiens
AGCWLRRKVRIGMVDCPGTGSGGRSTSQWWTVQVVAQEGGPRHNGGLSRCWLGREVHVTMVDCPGSGSGGRSTSQWWTVRVVAREGGPRHNGGLSRCWLGREVHVTMVDCPGSGSGGRSTSQWWTVQVLAQEGGPRHNGGLSGYWLGREVHVTMVDCPGAGSGGRSTSQWWTVRVVAQGGGPRHNGGAVQVLAQEGGPRHNGGLSRCWLRREVHVTMVDCPGTGSGGRSTSQWWTVQVVAQEGGPRHNGGLSRCWLGREVHVTMVDCPGSGSGGRSTSQWWTVQVLAREGGPRHNGGLSRCWLRGKVHIGMVDCLGERSTSEWWTVLRGRSTSEWTVQDGACAGCVLAPLCVYSESLSVTWPLVTRCTYNMHLAAARCSLWTQIKRVCPEVESALEWSRLPWSGVICPGAESALKRSLPWSGVVCPGVESSALEWSRLPWSGVVCPGAESALEWSPLPWSGVVCPGVESSALEQSLPWSGVICPGAESALEWSRLPWSGVVCPGVESSALEWSLPWSGVVCPGVESSTLEWSLPWSGVVCPGVESALEWSRLPWSGVVYPGVESSTLEWSLPWSGVICPGAESALVWSRLPWSGVGPGVESALEWSRLPWSGVVCPGVESALEWSRLPWSGVIYPRSGVVYPGVESALEWSRLPWSGVCPGVESSTLEWSRLPWSGVCPGVESSALERSLPWCGVVCPGVESALEWSLPWSGVVYPGVESSALEWSLPWSGVVCPGVESSTLEWSRLPWSGVCPGVESSALEWSLPWSGVVYPGVESSTLEWSRLPWSGVCPGVESSALERSLPWCGVVCPGVESALEWSLPWSGVVYPGVESSALEWSLPWSGVVCPGAESALEWSRLPWSGVCPGAESALERSLPWSGVVCPGVESALEWSLPWSGGK

SEQ ID NO: 920511 - protein, 340 aa, Homo sapiens
MVCFSRACTFIAADSYRPGVPNFSICQQGNNDNETALHCAAQYGHTEVVKVLLEELTDPTMRNNKFETPLDLAALYGRLEVVKMLLNAHPNLLSCNTKKHTPLHLAARNGHKAVVQVLLDAGMDSNYQTEMGSALHEAALFGKTDVVQILLAAGTDVNIKDNHGLTALDTVRELPSQKSQQIAALIEDHMTGKRSTKEVDKTPPPQPPLISSMDSISQKSQGDVEKAVTELIIDFDANAEEEGPYEALYNAISCHSLDSMASGRSSDQDSTNKEAEAAGVKPAGVRPRERPPPPAKPPPDEEEEDHIDKKYFPLTASEVLSMRPRIHGSAAREEDEHPYE

SEQ ID NO: 920512 - protein, 352 aa, Homo sapiens
MVCFSRACTFIAADSYRPGVPNFSICQQGNNDNETALHCAAQYGHTEVVKVLLEELTDPTMRNNKFETPLDLAALYGRLEVVKMLLNAHPNLLSCNTKKHTPLHLAARNGHKAVVQVLLDAGMDSNYQTEMGSALHEAALFGKTDVVQILLAAGTDVNIKDNHGLTALDTVRELPSQKSQQIAALIEDHMTGKRSTKEVDKTPPPQPPLISSMDSISQKSQGDVEKAVTELIIDFDANAEEEGPYEALYNAISCHSLDSMASGRSSDQDSTNKEAEAAGVKPAGVRPVCDPGLTPPGGCVGWLAPEVMGHGEGKCDPWCQLMFPGPGAHLFSSSWGSAGSLLLSVLKLYRSH

SEQ ID NO: 920513 - protein, 214 aa, Homo sapiens
FVFLQFRFADGLDITLMILGILASLVNGACLPLMPLVLGEMSDNLISGCLVQTNTTNYQNCTQSQEKLNEDMTLLTLYYVGIGVAALIFGYIQISLWIITAARQTKRIRKQFFHSVLAQDIGWFDSCDIGELNTRMTEYTQNLKDAKDFGIKRTIASKVSLGAVYFFMNGTYGLAFWYGTSLILNGEPGYTIGTVLALADFSGHTSQHVITTRL

SEQ ID NO: 920514 - protein, 214 aa, Homo sapiens; identical to SEQ ID NO: 920513

SEQ ID NO: 920515 - protein, 255 aa, Homo sapiens
KGRRHRQPGDYCTTAICNAALGNPGNLKGQQRDRHSRLFRAHSADRTMATIAAAAFEALMDGVTCWDVPRGPIPSELLLIGEAAFPVMVNDKGQVLIAASSYGRGRLVVVSHEGYLSHAGLASFLLNAVSWLCPCPGAPVGVRPSLAPLVNILQDAGLEAQVKPEPGEPLGVYCINAYNDTLTATLIQFVKHGGGLLIGGQAWYWASQHGPDKVLSRFPGNKVTSVAGVYFTDTYGDRDRFKVSKKVPKIPLHVR

SEQ ID NO: 920516 - protein, 259 aa, Homo sapiens
MATIAAAAFEALMDGVTCWDVPRGPIPSELLLIGEAAFPVMVNDKGQVLIAASSYGRGRLVVVSHEGYLSHAGLASFLLNAVSWLCPCPGAPVGVRPSLAPLVNILQDAGLEAQVKPEPGEPLGVYCINAYNDTLTATLIQFVKHGGGLLIGGQAWYWASQHGPDKVLSRFPGNKVTSVAGVYFTDTYGDRDRFKVSKKVPKIPLHVRRIPWEHPPAEICTSATILSGRRKGKGSAASLATACIISSQRRSTGSGSFRA

SEQ ID NO: 920517 - protein, 48 aa, Homo sapiens
MATIAAAAFEALMDGVTCWDVPRGPIPSELLLIGEAAFPVMVNDKGQV

SEQ ID NO: 920518 - protein, 86 aa, Homo sapiens
AGTVRSVGIASPPTRPPGATAEPVRQSLGIRTAQGRIPWEHPPAEICTSATILSGRRKGKGSAASLATACIISSQRRSTGSGSFRA

SEQ ID NO: 920519 - protein, 259 aa, Homo sapiens; identical to SEQ ID NO: 920516

SEQ ID NO: 920520 - protein, 381 aa, Homo sapiens
SVREAGTARRAPESSRRRAVAAGHPETMGKLVALVLLGVGLSLVGEMFLAFRERVNASREVEPVEPENCHLIEELESGSEDIDILPSGLAFISSGLKYPGMPNFAPDEPGKIFLMDLNEQNPRAQALEISGGFDKELFNPHGISIFIDKDNTVYLYVVNHPHMKSTVEIFKFEEQQRSLVYLKTIKHELLKSVNDIVVLGPEQFYATRDHYFTNSLLSFFEMILDLRWTYVLFYSPREVKVVAKGFCSANGITVSADQKYVYVADVAAKNIHIMEKHDNWDLTQLKVIQLGTLVDNLTVDPATGDILAGCHPNPMKLLNYNPEDPPGSEVLRIQNVLSEKPRVSTVYANNGSVLQGTSVASVYHGKILIGTVFHKTLYCEL

SEQ ID NO: 920521 - protein, 76 aa, Homo sapiens
PRAAGFGTSMKLLNYNPEDPPGSEVLRIQNVLSEKPRVSTVYANNGSVLQGTSVASVYHGKILIGTVFHKTLYCEL

SEQ ID NO: 920522 - protein, 95 aa, Homo sapiens
YTRDSISGLKYPGMPNFAPDEPGKIFLMDLNEQNPRAQALEISGGFDKELFNPHGISIFIDKVGRSKMGLLAESAELLRWGLTASHAFCAPGRPS

SEQ ID NO: 920523 - protein, 349 aa, Homo sapiens
MTNTLQKHISSFEVGFFFYRERVNASREVEPVEPENCHLIEELESGSEDIDILPSGLAFISSGLKYPGMPNFAPDEPGKIFLMDLNEQNPRAQALEISGGFDKELFNPHGISIFIDKDNTVYLYVVNHPHMKSTVEIFKFEEQQRSLVYLKTIKHELLKSVNDIVVLGPEQFYATRDHYFTNSLLSFFEMILDLRWTYVLFYSPREVKVVAKGFCSANGITVSADQKYVYVADVAAKNIHIMEKHDNWDLTQLKVIQLGTLVDNLTVDPATGDILAGCHPNPMKLLNYNPEDPPGSEVLRIQNVLSEKPRVSTVYANNGSVLQGTSVASVYHGKILIGTVFHKTLYCEL

SEQ ID NO: 920524 - protein, 198 aa, Homo sapiens
SVREAGTARRAPESSRRRAVAAGHPETMGKLVALVLLGVGLSLVGEMFLAFRERVNASREVEPVEPENCHLIEELESGSEDIDILPSGLAFISSLQVCWSLLEVHSRPCLPGYHQWRLQNGKYCCLIFLLEASSQRGIRLYEGLKYPGMPNFAPDEPGKIFLMDLNEQNPRAQALEISGGFDKELFNPHGISIFIDKV

SEQ ID NO: 920525 - protein, 413 aa, Homo sapiens
SVREAGTARRAPESSRRRAVAAGHPETMGKLVALVLLGVGLSLVGEMFLAFRERVNASREVEPVEPENCHLIEELESGSEDIDILPSGLAFISSLQVCWSLLEVHSRPCLPGYHQWRLQNGKYCCLIFLLEASSQRGIRLYEGLKYPGMPNFAPDEPGKIFLMDLNEQNPRAQALEISGGFDKELFNPHGISIFIDKDNTVYLYVVNHPHMKSTVEIFKFEEQQRSLVYLKTIKHELLKRDHYFTNSLLSFFEMILDLRWTYVLFYSPREVKVVAKGFCSANGITVSADQKYVYVADVAAKNIHIMEKHDNWDLTQLKVIQLGTLVDNLTVDPATGDILAGCHPNPMKLLNYNPEDPPGSEVLRIQNVLSEKPRVSTVYANNGSVLQGTSVASVYHGKILIGTVFHKTLYCEL

SEQ ID NO: 920526 - protein, 426 aa, Homo sapiens
SVREAGTARRAPESSRRRAVAAGHPETMGKLVALVLLGVGLSLVGEMFLAFRERVNASREVEPVEPENCHLIEELESGSEDIDILPSGLAFISSLQVCWSLLEVHSRPCLPGYHQWRLQNGKYCCLIFLLEASSQRGIRLYEGLKYPGMPNFAPDEPGKIFLMDLNEQNPRAQALEISGGFDKELFNPHGISIFIDKGVTFLEIIPFFHVDNTVYLYVVNHPHMKSTVEIFKFEEQQRSLVYLKTIKHELLKRDHYFTNSLLSFFEMILDLRWTYVLFYSPREVKVVAKGFCSANGITVSADQKYVYVADVAAKNIHIMEKHDNWDLTQLKVIQLGTLVDNLTVDPATGDILAGCHPNPMKLLNYNPEDPPGSEVLRIQNVLSEKPRVSTVYANNGSVLQGTSVASVYHGKILIGTVFHKTLYCEL

SEQ ID NO: 920527 - protein, 296 aa, Homo sapiens
SVREAGTARRAPESSRRRAVAAGHPETMGKLVALVLLGVGLSLVGEMFLAFRERVNASREVEPVEPENCHLIEELESGSEDIDILPSGLAFISSGLKYPGMPNFAPDEPGKIFLMDLNEQNPRAQALEISGGFDKELFNPHGISIFIDKDNTVYLYVVNHPHMKSTVEIFKFEEQQRSLVYLKTIKHELLKSVNDIVVLGPEQFYATRDHYFTNSLLSFFEMILDLRWTYVLFYSPREVKVVAKGFCSANGITVSADQKYVYVADVAAKNIHIMEKHDNWDLTQLKVRVPCLAHTI

SEQ ID NO: 920528 - protein, 263 aa, Homo sapiens
SVREAGTARRAPESSRRRAVAAGHPETMGKLVALVLLGVGLSLVGEMFLAFRLPLWEVHQTCAELVEIAAAGTSVNDIVVLGPEQFYATRDHYFTNSLLSFFEMILDLRWTYVLFYSPREVKVVAKGFCSANGITVSADQKYVYVADVAAKNIHIMEKHDNWDLTQLKVIQLGTLVDNLTVDPATGDILAGCHPNPMKLLNYNPEDPPGSEVLRIQNVLSEKPRVSTVYANNGSVLQGTSVASVYHGKILIGTVFHKTLYCEL

SEQ ID NO: 920529 - protein, 429 aa, Homo sapiens
SVREAGTARRAPESSRRRAVAAGHPETMGKLVALVLLGVGLSLVGEMFLAFRERVNASREVEPVEPENCHLIEELESGSEDIDILPSGLAFISSLQVCWSLLEVHSRPCLPGYHQWRLQNGKYCCLIFLLEASSQRGIRLYEGLKYPGMPNFAPDEPGKIFLMDLNEQNPRAQALEISGGFDKELFNPHGISIFIDKDNTVYLYVVNHPHMKSTVEIFKFEEQQRSLVYLKTIKHELLKSVNDIVVLGPEQFYATRDHYFTNSLLSFFEMILDLRWTYVLFYSPREVKVVAKGFCSANGITVSADQKYVYVADVAAKNIHIMEKHDNWDLTQLKVIQLGTLVDNLTVDPATGDILAGCHPNPMKLLNYNPEDPPGSEVLRIQNVLSEKPRVSTVYANNGSVLQGTSVASVYHGKILIGTVFHKTLYCEL

SEQ ID NO: 920530 - protein, 363 aa, Homo sapiens
SVREAGTARRAPESSRRRAVAAGHPETMGKLVALVLLGVGLSLVGEMFLAFRERVNASREVEPVEPENCHLIEELESGSEDIDILPSGLAFISSGLKYPGMPNFAPDEPGKIFLMDLNELNPHGISIFIDKDNTVYLYVVNHPHMKSTVEIFKFEEQQRSLVYLKTIKHELLKSVNDIVVLGPEQFYATRDHYFTNSLLSFFEMILDLRWTYVLFYSPREVKVVAKGFCSANGITVSADQKYVYVADVAAKNIHIMEKHDNWDLTQLKVIQLGTLVDNLTVDPATGDILAGCHPNPMKLLNYNPEDPPGSEVLRIQNVLSEKPRVSTVYANNGSVLQGTSVASVYHGKILIGTVFHKTLYCEL

SEQ ID NO: 920531 - protein, 162 aa, Homo sapiens
SAVCMRCFCHGGRDSGERVNASREVEPVEPENCHLIEELESGSEDIDILPSGLAFISSLQVCWSLLEVHSRPCLPGYHQWRLQNGKYCCLIFLLEASSQRGIRLYEGLKYPGMPNFAPDEPGKIFLMDLNEQNPRAQALEISGGFDKELFNPHGISIFIDKV

SEQ ID NO: 920532 - protein, 365 aa, Homo sapiens
SVREAGTARRAPESSRRRAVAAGHPETMGKLVALVLLGVGLSLVGEMFLAFRERVNASREVEPVEPENCHLIEELESGSEDIDILPSGLAFISSGLKYPGMPNFAPDEPGKIFLMDLNEQNPRAQALEISGGFDKELFNPHGISIFIDKDNTVYLYVVNHPHMKSTVEIFKFEEQQRSLVYLKTIKHELLKRDHYFTNSLLSFFEMILDLRWTYVLFYSPREVKVVAKGFCSANGITVSADQKYVYVADVAAKNIHIMEKHDNWDLTQLKVIQLGTLVDNLTVDPATGDILAGCHPNPMKLLNYNPEDPPGSEVLRIQNVLSEKPRVSTVYANNGSVLQGTSVASVYHGKILIGTVFHKTLYCEL

SEQ ID NO: 920533 - protein, 150 aa, Homo sapiens
MFRNEGKKKEKTKMVSGFPVWAIWRGWVPLRDLERVGTIKRMRQDTFDTGRSVKWGKIDTCIQFTGPGISPFEMQKIQLLVPYESFSSPMWRGSGAHLCECVCVCGGKMLSRVKNVSLINQWKFITAVKSPGSGAKLLRFEAPFCCSLAT

SEQ ID NO: 920534 - protein, 150 aa, Homo sapiens; identical to SEQ ID NO: 920533

SEQ ID NO: 920535 - protein, 178 aa, Homo sapiens
MIFPEVLDSVIQARVQWGKTRLTAASISWLKLSSCLSLLFIWDHRNYSFAGGAKDQHGSFDLLRFRPGSVHPSLGNLAVPRSREVTLLMLNLARTPDGHSALQPRAPELKPSSCLSLQVARTTGTHPEEEEIPGAHAPRKSHLRTRQEGRHLQAKERGLRQKSNLSHLASWTSSPSEL

SEQ ID NO: 920536 - protein, 154 aa, Homo sapiens
MGVVILLMVQTSALSLKGSTSCETQHIHKHLKPTARHPSLSEKSRKVPIQMAELLRLGPDLYHHRVTEMEPSPSHLLMAVSCDPLNPGHHAFQFHLREHFQVRLKPSGSSRGLNPFGMLSGRQNQGPMIHDLVLVPMSVCQRPSEQIVFSLAGA

SEQ ID NO: 920537 - protein, 149 aa, Homo sapiens
MTATVSTTMLPNFTESSRYTNEFLIPKVIVKSDPIETTPGKDVLNIVEMTTKDLEYYVKLVDKAATGLERINSNLKRSSTLGKNAIKKHCMLQRNLSWKKESINAANFIIVSFYEIATVTPAFSNHHPDQSAAFNTEIRTSISKKIMPC

SEQ ID NO: 920538 - protein, 285 aa, Homo sapiens
MLQSGRGSREWEMATIPVIGTLASLDKPPFWNPFPYACGGGMVLYPAWALGSGLCSVLPLALPTLFLRGLDASRSGQMSSTKMTSQSVRETLPGDPCHSFPPSTGTYLDNTVCFAVAPYASCETHSHHLLWDTPVPRVVTWSPPRIRPCSCLHVSHKAWSAFRSPRAFRSGAGHCSFKGRGRQRADGSVHLQLTLGLDSYGIILCCREALPASPDVVSPSYLTRRAPKSDLKWSPENRCRRPDVPHPSVEGTQPDCQEWSGSRPSQCACARSQRLLPSQWFPPLS

SEQ ID NO: 920539 - protein, 285 aa, Homo sapiens; identical to SEQ ID NO: 920538

SEQ ID NO: 920540 - protein, 611 aa, Homo sapiens
MRPMENPRCPRRPLAEKKARSLDRPQAPGKGSESWDCHWLSLPTAPSRKALHWTTSDWARHSDSPAPSAEAHCTTAAAPTPEETGDFLPSEQRPSQDTKKGWLKTMLNFFVRTGPEEPREKASRRPRGKEGISQHPEPLEAAGEPALRKKAHHDKKPSRKKQGHKKHAAEVTKAAQDQEARGREEGLSKAAAALRSGEADLGPARRGGEDSDHQSFLIKVDGTGALDVSPHATGHQQEEELKKPDQDAIIQMIVELLKRVGDQWEEEQSLASQLGVALPNPAPAVRKKSQEKKTSLKRTSKTNPKKHGSEEAKRGAADVSSPEAWPPKKSSFLPLCVSGHRPSISSSYEEFIQKIISMLQDAEEQQGEEQPQVQQEEVGVENPAPHCRRKSQEKRSSFRRAFYHKKHTSKEPRRAGAAGAASPEARRPKRPSFLPLCVGGHRPSTSSSLDPEDLECREPLPAEGEPVVISEAPSQARGHTPEGAPQLSGACESKEIIIQKLVALLQEVDGQLGQQIRRHPSFKRFFYEFSDSSLSKLVATLRSQVAHSSKLDRNRARRLYQFDVSLANKFAGSNSHAMCILMGLRDHYNCTQFPYREDQPNITSPKVESPD

SEQ ID NO: 920541 - protein, 152 aa, Homo sapiens
ESAVLAFTPIMFVWARLSAPVIVYVRVLPIGMCGELSRRMKSDAVESDTAYSSRIHPWFFCRVKNSLGARGTKPAKICTASQGTYFPASNSFAVTKAATHAELKCLLIAKAAIFGGDKQTTSKPLQIPYIPGLHSRPTELNPLGMVPEKNIF

SEQ ID NO: 920542 - protein, 520 aa, Homo sapiens
MSHVYISVAVSRCKQNPEKWSGKMSNQQEKYEAQNIVNSTEESDDAFDTVTIPVPSEEPQESDQTEEHESGIEQFSESHAIHVEEQSDQSFSSLEPDNEQLMEEVISPRQVSYTPQHHEKQYAMQRPNDDSLAFLDKIKSVKESLQESVEDSLATGKILKNNETLVQHGVKPQEIVQVEIFSTNPDLYPVRRIDGLTDVSQIITVTVQTGLDQYQQVPVEIVKSDFHKPFLGGFRHKVTGVEYHNAGTQTVPKRIPERLSIFCRDTQKKNLQQTTNTTSTQMTNIGVYVSNMTDKLVTPGKYFSAAEYHAQRLKAVPQDPLKFYKKIYFCHSCQLYLPSTEFSVSSTSRRIYRCRNCINLQNEAQKRESFLKYKCLLQQLYYTEADYEDDSKIAFLMQLQDIQYLTENIWASQSVLSACDNLSDLVMVRWNKSLEWSPWNCILLTKDEAAAHLKLTSIEEGYERSFIHKIKHKHILAKNYFSQVPVLASFILDDGEIDEIRWKYHSDTTPKIIESQRPPH

SEQ ID NO: 920543 - protein, 274 aa, Homo sapiens
MAVVCTCVRVMHVHLHACAVVCVMYVHLHACAVACVMYVHLHACAVACDPILMRSKGSEGDGAQIDECGGNQHEGYVISVKYEFHSTKGNDSQQDLASGSPCLWIKEPFEACLVMSWKTAYDTKISPYPTRLAGFIPVSNETCWVYPRIQRDLLGLSPYPTRLAGFIPVSNETCWVYPRIQRDLLGLSPYPTRLAGFIPVSNETCWVYPRIQRDLLGLSPYPTRLAGFIPVSNETCWVYPRIQRDLLGLSPYPMRLAGFIPVSNETCWVYPRIQ

SEQ ID NO: 920544 - protein, 689 aa, Homo sapiens
GFGVDYFVNELLGTPPRRGSRSEAPPHLPDGAAAGWGLPPTSWTGQLAGLGLPPTSRTGRLPGGGAPHFPDWVAGQRRSSLPRRVGGRAETLLSSQTGSRPGRGALHISDGAAGQRRSPHPRRWAAGQRRSSLPRRDDGREEALLTSQTGRPGRGAPHIPEDGRPGRDAPHFLDGVAAGQRLQSRHFGRPRQAAGRRPAGSPPAAQASLSDVALECCCGIGVHGPLTFRDVAIEFSLEEWQCLDTAQRNLYRKVMFENYRNLVFLVILRGYGKCGHENLQLRISCKSVDESKVFKEGYNELNQCLRTTQSKIFQCDKYVKVFHKFSNSNSHKKRNTGKKVFKCKECGKSFCMLSHLTQHIRIHTRENSYKCEECGKVLNWFSELIKHKGIHMGEKPYKCEECGKAFNQSSTLIKHKKIHIEEKPFKCEECGKAFSLFSILSKHKIIHTGDKPYKCDECHKAFNWFATLTNHKRIHTGEKPFKCEECGKDFNQFSNLTKHKKIHTGEKPYKCEECGKAFNQFANLTRHKKIHTGEKSYKCEECGKAFIQSSNLTEHMRIHTGEKPYKCEECGKAFNGCSSLTRHKRIHTRENTYKCEECGKGFTLFSTLTNHKVIHTGEKSYKCDECGNVFNWPATLANHKRIHAREKPYKCEECGKAFNRSSHLTRHKKIHTGEKLYKPEKCDNNFDNT

SEQ ID NO: 920545 - protein, 135 aa, Homo sapiens
MMTKCTGIFRDGDPRTEKEHTEEYTMHNLIYINYQKIKTSYAVRNRDSGDPWYSKGRTTIVVAHRLSTIRSADLIVTLKDGMLAEKGAHAELMAKRGLYYSLVMSQDPYLRVSWIHPTGFHITFSLGHINMSHGN

SEQ ID NO: 920546 - protein, 160 aa, Homo sapiens
DDGFQLHLCPCKGHEFILFMAAQYSMVYMCRTSFIQSIIDGHLALGETLVGAFAWNTYMRPPHVVWASPQHGDWFLKMSMESQVEAILSFMTLSPSCVVSLALNFVHQDSHKRPSNFKVRKKFTLSLAGDWQNSERLLGTRYIAVANFGKKNTSCCNVVL

SEQ ID NO: 920547 - protein, 1857 aa, Homo sapiens
MDIYDELSPEQHNLSLYSMELVLKKSTGHSAAQVALTETAPGSQHSSPLHVTAPPSATTFDTAFFNQGKQTKSTADPSIFVATYVSVTSKEVAVNDDEMDNFLPDTHWTTPRMVSPIQYITVSPPGLPREALEPMLTPSLPMVSLQDEEVTSGWQNTTRQPAAYAESASHFHTFRSAFRTSEGSSRSLMPQPLGDGITIPLPSLGEVSQPPEEVWATSADRYTDVTTVLSQSLEETISPRTYPTVTASHAALAFSRTHSPLLSTPLAFASSASPTDVSSNPFLPSDSSKTSELHSNSALPGPVDNTHILSPVSSFRPYTWCAACTVPSPQQVLATSLMEKDVGSGDGAETLCMTVLEESSISLMSSVVADFSEFEEDPQVFNTLFPSRPIVPLSSRSMEISETSVGISAEVDMSSVTTTQVPPAHGRLSVPASLDPTAGSLSVAETQVTPSSVTTAFFSVITSILLDSSFSVIANKNTPSLAVRDPSVFTPYSLVPSVESSLFSDQERSSFSEHKPRGALDFASSFFSTPPLELSGSISSPSEAPASLSLMPSDLSPFTSQSFSPLVETFTLFDSSDLQSSQLSLPSSTNLEFSQLQPSSELPLNTIMLLPSRSEVSPWSSFPSDSLEFVEASTVSLTDSEAHFTSAFIETTSYLESSLISHESAVTALVPPGSESFDILTAGIQATSPLTTVHTTPILTESSLFSTLTPPDDQISALDGHVSVLASFSKAIPTGTVLITDAYLPSGSLFVSEATPFPLPTELTVVGPSLTPTEVPLNTSTEVSTTSTGAATGGPLDSTLMGDAASQSPPESSAAPPLPSLRPVTAFTLEATVDTPTLATAKPPYVCDITVPDAYLITTVLARRAVQEYIITAIKEVLRIHFNRAVELKVYELFTDFTFLVTSGPFVYTAISVINVLINSKLVRDQTPLILSVKPSFLVPESRFQVQTVLQFVPPSVDTGFCNFTQRIEKGLMTALFEVRKHHQGTYNLTVQILNITISSSRVTPRRGPVNIIFAVKSTQGFLNGSEVSELLRNLSVVEFSFYLGYPVLQIAEPFQYPQLNLSQLLKSSWVRTVLLGVMEKQLQNEVFQAEMERKLAQLLSEVSTRRRMWRRATVAAGNSVVQVVNVSRLEGDDNPVQLIYFVEDQDGERLSAVKSSDLINKMDLQRAAIILGYRIQGVIAQPVDRVKRPSPESQSNNLWVIVGVVIPVLVVMVIVVILYWKLCRTDKLDFQPDTVANIQQRQKLQIPSVKGFDFAKQHLGQHNKDDILIIHEPAPLPGPLKDHTTPSENGDVPSPKSKIPSKNVRHRGRVSPSDADSTVSEESSERDAGDKTPGAVNDGRSHRAPQSGPPLPSSGNEQHSSASIFEHVDRISRPPEASRRVPSKIQLIAMQPIPAPPVQRPSPADRVAESNKINKEIQTALRHKSEIEHHRNKIRLRAKRRGHYEFPVVDDLSSGDTKERHRVYRRAQMQIDKILDPTASVPSVFIEPRKSSRIKRSPKPRRKHQVNGCPADAEKDRLITTDSDGTYRRPPGVHNSAYIGCPSDPDLPADVQTPSSVELGRYPALPFPASQYIPPQPSIEEARQTMHSLLDDAFALVAPSSQPASTAGVGPGVPPGLPANSTPSQEERRATQWGSFYSPAQTANNPCSRYEDYGMTPPTGPLPRPGFGPGLLQSTELVPPDPQQPQASAEAPFAARGIYSEEMPSVARPRPVGGTTGSQIQHLTQVGIASRIGAQPVEIPPSRGSQYGGPGWPSYGEDEAGRREAVPRTSGREPSAPSGNLPHRGLQGPGLGYPTSSTEDLQPGHSSASLIKAIREELLRLSQKQSTVQNSTADRPRLADLPSIRFLWKQDQKEIN

SEQ ID NO: 920548 - protein, 1668 aa, Homo sapiens
  misc_feature (13)..(14): Xaa can be any naturally occurring amino acid
VSGDRDENSFSLXXSISSSARRTTRSEPIRRAGKSGTSTPTTPGSTAISPRTYPTVTASHAALAFSRTHSPLLSTPLAFASSASPTDVSSNPFLPSDSSKTSELHSNSALPGPVDNTHILSPVSSFRPYTWCAACTVPSPQQVLATSLMEKDVGSGDGAETLCMTVLEESSISLMSSVVADFSEFEEDPQVFNTLFPSRPIVPLSSRSMEISETSVGISAEVDMSSVTTTQVPPAHGRLSVPASLDPTAGSLSVAETQVTPSSVTTAFFSVITSILLDSSFSVIANKNTPSLAVRDPSVFTPYSLVPSVESSLFSDQERSSFSEHKPRGALDFASSFFSTPPLELSGSISSPSEAPASLSLMPSDLSPFTSQSFSPLVETFTLFDSSDLQSSQLSLPSSTNLEFSQLQPSSELPLNTIMLLPSRSEVSPWSSFPSDSLEFVEASTVSLTDSEAHFTSAFIETTSYLESSLISHESAVTALVPPGSESFDILTAGIQATSPLTTVHTTPILTESSLFSTLTPPDDQISALDGHVSVLASFSKAIPTGTVLITDAYLPSGSLFVSEATPFPLPTELTVVGPSLTPTEVPLNTSTEVSTTSTGAATGGPLDSTLMGDAASQSPPESSAAPPLPSLRPVTAFTLEATVDTPTLATAKPPYVCDITVPDAYLITTVLARRAVQEYIITAIKEVLRIHFNRAVELKVYELFTDFTFLVTSGPFVYTAISVINVLINSKLVRDQTPLILSVKPSFLVPESRFQVQTVLQFVPPSVDTGFCNFTQRIEKGLMTALFEVRKHHQGTYNLTVQILNITISSSRVTPRRGPVNIIFAVKSTQGFLNGSEVSELLRNLSVVEFSFYLGYPVLQIAEPFQYPQLNLSQLLKSSWVRTVLLGVMEKQLQNEVFQAEMERKLAQLLSEVSTRRRMWRRATVAAGNSVVQVVNVSRLEGDDNPVQLIYFVEDQDGERLSAVKSSDLINKMDLQRAAIILGYRIQGVIAQPVDRVKRPSPESQSNNLWVIVGVVIPVLVVMVIVVILYWKLCRTDKLDFQPDTVANIQQRQKLQIPSVKGFDFAKQHLGQHNKDDILIIHEPAPLPGPLKDHTTPSENGDVPSPKSKIPSKNVRHRGRVSPSDADSTVSEESSERDAGDKTPGAVNDGRSHRAPQSGPPLPSSGNEQHSSASIFEHVDRISRPPEASRRVPSKIQLIAMQPIPAPPVQRPSPADRVAESNKINKEIQTALRHKSEIEHHRNKIRLRAKRRGHYEFPVVDDLSSGDTKERHRVYRRAQMQIDKILDPTASVPSVFIEPRKSSRIKRSPKPRRKHQVNGCPADAEKDRLITTDSDGTYRRPPGVHNSAYIGCPSDPDLPADVQTPSSVELGRYPALPFPASQYIPPQPSIEEARQTMHSLLDDAFALVAPSSQPASTAGVGPGVPPGLPANSTPSQEERRATQWGSFYSPAQTANNPCSRYEDYGMTPPTGPLPRPGFGPGLLQSTELVPPDPQQPQASAEAPFAARGIYSEEMPSVARPRPVGGTTGSQIQHLTQVGIASRIGAQPVEIPPSRGSQYGGPGWPSYGEDEAGRREAVPRTSGREPSAPSGNLPHRGLQGPGLGYPTSSTEDLQPGHSSASLIKAIREELLRLSQKQSTVQNSTADRPRLADLPSIRFLWKQDQKEIN

SEQ ID NO: 920549 - protein, 172 aa, Homo sapiens
YTIWGPPQSIHFNSHNPRGMTSGFLSPPLGWPCEEARKYCERQGLGEPLWPTGGDQPSSHSQKRKCGRVLCCCSNQRQPSSKPQMTEPSPFNEGEFQVACVPQGLGLAQSGKVSIQKSSMTQRKPGENSQWLVITDSQWKLDLEAPLTNNVAIVESPHGHGIMLGSQQGLTF

SEQ ID NO: 920550 - protein, 525 aa, Homo sapiens
MATLLRSKLSNVATSVSNKSQAKMSGMFARMGFQAATDEEAVGFAHCDDLDFEHRQGLQMDILKAEGEPCGDEGAEAPVEGDIHYQRGSGAPLPPSGSKDQVGGGGEFGGHDKPKITAWEAGWNVTNAIQGMFVLGLPYAILHGGYLGLFLIIFAAVVCCYTGKILIACLYEENEDGEVVRVRDSYVAIANACCAPRFPTLGGRVVNVAQIIELVMTCILYVVVSGNLMYNSFPGLPVSQKSWSIIATAVLLPCAFLKNLKAVSKFSLLCTLAHFVINILVIAYCLSRARDWAWEKVKFYIDVKKFPISIGIIVFSYTSQIFLPSLEGNMQQPSEFHCMMNWTHIAACVLKGLFALVAYLTWADETKEVITDNLPGSIRAVVNIFLVAKALLSYPLPFFAAVEVLEKSLFQEGSRAFFPACYSGDGRLKSWGLTLRCALVVFTLLMAIYVPHFALLMGLTGSLTGAGLCFLLPSLFHLRLLWRKLLWHQVFFDVAIFVIGGICSVSGFVHSLEGLIEAYRTNAED

SEQ ID NO: 920551 - protein, 180 aa, Homo sapiens
CVLIAQLPLIMSEHVVLHPTSQWLSVDHLISYFIHKIGSVSKTSYIILLIHITKLPASSAQVSEGKFFLPSSPLGTYSLLLPLQLASSIFFLFSFTFNLTFFIEPSSSIYRPAHVPLNLTFYALYISKEARNADFLRYLSILNCWQLFLKNIVNTGEGNKMKIWANLVQRLWMSAHGFHG

SEQ ID NO: 920552 - protein, 180 aa, Homo sapiens; identical to SEQ ID NO: 920551

SEQ ID NO: 920553 - protein, 169 aa, Homo sapiens [sequence omitted]

SEQ ID NO: 920554 - protein, 97 aa, Homo sapiens
  misc_feature (2)..(2): Xaa can be any naturally occurring amino acid
NXCCNPLLISTATAVALLVSSKPKSAVPLVHVKETVSKPYVTESPAEDSNWVNKVFKKNKQKTSGTRKGFPRHSGSKKPSSKVQQVVVCCVPLQNRC

SEQ ID NO: 920555 - protein, 379 aa, Homo sapiens
MGETSVIQHLGIQMSSCRITYEYLRVLNVGVAEVKKSFLGPLSPSCKMVQMMRQFLYRVLPEDSYKALYCSCFVPVYCGLIPPTYRGVRYIDGGFTGMQPCAFWTDAITISTFSGQQDICPRDCPAIFHDFRMFNCSFQFSLENIARMTHALFPPDLVILHDYYYRGYEDAVLYLRRLSKYRWGPSCAQATQLHTWFITAHPTTWTVTSVTSAAGTTVWITSQIPTLSGTHFTQAIPGAFNCGGTSNTAPKFSFSLPCSATCGGTRPRTAPRVRVSRSTDAAGLRLSQVPRHDSGSVALLVSSKPKSAVPLVHVKETVSKPYVTESPAEDSNWVNKVFKKNKQKTSGTRKGFPRHSGSKKPSSKVQQVVVCCVPLQNRC

SEQ ID NO: 920556 - protein, 241 aa, Homo sapiens
MGELALSWAGSQVSSAVKSQVWCISQHCCVRCVGFIPDPTQDKVASLSSLVLTLEPHGGADILLEDIRKEIKELAVRGGRGSSKFKGPGVGCASMCKEQYRDRVAGTRCARERGEGNKRCLLGWRAFAKVLEKTQDGEEEPERPGKELVGRRGVVHSRDGVAGGWCCKEASRAGKERSRRSGQGPDLTGQGSPGKKFASYPVSHEQPGKVRQVSTGLALRAPWANATVLFVYSKLCISKRH

SEQ ID NO: 920557 - protein, 117 aa, Homo sapiens
MIFGNPWWEALLTAGKWTFLVTATTMILLPELLMEVVQSNRCSKKPFTYTVSFNPQSQGSPTPGATDRSMNPTVNCACEGSRLRAPYENLTPDDLSLSPITPRWDRLVAGKQAQGSH

SEQ ID NO: 920558 - protein, 117 aa, Homo sapiens; identical to SEQ ID NO: 920557

SEQ ID NO: 920559 - protein, 383 aa, Homo sapiens
MVKYHELQRSWVFAGETMKKRCSDVGLQSEDYTTPPHGPGELCFLDSLSKSAGCEMSSKPLWTALSEKKRYSHGNIPNFEYYETTGTKYVVQGVTHFKEWHCLSQKVKRGNWKIVSGPSDTAPPCVEKGKELHAYYSASYIQSETFLPNGINGIKDARKVTVGVIGSGDFAKSLTIRLIRCGYHVVIGSRNPKFASEFFPHVVDVTHHEDALTKTNIIFVAIHREHYTSLWDLRHLLVGKILIDVSNNMRINQYPESNAEYLASLFPDSLIVKGFNVVSAWALQLGPKDASRQVYICSNNIQARQQVIELARQLNFIPIDLGSLSSAREIENLPLRLFTLWRGPVYTSQVFWQLLINFITAPSIGDFHLGWKPGYSVENSLDY

SEQ ID NO: 920560 - protein, 338 aa, Homo sapiens
MVKYHELQRSWVFAGETMKKRCSDVGLQSEDYTTPPHGPGELCFLDSLSKSAGCEMSSKPLWTALSEKKRYSHGNIPNFEYYETTGTKYVVQGVTHFKEWHCLSQKVKRGNWKIVSGPSDTAPPCVEKGKELHAYYSASYIQSETFLPNGINGIKDARKVTVGVIGSGDFAKSLTIRLIRCGYHVVIGSRNPKFASEFFPHVVDVTHHEDALTKTNIIFVAIHREHYTSLWDLRHLLVGKILIDVSNNMRINQYPESNAEYLASLFPDSLIVKGFNVVSAWALQLGPKDASRQVYICSNNIQARQQVIELARQLNFIPIDLGSLSSESCRGYSRINYH

SEQ ID NO: 920561 - protein, 176 aa, Homo sapiens
MDLDGNHMTSFLLEKFQEVIHSREQGTENPQEVKEVLLPFTDYRLLCPSHSLNPMEEALLGPSEAAGSPPCESFRVPSHWLQVAKLWLQFKSLPWSWMFQKGHSVLQGCLCDPGFDLGKVAPHCRVEAICLLCLHERPSRTLSAFGVEVPCQKLQLSMLAVWPAYLLPFQRFLCPG

SEQ ID NO: 920562 - protein, 582 aa, Homo sapiens
VRMDNHMYILEEAALLTSYSRCNSRYSRDRISPRHSRAPNNKPYLFSTSHNLNSSACPLKPFANTSNLISCSSSIQPVLVGTASPLTFATMLLLLRHSVLHASASLGPRQRRRLARLSPSAPRLPSDQARSAARPRPPRRRPGPRSQPRARVGAERSRPAHYGPRLEAPPPPARGARMLARRKPMLPALTINPTIAEGPSPTSEGASEANLVDLQKKLEELELDEQQKRLEAFLTQKAKVGELKDDDFERTSELDAGNGGVVTKVQHRPSGLIMARKLIHLEIKPAIRNQIIREHQVLHECNSPYIVGFYGAFYCDREISICMEHMDGGSLDQGLKEAKRIPEDILGKVSIAVLRGLAYLREKHQIMHRNVKPSNILVNSRGEIKLCDFGVSGQLIDSMANSFVGTRSYMAPERLQGTHYSVQSVIWSMDLSLVELAIERYPIPPPDAKELEAIFGQPVVDREEGEPHSISSWPGSPGRPNSGYGMDSLPAMAIFELLDYIVKEPPPKLPNGVFTPDFQEFVNKCLIKNPTERADLKMLTNHAFIKRSEACLLSNHQAKHTLMNTSNSASKWTLTTLMLTTN

SEQ ID NO: 920563 - protein, 557 aa, Homo sapiens
VRMDNHMYILEEAALLTSYSRCNSRYSRDRISPRHSRAPNNKPYLFSTSHNLNSSACPLKPFANTSNLISCSSSIQPVLVGTASPLTFATMLLLLRHSVLHASASLGPRQRRRLARLSPSAPRLPSDQARSAARPRPPRRRPGPRSQPRARVGAERSRPAHYGPRLEAPPPPARGARMLARRKPMLPALTINPTIAEGPSPTSEGASEANLVDLQKKLEELELDEQQKRLEAFLTQKAKVGELKDDDFERTSELDAGNGGVVTKVQHRPSGLIMARKLIHLEIKPAIRNQIIREHQVLHECNSPYIVGFYGAFYCDREISICMEHMDGGSLDQGLKEAKRIPEDILGKVSIAVLRGLAYLREKHQIMHRNVKPSNILVNSRGEIKLCDFGVSGQLIDSMANSFVGTRSYMAPERLQGTHYSVQSVIWSMDLSLVELAIERYPIPPPDAKELEAIFGQPVVDREEGEPHSISSWPGSPGRPNSGYGMDSLPAMAIFELLDYIVKEPPPKLPNGVFTPDFQEFVNKCLIKNPTERADLKMLTNHAFIKRSEVKEADFAC

SEQ ID NO: 920564 - protein, 145 aa, Homo sapiens
MAAGGESGRPSLHPTVGARRALRVLHTNGEKCAFRSSPTEWACLREELLPTANPEFPPPATKPTAASPPVKPGSEQTVTPVGSAGWKGHWSRPRLGLGDTHRTLEEATPGPRERAQDPGGGHTWASGTGTSRGRTGKDRRGWAHI

SEQ ID NO: 920565 - protein, 831 aa, Homo sapiens
MENQRSSPLSFPSVPQEETLRQAPAGLPRETLFQSRVLPPKEIPSLSPTIPRQGSLPQTSSAPKQETSGWMPHVLQKGPSLLCSAASEQETSLQGPLASQEGTQYPPPAAAEQEVSLLSHSPHHQEAPVHSPEAPEKDPLTLSPTVPETDMDPLLQSPVSQKDTPFQISSAVQKEQPLPTAEITRLAVWAAVQAVERKLEAQAMRLLTLEGRTGTNEKKIADCEKTAVEFANHLESKWVVLGTLLQEYGLLQRRLENMENLLKNRNFWILRLPPGSNGEVPKVPVTFDDVAVHFSEQEWGNLSEWQKELYKNVMRGNYESLVSMDYAISKPDLMSQMERGERPTMQEQEDSEEGETPTDPSAAHDGIVIKIEVQTNDEGSESLETPEPLMGQVEEHGFQDSELGDPCGEQPDLDMQEPENTLEESTEGSSEFSELKQMLVQQRNCTEGIVIKTEEQDEEEEEEEEDELPQHLQSLGQLSGRYEASMYQTPLPGEMSPEGEESPPPLQLGNPAVKRLAPSVHGERHLSENRGASSQQQRNRRGERPFTCMECGKSFRLKINLIIHQRNHIKEGPYECAECEISFRHKQQLTLHQRIHRVRGGCVSPERGPTFNPKHALKPRPKSPSSGSGGGGPKPYKCPECDSSFSHKSSLTKHQITHTGERPYTCPECKKSFRLHISLVIHQRVHAGKHEVSFICSLCGKSFSRPSHLLRHQRTHTGERPFKCPECEKSFSEKSKLTNHCRVHSRERPHACPECGKSFIRKHHLLEHRRIHTGERPYHCAECGKRFTQKHHLLEHQRAHTGERPYPCTHCAKCFRYKQSLKYHLRTHTGE

SEQ ID NO: 920566 - protein, 911 aa, Homo sapiens
MELSGFRQPPTSLGVFLFKRPERDMPPRMQFVATWQLLCSSPAPVRAARARTDARPRGPGDGLRVPGSAARPGISVQQLDMENQRSSPLSFPSVPQEETLRQAPAGLPRETLFQSRVLPPKEIPSLSPTIPRQGSLPQTSSAPKQETSGWMPHVLQKGPSLLCSAASEQETSLQGPLASQEGTQYPPPAAAEQEVSLLSHSPHHQEAPVHSPEAPEKDPLTLSPTVPETDMDPLLQSPVSQKDTPFQISSAVQKEQPLPTAEITRLAVWAAVQAVERKLEAQAMRLLTLEGRTGTNEKKIADCEKTAVEFANHLESKWVVLGTLLQEYGLLQRRLENMENLLKNRNFWILRLPPGSNGEVPKVPVTFDDVAVHFSEQEWGNLSEWQKELYKNVMRGNYESLVSMDYAISKPDLMSQMERGERPTMQEQEDSEEGETPTDPSAAHDGIVIKIEVQTNDEGSESLETPEPLMGQVEEHGFQDSELGDPCGEQPDLDMQEPENTLEESTEGSSEFSELKQMLVQQRNCTEGIVIKTEEQDEEEEEEEEDELPQHLQSLGQLSGRYEASMYQTPLPGEMSPEGEESPPPLQLGNPAVKRLAPSVHGERHLSENRGASSQQQRNRRGERPFTCMECGKSFRLKINLIIHQRNHIKEGPYECAECEISFRHKQQLTLHQRIHRVRGGCVSPERGPTFNPKHALKPRPKSPSSGSGGGGPKPYKCPECDSSFSHKSSLTKHQITHTGERPYTCPECKKSFRLHISLVIHQRVHAGKHEVSFICSLCGKSFSRPSHLLRHQRTHTGERPFKCPECEKSFSEKSKLTNHCRVHSRERPHACPECGKSFIRKHHLLEHRRIHTGERPYHCAECGKRFTQKHHLLEHQRAHTGERPYPCTHCAKCFRYKQSLKYHLRTHTGE

SEQ ID NO: 920567 - protein, 796 aa, Homo sapiens
MELSGFRQPPTSLGVFLFKRPERDMPPRMQFVATWQLLCSSPAPVRAARARTDARPRGPGDGLRVPGSAARPGISVQQLDMENQRSSPLSFPSVPQEETLRQAPAGLPRETLFQSRVLPPKEIPSLSPTIPRQGSLPQTSSAPKQETSGWMPHVLQKGPSLLCSAASEQETSLQGPLASQEGTQYPPPAAAEQEVSLLSHSPHHQEAPVHSPEAPEKDPLTLSPTVPETDMDPLLQSPVSQKDTPFQISSAVQKEQPLPTAEITRLAVWAAVQAVERKLEAQAMRLLTLEGRTGTNEKKIADCEKTAVEFANHLESKWVVLGTLLQEYGLLQRRLENMENLLKNRNFWILRLPPGSNGEVPKVPVTFDDVAVHFSEQEWGNLSEWQKELYKNVMRGNYESLVSMDYAISKPDLMSQMERGERPTMQEQEDSEEGETPTDPSAAHDGIVIKIEVQTNDEGSESLETPEPLMGQVEEHGFQDSELGDPCGEQPDLDMQEPENTLEESTEGSSEFSELKQMLVQQRNCTEGIVIKTEEQDEEEEEEEEDELPQHLQSLGQLSGRYEASMYQTPLPGEMSPEGEESPPPLQQRNCTEGIVIKTEDKCPECDSSFSHKSSLTKHQITHTGERPYTCPECKKSFRLHISLVIHQRVHAGKHEVSFICSLCGKSFSRPSHLLRHQRTHTGERPFKCPECEKSFSEKSKLTNHCRVHSRERPHACPECGKSFIRKHHLLEHRRIHTGERPYHCAECGKRFTQKHHLLEHQRAHTGERPYPCTHCAKCFRYKQSLKYHLRTHTGE

SEQ ID NO: 920568 - protein, 181 aa, Homo sapiens [sequence omitted]

SEQ ID NO: 920569 - protein, 219 aa, Homo sapiens
MWGQRHQPSKTPSSGSGGGGPKPYKCPECDSSFSHKSSLTKHQITHTGERPYTCPECKKSFRLHISLVIHQRVHAGKHEVSFICSLCGKSFSRPSHLLRHQRTHTGERPFKCPECEKSFSEKSKLTNHCRVHSRERPHACPECGKSFIRKHHLLEHRRIHTGERPYHCAECGKRFTQKHHLLEHQRAHTGERPYPCTHCAKCFRYKQSLKYHLRTHTGE

SEQ ID NO: 920570 - protein, 685 aa, Homo sapiens
MELSGFRQPPTSLGVFLFKRPERDMPPRMQFVATWQLLCSSPAPVRAARARTDARPRGPGDGLRVPGSAARPGISVQQLDMENQRSSPLSFPSVPQEETLRQAPAGLPRETLFQSRVLPPKEIPSLSPTIPRQGSLPQTSSAPKQETSGWMPHVLQKGPSLLCSAASEQETSLQGPLASQEGTQYPPPAAAEQEVSLLSHSPHHQEAPVHSPEAPEKDPLTLSPTVPETDMDPLLQSPVSQKDTPFQISSAVQKEQPLPTAEITRLAVWAAVQAVERKLEAQAMRLLTLEGRTGTNEKKIADCEKTAVEFANHLESKWVVLGTLLQEYGLLQRRLENMENLLKNRNFWILRLPPGSNGEVPKVPVTFDDVAVHFSEQEWGNLSEWQKELYKNVMRGNYESLVSMDYAISKPDLMSQMERGERPTMQEQEDSEEGETPTDPSAAHDGIVIKIEVQTNDEGSESLETPEPLMGQVEEHGSSSGSGGGGPKPYKCPECDSSFSHKSSLTKHQITHTGERPYTCPECKKSFRLHISLVIHQRVHAGKHEVSFICSLCGKSFSRPSHLLRHQRTHTGERPFKCPECEKSFSEKSKLTNHCRVHSRERPHACPECGKSFIRKHHLLEHRRIHTGERPYHCAECGKRFTQKHHLLEHQRAHTGERPYPCTHCAKCFRYKQSLKYHLRTHTGE

SEQ ID NO: 920571 - protein, 429 aa, Homo sapiens
MELSGFRQPPTSLGVFLFKRPERDMPPRMQFVATWQLLCSSPAPVRAARARTDARPRGPGDGLRVPGSAARPGISVQQLDMENQRSSPLSFPSVPQEETLRQAPAGLPRETLFQSRVLPPKEIPSLSPTIPRQGSLPQTSSAPKQETSGWMPHVLQKGPSLLCSAASEQETSLQGPLASQEGTQYPPPAAAEQEVSLLSHSPHHQEAPVHSPEAPEKDPLTLSPTVPETDMDPLLQSPVSQKDTPFQISSAVQKEQPLPTAEITRLAVWAAVQAVERKLEAQAMRLLTLEGRTGTNEKKIADCEKTAVEFANHLESKWVVLGTLLQEYGLLQRRLENMENLLKNRNFWILRLPPGSNGEVPKVPVTFDDVAVHFSEQEWGNLSEWQKELYKNVMRGNYESLVSMGKEKPSLAGGCLDASSKCIHKLREF

SEQ ID NO: 920572 - protein, 183 aa, Homo sapiens
APGFALSRVAGRAASTAAEFRAAHRPPPQVGFPALLPRHRSAMKMHFCIPVSQQRSDALGGRYVLYSVHLDGFLFCRVRYSQLHGWNEQLRRVFGNCLPPFPPKYYLAMTTAMADERRDQLEQYLQNAAPAEGEDPALPSFFRGSENCTEHRNLEDVPDRRRKGSKGQWATNSSHPDQWQRVG

SEQ ID NO: 920573 - protein, 134 aa, Homo sapiens
MGKDGIFGSSSGDPPLISLHFRPGLRGAFPARGRRGDGMEEREEDAPASRGKWVQPEDGTMFPWRMAQAPSRPGWSQSQACPRSLASVLVATPGPPSASHDVYPSLAPVEIMFKRKHPGGHNDNNNTTTCAPWV

SEQ ID NO: 920574 - protein, 137 aa, Homo sapiens
MQAALTAFFVLLFSLLSLLGIAANGFIVLVLGREWLRYGRLLPLDMILISLGASRFCLQLVGTVHNFYYSAQKVEYSGGLGRQFFHLHWHFLNSATFWFCSWLSVLFCVKIANITHSTFLWLKWRFPGWVPWLLLGS

SEQ ID NO: 920575 - protein, 692 aa, Homo sapiens
ANILDPRGSRMIEWRHLKPFCCGITNMSFPLSDQPVLGEWFIFVEMQGHAYNKSFEVQKYVLPKFELLIDPPRYIQDLDACETGTVRARYTFGKPVAGALTINMTVNGVGYYSHEVGRPVLRTSKILGSRDFDICVRDMIPADVPEHFRGRVSIWAMVTSVDGSQQVAFDDSTPVQRQLVDIRYSKDTRKQFKPGLAYVGKVELSYPDGSPAEWVTVQIKAELTPKDNIYTSEVVSQGGLVGFEIPSIPTSAQHVWLETKVMALNGKPVGAQYLPSYLSLGSWYSPSQCYLQLQPLSHPLQVGEEAYFSDKYTCPCNFTLYYEVAARGNIVLSGQQPAHITQQRSKRAAPALEKPIRLTHLSETEPPPAPEAEVDVCVTSLRLAVTPSMVPLGRLLVFYVRENGEGVADSLQFAVETFFENQVSVTYSANETQPGEVVDLRIRAARGSCVCVAAVDKSVYLLRSGFRLTPAQVFQELEDYDVSDSFGVSREDGPFWWAGLTAQRRRRSSVFLWPWGITKDSGFAFTVRRGGLRSRCPLLRSSCLEIRVLEIQKWVGNRIGSFSFFFSKWGLALWPRLECSGVPEQGQALRSFNKYFLSEIKDFTHIKKVLPWGLAERNYRLLLTSKETDCYSGTYVTRKKHFHKEFDLMASCGHRTLIVMTQPVFPVILMNSQQNQIVILLFSLYTDIFSCS

SEQ ID NO: 920576 - protein, 101 aa, Homo sapiens
TLVLLDILDKDFTHIKKVLPWGLAERNYRLLLTSKETDCYSGTYVTRKKHFHKEFDLMASCGHRTLIVMTQPVFPVILMNSQQNQIVILLFSLYTDIFSCS

SEQ ID NO: 920577 - protein, 155 aa, Homo sapiens
LSLSPMFWAAKHPKAKHSGPHPWLSSKEVTAAFQEISGKLVPPGRVKSKRPWRIGCILGSLVVLPANASTSADNHPQSKTTGQKLLEATNSPVLEHHNGCPTIQFNYDMLCLELASDPSRLRAQLHKTTPFTCQQQIWGPSYPHFCPADYKFWFP

SEQ ID NO: 920578 - protein, 155 aa, Homo sapiens; identical to SEQ ID NO: 920577

SEQ ID NO: 920579 - protein, 200 aa, Homo sapiens
MWTEEAGATAEAQESGIRNKSSSSSQIPVVGVVTEDDEAQDVFKPMDLNRVIKLLEETDKDGLEEKQLKFVKKLVQCYQNGLPLRDLAQIFKILNLCSGKIKNQPRFIESAYDIIKLCGLPFLKKKVSDEITYAEDTANSIALLGDLMKIPSSELRIQICKCIVDFYHAEPPKKHIPGEVYNGLSVITCVCRKQNILISL

SEQ ID NO: 920580 - protein, 297 aa, Homo sapiens
MTVPAEVCGTPSYLAPEIIECSMNEDHPGYGKEVDMWSTGVIMYTLLAGSPPFWHRKQMLMLRMIMSGNYQFGSPEWDDYSDTVKDLVSRFLVVQPQNRYTAEEALAHPFFQQYLVEEVRHFSPRGKFKESLHPVNFQSTHPSPPSCPVMASKTAGVSPLARSLRMLAKWEVGDTRKAPQKPPKASWQTSPERPCAGGAGPGRAGAAAQLLRLALQVIALTVLASVRIYYQYRRVKPVTREIVIRDPYALRPLRRLIDAYAFRIYGHWVKKGQQQNRAALFENTPKAVLLSLAEEDY

SEQ ID NO: 920581 - protein, 490 aa, Homo sapiens
MKWAQQVLQRLQMFWSNFASLRYLFLGNPDHALVYQKYVEMTTLLDQFESRIYNEWKSNVDEICEFNLNQPLVKFSAINGLLCVNFDPKYIGNLDLLVQGYNKLKQTLLEVEYPLIEDELRAIDEQLTAATTWLTWQDDCWGYIERVRAATSELEHRVERTQKNVKVIQQTMRGWARCVLPPRREHRREAAFTLEDKGDLFTKKYKLIQGDGCKIHNLVEENRKLFKANPSLDTWKIYVEFIDDIVVEGFFQAIMHDLDFFLKNTEKQLKPAPLNELQEFIKETDSGLQRELNEGDHDGLVDIMVHLLAVRSRQRATDELFEPLKETITLLESYGQKMPEQVYIQLEEIWSLNKEVRVWDAYTGLEGTVKDMTASLRAITELQSPALRDRHWHQLMKAIGVKFLINEATTLADLLALRLHRVEDDVRRIVDKAVKELGTEKVITEISQTWATMKFSYEVHYRTGIPLLKSDEQLFETLEHNQGTRAQCAG

SEQ ID NO: 920582 - protein, 159 aa, Homo sapiens
MTSLNADTGYNLFTSLRKLDAGEARSHRSQQTNTRTENQTPYVLTHKWELNNENTWTQRGEHHTPGPIDVNGLKALPTQSCSPSSNSYDTFLVSPLHPFQDPPGITRSASATMNCWKFPATLFPASAHTVPLPVKVLPVFLAHPCLSPAQTSPPASSQS

SEQ ID NO: 920583 - protein, 79 aa, Homo sapiens
HRKLHARGSAEAGVLRAWEHVGEHAGTAGANGFERMRPTRHFTVAMTTGRSATAAGTRPLRLPGESGLSGPRLTRLGCA

SEQ ID NO: 920584 - protein, 144 aa, Homo sapiens
WIGRISIVKMAILFKVIYRFSAIPIILPSIFFTELEKTSLKLVWKQNRALISQDKPKQKEQSGRYQATQLQTILQGYCNQNSMRKRESLESCEEISDINWHVLKESLWMLCGENTEKGLKWKLQAQYYRSVDFSYNVSMRKSKS

SEQ ID NO: 920585 - protein, 144 aa, Homo sapiens; identical to SEQ ID NO: 920584

SEQ ID NO: 920586 - protein, 233 aa, Homo sapiens
MPSSLGKPKGHPHMNSIRIDGDITLGGLFPVHGRGSEGKPCGELKKEKGIHRLEAMLFALDRINNDPDLLPNITLGARILDTCSRDTHALEQSLTFVQALIEKDGTEVRCGSGGPPIITKPERVVGVIGASGSSVSIMVANILRLFKVSALVGPLSLVALTEVLKQHLPLEARLVALTEVLKQHLPLEARTGVLMGVKNTFWWAPKPSGCSLYNALLWAQPRLWRKSGLGLNP

SEQ ID NO: 920587 - protein, 300 aa, Homo sapiens
MMLTWMVSVASMVRKLVYEQEIQIEEGVQMCPSVRSGVPNPWAMEQSVACWELSLTAGGIQWNNMYQALEQGGMTFGWVCWMILFDSSLYFLCGWYLSNLIPGTFGLRKPWYFPFTASYWKSVGFLVEKRQYFLSSSLFFFNENFDNKGSSLQNREGELEGSAPGVTLVSVTKEYEGHKAVVQDLSLTFYRDQITALLGTNGAGKTTIISMLTGLHPPTSGTIIINGKNLQTDLSRVRMELGVCPQQDILLDNLTVREHLLLFASIKAPQWTKKELHQQVNQLVNSCLSAPPASAHCVRK

SEQ ID NO: 920588 - protein, 241 aa, Homo sapiens
MARGSAVAWAALGPLLWGCALGLQGGMLYPQESPSRECKELDGLWSFRADFSDNRRRGFEEQWYRRPLWESGPTVDMPVPSSFNDISQDWRLRHFVGWVWYEREVILPERWTQDLRTRVVLRIGSAHSYAIVWVNGVDTLEHEGGYLPFEADISNLVQVGPLPPGSDITIAINNTLTPTTLPPGTIQYLTDTSKYPKGYFVQNTYFDFFNYAGLQRSVLLYTTPTTYIDDITVTTSVEQDS

SEQ ID NO: 920589 - protein, 134 aa, Homo sapiens
MSAPRGINFQHSRSCLNVGPQGSLGVEISKAVDNSGKAFTSCLSTALRPARAYTAARWNYTQCPAYAKVLPPLVMLLPVLTPPSQLDPAEQPGICVRDAPQSHPDTGEAGVFIPRPSVTGAGLLLGHSPQHLQR

SEQ ID NO: 920590 - protein, 134 aa, Homo sapiens; identical to SEQ ID NO: 920589

SEQ ID NO: 920591 - protein, 187 aa, Homo sapiens
MRTSIKPSTGPGYVRLCYYPNTFSSAEQATEHMQTLINTTGVQAMDIWTNALKQPGGDLSHYNIGAAAAPGGGCTRAEIVTSKRHLLLVTLVLGILQGRSQCQLLSDVFPEVEFCCSPPPTPSPIALSTVTGSMGHEEEPGHPGRAGAVKGTLTKPEAMETGDAPRTRNRGLGAGNCISTPRTVPGT

SEQ ID NO: 920592 - protein, 182 aa, Homo sapiens
MVHLGPPMECLTTVDKWDIKVGRQRAVSIDSQTKLVFTSFDSPDLDKLQNAKGIRQNVAARSSGAEGRCDGILQKALPDQYKKLSTSVLTANSWKKDSPYQTPNALNQGKVLHGAITVLSNFLQKLALPEVALGYLNILDKVLAVTTYSCIEQKPNISGITKSGSVFLAYQALQGCTAATLT

SEQ ID NO: 920593 - protein, 279 aa, Homo sapiens
MNCTNWSPLSPFPDFWLGSTNEGLLPQGIGAGGPSQPLTFPDQTQADPLAGLAAPGGTHASCPGKNTVLESEAIISSGLTVSWSLTNIDEKGEPSRPRFPSASSPSRWSIGRKLAIQIHQALEDARQKLRDNLRSDIPSLLRFLEWKGLGKGVNAKKCESLRPFRILTIKVEVKQGWMKTQDKEECTSGDWHGDTEQGGNPKKGKHGIKKKRTQDSSKGNSQMRSVSEQCQIKETFTIKMLPAPQCHSTESLQRQHSPEYGTNIEMDKAHHSSRLTINS

SEQ ID NO: 920594 - protein, 557 aa, Homo sapiens
MATPSAAFEALMNGVTSWDVPEDAVPCELLLIGEASFPVMVNDMGQVLIAASSYGRGRLVVVSHEDYLVEAQLTPFLLNAVGWLCSSPGAPIGVHPSLAPLAKILEGSGVDAKVEPEVKDSLGVYCIDAYNETMTEKLVKFMKCGGGLLIGGQAWDWANQGEDERVLFTFPGNLVTSVAGIYFTDNKGDTSFFKVSKKMPKIPVLVSCEDDLSDDREELLHGISELDISNSDCFPSQLLVHGALAFPLGLDSYHGCVIAAARYGRGRVVVTGHKVLFTVGKLGPFLLNAVRWLDGGRRGKIVVQTELRTLSGLLAVGGIDTSIEPNLTSDASVYCFEPVSEVGVKELQEFVAEGGGLFVGAQAWWWAFKNPGVSPLARFPGNLLLNPFGISITSQSLNPGPFRTPKAGIRTYHFRSTLAEFQVIMGRKRGNVEKGWLAKLGPDGAAFLQIPAEEIPAYMSVHRLLRKLLSRYRLPVATRENPVINDCCRGAMLSLATGLAHSGSDLSLLVPEIEDMYSSPYLRPSESPITVEVNCTNPGKEQGLEAQYYGNGGMGTG

SEQ ID NO: 920595 - protein, 557 aa, Homo sapiens; identical to SEQ ID NO: 920594

SEQ ID NO: 920596 - protein, 193 aa, Homo sapiens
SFEPAALCLLGGEAASSWEQPPPAPSRLLLPRTRAAGNSGANKTNRAMATPSAAFEALMNGVTSWDVPEDAVPCELLLIGEASFPVMVNDMGQVLIAASSYGRGRLVVVSHEDYLVEAQLTPFLLNAVGWLCSSPGAPIGVHPSLAPLAKILEGSGVDAKVEPEVKDSLGVYCIDAYNETMTEQDKKQKTNQK

SEQ ID NO: 920597 - protein, 151 aa, Homo sapiens
RNVLRKFMNLCWAVFKPWAVFKAVLGHMRPVGHGQKRSLFSLHEGELNCVRQENFVVVDVVLNIGGWWILALGPLKQLNEADTCHVSWLSSNFLNSPLLYLGNVLLCDLPEITQPRVWQSLRFQARLSDARPSQLSYASTAPRTSPWSTCQ

SEQ ID NO: 920598 - protein, 338 aa, Homo sapiens
MRAPSYSPTPPAGEASPSYSEGSFLCPGRCLETWLPDVQAPGACPLLLPLLLDSLTFLLCHKQPGSFPTQGPCVTDHSPPGCCPQPCAWLPLLTFQGSARCHLLGSRETQENYTDVASDHTELTFSLRSQTLREVNKSLNKTIPENKNANMKREQPLQTELQDPRGLFNPQKQGSQEARAFGGGERSQQGEGRGPSERLSRQAIEGTWARDEALQPSEQLRQQSLTSQQGALAAGKLGLTPGHCPLEPLASTCPPTAMVMAPQQEEAQQPPGAPACGAITSRPSVVAGAATLGLLSASRWERRKEENPQQLPVLPLHWARAVSHRLSGQEAGHHPGSV

SEQ ID NO: 920599 - protein, 254 aa, Homo sapiens
FPFMADNGNPQTGLARSSGRGRAIPLGSGFHLVEAGPSLPSVGTQRDLLSLSEGTQPPSYVLRAAVVGSGLSIPRAHPHAQPESKPSRLPSAICTGPRCHRPRTLRNSGRSPSSSHLLGLSVRRCCRQEATGSSCLPEIGAGQAPHQPLALWTWVVNRLKGTETTQKAGRGPTSLRLRWDNPRSGHPRARGPGVPVTSPGDVTSEGGGFARFLHRWGRDLDLEHRVDLGEMTSSPLKSKEVCLFIKIQMSGGDN

SEQ ID NO: 920600 - protein, 562 aa, Homo sapiens
AFSSTNQDCAHCACTMRACESDTRDPETDKHTEDQSPSTPLPQPAAEKNSYLYSTEITLWTVVAAIQALEKKVDSCLTRLLTLEGRTGTAEKKLADCEKTAVEFGNQLEGKWAVLGTLLQEYGLLQRRLENVENLLRNRNFWILRLPPGSKGEAPKVPVTFDDVAVYFSELEWGKLEDWQKELYKHVMRGNYETLVSLDYAISKPDILTRIERGEEPCLDRWGQEKGNEVEVGRPRMMGTGLPPYPEHLTSPLSPAQEELKEGQAPKQQQDSEARVAPAGPEAGGGVAIKTEAQSEDEMTPERLFLGVSRGQTECRIPRGPRNRPGGPSRHQAQGMPRVRAGEPRPPGASGETPRVLSRRRQRAFPCPDCGQSFRLKINLTIHQRTHVEEGRQEAPGRSPTSCGDSQAMLEPGEVVVPGPVIRWLPEEPEGRRSVAGGRALVGRRPAASKMYHCSECLRFFQQRKSLLLHQRLHTGNGQGWPACPYCGKAFRRPSDLFRHQRIHTGERPYQCPQCGRTFNRNHHLAVHMQTHARGQVGPHFPAAPARHGSLPLPWPSRKEEG

SEQ ID NO: 920601 - protein, 268 aa, Homo sapiens
AFSSTNQDCAHCACTMRACESDTRDPETDKHTEDQSPSTPLPQPAAEKNSYLYSTEITLWTVVAAIQALEKKVDSCLTRLLTLEGRTGTAEKKLADCEKTAVEFGNQLEGKWAVLGTLLQEYGLLQRRLENVENLLRNRNFWILRLPPGSKGEAPKVPVTFDDVAVYFSELEWGKLEDWQKELYKHVMRGNYETLVSLDYAISKPDILTRIERGEEPCLDRWGQEKGNEVEVGRPRMMGTDSVMTCLAIITVISCLLNSCAAVSFCGT

SEQ ID NO: 920602 - protein, 346 aa, Homo sapiens
AFSSTNQDCAHCACTMRACESDTRDPETDKHTEDQSPSTPLPQPAAEKNSYLYSTEITLWTVVAAIQALEKKVDSCLTRLLTLEGRTGTAEKKLADCEKTAVEFGNQLEGKWAVLGTLLQEYGLLQRRLENVENLLRNRNFWILRLPPGSKGEAPKVPVTFDDVAVYFSELEWGKLEDWQKELYKHVMRGNYETLVSLDYAISKPDILTRIERGEEPCLDRWGQEKGNEVEVGRPRMMGTGLPPYPEHLTSPLSPAQEELKEGQAPKQQQDSEARVAPAGPEAGLALRTDLQGEAQICSAEISLPAIVAAVQVVEKKMEPQAAWLQSLEGCMWTAKKKLADCEKVA

SEQ ID NO: 920603 - protein, 268 aa, Homo sapiens; identical to SEQ ID NO: 920601

SEQ ID NO: 920604 - protein, 152 aa, Homo sapiens
MYGYLRGKRTALSDVVFLKIIRLSTEHITTGKGEGKTHATEYSVSPTKVEATSTSWPPLDPHGKGSVSEKAVAPLAGMLTLMTVKRPGGQHRGGWQGKGWHGSLFAPPWPGSNCFGKNIAIKRQQKEITQVFRPSSILVWVFSPGNEPDRPK

SEQ ID NO: 920605 - protein, 535 aa, Homo sapiens
MDFGHISVIELLHSLFDLVLGGFNIHSEHKCVVVFYLLHGRLSGQRKLCDSIVRPEPSSHLPPDTGRFGTNSAGHRMVDLLPPLSRSLKPATLSPTPTPLNMALPLTQWRNWAPSEGAATYPPTHQRVCFLRQLPFTISQCLSPFPSALHHSPVPLTISQCPSPFPSAPHHFPVPFTIPQCPSPFPSALHHFPVPFTISQCPSPFPSALHHFPVPFTISQCPSPFPSVPHHFPVPLTIPQCPSPFPSASHHSPVPFTISQCPSPFPSTLHHSPVSLTISQCLSPFPSALHHFPVPFTISQCPSPFPSVPHHFPVPFTIPQCPSPFPSALHHSPVSLTISQCLSPFPSALHHSPVPLTISQCLSPFPSALHHFPVLLTISQCPSPFPSALHHSPVPFTIPQCPSPFPSASHHSSVPDALSSLDMHTYCYLGWPPFCPAQALPVLLDDSGSSWCHLTLFLEPEIGGKRSNDTAQWMPIGCCLSSLQLWQHNNYLGGSEKCWCPDVTPGECNQKRMASVPFRSFSGDSAKRGARDPQL

SEQ ID NO: 920606 - protein, 535 aa, Homo sapiens; identical to SEQ ID NO: 920605

SEQ ID NO: 920607 - protein, 218 aa, Homo sapiens
ELLTSLPLASLPASGRLECLVLQAPSGSDKAGTMSTFGYRRGLSKYESIDEDELLASLSAEELKELERELEDIEPDRNLPVGLRQKSLTEKTPTGTFSREALMAYWEKESPPPPPPPPPLPEKKLITRNIAEVIKQQESAQRALQNGQKKKKGKKVKKQPNSILKEIKNSLRSVQEKKMEDSSRPSTPQRSAHENLMEAIRGSSIKQLKRVEVPEALR

SEQ ID NO: 920608 - protein, 536 aa, Homo sapiens
ELLTSLPLASLPASGRLECLVLQAPSGSDKAGTMSTFGYRRGLSKYESIDEDELLASLSAEELKELERELEDIEPDRNLPVGLRQKSLTEKTPTGTFSREALMAYWEKESQKLLEKERLGECGKVAEDKEESEEELIFTESNSEVSEEVYTEEEEEESQEEEEEEDSDEEERTIETAKGINGTVNYDSVNSDNSKPKIFKSQIENINLTNGSNGRNTESPAAIHPCGNPTVIEDALDKIKSNDPDTTEVNLNNIENITTQTLTRFAEALKDNTVVKTFSLANTHADDSAAMAIAEMLKVNEHITNVNVESNFITGKGILAIMRALQHNTVLTELRFHNQRHIMGSQVEMEIVKLLKENTTLLRLGYHFELPGPRMSMTSILTRNMDKQRQKRLQEQKQQEGYDGGPNLRTKVWQRGTPSSSPYVSPRHSPWSSPKLPKKVQTVRSRPLSPVATPTSSSSPSSTPREKAHYQKHCRSHQTTGECPTGITKWTKKEKREKGQETAKQYSKGNKKFSEVSAREENGRQFPTFYPTEISS

SEQ ID NO: 920609 - protein, 351 aa, Homo sapiens
ELLTSLPLASLPASGRLECLVLQAPSGSDKAGTMSTFGYRRGLSKYESIDEDELLASLSAEELKELERELEDIEPDRNLPVGLRQKSLTEKTPTGTFSREALMAYWEKESQKLLEKERLGECGKVAEDKEESEEELIFTESNSEVSEEVYTEEEEEESQEEEEEEDSDEEERTIETAKGINGTVNYDSVNSDNSKPKIFKSQIENINLTNGSNGRNTESPAAIHPCGNPTVIEDALDKIKSNDPPPPPPPPPLPEKKLITRNIAEVIKQQESAQRALQNGQKKKKGKKVKKQPNSILKEIKNSLRSVQEKKMEDSSRPSTPQRSAHENLMEAIRGSSIKQLKRVEVPEALR

SEQ ID NO: 920610 - protein, 577 aa, Homo sapiens
ELLTSLPLASLPASGRLECLVLQAPSGSDKAGTMSTFGYRRGLSKYESIDEDELLASLSAEELKELERELEDIEPDRNLPVGLRQKSLTEKTPTGTFSREALMAYWEKESQKLLEKERLGECGKVAEDKEESEEELIFTESNSEVSEEVYTEEEEEESQEEEEEEDSDEEERTIETAKGINGTVNYDSVNSDNSKPKIFKSQIENINLTNGSNGRNTESPAAIHPCGNPTVIEDALDKIKSNDPDTTEVNLNNIENITTQTLTRFAEALKDNTVVKTFSLANTHADDSAAMAIAEMLKVNEHITNVNVESNFITGKGILAIMRALQHNTVLTELRFHNQRHIMGSQVEMEIVKLLKENTTLLRLGYHFELPGPRMSMTSILTRNMDKQRQKRLQEQKQQEGYDGGPNLRTKVWQRGTPSSSPYVSPRHSPWSSPKLPKKVQTVRSRPLSPVATPPPPPPPPPPPPPSSQRLPPPPPPPPPPLPEKKLITRNIAEVIKQQESAQRALQNGQKKKKGKKVKKQPNSILKEIKNSLRSVQEKKMEDSSRPSTPQRSAHENLMEAIRGSSIKQLKRIPTLV

SEQ ID NO: 920611 - protein, 524 aa, Homo sapiens
ELLTSLPLASLPASGRLECLVLQAPSGSDKAGTMSTFGYRRGLSKYESIDEDELLASLSAEELKELERELEDIEPDRNLPVGLRQKSLTEKTPTGTFSREALMAYGKRSPKNSWRRRGWGNVERLQKTKRKVKKSLSLLKVTEEESQEEEEEEDSDEEERTIETAKGINGTVNYDSVNSDNSKPKIFKSQIENINLTNGSNGRNTESPAAIHPCGNPTVIEDALDKIKSNDPDTTEVNLNNIENITTQTLTRFAEALKDNTVVKTFSLANTHADDSAAMAIAEMLKVNEHITNVNVESNFITGKGILAIMRALQHNTVLTELRFHNQRHIMGSQVEMEIVKLLKENTTLLRLGYHFELPGPRMSMTSILTRNMDKQRQKRLQEQKQQEGYDGGPNLRTKVWQRGTPSSSPYVSPRHSPWSSPKLPKKVQTVRSRPLSPVATPTSSSSPSSTPREKAHYQKHCRSHQTTGECPTGITKWTKKEKREKGQETAKQYSKGNKKFSEVSAREENGRQFPTFYPTEISS

SEQ ID NO: 920612 - protein, 138 aa, Homo sapiens
MHGKRRIKVADGIKVAHQLTLTRIILVYLMLTQRTLEDGGRSKSFLSRRVGPSAPWRGECADSGSRASQALSGASARTLAHAATAQMTACAFQGAWQTLSVKELRHEKVPIRRIPRPLHSLCKGTACVRTKTNQTPTM

SEQ ID NO: 920613 - protein, 1046 aa, Homo sapiens
DLLRLIHSHENSMGRTCLRDSVTSHWVLLTKHGNSSILRLDELDKETKGDKPAENRALEKTEFGEQEEETKRRQQESEDIRIQLVKDARRFDGVDAEFKKRKILCGPKVVTVLITFIFIKTVCFYIAFDLHLRVEKQNLEKIVLISTAPYCTFMQELMFKTAKVENVLEATCRPNLYEKLKDLQSRLSLCEKALAEYLETKRIAFPRFYFVSSADLLDILSKGAQPKQVTCHLAKLFDSIADLQFEDNQDVSAHRAVGMYSKEKEYVPFQAECECVGHQVLNTYYASDARSGFGEFRNGPCLRGALRPIEKMDMHIIMEVVSPQAFTWLSQLRHRWEDTQKHCFVNICDAQFQYFYEYLGNSPRLVITPLTDSGAPAGPAGTGKTETTKDLGRALGMMVYVFNCSEQMDYKSIGNIYKGLVQTGAWGCFDEFNRISVEVLSVVAVQVKMIHDAIRNRKKRFVFLGEAITLKPSVGIFITMNPGYAGRTELPENLKALFRQEFLKIYAMRVIVLHCPCKIFVWLWHQSSADIMKPCAMVAPDIELICEILLVAEGFVDARALARKFITLYTLCKELLSKQDHYDWGLRAIKSVLVVAGSLKRGDKNRPEDQVLMRALRDFNMPKIVTDDIPVFLGLVGDLFPALDVPRRRKLHFEQMVRQSTLELRLQPEESFILKVVQLEELLAVRHSVFVVGNAGTGKSKILRTLNRTYVNMKQKPVWNDLNPKAVTTDELFGFIHHATREWKDGKYVTFYKSPQLFMKEGFCYLCLAYGKLSLFSSILREQANLKHDGPKWIVLDGDIDPMWIESLNTVLTLASNERIALTPFMRLLFEIHHLRSATPATVSRAGILYVNPQDLGWNPYVASWIDRRRHQSEKANLTILFDKYVPACLDKLRTSFKTITSIPESSLVQESLGQVILWMHRGITGPGHHVDMAVTGPDHPRDIGVSGPDYPMDIGVTGPDHPVDMGITGTGHPVDMGITGPGHPISDYQADFSRWWQKEMKAVKFPSQGTIFDYYVDHKTKKLLPWADKIAQFTMDPDVPLQYQL

SEQ ID NO: 920614 - protein, 556 aa, Homo sapiens
MAEAVAAPISPWTMAATIQAMERKIESQAARLLSLEGRTGMAEKKLADCEKTAVEFGNQLEGKWAVLGTLLQEYGLLQRRLENVENLLRNRNFWILRLPPGSKGESPKVPVTFDDVAVYFSEQEWGKLEDWQKELYKHVMRGNYETLVSLDYAISKPEVLSQIEQGKEPCNWRRPGPKIPDVPVDPSPGSGPPVPAPDLLMQIKQEGELQLQEQQALGVEAWAAGQPDIGEEPWGLSQLDSGAGDISTDATSACSDGTLKLNTAASTEDVKIVIKTEVQEEEVVATPVHPTDLEAHGTLFGPGQATRFFPSPAQEGAWESQGSSFPSQDPVLGLREPARPERDMGELSPAVAQEETPPGDWLFGGVRWGWNFRCKPPVGLNPRTGPEGLPYSSPDNGEAILDPSQAPRPFNEPCKYPGRTKGFGHKPGLKKHPAAPPGGRPFTCATAAVGRPTGRARAQAVAAAAVAAAVAAAVGAAHGMAAPFGVGSAAVASRAPRTSSAIACCTPASGPSPAPSVRSASPNAPSSSTTTERTRACGPSPAPSKFNDVCKVPFAI

SEQ ID NO: 920615 - protein, 167 aa, Homo sapiens
EQQLKRSTKMCIFSNVLFRRVHRSDKKKKGHCRGQSQEVWRVVDKELLQEAEQGLSQQEQPSTSDRWVNEHSSSSGTALSMGNRIRPCRKERVGLKDKHDLDGCRVGNRNKDMDVLSIFHARWVLRNADQIYENHRIMQCPGASSNRALLPLCYGLNCVPPKDMLKL

SEQ ID NO: 920616 - protein, 152 aa, Homo sapiens
MLCRGKRFSMSASVASPKAPPPSRGAHRNSRRGCWVFQERPDAGRWPPVATGLGRMEAPAERALPRLQALARPPPPISYEEELYDCLDYYYLRDFPACGAGRSKGRTRREQALRTNWPAPGGHERKVAQKLLNGQRKRRQRQLHPKMRTRLT

SEQ ID NO: 920617 - protein, 256 aa, Homo sapiens
WVTLSISTRHHLQVMCCHHAGPRPCVTPIRAVVISHCRALLMPPSSAINCKFPEDRNTFYKAIAAIDSDSSDGCVQSKLNTFWKRFTILHAIKNIQKDYNLLKAQMGGSLDPGDGGRRIDIKVRAVYGKFHDAYHRNLYQDKMIADAREKERQPPPTCKQECESLSSRSFAIIFAGGVAVFSRTGVASGLHSPNALPFSTEERKGRIPSNTISFMSSLIDSFSPPLRQNESNRISVAPSPYPDPMLIVATNVATPV

SEQ ID NO: 920618 - protein, 1327 aa, Homo sapiens
MTSLIPQVSELVLNVTISTLTFLQQHGVAVTEPVYHLSMQNIVWDPQKVQYDLKSQFGFDDLHTEQILNSSAELKEIPTDTSLEKMVCSVLSSTSEDEAEKWGHVGGCHPKWSEAKNYLVHAVSWLRVYQQVLSPLSMFCSKKTLTGMGHSLEALRNQFEEESKPWKVVEALHTALLLLNDSLSADGPKDNHTFPKMFFLVPAHVPAVRVAEVWELFTQALADSVDFGKARTHRGASAPSSKDSPFNVARCCECEVLQHLWKLQSLLQNLPQWPALKRFLQLDGALRNAIAQNLHFVQEVLICLETSANDFKWFELNQLKLEKDVFFWELKQMLAKNAVCPNGRFSEKEVFLPPGNSSIWGGLQGLLCYCNSSETSVLNKLLGSVEDADRILQEVITWHKNMSVLIPEEYLDWQELEMQLSEASLSCTRLFLLLGADPSPENDVFSSDCKHQLVSTVIFHTLEKTQFFLEQAYYWKAFKKFIRKTCEVAQYVNMQESFQNRLLVDQLEQVSVNLMDFFKNISSVGTGNLVVNLLVGLMEKFADSSHSWNVNHLLQLSRLFPKDVVDAVIDVYYVLPHAVRLLQGVPGKNITEGLKDVYSFTLLHGITISNITKEDFAIVIKILLDTIELVSDKPDIISEALACFPVVWCWNHTNSGFRQNSKIDPCNVHGLMSSSFYGKVASILDHFHLSPQGEDSPCSNESSRMEITRKVVCIIHELVDWNSILLELSEVFHVNISLVKTVQKFWHKILPFVPPSINQTRDSISELCPSGSIKQVALQIIEKLKNVNFTKVTSGENILDKLSSLNKILNINEDTETSVQNIISSNLERTVQLISEDWSLEKSTHNLLSLFMMLQNANVTGSSLEALSSFIEKSETPYNFEELWPKFQQIMKDLTQDFRIRHLLSEMNKGIKSINSMALQKITLQFAHFLEILDSPSLKTLEIIEDFLLVTKNWLQEYANEDYSRMIETLFIPVTNESSTEDIALLAKAIATFWGSLKNISRAGNFDVAFLTHLLNQEQLTNFSVVQLLFENILINLINNLAGNSQEAAWNLNDTDLQIMNFINLILNHMQSETSRKTVLSLRSIVDFTEQFLKTFFSLFLKEDSENKISLLLKYFHKDVIAEMSVVEICEVFQQTVKPSEAMEMLQKVKMMVVRVLTIVAENPSWTKDILCATLSCKQNGIRHLILSAIQGVTLAQDHFQEIEKIWSSPNQLNCESLSKNLSSTLESFKSSLENATGQDCTSQPRLETVQQHLYMLAKSLEETWSSGNPIMTFLSNFTVTEDVKIKDLMKNITKLTEELRSSIQISNETIHSILEANISHSKYESL

SEQ ID NO: 920619 - protein, 132 aa, Homo sapiens
MPIPPSPQPSLCGRVGTDAIPQPQPSQHQPTGPPVGLCSSKEERAIWDNGSQSPLKFQRVGKNTSIRPILMSLSLFISSPEHFLDLNNARLNMDGISDSEQRGGDVGLLINYSPWARVGCKRKQKKDRRQDK

SEQ ID NO: 920620 - protein, 134 aa, Homo sapiens
MFRPFPQPWVDLSLAPPTASWGHKRKCCGFPGGTLCSLSLSEGPSLCTFSDFKIRTLLFINLADAIASSGSQASVLGSSCLLPLLLRSQHQQLTQGRPRLRLQTALPSSERIENYSSWFIRLDDPQQSISIQNG

SEQ ID NO: 920621 - protein, 450 aa, Homo sapiens
SISVLSFKCLLIPPLDLPWRLVVMQEQSAGILSCCLSLPATVSARFQEQQKMNTLQVCRLVNDVYRVYNRHQYPFVVLNISVDSENKPHSPKTPEPRRSPLGQKRGMSSSSTSDAISDKGVLRPQKEAVSSSQGPSDPTDRAEVEKDSGHGSTSVDSEGFSIPDTGSHCSSECVASTPGDRGSQEHVDSQEKAPETDDSFSDVDCHSNQEDTGSKRIKQLHHEAQQSEGEQNYRKFRARICPGENQAAEDELRKEISKTMFAEMEIIGQFNLGFIITKLNEDIFIVDQHATDEKYNFEMLQQHTVLQGQRLIAPQTLNLTAVNEAVLIENLEIFRKNGFDFVIDENAPVTERAKLISLPTSKSWTFGPQDVDELIFMLSDSPGVMCRPSRVKQMFASRACRKSVMIGTALNTSEMKKLITHMGEMDHPWNCPHGRPTMRHIANLGVISQN

SEQ ID NO: 920622 - protein, 744 aa, Homo sapiens
MSHVPRMCCAFAGTYSSVGSLFGVMVPTEAVRGKMSYDTCCPQGLFLFPLDAGQLERPQAFCPGSSKRKGQVGGASRAHRRPLWHTCAQEGMLGHVSSGLYPWALGDMASPGGPHSASSGAFSWARLLREGSAQPWLCLCRILYACCVVSSHAVARNHSFIPDPVSCLFHELVCRQHGAGRCRGSLMHETQIPLRREKTNTDTVHGGKGHFHVCSQRALSESDPKDGQYSKKKHNAYDVQTAEGVLSTIVKGVSRWPQAAQMKRPVWAAERSLEVGSKGHEPVWAAGGGPGKEGSRGSTCGGLLPDPRELEASLPPGPPSQAEPAARGTEQCPPCAQCGQSFGQKELSAPHQRVHRGPRPFAGAQCPKSFTQRTTPASHRRAHVAECTYTRAQCGKTFLQQIDAHTHYCAHIREKPYECAKLFGRLSTLLEHRHMHTGERPFQCTQCGCCFSRLSTLLEHRHTHISEKPFQCAQCDKRFTRLANLTVHQRVHLGERSFQCAQYSRRFMQKPGFLRHLCGHSQEKHYPCSPCGESFTCPSWLVRHQDSHASQASPSCLVCERDSSTDEPPTGLRGAVWGSTPSNPSAALRFEGTGTELGLRRCPGDRQRGSGDQEGLGWGSLAQFSFSREDGEMWVAPRELPKGALRAQGQLVPLKSEQPLLGATSWPGQSILAMVLASRGRAVLPGTEIAHGPSRCREAAGIEASPKHLSLTEGKAWAWRWGAQEWLALPCSIRRVIFRDKGPS

SEQ ID NO: 920623 - protein, 989 aa, Homo sapiens
SAAVCWSQSLAPGCEVVEKKMEPQAAWLQSLEGCMWTAKKKLADCEKVAVEFGNQLEAKWAVLGTLLQEYGLLQRWLGNVENLLCNRNFWILQLPPGSKGEAPKKRVPVCCGRQGEEAVRPQARKEKHVEGRAAGSLSLTAMDGQTHSWASVSSSVWTEVTCLCGQWMGTLPLGLMALTSSPRKLRGLATLLSMPLNTRLEEAAPSLAEHPPFPGLQRTALPLPFSSPQARPPPSQIWHQWRKETGRQLQPAQCGEGPEPGHWALVNGGASLVCGSQVGLVSSEWLCQKGLVYDRNAGQLERPQAFCPGSSKRKGQVGGASRAHRRPLWHTCAQEGMLGHVSSGLYPWALGDMASPGGPHSASSGAFSWARLLREGSAQPWLCLCRILYACCVVSSHAVARNHSFIPDPVSCLFHELVCRQHGAGRCRGSLMHETQIPLRREKTNTDTVHGGKGHFHVCSQRALSESDPKDGQYSKKKHNAYDVQTAEGVLSTIVKGVSRWPQAAQMKRPVWAAERSLEVGSKGHEPVWAAGGGPGKEGSRGSTCGGLLPDPRELEASLPPGPPSQAEPAARGTEQCPPCAQCGQSFGQKELSAPHQRVHRGPRPFAGAQCPKSFTQRTTPASHRRAHVAECTYTRAQCGKTFLQQIDAHTHYCAHIREKPYECAKLFGRLSTLLEHRHMHTGERPFQCTQCGCCFSRLSTLLEHRHTHISEKPFQCAQCDKRFTRLANLTVHQRVHLGERSFQCAQYSRRFMQKPGFLRHLCGHSQEKHYPCSPCGESFTCPSWLVRHQDSHASQASPSCLVCERDSSTDEPPTGLRGAVWGSTPSNPSAALRFEGTGTELGLRRCPGDRQRGSGDQEGLGWGSLAQFSFSREDGEMWVAPRELPKGALRAQGQLVPLKSEQPLLGATSWPGQSILAMVLASRGRAVLPGTEIAHGPSRCREAAGIEASPKHLSLTEGKAWAWRWGAQEWLALPCSIRRVIFRDKGPS

SEQ ID NO: 920624 - protein, 127 aa, Homo sapiens
MVTLQINFASREAVKGPPSHRTKLAQFLSLGARKPHGQPLDVCSASGNPNGRNGKQTAEDNFYKQDGLWLWIPGSNFSVPKQATGTAANRAAETTHPPIKVKPAPNPSPRRNGDSQKICLSLSPLSS

SEQ ID NO: 920625 - protein, 127 aa, Homo sapiens; identical to SEQ ID NO: 920624

SEQ ID NO: 920626 - protein, 347 aa, Homo sapiens
CLSLARTLSLFLIFVSFCFSSQTVLVHTTETARLRYFMELLLEKGKPLMLVGNAGVGKTVFVGDTLASLSEDYIVSRVPFNYYTTSTALQKILEKPLEKKAGHNYGPGGNKKLIYFIDDMNMPEVDLYGTVQPHTLIRQHIDYGHWYDRQKVMLKEIHNCQYVACMNPMVGSFTINPRLQGIDSHMLLQQPLIYCHFADRGKDPHYMPVKDWEVLKTILTETLDNYNELNAAMHLVLFEDAMQHVCRISRILRTPQGCALLVGVGGSGKQSLSRLAAYLRGLEVFQITLTEGYGIQELRVDLANLYIRTGAKNMPTVFLLTDAQVLDESFLVLINDLLASEGFRKVL

SEQ ID NO: 920627 - protein, 620 aa, Homo sapiens
QQRLYRDVMLENYGNLFSLAGSLHFTAEILLEHDINDSFQKVILRKSGSCDLNTLRLKKDYQRVGNCKGQKSSYNGIHQCLSATRSKTCQYNKCGKAFGLCSIFTEHKKIFSREKCYKCEECGKDCRLSDFTIQKRIHTADRSYKCEECGKACKKFSNLTEHNRVHTGKKPYKCEECGKTFTCSSALTKHKRNHTGDRPYKCEECHKAFRCCSDLTKHKRIHTGEKPYKCKECHKAFRCCSDLTKHKRIHTGEKPYKCNECGKAFMWISALSQHNRIHTGEKPYICEECGKAFTYSSTLISHKRIHMELRPYKCEECGKTFKWFSDLTNHKRIHTGEKPYKCEECGKSFTCSSNLIKHKRIHMEVRPYKCEECGKTFKWFPDLTNHKRIHTGEKPYKCEECGKTFTCSSSLIKHKRSHTGDRPTSAKNVAKPLGGSQTLLNISKHKRIHTGEKPYICEECGKAFIRSSTLTSHKRIHMEERPYKCEECGKTYLAKHKIIHIGEKPYKCNECGKGFMWISALRKHKRIHTGETPYIHEECGKAFTYSSILINHKRIHMEEGPYKCEECGKTFMWLSDFTNHKRIHPGEKPYKCEECGKVLSSFSHVIRHKTIHSREKLHKC

SEQ ID NO: 920628 - protein, 457 aa, Homo sapiens
RYPHRFAGTNVKNVAKHLPVPQPLLNTREIILETDPTNAKNVTKPLGVAQTLLNIREFILERNPTNVKNVTKPLGVAQTLLNIREFILERNPTNVMNVEKLLCGSRPLVNITEFILERNPTFVKNVAKPLPTPQPLLATREFIMELRPYKCEECGKTFKWFSDLTNHKRIHTGEKPYKCEECGKSFTCSSNLIKHKRIHMEVRPYKCEECGKTFKWFPDLTNHKRIHTGEKPYKCEECGKTFTCSSSLIKHKRSHTGDRPTSAKNVAKPLGGSQTLLNISKHKRIHTGEKPYICEECGKAFIRSSTLTSHKRIHMEERPYKCEECGKTYLAKHKIIHIGEKPYKCNECGKGFMWISALRKHKRIHTGETPYIHEECGKAFTYSSILINHKRIHMEEGPYKCEECGKTFMWLSDFTNHKRIHPGEKPYKCEECGKVLSSFSHVIRHKTIHSREKLHKC

SEQ ID NO: 920629 - protein, 156 aa, Homo sapiens
SKQDLALYIMAIKKHKGDFSKCYARSNNALRLSEIDQSLKAALHQMEGTSDETSGKYQNEREMQGSKGSSNSLRHPPVSKEVTESQKGRGEIMDSRLLEEKLDANVLAFILPACCLYHLRGSNHPSCWKHRLSSMSQLFYIPGNVLAFLSLFDVTM

SEQ ID NO: 920630 - protein, 394 aa, Homo sapiens
MFAQSVAPLCPYDNDSMSITGETGIGKSTLIDTLFNTNLKDNKSSHFYSNVGLQIQTYELQESNVQLKLTVVETVGYGDQIDKEASYQPIVDYIDAQFEAYLQEELKIKRSLFEYHDSRVHVCLYFISPTGHSLKSLDLLTMKNLDSKVNIIPLIAKADTISKNDLQTFKNKIMSELISNGIQIYQLPTDEETAAQANSSVSGLLPFAVVGSTDEVKVGKRMVRGRHYPWGVLQVENENHCDFVKLRDMLLCTNMENLKEKTHTQHYECYRYQKLQKMGFTDVGPNNQPVSFQEIFEAKRQEFYDQCQREEEELKQRFMQRVKEKEATFKEAEKELQDKFEHLKMIQQEEIRKLEEEKKQLEGEIIDFYKMKAASEALQTQLSTDTKKDKHRKK

SEQ ID NO: 920631 - protein, 350 aa, Homo sapiens
MIQAKVSGEKERQAYAKGNIYSEDTLSLTRKGTSVKQLGGNVPLNDMVTIEYSVLPFAITFLEIIYLEIFPEVWFSYCDKGKCRTTATFAERTIIHNFTERRKVSFLELQAALPMVEGEVMQALPWLLQQNLSQCHVVTAGDERGLLSAIQYSLSYSLQCLFPCYDVKTSFPSNSRDPQLQVCWNLLEVHSRSCLPGYHQRRLQNSKYCYLILPLEASSQRDTQLYEVSAGPYWQLYRLLQLPLAGKGKSPNPLHFPGNNHDSIREPGSSNAIKSGWTHPGIPVEAPEATGFEKTCPWDTGNIYKVSENNFEESFKSYTERHRLEPADSGLKQTPFVGNKLLGTPDPSPQ

SEQ ID NO: 920632 - protein, 892 aa, Homo sapiens
DLRMSHSVLEPHGLPVILGDLLFWFTSWPFSKVQASPRSPGLEPFSTTFTPKIHLLPLSSQVPAGDISLLIPDEKLESRTRRVLSNTYQKLIQSVFLDDSIPNGVKYLMLLALIEKPTVDPIYIALFGSTGAGKSSLINAIIQQAMFLPVSGESICTSCIVQVSSGCCVQYEAKIHLLSDQLMPLLNEKSPSQEKVHQVSWGGGLAWSLHFYETLGKPFPSSRPQIDDLDFLNMQPPGPPQGAMGPSVCRCSLCLCQEGLGPTLPWQEWREELKNLTKLLHRTEELGREEADAWNRDEAVEEATWKLQMIYGNGAESKNYEELLRAKPKRKIPTSRVITLKAEEAEELSIKLDPYIRTQRRDWDGEAAEMRIWPLIKHVEVTLPKSDLIPEGVVLVDIPGTGDFNSKRDEMWKKTIDKCSVIWVISDIERVSGGRAHEDLLNESIKACQRGFCRDVALVVTKMDKLHLPEYLRERKAGNQAIQSQREAVLERNEMIKLQRTRILKEKLKRKLPADFKVLEASDLVYTVSAQEYWQQALLTEEETEIPKLREYIRKSLLDKKKRTVTKYVTEAFGLLLLTDSFNSTQNLPNEHLHMSVLRRFAEEKVELLEKAIAQCFACMEQPLQEGVRTARTSYRCILRACLVRSKGNQGFHQTLKAVCLKNGIYASRTLARIDLNEALTQPVYDQIDPVFGSIFRTGKPTGSALMPHIDAFKQSLQEKMTEIGIRSGWKYDSCKKNFLIQEISAILGGLEDHILRRKRRIYESLTASVQSDLKLCYEEAAQITGKKACERMKDAIRRGVDRQVAEGMFERAQERMQHQFQQLKTGIVEKVKGSITTMLALASSQGDGLYKELAAVDLGVGNHVPFRPWAPSGPRYKLERVTWYKQQLSNF

SEQ ID NO: 920633 - protein, 159 aa, Homo sapiens
MWELKGGTSNSNSLPVVGKKGFQRECFQFLPIQYDIGRGFVIDSAYYFEVWQCTEDCHMPLAQDQALRTTEIKKFQCHLSQCTMHCNDKARDSLDAGTFHQCNHPKFASCLMLTEEEGHLEFDQQEQNMLKLLQKMMRTSQVWHLMYSKVYGDHLRKLV

SEQ ID NO: 920634 - protein, 143 aa, Homo sapiens
MSLRIFSAIFVANSFIELDINILLQGLNRLSNVTSKILQKGCLEPDLSKHKLDAGSIGSEMPFLISTKRVFGTCFIKMQMLPALKHRIPSSSVLGLGLALLAPQLADSLLLDLVIIIKKLKRKKKKEKWADTCLLCDREHVSH

SEQ ID NO: 920635 - protein, 222 aa, Homo sapiens
MGPVMRSLCDGETEAPADTWDAETPAPLCVLGQFAEPFWASVSHQFQKLILLPTAVRVPGDGKARAAPTGAQELADSEGVGPGLGKGWGRAWARGGDGACSTCSALPGCLLGAPPAALRTLRKALADSGVANMSTAMNFGTKSFQPRPPDKGSFPLDHLGECKSFKEKFMKCLHNNNFENALCRKESKEYLECRMERKLMLQEPLEKLGFGDLTSGKSEAKK

SEQ ID NO: 920636 - protein, 286 aa, Homo sapiens
VSSASTRPQFLITVPVLTVINYRPHNMRPEDRMFHIRAVILRALSLAFLLSLRGAGAIKADHVSTYAAFVQTHRPTGEFMFEFDEDEMFYVDLDKKETVWHLEEFGQAFSFEAQGGLANIAILNNNLNTLIQRSNHTQATNDPPEVTVFPKEPVELGQPNTLICHIDKFFPPVLNVTWLCNGELVTEGVAESLFLPRTDYSFHKFHYLTFVPSAEDFYDCRVEHWGLDQPLLKHWEAQEPIQMPETTETVLCALGLVLGLVGIIVGTVLIIKSLRSGHDPRAQGTL

SEQ ID NO: 920637 - protein, 237 aa, Homo sapiens
MGRVIRGQRKGAGSVFRAHVKHRKGAARLRAVDFAERHGYIKGIVKDIIHDPGRGAPLAKVVFRDPYRFKKRTELFIAAEGIHTGQFVYCGKKAQLNIGNVLPVGTMPEGTIVCCLEEKPGDRGKLARASGNYATVISHNPETKKTRVKLPSGSKKVISSANRAVVGVVAGGGRIDKPILKAGRAYHKYKAEAGSRSRKRQNAGSSVLHYDEVLLSADQDDIRVSFQQPYGLKEILA

SEQ ID NO: 920638 - protein, 271 aa, Homo sapiens
MGRVIRGQRKGAGSVFRAHVKHRKGAARLRAVDFAERHGYIKGIVKDIIHDPGRGAPLAKVVFRDPYRFKKRTELFIAAEGIHTGQFVYCGKKAQLNIGNVLPVGTMPEGTIVCCLEEKPGDRGKLARASGNYATVISHNPETKKTRVKLPSGSKKVISSANRAVVGVVAGGGRIDKPILKAGRAYHKYKAKRNCWPQLRGVAINVSLQEGDLRWEEQQPVEHPFGGGNHQHIGKPSTIRRDAPAGRKVGLIAARRTGRLRGTKTVQEKEN

SEQ ID NO: 920639 - protein, 88 aa, Homo sapiens
GLHPQADSMICSFSTWCLAVSCTPWALTEYSFIVVKPSMASQHSHPSLPTRVYTVLEELSPGTIVANITAEDPDDEGFPSHLLYSITT

SEQ ID NO: 920640 - protein, 214 aa, Homo sapiens
GLHPQADSMICSFSTWCLAVSCTPWALTEYSFIVVKPSMASQHSHPSLPTRVYTVLEELSPGTIVANITAEDPDDEGFPSHLLYSITTVSKYFMINQLTGTIQVAQRIDRDAGELRQNPTISLEVLVKDRPYGGQENRIQITFIVEDVNDNPATCQKFTFRYAHFESWAGHSISLVALCPSASLVYSQENYKHLEKQLSRINRCELFTVVHRFP

SEQ ID NO: 920641 - protein, 476 aa, Homo sapiens
MWQDTTWVLVTLHSWGVATQERFVVTEYKELTSQETFGEEDPQGSEPVEACDHISKSEGSLEKLVEQRGPRAVTLTNGESSRESGGNLRLLSRPVPDQRPHKCDICEQSFEQRSYLNNHKRVHRSKKTNTVRNSGEIFSANLVVEDQKIPTGKKLHYCSYCGKTFRYSANLVKHQRLHTEEKPYKCDECGKAFSQSCEFINHRRMHSGEIPYRCDECGKTFTRRPNLMKHQRIHTGEKPYKCGECGKHFSAYSSLIYHQRIHTGEKPYKCNDCGKAFSDGSILIRHRRTHTGEKPFECKECGKGFTQSSNLIQHQRIHTGEKPYKCNECEKAFIQKTKLVEHQRSHTGEKPYECNDCGKVFSQSTHLIQHQRIHTGEKPYKCSECGKAFHNSSRLIHHQRLHHGEKPYRCSDCKKAFSQSTYLIQHRKINTGEKPYKCSECGKPSGTVPTCVSISGFTSGRTSPCNVARCPRAESS

SEQ ID NO: 920642 - protein, 135 aa, Homo sapiens
QLFLKTQMRREEEAAPNAADIGTSEDPWHEELAPSGNALTFRVWSCHRTDRCEGNGEALQGLVDSCNIIGFYSMGGDKPQAAYFYYSILSIPINSFILISSLFFHCNTRDYNISPPVILVCPKLESCHFLDNEEP

SEQ ID NO: 920643 - protein, 179 aa, Homo sapiens
QLRFCSFVMRLFSFTPMNMMDNNCFFLKRLSTLWLSLSGTLDSIDCIFFFLYELGFLLLFFYCLEVNLYLSIFRFTFQTRSKTVPQNCLEMKQKVMKVQNDAHPGQRTQHSDPCTGCTEHTRHWVNHEQKEKPAWVCKIYFAGKADTVEQSVAAPGRTLMTHITEPDRSRENIPSNRTA

SEQ ID NO: 920644 - protein, 140 aa, Homo sapiens
MASLRLFIFVVDKKCPYVWFLLTPTNSSVPAGTMVEWKVPDLVPPRTLTDNNIQSKRMYENYRNQFRSHSTPGKLKAKNSCIEPVALPDNLQCHRQAPEGSRDYKQLKRNWQTSLIGTFHVQAQRRFIPRKGLRGPRISS

SEQ ID NO: 920645 - protein, 302 aa, Homo sapiens
MGRVIRGQRKGAGSVFRAHVKHRKGAARLRAVDFAERHGYIKGIVKDIIHDPGRGAPLAKVVFRDPYRFKKRTELFIAAEGIHTGQFVYCGKKAQLNIGNVLPVGTMPEGTIVCCLEEKPGDRGKLARASGNYATVISHNPETKKTRVKLPSGSKKVISSANRAVVGVVAGGGRIDKPILKAGRAYHKYKAKRNCWPRVRGVAMNPVEHPFGGGNHQHIGKPSTIRRDAPAGRKWVSLLPAGLDVSGEPDCAGERELVLRASIKFVFMPPGCAHPHGFKGRGPCWEDFCGIPLVGTGRELDY

SEQ ID NO: 920646 - protein, 169 aa, Homo sapiens
SPVQSFLGNHILKMGWCQFGKLLFSACAASLCRDAVDLSSAGTAGVLIGYCPQQDALDELLTGWEHLYYYCSLRGIPRQCIPEVAGDLIRRLHLEAHADKPVATYSGGTKRKLSTALALVGKPDILLLDEPSSGMDPCSKRYLWQTIMKEVREGCAAVLTSHSILVTAI

SEQ ID NO: 920647 - protein, 188 aa, Homo sapiens
MRLQSGEPCREFCLTVDDPEGHDAPVKDDEDPKVQLENRGKEGKRDDPGGDGEEVPAELDDDGHVADGLLVISRVPEGLLVGGQGPGQGHEGSCRCETYKGKQEDSVSEISCSNAPWNLHRKTLLKAAFQSSEKISQNSCADGWDSLRTAWKARPGSSLGPPELSCLVLYLPLCAPATLPSLRFSNAT

SEQ ID NO: 920648 - protein, 854 aa, Homo sapiens
APRLYTGCMLHAELSAEVELGEAVSDCPTGPIKFAHNYPLPYGCFVLGLFCFKRLQPNIEGTSSSAGTQPDVDECVEGTDNCHIDAICQNTPRSYKCICKSGYTGDGKHCKDVDECEREDNAGCVHDCVNIPGNYRCTCYDGFHLAHDGHNCLDVDECAEGNGGCQQSCVNMMGSYECHCREGFFLSDNQHTCIQRPEEGMNCMNKNHGCAHICRETPKGGIACECRPGFELTKNQRDCKCEIIGMAVTCNYGNGGCQHTCDDTEQGPRCGCHIKFVLHTDGKTCIGAGETCAVNNGGCDSKCHDAATGVHCTCPVGFMLQPDRKTCKDIDECRLNNGGCDHICRNTVGSFECSCKKGYKLLINERNCQDIDECSFDRTCDHICVNTPGSFQCLCHRGYLLYGITHCGDVDECSINRGGCRFGCINTPGSYQCTCPAGQGRLHWNGKDCTEPLKCQGSPGASKAMLSCNRSGKKDTCALTCPSRARFLPESENGFTVSCGTPSPRAAPARAGHNGNSTNSNHCHEAAVLSIKQRASFKIKDAKCRLHLRNKGKTEEAGRITGPGGAPCSECQVTFIHLKCDSSRKGKGRRARTPPGKEVTRLTLELEAEVRAEETTASCGLPCLRQRMERRLKGSLKMLRKSINQDRFLLRLAGLDYELAHKPGLVAGERAEPMESCRPGQHRAGTKCVQCSPGHYYNTSIHRCIRCAMGSYQPDFRQNFCSRCPGNTSTDFDGSTSVAQCKNRQCGGELGEFTGYIESPNYPGNYPAGVECIWNINPPPKRKILIVVPEIFLPSEDECGDVLVMRKNCGWLAELGQGRAVQIWLRRRTKRETDTGRNGAVKLGIYEGEIVRGL

SEQ ID NO: 920649 - protein, 833 aa, Homo sapiens
APRLYTGCMLHAELSAEVELGEAVSDCPTGPIKFAHNYPLPYGCFVLGLFCFKRLQPNIEGTSSSAGTQPDVDECVEGTDNCHIDAICQNTPRSYKCICKSGYTGDGKHCKDVDECEREDNAGCVHDCVNIPGNYRCTCYDGFHLAHDGHNCLDVDECAEGNGGCQQSCVNMMGSYECHCREGFFLSDNQHTCIQRPEEGMNCMNKNHGCAHICRETPKGGIACECRPGFELTKNQRDCKCEIIGMAVTCNYGNGGCQHTCDDTEQGPRCGCHIKFVLHTDGKTCIGAGETCAVNNGGCDSKCHDAATGVHCTCPVGFMLQPDRKTCKDIDECRLNNGGCDHICRNTVGSFECSCKKGYKLLINERNCQDIDECSFDRTCDHICVNTPGSFQCLCHRGYLLYGITHCGDVDECSINRGGCRFGCINTPGSYQCTCPAGQGRLHWNGKDCTEPLKCQGSPGASKAMLSCNRSGKKDTCALTCPSRARFLPESENGFTVSCGTPSPRAAPARAGHNGNSTNSNHCHEAAVLSIKQRASFKIKDAKCRLHLRNKGKTEEAGRITGPGGAPCSECQVTFIHLKCDSSRKGKGRRARTPPGKEVTRLTLELEAEVRAEETTASCGLPCLRQRMERRLKGSLKMLRKSINQDRFLLRLAGLDYELAHKPGLVAGERAEPMESCRPGQHRAGTKCVQCSPGHYYNTSIHRCIRCAMGSYQPDFRQNFCSRCPGNTSTDFDGSTSVAQCKNRQCGGELGEFTGYIESPNYPGNYPAGVECIWNINPPPKRKILIVVPEIFLPSEDECGDVLVMRKNSSPSSITTYETCQTYERPIAFTARS

SEQ ID NO: 920650 - protein, 355 aa, Homo sapiens
SLSLSLCLSLSRLSSFPPSTTWDLSERTAAGEFRKAESPGPSPGPRQLAPAAPPARLRPHSAMEVKRRRPRALPRLPLPSPRCSPFPFSFLGEAEGDMGGWVAALGRGGVDVVFSLSGAAGEARRGERGEGSRGNYTGEAPLRLPLPPTPPSLHPLRFAGKSLDAKGWGRTKSLWKTSLLSHCLCDWGSCGGEDAVVPSSGVPHPHPSPRCQCARTTRRFLFLFPGFLIPSSTHPSSFLSPFLPSFLLSFLRRKASLSVFTADLDLNVHTIKARGECQEWGWLSTVGRRGPAKEGATDRARRPPQTSAQPRARGEGSGAPSGCLSRTGARGVGRCAACDRQGLRDAKRLRERNRS

SEQ ID NO: 920651 - protein, 163 aa, Homo sapiens
MGCNTLGLYCGVCTESAPAREEQPDGSSMKTYASHRQPLAQLGSCGSQNPILMPRNLLRLTRGHQDREELWVHPPFLPPALCPGRLIHMYHSMALVASGFWVWLLGALQAAAGGQGVDITDCAYFCISEDRMTLPGPETCDPLGPVAPPTSKLNTPGPFPTPL

SEQ ID NO: 920652 - protein, 209 aa, Homo sapiens
GWRVMEQEEPTWRSDSVDTEDSGYGGEAEERPEQDGVQVAVVRIKRPLPSQVNRFTEKLNCKAQQKYSPVGNLKGRWQQWADEHIQSQKLNPFSEEFDYELAMSTRLHKGDEGYGRPKEGTKTAERAKRAEEHIYREMMDMCFIICTMARHRRDGKIQVTFGDLFDRYVRISDKVVGILMRARKHGLVDFEGEMLWQGRDDHVVITLLK

SEQ ID NO: 920653 - protein, 141 aa, Homo sapiens
LGEKCGGFSQGWSLEDANPMCERRTPPGLPGGARLVRRRRPPAFAGSRPPLPGAAGPPQPRASPGRAGCTPSTYLAGRASPGTKGALGSKPSPRPRGDAALRKEGRCPQDPRLLGKLDMHIPKENSVGRRQESSSRVGGRG

SEQ ID NO: 920654 - protein, 137 aa, Homo sapiens
YIWRGLFMLNLKFLMKIIHFMQIIRTNIMELKLVLQINWCCCDLSLVKIGNWREKNYVSSKKLYYTCCWIPTRSIVFESLLVTSNLICFQGHSAASLKFSGVLQKCHVLINTSNSQWFFLNYKLHEDPIPSAAIGSF

SEQ ID NO: 920655 - protein, 161 aa, Homo sapiens
MVPAPPCTSGTSVNPSGPGLFLIGPSAAGLLEFAGGPLQTLFSWVSAVEAAEQQILVNSKCCCLIVPLGGVYRGRQASLSYGGLHLIRASWLLCLPTQASAMAGAPPPTSLLRCSSISDCCASNQHGSVGMGPSKPGTGYYLLVCCLLRPSEKHSISVGVT

SEQ ID NO: 920656 - protein, 121 aa, Homo sapiens
GLGSAPEESTTFPRFTSRCNWACLSSLCSKHVKSKMGVPDLPVALLQPRLLSNCGSTIFNMELPRSPCCPASSLQKRIGGQATHISLAQIQSHGHTHCKGSWEMESSSVPKKQRKTDLMKT

SEQ ID NO: 920657 - protein, 69 aa, Homo sapiens
AESSTAEANEATHLFLAPTLRIFIMTIEVNEHFHKINKKSPQICKCFNIMIAVYFSLRSNPRWVFLICL

SEQ ID NO: 920658 - protein, 152 aa, Homo sapiens
MTGHFYSVPEVSAPGQAVGQAPLHAGSVALNSRACHPSEGSERAVCRARTLPGPGPLWHEKGRLGARGLEQAVMTLWVLPSSRFGSEETGVTLMGFRSRSSKYWILDSDLVVPPGSRTLTRVAPGLVVGPQARKDALVECGLHCHCNRLLKT

SEQ ID NO: 920659 - protein, 145 aa, Homo sapiens
MQLNPGLVNVPGVSRLRRELNTCVYPAARRLNEEVQYHTTPLSPTMVSAGDGGKLSLHLHQQTNTGTENQIPYVLTYKWELNDENTWKHRGEQHTLGPTGGWKEASGGAWPCQDLDFGATRLQICERTNFCHFKPPSLPYLLQQP

SEQ ID NO: 920660 - protein, 164 aa, Homo sapiens
EKLRMWKALKFKHGKSRRGNSDKCHWTVCYLLTSFPVVVEPLQGTKKVETSTLWMVNSTLTLIFETLTLTLIFRQNNGNYQAPSATDSSHNPGFEYFLQTKYCIVVLEHGLSIIKKTRCYKGLISDTLNTSGSLVQERITSKINFLFLPQPLDWANFKQVTELP

SEQ ID NO: 920661 - protein, 164 aa, Homo sapiens; identical to SEQ ID NO: 920660

SEQ ID NO: 920662 - protein, 164 aa, Homo sapiens; identical to SEQ ID NO: 920660

SEQ ID NO: 920663 - protein, 164 aa, Homo sapiens; identical to SEQ ID NO: 920660

SEQ ID NO: 920664 - protein, 143 aa, Homo sapiens
MEGHRKGLYCSMPAVLLALLREHLTPVATAKKVLLLNGIGRWVRVDDAAGSALVLAASDKAKPPFAAVLPQEHGSSGDADTFPLELERVPLAAVKKHRGRGLCQQHECSLGDSLLWASGDLSCALRDPLVGPASAWPDCSMFY

SEQ ID NO: 920665 - protein, 174 aa, Homo sapiens
MPSRIQGLESETLGIYVVLYSTAAKLAPKPQDEVLLTLSLSTSRGVSSLLWPPLPQAHSIGRASRKLGRLAKPTVTISTDGDVITIKTKSIFKNNEISFKLGEEFEEITPGGHKTKSKVTLDKESLIQVQDWDGKETTITRKLVDGKMVVESTVNSVICTRTYEKVSSNSVSNS

SEQ ID NO: 920666 - protein, 139 aa, Homo sapiens
MPSRIQGLESETLGIYVVLYSTAAKLAPKPQDEVLLTLSLSTSRGVSSLLWPPLPQAHSIGRASRKLGRLAKPTVTISTDGDVITIKTKSIFKNNEISFKLGEEFEEITPGGHKTKVRPTTVFQTHFKRMLVRYHPRVK

SEQ ID NO: 920667 - protein, 134 aa, Homo sapiens
MAGPGGRRTTSLPKRRGCGCCWRGEAHSPRTGRTRRGRAGRRPAPRQVATAKDAGRAPGAMASPSGSSEATGKPRGRDGRPRREEDDVPPEEKRLRLLLEGGSAQPEDCEDGEDALRPGKEDTGTQTGGDGRGA

SEQ ID NO: 920668 - protein, 133 aa, Homo sapiens
MRAGMCSCWLCVYHGKKVIESLLYARHCTLGTWDVNIRYTSAFEELIVHHGVTKKVTDNYTICLKQCHGTEKNSKGFGAQQETGGCTQLAVRTILHWKEYYRLGNLYRIEVYLTHGSGVWEVQEHGVTCAPIR

SEQ ID NO: 920669 - protein, 143 aa, Homo sapiens
ENFRLMTVEILGLGFGCNHRSSALIHLCQSAGGERRAQRRQTETGHQNEVRKQRGPKVEDEDNLLAGCVHSLSEHSRRGCWVPGPCLIPGDESGQDSKGPASGTHHLNGQPASSPTNNYQLQHATKDKGKEPWWSMRECGRAL

SEQ ID NO: 920670 - protein, 151 aa, Homo sapiens
MGKMYLLVKKHPSLTSETNIIDFTRRKLITCKLSFVSICILKVAATSLHMLESIDVKPTGTLRPVHQDGGLPKSSGDSSARRSIGHSDPTIQGGGTKWSCLLKLLCWIALGSASRPPGPFKIVTVFNLQPALLQQPRLLLHLPGSITHYLG

SEQ ID NO: 920671 - protein, 205 aa, Homo sapiens
MDTFTDPFKCPCPYLRLLEIPIMLTLVCFMVSCLRCGHAHGGARVWGMSLGHEHTYGVVLGSKKAMCRASLVPMFKVWTCSWQQSHQFLWYSTYREQGRDIVVAPSGLESGTGTWTLGSSVNQSQHWQRLQRLNGKNHWDHCALFTPLVEVRTKRIPLGADCARLGNGVAQSGDSGLWTEINERSSYPSFFQRIISPTDKARRRK

SEQ ID NO: 920672 - protein, 447 aa, Homo sapiens
MRSSTLQDPRRRDPQDDVYVDITDRLRFAILYSRPKSASNVHYFSIDNELEYENFSEDFGPLNLAMVYRYCCKINKKLKSITMLRKKIVHFTGSDQRKQANAAFLVGCYMVIYLGRTPEAAYRILIFGDTPYIPFRDAAYGSCNFYITLLDCFHAVKKAMQYGFLNFNSFNLDEYEHYEKAENGDLNWIIPDRFIAFCGPHSRARLESGYHQHSPETYIQYFKNHNVTTIIRLNKRMYDAKRFTDAGFDHHDLFFADGSTPTDAIVKRFLDICENAEGAIAVHCKAGLGRTGTLIACYIMKHYRMTAAETIAWVRICRPGLVIGPQQQFLVMKQTSLWLEGDYFRQRLKGQENGQHRAAFSKLLSGVDDISINGVENQDQQEPKPYSDDDEINGVTQGDRSRALKRRRQSKTNDILLPSPLAVLTFTLCSVVIWWIVCDYILPILLF

SEQ ID NO: 920673 - protein, 161 aa, Homo sapiens
MLQSFWWFALNLWYSWLVSAAIPSLPPLSYSLLPACLSFFFPQDTSILDLWHALFQYDLILTNQSPVALFSKILEDCPPKLTSWGTKGWKSRQGIGTSTDDSDGGHDDDDGDGDSYGKDKATSIYLALTVDQVLSLGGGKRKGADSVLIDMHIGTLFQENL

SEQ ID NO: 920674 - protein, 148 aa, Homo sapiens
MNWVAYSLCLFMGISKFPGFTAFNLVKLHEIKCSSSRRHWRLLEALEATGSGNTQKSSEGYSRKGDPLSQFKQQQRPGAGKVLGQGQCGDFTIQVQNGFSSDINNALVQSPVQLSRPHSPKPELCSALSWLHVKVLKGSFFQNKWTVF

SEQ ID NO: 920675 - protein, 139 aa, Homo sapiens
HSHSKLHAMSSKKISNFYKVLALLPVFVKNADQMKTTFYKANNNNSFCELNIYCARHLANIISFNSHTFSSRYGSLYDTDHETEAQKVAAISPTCSRDEAQTSVLSSSPVDDSDVLPGMSTPDDMIFEDRHLFLFIIVS

SEQ ID NO: 920676 - protein, 262 aa, Homo sapiens
MVYPWCFLPTLSPAARFKPCCPSQPVRIGCATSSEKSQRQHTDGTTISKNKKRKLKKKQQIKRKKAAGLAAKAAGVSFMYQPEDSSNEGEGVGEACEEDGVDTSEEDPTLAGEEDVKDTREEDGADASEEDLTRARQEEGADASEEDPTPAGEEDVKDAREEDGVDTIEEDLTRAGEEDGKDTREEDGADASEEDPTWAGEEEGADSGEEDGADASEEDDTITNEKAHSILNFLKSTQEMYFYDGMFFTVFLLHSDIHLKVY

SEQ ID NO: 920677 - protein, 483 aa, Homo sapiens
MVAHTLEILPILCAAFGARARWPLGTPRAAATRREAAALPPVTLALLCLDGVFLSSAENDFVHRIQEELDRFLLQKQLSKVLLFPPLSSRLRYLIHRTAENFDLLSSFSVGEGWKRRTVICHQDIRVPSSDGLSGPCRAPASCPSRYHGPRPISNQGAAAVPRGARAGRWYRGRKPDQPLYVPRVLRKQEEWGLTSTSVLKREAPAGRDPEEPGDVGAGDPNSDQGLPVLMTQGTEDLKGPGQRCENEPLLDPVGPEPLGPESQSGKGDMVEMATRFGSTLQLDLEKGKESLLEKRLVAEEEEDEEEVEEDGPSSCSEDDYSELLQEITDNLTKKEIQIEKIHLDTSSFVEELPGEKDLAHVVEIYDFEPALKTEDLLATFSEFQEKGFRIQWVDDTHALGIFPCLASAAEALTREFSVLKIRPLTQGTKQSKLKALQRPKLLRLVKERPQTNATVARRLVARALGLQHKKKERPAVRGPLPP

SEQ ID NO: 920678 - protein, 120 aa, Homo sapiens
QSEGLNESLAYLPGALRAHRRYQITVIAPPFPLLLPETRRGHRQMRLWPGGWWPGPWDSNTKRKSGLLSGVRCRPEAWRPNWPGSASRRSWRPQHHKPSQTPEQPRTTLELHHGVWWALV

SEQ ID NO: 920679 - protein, 445 aa, Homo sapiens
MVAHTLEILPILCAAFGARARWPLGTPRAAATRREAAALPPVTLALLCLDGVFLSSAENDFVHRIQEELDRFLLQKQLSKVLLFPPLSSRLRYLIHRTAENFDLLSSFSVGEGWKRRTVICHQDIRVPSSDGLSGPCRAPASCPSRYHGPRPISNQGAAAVPRGARAGRWYRGRKPDQPLYVPRVLRKQEEWGLTSTSVLKREAPAGRDPEEPGDVGAGDPNSDQGLPVLMTQGTEDLKGPGQRCENEPLLDPVGPEPLGPESQSGKGDMVEMATRFGSTLQLDLEKGKESLLEKRLVAEEEEDEEEVEEDGPSSCSEDDYSELLQEITDNLTKKEIQIEKIHLDTSSFVEELPGEKDLAHVVEIYDFEPALKTEDLLATFSEFQEKGFRIQWVDDTHALGIFPCLASAAEALTREFSVLKIRPLTQGTKQSKLKALQRPNGERF

SEQ ID NO: 920680 - protein, 443 aa, Homo sapiens
MVAHTLEILPILCAAFGARARWPLGTPRAAATRREAAALPPVTLALLCLDGVFLSSAENDFVHRIQEELDRFLLQKQLSKVLLFPPLSSRLRYLIHRTAENFDLLSSFSVGEGWKRRTVICHQDIRVPSSDGLSGPCRAPASCPSRYHGPRPISNQGAAAVPRGARAGRWYRGRKPDQPLYVPRVLRKQEEWGLTSTSVLKREAPAGRDPEEPGDVGAGDPNSDQGLPVLMTQGTEDLKGPGQRCENEPLLDPVGPEPLGPESQSGKGDMVEMATRFGSTLQLDLEKGKESLLEKRLVAEEEEDEEEVEEDGPSSCSEDDYSELLQEITDNLTKKEIQIEKIHLDTSSFVEELPGEKDLAHVVEIYDFEPALKTEDLLATFSEFQEKGFRIQWVDDTHALGIFPCLASAAEALTREFSVHASLHVPGLHVPLACTGLDVGRGV

SEQ ID NO: 920681 - protein, 114 aa, Homo sapiens
MACTAAVLLGERQPRPCVRSPLWGFPSRTPASGEGEATDKCDCGPAAGGPGPGTPTQKERAACCPGSAAALRPGDPTGLDLRPDVAGAPNTISLHRRQSSPAPPSSFTMGCGGL

SEQ ID NO: 920682 - protein, 162 aa, Homo sapiens
LCYRGSLEDGGCKKRLVAEEEEDEEEVEEDGPSSCSEDDYSELLQEITDNLTKKEIQIEKIHLDTSSFVEELPGEKDLAHVVEIYDFEPALKTEDLLATFSEFQEKGFRIQWVDDTHALGIFPCLASAAEALTREFSVHASLHVPGLHVPLACTGLDVGRGV

SEQ ID NO: 920683 - protein, 476 aa, Homo sapiens
RPDPRAPGWEGAAGLRGAGPREPREGAQRRALPPVTLALLCLDGVFLSSAENDFVHRIQEELDRFLLQKQLSKVLLFPPLSSRLRYLIHRTAENFDLLSSFSVGEGWKRRTVICHQDIRVPSSDGLSGPCRAPASCPSRYHGPRPISNQGAAAVPRGARAGRWYRGRKPDQPLYVPRVLRKQEEWGLTSTSVLKREAPAGRDPEEPGDVGAGDPNSDQGLPVLMTQGTEDLKGPGQRCENEPLLDPVGPEPLGPESQSGKGDMVEMATRFGSTLQLDLEKGKESLLEKRLVAEEEEDEEEVEEDGPSSCSEDDYSELLQEITDNLTKKEIQIEKIHLDTSSFVEELPGEKDLAHVVEIYDFEPALKTEDLLATFSEFQEKGFRIQWVDDTHALGIFPCLASAAEALTREFSVLKIRPLTQGTKQSKLKALQRPKLLRLVKERPQTNATVARRLVARALGLQHKKKERPAVRGPLPP

SEQ ID NO: 920684 - protein, 274 aa, Homo sapiens
LDPVGPEPLGPEESDQGLPVLMTQGTEDLKGPGQRCENEPLLDPVGPEPLGPESQSGKGDMVEMATRFGSTLQLDLEKGKESLLEKRLVAEEEEDEEEVEEDGPSSCSEDDYSELLQEITDNLTKKEIQIEKIHLDTSSFVEELPGEKDLAHVVEIYDFEPALKTEDLLATFSEFQEKGFRIQWVDDTHALGIFPCLASAAEALTREFSVLKIRPLTQGTKQSKLKALQRPKLLRLVKERPQTNATVARRLVARALGLQHKKKERPAVRGPLPP

SEQ ID NO: 920685 - protein, 220 aa, Homo sapiens
WSCEKRATILQTPESRQVMNPARTGSILSRQQEWGTAVKILESMEATLEQDNKTRLEQFGGFRRKEDRKMWESLELPRDLWNDFDQNADSDMDNEVQAEVVSDGDKELVRNWMWKGNVGLEPRYRVPTGALTSRVVRRGPPSFRPQKCRSTDSLHHEPGKAAGTQCQPVKDLPKAVGAHSLHQPALDVAKLGKTEPGTSDHLPSHSKKPVCRMKLNRDKP

SEQ ID NO: 920686 - protein, 556 aa, Homo sapiens
MASKPAAGKSRGEKRKRVVLTLKEKIDICTRLEKGESRKALMQEYNVGMSTLYDIRAHKAQLLRFFASSDSNKALEQRRTLHTPKLEHLDRVLYEWFLGKRSEGVPVSGPMLIEKAKDFYEQMQLTEPCVFSGGWLWRFKARHGIKKLDASSEKQSADHQAAEQFCAFFRSLAAEHGLSAEQVYNADETGLFWRCLPNPTPEGGAVPGPKQGKDRLTVLMCANATGSHRLKPLAIGKCSGPRAFKGIQHLPVAYKAQGNAWVDKEIFSDWFHHIFVPSVREHFRTIGLPEDSKAVLLLDSSRAHPQEAELVSSNVFTIFLPASVASLVQPMEQGIRRDFMRNFINPPVPLQGPHARYNMNDAIFSVACAWNAVPSHVFRRAWRKLWPSVAFAEGSSSEEELEAECFPVKPHNKSFAHILELVKEGSSCPGQLRQRQAASWGVAGREAEGGRPPAATSPAEVVWSSEKTPKADQDGGGDPGEGEEVAWEQAAVAFDAVLRFAERQPCFSAQEVGQLRALCAVFRSQQQETVGLEDVVVTSPEELAIPKCCLEASTET

SEQ ID NO: 920687 - protein, 509 aa, Homo sapiens
MAKQLNLPENTDDWTKEDVNQWLESHKIDQKHREILTEQDVNGAVLKWLKKEHLVDMGITHGPAIQIEELFKELRKTAIEDSIQTSKMGKPSKNAPKDQTVSQKERRETSKQKQKGKENPDMANPSAMSTTAKGSKSLKVELIEDKIDYTKERQPSIDLTCVSYPFDEFSNPYRYKLDFSLQPETGPGNLIDPIHEFKAFTNTATATEEDVKMKFSNEVFRFASACMNSRTNGTIHFGVKDKPHGKIVGIKVTNDTKEALINHFNLMINKYFEDHQVQQAKKCIREPRFVEVLLPNSTLSDRFVIEVDIIPQFSECQYDYFQIKMQNYNNKIWEQSKKFSLFVRDGTSSKDITKNKVDFRAFKADFKTLAESRKAAEEKFRAKTNKKEREGPKLVKLLTGNQDLLDNSYYEQYILVTNKCHPDQTKHLDFLKEIKWFAVLEFDPESNINGVVKAYKESRVANLHFPSVYVEQKTTPNETISTLNLYHQPSWIFCNGRLDLDSEKYKPFD

SEQ ID NO: 920688 - protein, 509 aa, Homo sapiens; identical to SEQ ID NO: 920687

SEQ ID NO: 920689 - protein, 107 aa, Homo sapiens
MSKQVSLPEMIKDWTKEHVKKWVNEDLKINEQYGQILLSEEVTGLVLQELTEKDLVEMGLPWGPALLIKRSYNKLNSKSPESDNHDPGQLDNSKPSKTEHQKNPKHT

SEQ ID NO: 920690 - protein, 326 aa, Homo sapiens
MDRGEKIQLKRVFGYWWGTSFLLINIIGAGIFVSPKGVLAYSCMNVGVSLCVWAGCAILAMTSTLCSAEISISFPCSGAQYYFLKRYFGSTVAFLNLWTSLFLGSGVVAGQALLLAEYSIQPFFPSCSVPKLPKKCLALAMLWIVGILTSRGVKEVTWLQIASSVLKVSILSFISLTGVVFLIRGKKENVERFQNAFDAELPDISHLIQAIFQGYFAYSGGACFTLIAASTDGAAPDPPQVITNHICRMHTGKLKGNFLCLTGKKYFGNVTEDVKFVENTEFPTHLLLPQPPYTQTFPPPKPMSGPYDLDTTTFHKKTLHPWPGPF

SEQ ID NO: 920691 - protein, 201 aa, Homo sapiens
MPGQGHQRAPWSSSNASVWEDTCCQADPPLDSAPVGSLYGGSSPTFAFHTALGEVLHEGSASAADFCLDIQAHIGNLLTSKFFSYKDFDTLLYTCAAEFDFMEKETPLRYTKTLLFPVVLVVFVAIVRKIISDMWGVLAKQQTHIRTQHITYSSFRCYPVQSDSSPAHNLHSKDTVLYFSSAGKVNYYVSGFRTSGLPFGK

SEQ ID NO: 920692 - protein, 162 aa, Homo sapiens
TKGSPLTMDSLASIAVRNNFCFFINYQIQLGHKWSLVIHPQLLPRSGLRAPFHYPLLMTLSLLSGPQPCFLTMVSATIICDKFPAVVMICLVMWFEALEEPLSLKATLSWGADIPHLAFPLLALTPFCRPVKRVPAFPLPSAMIVSFLRPSQRCGTETMHSK

SEQ ID NO: 920693 - protein, 640 aa, Homo sapiens
MLRATAPCWFPPGYPEAKKVAEEAALEASRHLGGEQSQAGAPEGSKMLRATAPCWFRPGYPEAKKLAKEAAPEASRHLGAEQSPAGAPEGSKMLRATAPCCFPPGYPEAKKVAEEAALEAPEFPLPSHQPAQSFGLWVPQMHKQASAFVDIQAEPQNRGPAVPPAWPKMVTESCYFPAQRGSACRLPAAPRLTERPSGVRISAPRKRKTIAHSSSPCLVTGYTDAKRTRVASSSQRSRGSKVGRQPGKTRNSSGCQVPTVLRRGYLQLFTEECLKFCASKQEAEEKALNEEKVAYDCSPNKNRYLNVVLNTLKRLKGLTPSSMPGLSRAALYSRLQEFLLTQDQLKENGYPFPHPERPGGAVLFTGQGKGPGDSSCRVCCRCGTEYLVSSSGRCVRDQLCYYHWGRVRSSQVAGGRVSQYTCCAAAPGSVGCQVAKQHVRDGRKESLDGFVETFKKELSRDAYPGIYALDCEMCYTTHGLELTRVTVVDADMRVVYDTFVKPDNEIVDYNTRFSGVTEADVAKTSITLPQVQAILLSFFSAQTILIGHSLESDLLALKLIHSTVVDTAVLFPHYLGFPYKRSLRNLAADYLAQIIQDSQDGHNSSEDANACLQLVMWKVRQRAQIQPRHRSASPAALACP

SEQ ID NO: 920694 - protein, 217 aa, Homo sapiens
HLVSCNQTSPSESEDREMVKWVSEKGYGKSQTLVEFELTGGCKLQPQVQAGLGICGKEKRREKQECETDILSEEEKREHFKRKAAELRRRPQNSAEGRRTPQKSAHSKEVASASSPLIEQAESQCAKKVRFRLFSSYFSFFLTSKPQSYGKGWGRICGRVLLPTGPLIMENQSFFLKLTGQSMNLTTADMDFPKLQSVERGLRVFTRYFIFRLLPAK

SEQ ID NO: 920695 - protein, 195 aa, Homo sapiens
DKAQWLLFGTRGRGPEKGGAEKEKEESTAWLGQKRWDPGRPPLCPCRAPRDQRVAHKGAAEPEPPAPQGTVGSAQLGGLCAPRPAAPPPALPGPTPLPPPSPRPSPPLSPRPPLLLGCSPTLSLCSPPYSRPVVEVTFLRSAASEGGEPTGSATPLHAVSGQLSEGLEPIEGWTPYRALGSPRKTWSPPPHFSGR

SEQ ID NO: 920696 - protein, 195 aa, Homo sapiens; identical to SEQ ID NO: 920695

SEQ ID NO: 920697 - protein, 309 aa, Homo sapiens
MWKFLGKNDGQLILIISLFTLLNVLTYFFFGGHIAGSLAVVTDAAHLLIDLTSFLLSLFSLWLSSKPPSKRLTFGWHRAEILGALLSILCIWVVTGVLVYLACERLLYPDYQIQATVMIIVSSCAVAANIVLTVVLHQRCLGHNHKEVQANASVRAAFVHALGDLFQSISVLISALIIYFKPEYKIADPICTFIFSILVLASTITILKDFSILLMEGVPKSLNYSGVKELILAVDGVLSVHSLHIWSLTMNQVILSAHVATAASRDSQVVRREIAKALSKSFTMHSLTIQMESPVDQDPDCLFCEDPCD

SEQ ID NO: 920698 - protein, 657 aa, Homo sapiens
MLRATAPCWFPPGYPEAKKVAEEAALEASRHLGGEQSQAGAPEGSKMLRATAPCWFRPGYPEAKKVAKEAAPEASRHLGAEQSPAGAPEGSKMLRATAPCWFPPGYPEAKKPAQSFGLWVPQMHKQASAFVDIQAEPQNRGPAVPPAWPKMVTESCYFPAQRGSACRLPAAPRLTERPSGVRISAPRKRKTIAHSSSPCLVTGYTDAKRTRVASSSQRSRGSKVGRQPGKTRNRSGMACKTTATTSSKRIVRRPSLPSLSLKKPIILRSSGCQVPTVLRRGYLQLFTEECLKFCASKQEAEEKALNEEKVAYDCSPNKNRYLNVVLNTLKRLKGLTPSSMPGLSRAALYSRLQEFLLTQDQLKENGYPFPHPERPGGAVLFTGQGKGPGDSSCRVCCRCGTEYLVSSSGRCVRDQLCYYHWGRVRSSQVAGGRVSQYTCCAAAPGSVGCQVAKQHVRDGRKESLDGFVETFKKELSRDAYPGIYALDCEMCYTTHGLELTRVTVVDADMRVVYDTFVKPDNEIVDYNTRFSGVTEADVAKTSITLPQVQAILLSFFSAQTILIGHSLESDLLALKLIHSTVVDTAVLFPHYLGFPYKRSLRNLAADYLAQIIQDSQDGHNSSEDANACLQLVMWKVRQRAQIQPRHRSASPAALACP

SEQ ID NO: 920699 - protein, 290 aa, Homo sapiens
KGRYGVRQSLCTPARYEGTWSNGLQDGYGVETYGDGGTYQGQWAGGMRHGYGVRQSVPYGMATVIRSPLRTSLASLRSEQSNGSVLHDAAAAADSPAGTRGGFVLNFHADAELAGKKKGGLFRRGSLLGSMKLRKSESKSSISSKRSSVRSDAAMSRISSSDANSTISFGDVDCDFCPVEDHVDATTTETYMGEWKNDKRNGFGVSERSNGMKYEGEWANNKRHGYGCTVFPDGSKEEGKYKNNILVRGIRKQLIPIRHTKTREKVDRAIEGAQRAAAMARTKVEIANSR

SEQ ID NO: 920700 - protein, 138 aa, Homo sapiens
MNESKNHITGLKSSFNPQETSFPRPLVNSKLTDSHCLPGDELPELAAGQPFPYAHSGPCAREPDNLAWGNCMGHLLPGHVDIVFVPESRGKCATCALGSMHRQAPCLLYCSALTILKFIIIVKQRVPCFLLDWALQIM

SEQ ID NO: 920701 - protein, 142 aa, Homo sapiens
MMTQYNGPQETSMTLELRTLLLTGGEKAKKTENPLCSCELALADNIMGGIPGEGSKPHSPDLNMKTQHMISVTLIPSQGEALFLLAGKCEPVGGERGVEHYVEVLPGSLASEGLMPEGIESPTETQDRRRRICECLSPVKLP

SEQ ID NO: 920702 - protein, 176 aa, Homo sapiens
MAGRADIYCIQDKRGRDLGTEMNKTWSLSLQQLIKNWEKQSCKELTVETKHMIIRVSHSRAQYQYEQNENKMVSAAYPTGMLGNLHEIFDRQECEFLSQIDEVEIPREDTGKSAALNGRVNVHDVIASPSSASSNLCPCQSGSSFWHLTCLPGKRQLRVKEKTLSCMLGCLRIQRS

SEQ ID NO: 920703 - protein, 195 aa, Homo sapiens
MASGLIDSGLMDSGLMDSGPMDSGLIDSGLMDSGLMDSGLMDSGLIDSGLMDSGLIDSGLMDSGLMDSGLIDLKGHKEQMGWERLLKDLKLPPQALALAPAGRVRAASSSSVRMTQMPASDILPSPPAWVTSLRNCLLPKTQLTGKMKQCRTALSPHSSCPQVLFLPLHSTTPMKLPHAPLQTHLARCSGSEPLW

SEQ ID NO: 920704 - protein, 149 aa, Homo sapiens
MRTWNKAECDNALGSGVWGPEKILDFWAVLEVLIQKWKKIMSLNAVTVGGIKSCELRTKYVYSDVNPKALSCPRVSSLAGGLCRYSYVPDLGNRISNADVTWWAEVVPSHLFVMFYNGGHFPEWFSLSMAIISDQNGIKLEMNNRRKQK

SEQ ID NO: 920705 - protein, 149 aa, Homo sapiens; identical to SEQ ID NO: 920704

SEQ ID NO: 920706 - protein, 149 aa, Homo sapiens; identical to SEQ ID NO: 920704

SEQ ID NO: 920707 - protein, 149 aa, Homo sapiens; identical to SEQ ID NO: 920704

SEQ ID NO: 920708 - protein, 149 aa, Homo sapiens; identical to SEQ ID NO: 920704

SEQ ID NO: 920709 - protein, 149 aa, Homo sapiens; identical to SEQ ID NO: 920704

SEQ ID NO: 920710 - protein, 149 aa, Homo sapiens; identical to SEQ ID NO: 920704

SEQ ID NO: 920711 - protein, 149 aa, Homo sapiens; identical to SEQ ID NO: 920704

SEQ ID NO: 920712 - protein, 149 aa, Homo sapiens; identical to SEQ ID NO: 920704

SEQ ID NO: 920713 - protein, 149 aa, Homo sapiens; identical to SEQ ID NO: 920704

SEQ ID NO: 920714 - protein, 149 aa, Homo sapiens; identical to SEQ ID NO: 920704

SEQ ID NO: 920715 - protein, 149 aa, Homo sapiens; identical to SEQ ID NO: 920704

SEQ ID NO: 920716 - protein, 149 aa, Homo sapiens; identical to SEQ ID NO: 920704

SEQ ID NO: 920717 - protein, 149 aa, Homo sapiens; identical to SEQ ID NO: 920704

SEQ ID NO: 920718 - protein, 149 aa, Homo sapiens; identical to SEQ ID NO: 920704

SEQ ID NO: 920719 - protein, 149 aa, Homo sapiens; identical to SEQ ID NO: 920704

SEQ ID NO: 920720 - protein, 149 aa, Homo sapiens; identical to SEQ ID NO: 920704

SEQ ID NO: 920721 - protein, 174 aa, Homo sapiens
MQGQDHRPVASDWQEGKFQPIGEERVQGHPRTPERLATVVVAFGPQLLGCHRSACGSPSPAHTGLYRSPQGRSEWLCSSGLSWCFSWLCLLPEATSHTQATLPPSAQPTLTLSRSSQSILATFLEEVKLLTNFHHGKLTMQLALACTSPCCHHVKKDVFTSPPAMIQRENGLIR

SEQ ID NO: 920722 - protein, 146 aa, Homo sapiens
MKPSSGAAQTGMAFGPVPPHTASEACKEVSEGRTRQTQVEGKGNLSRTPQVPSTRRPSEALQTVPSDRASHFRLGLNGSPTHTSVVLEAGKKGKCADTEGRGGGLALESPRYRARDSAGVRALEMDSRALAPALPEDPARANWRCE

SEQ ID NO: 920723 - protein, 573 aa, Homo sapiens
MSNLKMKEAALIYLDRSGGLQKFIDDCKYYNDSKQSYAVYRFKILINPSDVVELDAELGNHILHQPLKAAEVFQSVCFIAVKTLSLIGQLQTETQINIVLKLTHLPPLPSYGLDLCEFPLDYTSQRFYMMQGIVIAMTTITKYTQGARFLCSDEACPLSKGFQYIRVHVPGATESATIRNDFLCNLCASSLQEDRKFRVLGDESVNKMNIGNEYKIIGIPTCVKTSQTAVCIEANSITFCNSKAILANIFASQITPPGTYNLLKLCLLMSLVQTTDRNKELEDCLDILIITSDTLLIDRLLNFSINLVPRGIRHLVSTEIFPTLSRNKYGTGAVSIQAGSALLAKGGICFIGDLASHKKDKLEQLQTVLESRSITVYIPGKKFGEDIDQQMTFPVQCSFWSFVDVDSSSRRNAQKINTLIGQMDCSLIPANLVEAFGLLINCNESSPCHPFLPTVQHTLNKAINPEGLFYAASRQFTTEDFEKLLAFAKNLNVEFSLEAERMTHGYYLASRRIRTGSVCGSKLSASALKYLVFLSEAHARLNLRNKVLKEDVLIAALLFETSLTLKYGNELNY

SEQ ID NO: 920724 - protein, 848 aa, Homo sapiens
MSLFFLIRNNTGIQSRAERQWDRTTLGSSPGLRVSGKGPHWDPVQGWESVRKHTPGSTPAGSQWERTTLGSSPAGSHGKGYTGIQSSWESVRKAHTGIQSRAGSQWERTTLGSSPRLGVSGKRPHRDPVWGWESVRKDLTGIQSGAGSQTTPGSSPGLGVSGKGRHWDPVRGWESVGKDTLASSPGLRVSGKGRHWDAVRGWESVGKDDTGIQSRAGSHQWERTTLGSSPGLRVSGKGRHWDAVRGWESVGKDTLKSSPGLGVSEKGPCWDPVRGWESVGKDHTGIQSGAESQWERTTLGSSTGLGVSEKGPHWDPVRGWESVGKEHAGIHLGLRVSGKGHIRIQSGWESVGKDTPASSPGLRVSGKGHTGIQSGAGSQWERTTLGSSPGLRVSGKGHAGIQSGAGSQWERTTLGSSPGLRVSGKGHTEIQSGAESQWERTTLRSSPGLGVSGKGLHWDAVRGWESVGKDHTGMQSRAGSQWQRTHWDPVRRDTPGSSLAGSQWERTTLGSSPELGVSEKEQHWDPVWGWESVAKDTLGSTPGLGVSEKGPHWDAVRDWESVGKDTLGCSPGLGVSGKGPHWDPVRGWESVRKDHTGMQSGAGSQWERTTLGSSPGLGVSEKGPHWDPVRGWESVGKDTLGSSPGLGVSGKGPHWDPVRGWESVGKDTLGCSPGLGVSGKGPHWDAVRGWESVGKDHTGIQIRGWESVGKDTLGCSPGLGVSGKGPQWDAVQGWESVGKDHTGMQSGAGSQWERTTLGSSPGLGVSKKGPHWDPVRSWESVRNNNTGNQSGDGSQWQRTHWDPLQGWESVRKDHTGIQSGAGSQWERTPLGSSPGLRVSGKGRHWDPV

SEQ ID NO: 920725 - protein, 848 aa, Homo sapiens; identical to SEQ ID NO: 920724

SEQ ID NO: 920726 - protein, 117 aa, Homo sapiens
MTTNMKERLLQRKTIHSPGLEVFEEILRGYNTRGTYANMSARFEQAPCKTSSGTHMDLKIPWREMYPAKANPALSLVLMLTLEGSPTSVGWRWRPGSLEDCPGTEQGQLSFQSRAGM

SEQ ID NO: 920727 - protein, 705 aa, Homo sapiens
QDLFHSAGARVDRANSCQSDSSGFLEEPLEPLPLQDCQLESDGPDSKSRASMSFSSQEANALEQRASVSVMEEEFLLEAMEGPPELYIPDMACAKTTTRGECPRKDSHLWQLLPMPHAEYEVTRPTATSKYDHPLGFMVTHVTEMQDSFVRPEGAGKVQSHHNESQRSPGNDHTQDKFLHVDSEAPREEESSGFCPHTNHSLLVPESSSQCIPKHSEITPYATDLAQTSEKLIPHLHKLPGDPAQVKSRSGTLGQILPGTEAEMENLPLNTGSSRSVMTQMSSSLVSAAQRAVALGTGPRGTSLECTVCDPVTATETRLGTKARQLNDASIQTSALSNKTLTHGPQPLTKSVSLDSGFSSICPMGTCHAIPAHCCICCHHHPHCHGERQSPGPEPSVCRHCLCSLTGHQEAQFMTTLKALQDTTVRELCSKDCSFSEEGRLERVRGGPGGKGTGTQSQIPHEEEEDDDDNDDDNGSSEQMLKLRAILGCKTKGIAGKNSASHQSAGKWTGLGGAKVLSHCSQCTVHEMEAMKTICQSFREYLEEIEQHLMGQQALFSRDMSEEEREEAEQLQTLREALRQQVAELEFQLGDRAQQIREGILLQLEVLTAEPPEHYSNLHQYNWIEESNGQTSCSKIHPGMAPRTVFPPDDGQEAPCSGGTQLAAFTPPTLENSTRMSPSSSAWAKLGPTPLSNCPVGEKDADVFL

SEQ ID NO: 920728 - protein, 404 aa, Homo sapiens
MRLEDLWNLFHAQGGGDVLAVAGVPMWSPEREAEAPAGGDPAGLLPPEWEEDEERMSFLFSAFKRSREVNSTDWDSKMGFWAPLVLSHSRRQGVVRLRLRDLQEAFQRKGSVPLGLATVLQDLLRRGELQRESDFMASVDSSWISWGVGVFLLKPLKWTLSNMLGDNKVPAEEVLVAVELLKEKAEEVYRLYQNSPLSSHPVVALSELSTLCANSCPDERTFYLVLLQLQKEKRVTVLEQNGEKIVKFARGPRAKVSPVNDVDVGVYQLMQSEQLLSRKVESLSQEAERCKEEARRACRAGKKQLALRSLKAKQRTEKRIEALHAKLDTVQGILDRIYASQTDQMVFNAYQAGVGALKLSMKDVTVEKAESLVDQIQEVQKGAREGHTEKEVTENRFDFIAHPL

SEQ ID NO: 920729 - protein, 453 aa, Homo sapiens
MWSPEREAEAPAGGDPAGLLPPEWEEDEERMSFLFSAFKRSREVNSTDWDSKMGFWAPLVLSHSRRQGVVRLRLRDLQEAFQRKGSVPLGLATVLQDLLRRGELQRESDFMASVDSSWISWGVGVFLLKPLKWTLSNMLGDNKVPAEEVLVAVELLKEKAEEVYRLYQNSPLSSHPVVALSELSTLCANSCPDERTFYLVLLQLQKEKRVTVLEQNGEKIVKFARGPRAKVSPVNDVDVGVYQLMQSEQLLSRKVESLSQEAERCKEEARRACRAGKKQLALRSLKAKQRTEKRIEALHAKLDTVQGILDRIYASQTDQMVFNAYQAGVGALKLSMKDVTVEKAESLVDQIQELCDTQDEVSQTLAGGVTNGLDFDSEELEKELDILLQDTTKEPLDLPDNPRNRHFTNSVPNPRISDAELEAELEKLSLSEGGLVPSSKSPKRQLEPTLKPL

SEQ ID NO: 920730 - protein, 433 aa, Homo sapiens
NGSREGTRAEADQGQACVRSLAVAGVPMWSPEREAEAPAGGDPAGLLPPEWEEDEERMSFLFSAFKRSREVNSTDWDSKMGFWAPLVLSHSRRQGVVRLRLRDLQEAFQRKGSVPLGLATVLQDLLRRGELQRESDFMASVDSSWISWGVGVFLLKPLKWTLSNMLGDNKVPAEEVLVAVELLKEKAEEVYRLYQNSPLSSHPVVALSELSTLCANSCPDERTFYLVLLQLQKEKRVTVLEQNGEKIVKFARGPRAKVSPVNDVDVGVYQLMQSEQLLSRKVESLSQEAERCKEEARRACRAGKKQLALRSLKAKQRTEKRIEALHAKLDTVQGILDRIYASQTDQMVFNAYQAGVGALKLSMKDVTVEKAESLVDQIQELCDTQDEVSQTLAGGVTNGLGECFFLSSWKTSLPCAVMSLTVDLLFRVQAGLS

SEQ ID NO: 920731 - protein, 480 aa, Homo sapiens
NGSREGTRAEADQGQACVRSLAVAGVPMWSPEREAEAPAGGDPAGLLPPEWEEDEERMSFLFSAFKRSREVNSTDWDSKMGFWAPLVLSHSRRQGVVRLRLRDLQEAFQRKGSVPLGLATVLQDLLRRGELQRESDFMASVDSSWISWGVGVFLLKPLKWTLSNMLGDNKVPAEEVLVAVELLKEKAEEVYRLYQNSPLSSHPVVALSELSTLCANSCPDERTFYLVLLQLQKEKRVTVLEQNGEKIVKFARGPRAKVSPVNDVDVGVYQLMQSEQLLSRKVESLSQEAERCKEEARRACRAGKKQLALRSLKAKQRTEKRIEALHAKLDTVQGILDRIYASQTDQMVFNAYQAGVGALKLSMKDVTVEKAESLVDQIQELCDTQDEVSQTLAGGVTNGLDFDSEELEKELDILLQDTTKEPLDLPDNPRNRHFTNSVPNPRISDAELEAELEKLSLSEGGLVPSSKSPKRQLEPTLKPL

SEQ ID NO: 920732 - protein, 392 aa, Homo sapiens
KQAGTGLGDFWAYRRPTLVVLRKGSVPLGLATVLQDLLRRGELQRESDFMASVDSSWISWGVGVFLLKPLKWTLSNMLGDNKVPAEEVLVAVELLKEKAEEVYRLYQNSPLSSHPVVALSELSTLCANSCPDERTFYLVLLQLQKEKRVTVLEQNGEKIVKFARGPRAKVSPVNDVDVGVYQLMQSEQLLSRKVESLSQEAERCKEEARRACRAGKKQLALRSLKAKQRTEKRIEALHAKLDTVQGILDRIYASQTDQMVFNAYQAGVGALKLSMKDVTVEKAESLVDQIQELCDTQDEVSQTLAGGVTNGLDFDSEELEKELDILLQDTTKEPLDLPDNPRNRHFTNSVPNPRISDAELEAELEKLSLSEGGLVPSSKSPKRQLEPTLKPL

SEQ ID NO: 920733 - protein, 431 aa, Homo sapiens
  misc_feature (7)..(7): Xaa can be any naturally occurring amino acid
  misc_feature (25)..(25): Xaa can be any naturally occurring amino acid
  misc_feature (29)..(29): Xaa can be any naturally occurring amino acid
  misc_feature (31)..(31): Xaa can be any naturally occurring amino acid
  misc_feature (37)..(37): Xaa can be any naturally occurring amino acid
  misc_feature (46)..(46): Xaa can be any naturally occurring amino acid
ILGPGHXFPPFIRGLDISGSCSDWXSSQXSXEPSEEXFPPPADLLXPSDEEAAPTGHTSPSGLSRLWATWGDLFSLNTRGELQRESDFMASVDSSWISWGVGVFLLKPLKWTLSNMLGDNKVPAEEVLVAVELLKEKAEEVYRLYQNSPLSSHPVVALSELSTLCANSCPDERTFYLVLLQLQKEKRVTVLEQNGEKIVKFARGPRAKVSPVNDVDVGVYQLMQSEQLLSRKVESLSQEAERCKEEARRACRAGKKQLALRSLKAKQRTEKRIEALHAKLDTVQGILDRIYASQTDQMVFNAYQAGVGALKLSMKDVTVEKAESLVDQIQELCDTQDEVSQTLAGGVTNGLDFDSEELEKELDILLQDTTKEPLDLPDNPRNRHFTNSVPNPRISDAELEAELEKLSLSEGGLVPSSKSPKRQLEPTLKPL

SEQ ID NO: 920734 - protein, 82 aa, Homo sapiens
ICPFVSRCKEEARRACRAGKKQLVFNAYQAGVGALKLSMKDVTVEKAESLVDQIQEVQKGAREGHTEKEVTENRFDFIAHPL

SEQ ID NO: 920735 - protein, 480 aa, Homo sapiens; identical to SEQ ID NO: 920731

SEQ ID NO: 920736 - protein, 482 aa, Homo sapiens
LQYTPEYCSEAGWRQGQACVRSLAVAGVPMWSPEREAEAPAGGDPAGLLPPEWEEDEERMSFLFSAFKRSREVNSTDWDSKMGFWAPLVLSHSRRQGVVRLRLRDLQEAFQRKGSVPLGLATVLQDLLRRGELQRESDFMASVDSSWISWGVGVFLLKPLKWTLSNMLGDNKVPAEEVLVAVELLKEKAEEVYRLYQNSPLSSHPVVALSELSTLCANSCPDERTFYLVLLQLQKEKRVTVLEQNGEKIVKFARGPRAKVSPVNDVDVGVYQLMQSEQLLSRKVESLSQEAERCKEEARRACRAGKKQLALRSLKAKQRTEKRIEALHAKLDTVQGILDRIYASQTDQMVFNAYQAGVGALKLSMKDVTVEKAESLVDQIQELCDTQDEVSQTLAGGVTNGLDFDSEELEKELDILLQDTTKEPLDLPDNPRNRHFTNSVPNPRISDAELEAELEKLSLSEGGLVPSSKSPKRQLEPTLKPL

SEQ ID NO: 920737 - protein, 456 aa, Homo sapiens
NGSREGTRAEADQGQACVRSLAVAGVPMWSPEREAEAPAGGDPAGLLPPEWEEDEERMSFLFSAFKRSREVNSTDWDSKMGFWAPLVLSHSRRQGVVRLRLRDLQEAFQRKGSVPLGLATVLQDLLRRGELQRESDFMASVDSSWISWGVGVFLLKPLKWTLSNMLGDNKVPAEEVLVAVELLKEKAEEVYRLYQNSPLSSHPVVALSELSTLCANSCPDERTFYLVLLQLQKEKRVTVLEQNGEKIVKFARGPRAKVSPVNDVDVGVYQLMQSEQLLSRKVESLSQEAERCKEEARRACRAGKKQLALRSLKAKQRTEKRIEALHAKLDTVQGILDRIYASQTDQMVFNAYQAGVGALKLSMKDVTVEKAESLVDQIQEILTVKNWRRNWTSSFRIPPKNLWICLTTPAIGILPTACLTLGSQMLNLKLNLRNCPYQREVWSQAVNLQKGNWNRL

SEQ ID NO: 920738 - protein, 424 aa, Homo sapiens
GTEAGRERGRKRTRARLVFAALPWLGFRCGPRSGRPRPQPGETRRAFCPPSGRRTRSACPSCSPLSRGVASRGELQRESDFMASVDSSWISWGVGVFLLKPLKWTLSNMLGDNKVPAEEVLVAVELLKEKAEEVYRLYQNSPLSSHPVVALSELSTLCANSCPDERTFYLVLLQLQKEKRVTVLEQNGEKIVKFARGPRAKVSPVNDVDVGVYQLMQSEQLLSRKVESLSQEAERCKEEARRACRAGKKQLALRSLKAKQRTEKRIEALHAKLDTVQGILDRIYASQTDQMVFNAYQAGVGALKLSMKDVTVEKAESLVDQIQELCDTQDEVSQTLAGGVTNGLDFDSEELEKELDILLQDTTKEPLDLPDNPRNRHFTNSVPNPRISDAELEAELEKLSLSEGGLVPSSKSPKRQLEPTLKPL

SEQ ID NO: 920739 - protein, 310 aa, Homo sapiens
MELMSVCCHVKLFMEKAEEVYRLYQNSPLSSHPVVALSELSTLCANSCPDERTFYLVLLQLQKEKRVTVLEQNGEKIVKFARGPRAKVSPVNDVDVGVYQLMQSEQLLSRKVESLSQEAERCKEEARRACRAGKKQLALRSLKAKQRTEKRIEALHAKLDTVQGILDRIYASQTDQMVFNAYQAGVGALKLSMKDVTVEKAESLVDQIQELCDTQDEVSQTLAGGVTNGLDFDSEELEKELDILLQDTTKEPLDLPDNPRNRHFTNSVPNPRISDAELEAELEKLSLSEGGLVPSSKSPKRQLEPTLKPL

SEQ ID NO: 920740 - protein, 195 aa, Homo sapiens
VPSTFPLDWTLILPRMVSNSCTQAILPPQPPKVLRLQALSHCTWPTRLSEALRSLKAKQRTEKRIEALHAKLDTVQGILDRIYASQTDQMVFNAYQAGVGALKLSMKDVTVEKAESLVDQIQELCDTQDEVSQTLGRWALPLHLMEPGGPPVGERLLPRLLHSPGKRPSHYRTLRCPDPLCKEAKLLPWPHHGVT

SEQ ID NO: 920741 - protein, 209 aa, Homo sapiens
ARGSTVLTSRPSLPVAVLSIMYKYKQAAGVWGFCASTDCFSGTDLLRIFQAQACHVSRAGRMWASCSISIPFGVTYLFRYLATIRSAWIAQMSLIGLLPWYAGRVMGFEGQGLRRCNKKALNLKNDFLMEDIYHFIPCIDQIPYYQKWVIATPDFYENYSVMSENIDFGVSCPDVNPGTRYSCCGPGGLIKFTGERKAFTLMDDGSCFA

SEQ ID NO: 920742 - protein, 145 aa, Homo sapiens
LSLQAMGSSQMFTCNPSPKIGTEEDAVISTCLMPIFDQICCEEEALGQGTRESEVLPGSQAERSRPSWTIYTHTSLPTEPLQWFNTIGPPPRRNADPAHHKHHCRFLVSLSLPEKRPKETLEVIGMSYTLIVGAVSWKCTLLRSH

SEQ ID NO: 920743 - protein, 210 aa, Homo sapiens
ERVEDLRSEELEAVMRANAICGEWETRRFGGGNGDALRLGGGGGEAVLLFGGGEGEYLLCIGGEYLLGEAVEDEGREKETVAFWWVVGMDFSSVYHEGKSLFGAFVVMEKHSGKGNVSAACQPHHSSHGISWVVHLLRRRRNQSQMKTAGFVVCIGVSAEINEEGPSVPTVLGGNVCYDVNFIWIELMNPFFSLMQSVILYSKAVLTNNS

SEQ ID NO: 920744 - protein, 364 aa, Homo sapiens
YPAGRRRSWASFAMQSTDLGNKESGKIWHRKPSPATRDGIIVNIIHNTSDYHPKVLRFLNVAFDGTGDCLIAGDHQGNIYVFDLHGNRFNLVQRTAQACTALAFNLRRKSEFLVALADYSIKCFDTVTKELVSWMRGHESSVFSISVHASGKYAITTSSDTAQLWDLDTFQRKRKLNIRQSVGIQKVFFLPLSNTILSCFKDNSIFAWECDTLFCKYQLPAPPESSSILYKVFAVTRDGRILAAGGKSNHLHLWCLEARQLFRIIQMPTKVRAIRHLEFLPDSFDAGSNQVLGVLSQDGIMRFINMQTCKLLFEIGSLDEGISSSAISPHGRYIASIMENGSLNIYSVQALTQEINKEEVRAQN

SEQ ID NO: 920745 - protein, 102 aa, Homo sapiens
MKLILWKKKQICGGRLGALGKSFHNTSPVWGAGAPVVGYGTPLATPAGPKGKPLAPGPTGLVSPPIKKPAGGHPRGSGQPRGGPAAYGLSHRSPKQNNRAAG

SEQ ID NO: 920746 - protein, 102 aa, Homo sapiens; identical to SEQ ID NO: 920745

SEQ ID NO: 920747 - protein, 143 aa, Homo sapiens
AAAGGSGMGACRSQALPHREAAEAPREFECSASRPALLGDPTHPPQLLAQLLSPSLPEACGPQRPLGVQGRQTHAHPELALAHKRLAQPRKGIPQCSSGLKGSSSAARVGAEAEEEPIASESCQHASFFTSLFSGPFSPNTPD

SEQ ID NO: 920748 - protein, 143 aa, Homo sapiens; identical to SEQ ID NO: 920747

SEQ ID NO: 920749 - protein, 115 aa, Homo sapiens
MWLKVFTTFLSFATGACSGLKVTVPSHTVHGVRGQALYLPVHYGFHTPASDIQIIWLFERPHTMPKYLLGSVNKSVVPDLEYQHKFTMMPPNASLLINPLQFPDEGNYIVKVNIQ

SEQ ID NO: 920750 - protein, 445 aa, Homo sapiens
QGTACMGQDAFMEPFGDTLGVFQCKIYLLLFGACSGLKVTVPSHTVHGVRGQALYLPVHYGFHTPASDIQIIWLFERPHTMPKYLLGSVNKSVVPDLEYQHKFTMMPPNASLLINPLQFPDEGNYIVKVNIQGNGTLSASQKIQVTVDDPVTKPVVQIHPPSGAVEYVGNMTLTCHVEGGTRLAYQWLKNGRPVHTSSTYSFSPQNNTLHIAPVTKEDIGNYSCLVRNPVSEMESDIIMPIIYYGPYGLQVNSDKGLKVGEVFTVDLGEAILFDCSADSHPPNTYSWIRRTDNTTYIIKHGPRLEVASEKVAQKTMDYVCCAYNNITGRQDETHFTVIITSVAEIYGSSQGESQHLGNYKILLSFAHKSNATWAKSGSRFGQDMVVKMLIPQLLSLTKIPILSFQARNRIQESSNIFRFHAGSSIPKRRGKEDLAGARIASLSPL

SEQ ID NO: 920751 - protein, 183 aa, Homo sapiens
MTYSNCIILFNAHNNPARFLLIFHFTDKKTEPHRVDAKPLSGRTGICTHIYVALKATLSPFHWPIKNHRDQITRACHSADSRAEVPNCSMLCILLVTGQRPSKGIKRRHRSFQDWRDWGSWPEYHSQRSQKTPCVHVSRGRNAHAGTVSLQLNTCQRSFATLKPRPGLLRMRHTNEVTCPVMA

SEQ ID NO: 920752 - protein, 161 aa, Homo sapiens
RIVEAGIMGTSPWLGVVWSPGLLGLACSDFFMQTQKQQEKNPQCTCTISIICLHNIYLYSISQNKLQDQTRPMEVEEDSTFDGRESFYHTWAVMLVLHMSGSVFDKVTGSKLKGELLDYMLAKLMLTSVQRKFGYLFFTLKIPTSITQVQMGNQKIYSKAF

SEQ ID NO: 920753 - protein, 119 aa, Homo sapiens
MFQICHYEIIGSKDGKKKNLILMRMTYQEIKHRTSDEWAFSIANPAHLTVLPRYGPDTGPYLWFGFHSEAKPGQLVTQSLESSPSCWDSGIGSLPSQISIRKTYLKIMLTNYIDDIRLI

SEQ ID NO: 920754 - protein, 119 aa, Homo sapiens; identical to SEQ ID NO: 920753

SEQ ID NO: 920755 - protein, 119 aa, Homo sapiens; identical to SEQ ID NO: 920753

SEQ ID NO: 920756 - protein, 142 aa, Homo sapiens
MYTVTEMKSRDRLSASWRTREVNSVAQSGSQRTRVQKPKNLESDVQRQRKNSIPLQKEDSTRCKLLMALPCSGLKDSGPILTAPLGSAPVETYYLTFPFCTGLAEVLCEGSVPAAGFCLGHPGISLESTTLALCTPAGLTPH

SEQ ID NO: 920757 - protein, 299 aa, Homo sapiens
SSSHHHHHCGCCCSCSCCSPSGCFFAWPAANGAMEPRLFCWTTLFLLAGWCLPGLPCPSRCLCFKSTVRCMHLMLDHIPQNSGMLHGQVNTKKNKSQDGHQWLCRLCTAQLQSVLGNVPPLQLCNTVVLEEKEGRDRGTHLPKTQEEPRRQYRLFFKREDGGHICQSSRWQRLLWFPGGPLQTWVPRASVISGGYRTAKMAAAPSPGLSVPEGHQPDAEPSGVKTKSADSWRPRLPLPTGAQSQEDQSAVPKPKAGGCWHPGLGPSGPRPRCPPPPPGPSLAHQGGQCRRELRLRHGPT

SEQ ID NO: 920758 - protein, 1341 aa, Homo sapiens
MEYNWHYFLSIAGICRVLAVSLSVPIQEWLCLNCQTQRAISGQLGDIRKMPPAPSGPKASPMPVPTESSSQKTAVPPQVKLVKKQEQEVKTEAEKVILEKVKETLSMEKIPPMVTTDQKQEESKLEKDKASALQEKKPLPEEKKLIPEEEKIRSEEKKPLLEEKKPTPEDKKLLPEAKTSAPEEQKHDLLKSQVQIAEEKLEGRVAPKTVQEGKQPQTKMEGLPSGTPQSLPKEDDKTTKTIKEQPQPPCTAKPDQVEPGKEKTEKEDDKSDTSSSQQPKSPQGLSDTGYSSDGISSSLGEIPSLIPTDEKDILKGLKKDSFSQESSPSSPSDLAKLESTVLSILEAQASTLADEKSEKKTQPHEVSPEQPKDQEKTQSLSETLEITISEEEIKESQEERKDTFKKDSQQDIPSSKDHKEKSEFVDDITTRREPYDSVEESSESENSPVPQRKRRTSVGSSSSDEYKQEDSQGSGEEEDFIRKQIIEMSADEDASGSEDDEFIRNQLKEISSSTESQKKEETKGKGKITAGKHRRLTRKSSTSIDEDAGRRHSWHDEDDEAFDESPELKYRETKSQESEELVVTGGGGLRRFKTIELNSTIADKYSAESSQKKTSLYFDEEPELEMESLTDSPEDRSRGEGSSSLHASSFTPGTSPTSVSSLDEDSDSSPSHKKGESKQQRKARHRPHGPLLPTIEDSSEEEELREEEELLKEQEKQREIEQQQRKSSSKKSKKDKDELRAQRRRERPKTPPSNLSPIEDASPTEELRQAAEMEELHRSSCSEYSPSIESDPEGFEISPEKIIEVQKVYKLPTAVSLYSPTDEQSIMQKEGSQKALKSAEEMYEEMMHKTHKYKAFPAANERDEVFEKEPLYGGMLIEDYIYESLVEDTYNGSVDGSLLTRQEEENGFMQQKGREQKIRLSEQIYEDPMQKITDLQKEFYELESLHSVVPQEDIVSSSFIIPESHEIVDLGTMVTSTEEERKLLDADAAYEELMKRQQMQLTPGSSPTQAPIGEDMTESTMDFDRMPDASLTSSVLSGASLTDSTSSATLSIPDVKITQHFSTEEIEDEYVTDYTREIQEIIAHESLILTYSEPSESATSVPPSDTPSLTSSVSSVCTTDSSSPITTLDSITTVYTEPVDMITKFEDSEEISSSTYFPGSIIDYPEEISVSLDRTAPPDGRASADHIVISLSDMASSIIESVVPKPEGPVADTVSTDLLISEKDPVKKAKKETGNGIILEVLEAYRDKKELEAERTKSSLSETVFDHPPSSVIALPMKEQLSTTYFTSGETFGQEKPASQLPSGSPSVSSLPAKPRPFFRSSSLDISALCPFLSNDVGPLL

SEQ ID NO: 920759 - protein, 719 aa, Homo sapiens
MEYNWHYFLSIAGICRVLAVSLSVPIQEWLCLNCQTQRAISGQLGDIRKMPPAPSGPKASPMPVPTESSSQKTAVPPQVKLVKKQEQEVKTEAEKVILEKVKETLSMEKIPPMVTTDQKQEESKLEKDKASALQEKKPLPEEKKLIPEEEKIRSEEKKPLLEEKKPTPEDKKLLPEAKTSAPEEQKHDLLKSQVQIAEEKLEGRVAPKTVQEGKQPQTKMEGLPSGTPQSLPKEDDKTTKTIKEQPQPPCTAKPDQVEPGKEKTEKEDDKSDTSSSQQPKSPQGLSDTGYSSDGISSSLGEIPSLIPTDEKDILKGLKKDSFSQESSPSSPSDLAKLESTVLSILEAQASTLADEKSEKKTQPHEVSPEQPKDQEKTQSLSETLEITISEEEIKESQEERKDTFKKDSQQDIPSSKDHKEKSEFVDDITTRREPYDSVEESSESENSPVPQRKRRTSVGSSSSDEYKQEDSQGSGEEEDFIRKQIIEMSADEDASGSEDDEFIRNQLKEISSSTESQKKEETKGKGKITAGKHRRLTRKSSTSIDEDAGRRHSWHDEDDEAFDESPELKYRETKSQESEELVVTGGGGLRRFKTIELNSTIADKYSAESSQKKTSLYFDEEPELEMESLTDSPEDRSRGEGSSSLHASSFTPGTSPTSVSSLDEDSDSSPSHKKGESKQQRKARHRPHGPLLPTIEDSSEEEELREEEELLKEQEKQRD

SEQ ID NO: 920760 - protein, 1980 aa, Homo sapiens
MEYNWHYFLSIAGICRVLAVSLSVPIQEWLCLNCQTQRAISGQLGDIRKMPPAPSGPKASPMPVPTESSSQKTAVPPQVKLVKKQEQEVKTEAEKVILEKVKETLSMEKIPPMVTTDQKQEESKLEKDKASALQEKKPLPEEKKLIPEEEKIRSEEKKPLLEEKKPTPEDKKLLPEAKTSAPEEQKHDLLKSQVQIAEEKLEGRVAPKTVQEGKQPQTKMEGLPSGTPQSLPKEDDKTTKTIKEQPQPPCTAKPDQVEPGKEKTEKEDDKSDTSSSQQPKSPQGLSDTGYSSDGISSSLGEIPSLIPTDEKDILKGLKKDSFSQESSPSSPSDLAKLESTVLSILEAQASTLADEKSEKKTQPHEVSPEQPKDQEKTQSLSETLEITISEEEIKESQEERKDTFKKDSQQDIPSSKDHKEKSEFVDDITTRREPYDSVEESSESENSPVPQRKRRTSVGSSSSDEYKQEDSQGSGEEEDFIRKQIIEMSADEDASGSEDDEFIRNQLKEISSSTESQKKEETKGKGKITAGKHRRLTRKSSTSIDEDAGRRHSWHDEDDEAFDESPELKYRETKSQESEELVVTGGGGLRRFKTIELNSTIADKYSAESSQKKTSLYFDEEPELEMESLTDSPEDRSRGEGSSSLHASSFTPGTSPTSVSSLDEDSDSSPSHKKGESKQQRKARHRPHGPLLPTIEDSSEEEELREEEELLKEQEKQREIEQQQRKSSSKKSKKDKDELRAQRRRERPKTPPSNLSPIEDASPTEELRQAAEMEELHRSSCSEYSPSIESDPEGFEISPEKIIEVQKVYKLPTAVSLYSPTDEQSIMQKEGSQKALKSAEEMYEEMMHKTHKYKAFPAANERDEVFEKEPLYGGMLIEDYIYESLVEDTYNGSVDGSLLTRQEEENGFMQQKGREQKIRLSEQIYEDPMQKITDLQKEFYELESLHSVVPQEDIVSSSFIIPESHEIVDLGTMVTSTEEERKLLDADAAYEELMKRQQMQLTPGSSPTQAPIGEDMTESTMDFDRMPDASLTSSVLSGASLTDSTSSATLSIPDVKITQHFSTEEIEDEYVTDYTREIQEIIAHESLILTYSEPSESATSVPPSDTPSLTSSVSSVCTTDSSSPITTLDSITTVYTEPVDMITKFEDSEEISSSTYFPGSIIDYPEEISVSLDRTAPPDGRASADHIVISLSDMASSIIESVVPKPEGPVADTVSTDLLISEKDPVKKAKKETGNGIILEVLEAYRDKKELEAERTKSSLSETVFDHPPSSVIALPMKEQLSTTYFTSGETFGQEKPASQLPSGSPSVSSLPAKPRPFFRSSSLDISAQPPPPPPPPPPPPPPPPPPPPPPLPPPTSPKPTILPKKKLTVASPVTTATPLFDAVTTLETTAVLRSNGLPVTRICTTAPPPVPPKPSSIPSGLVFTHRPEPSKPPIAPKPVIPQLPTTTQKPTDIHPKPTGLSLTSSMTLNLVTSADYKLPSPTSPLSPHSNKSSPRFSKSLTETYVVITLPSEPGTPTDSSASQAITSWPLGSPSKDLVSVEPVFSVVPPVTAVEIPISSEQTFYISGALQTFSATPVTAPSSFQAAPTSVTQFLTTEVSKTEVSATRSTAPSVGLSSISITIPPEPLALDNIHLEKPQYKEDGKLQLVGDVIDLRTVPKVEVKTTDKCIDLSASTMDVKRQITANEVYGKQISAVQPSIINLSVTSSIVTPVSLATETVTFVTCTASASYTTGTESLVGAEHAMTTPLQLTTSKHAEPPYRIPSDQVFPIAREEAPINLSLGTPAHAVTLAITKPVTVPPVGVTNGWTDSTVSQGITDGEVVDLSTTKSHRTVVTMDESTSSVMTKIIEDEKPVDLTAGRRAVCCDVVYKLPFGRSCTAQQPATTLPEDRFGYRDDHYQYDRSGPYGYRGIGGMKPSMSDTNLAEAGHFFYKSKNAFDYSEGTDTAVDLTSGRVTTGQYDVAADLSLKYHYGVPHLISG

SEQ ID NO: 920761 - protein, 184 aa, Homo sapiens
MVGELWDRFQTRSFLAPVKPINLILQHTIHSGSLLYVNVPSKSSHKDLYVNVYNSFIHDLQNPETTKMPFSSGHVQSTNADDVDNPLGDIASLAKQRYSKPLYTNTSRAANIPGYTGKVHFTATHPANSNIPSTTPSPDSELHRVFQKEMAVDLFRHQAPLSRLVTTVRPYNPFNKKDKETIDY

SEQ ID NO: 920762 - protein, 636 aa, Homo sapiens
EWVHSENLENYPFDMFPVISKHYERSKLRNINIEMRLKRPGGPPGPPGRDGEDGPTGPPGPPGPPGPPGLGGNFAAQYDGKGVGLGPGPMGLMGPRGPPGAAGAPGPQGFQGPAGEPGEPGQTGPAGARGPAGPPGKAGEDGHPGKPGRPGERGVVGPQGARGFPGTPGLPGFKGIRGHNGLDGLKGQPGAPGVKGEPGAPGENGTPGQTGARGLPGERGRVGAPGPAGARGSDGSVGPVGPAGPIGSAGPPGFPGAPGPKGEIGAVGNAGPAGPAGPRGEVGLPGLSGPVGPPGNPGANGLTGAKGAAGLPGVAGAPGLPGPRGIPGPVGAAGATGARGLVGEPGPAGSKGESGNKGEPGSAGPQGPPGPSGEEGKRGPNGEAGSAGPPGPPGLRGSPGSRGLPGADGRAGVMGPPGSRGASGPAGVRGPNGDAGRPGEPGLMGPRGLPGSPGNIGPAGKEGPVGLPGIDGRPGPIGPAGARGEPGNIGFPGPKGPTGDPGKNGDKGHAGLAGARGAPGPDGNNGAQGPPGPQGVQGGKGEQGPPGPPGFQGLPGPSGPAGEVGKPGERGLHGEFGLPGPAGPRGERGPPGESGAAGPTGPIGSRGPSGPPGPDGNKVKSYVFYIAGLAQSAWNK

SEQ ID NO: 920763 - protein, 265 aa, Homo sapiens
MDQERPRSDLSINNRNDLRKVLHLEFLYKENKWFHEKTSKFTRSLDGRAVPAAILHGQRNACRVPPTVSLRVLKSSSTQPQEESRKVPELFVCTQQDILASSNSSPSRTSLGQLSELTVERQKTTASSPPHLPSKRLPPWDRARPRDPSEDTPAVDGSTDTDRMPLKLYLPGGNSRMTQERLERAFKRQGSQPAPVSLLGLSEQACEVTGKVEFVMVNQEENSARAHTPGKLKNALDRGVQPFGFPGPHWKNNCLVPRIKYTNNS

SEQ ID NO: 920764 - protein, 159 aa, Homo sapiens
WCAMKKNKTKACALAAPQSNKIRLSRDGNKAAVALKALQDVNCDHLNRALLRVLFSSPCYRDHVRRLRHHQQHRTGLKVHVEGRASQDSQTEAACQAEPSRRPPPSSLSSVSSMRLKKNAVVVPCLLTQRVKQEFSAPVCHGGPWEEVTYHSHPQAQEH

SEQ ID NO: 920765 - protein, 173 aa, Homo sapiens
MARSSSDSGSGRGAPGPGPEPGSERGHGGHGKRAKERPPRARPASTSPSPGAHGRRGGPEGKSSSRSPGPHPRSWSSSRSPSKSRSRSAEKRPHSPSRSPSPKKPLSRDKDGEGRARHSEAEATRARRRSRSYSPIRKRRRDSPSFMEPRRITSAASVLFHTTGPAPLPPPAA

SEQ ID NO: 920766 - protein, 128 aa, Homo sapiens
MGPAAGHAAPRGPPVPATTAGAALRAGASEPRQTQLGAPLALGEARGGPQDPSGEGAISPCPQGYKEVSGPVHGQMGPGKTLRVGIQWTRRSQMCCFYGCPLPPPVHPLCPGNKEPLRTQESPHPPSC

SEQ ID NO: 920767 - protein, 103 aa, Homo sapiens
SRSSLLSGLWSAWGPGGPLCTGCLGDAQRRKRPIPYYRPSPSSSSSCLSSDYSTRSHSRSPSPGHSHGSYSSRSHGTRSRTRSPSRTPSPSYHSRSSSESGGF

SEQ ID NO: 920768 - protein, 119 aa, Homo sapiens
MTSREQQDPSSENKKHLFPEPVTPAMRTLAILAAILLVALQAQAEPLQARADEVAAAPEQIAADIPEVVVSLAWDESLAPKHPGSRKNMDCYCRIPACIAGERRYGTCIYQGRLWAFCC

SEQ ID NO: 920769 - protein, 358 aa, Homo sapiens
RRCVVLDRILFCQQTPTMISAVLTATRYAKFAKRSNHTFAQRGGLHAYFIPLPFVYHLYVLMMPELLNGNSLFAQNCVGMQGKCCARGLLLGTAPATGASCVRHQLLRLAQHLDSIWKIECDPFPHLVTELPLEVDKLLTHKNSCLPDYVAIIDVFEPIDADGICRMEGSTVQGSSFCTASSQFCERQRATERDGQGLIRGLADSIMEGEKSQDRPSARRKPREAAGMARFKSKGLSTKETKVITLITYIVNYTETYRVERSHIEPHLHGDQLSEITEKSRWPVSKSHKIRWFYKGQFPCTSSLLCHHAFAVHSPFTMIVRPPSHVELCRLKAYNCYIKSRWIGFFAIIVTRLFLPRF

SEQ ID NO: 920770 - protein, 143 aa, Homo sapiens
MGFSFLLHRHAAKFPNFYGDQDKSKTSKAWIHDTKSGCDLSSVYFVPIIALHSTGSEGLECRCHETVTVSFWLTPDLSSNTVLTPEQKGVRSLNIPFLAAMPKRDTTNPSQHSSHKLCKWPCNPPLIGHSQSESAHKMKPYLN

SEQ ID NO: 920771 - protein, 532 aa, Homo sapiens
MPIPRGLCSFHGPHTTCLHAVCGPVGASHLARTKYNSFEYLGVSVLLCFQHKLWVLLLLLGRWRVEFRLVNELLIYSIHVTMLLDGGLGWCLMVFAGFLRPPSPCALSGAAPTCWWLLLPRLQVVLRGGPLSRTTAARDFRHHPGRPLDTEGCVPRSKSRRGGPAWLHSPFLRALVPAAANGTRKTPLPDTPHCHKAAYSALGRLRPGTARGPPSVSHLRGCVGSEAPASLQGHLGLCRCSLAGGRSGAQVGGVSAGSQLGLAWGNPGSQGPTPATLACLPVPVGLYVLQMLWISGEEPPFLSGFFCGGGLWASFFEGTPSKKAWEIEAAVSQDGDLRVRVSGAGGRGFSVATTAPELVWHQQRLKASDLVQEARDEGLCGCVTVNQQLLDPGSPGIVSLHVQELIHINLQFWDLLFLARGSESRRVVLGRHCPARGPGPPTQRPRAVPLSALAAAGTTSTRRAVPCAAAFGRPAGWLWLGPRLLSMLLGGEGSGGGTRGQLQHAEPPGRAWPRPAPSPPIRLPFVPVTATP

SEQ ID NO: 920772 - protein, 429 aa, Homo sapiens
PRGCWDSGRSAAAIMDFLWDKRTGLAARKMPHPRSSSDRTRRRRREDSYHVRRRCSRTFSRSSSQHSSRKAKSVEDDTEGHLIYHVGDWLQERYEIVSTLGKGTFGRVVQCVDHRRRGARVALKIIKNVEKYKEAARLEIKVLEKINEKDPGKNLCVQMFDWFDYHGHMCISLELLGLSTFDFLKDNNHLPYPIHQVHHMASQLCQAVKFLHDNKLTHTDLKPENILFVNSDYELTYNLEKKRHERSVKSTAVRVGDFGSATFDHEHHSTIVSTRHYRAPEVILELGWSQPCDVWSIGCIIFEYYVGFTLFQTHDNRQHLATMERILGPIPSRMIRKTRKQKYFYRGRLDWDENTSAGRYVRENCKPLRQYLTSEAEEDHQLFDLIESMLEYEPAQRLTLGEALQHPFFSRLWAEPPNKLWDSSQDISP

SEQ ID NO: 920773 - protein, 681 aa, Homo sapiens
MPNFCAAANCTRKSTHFPRDPARCQKWVENCRRADLEDKTPDQLNKHYRLCAKHFETSMICRTGPYRTVLRDNAIPTIFDLNSHLNNPHSRHRKRIKELSEDEIRTLKQKKIDETSEQEQKHKETNNSNAQNPSEEEGEGQDEDILPLTLEEKENKEYLKYLLEILILMGRQNIPLDGHEADEIPEGLFTPDNFQALLECRINSGEEVLRKRFETTAVNTLFCSKTQQRQMLEICESCIREETLREVRDSHVFSIITDDVVDIAGEEHLPVLVRFVDESHNLREEFIGFLPYEADAEILAVKFHTMITEKWGLNMEYCRGQAYIVSSGFSSKMKVVASRLLEKYPQAIYTLCSFCALNMWLAKSVPVMGVSVALGTIEEVCSFFHRSPQLLLELDNVISVLFQNSKERGKELKEICHSQWTGRHDAFEILVELLQALVLCLDGINSDTNIRWNNCIAGRAFVLCSAVTDFDFIVTIVVLKNVLSFTRAFGKNLQGQTSDVFFAAGSLTAVLHSLNEVMENIEVYNEFWFEEATNLATKLDIQMKLPGKFRRAHQGNLESQLTFESYYKETLSVPTVEHIIQELKDIFSEQHLKALKCLSLVPSVMGQLKFNTLEEHHADMYRSDLPNPDTLSAELHCWGIKWKHRGKDIELPSTIYEALQLPDIKFFPNVYALLKVLCILL

SEQ ID NO: 920774 - protein, 129 aa, Homo sapiens
MADSGDAGSSGPWWKSLTNSRKKSKEAAVGVPPPAQPAPGEPTPPAPPSPDWTSSSRENQHPNLLGGAGEPPKPDKLYGDKSGSSRRNLKISRSGRFKEKRKVRATLLPEAGRSPEEAGFPGDPHEDKQ

SEQ ID NO: 920775 - protein, 129 aa, Homo sapiens; identical to SEQ ID NO: 920774

SEQ ID NO: 920776 - protein, 129 aa, Homo sapiens; identical to SEQ ID NO: 920774

SEQ ID NO: 920777 - protein, 129 aa, Homo sapiens; identical to SEQ ID NO: 920774

SEQ ID NO: 920778 - protein, 176 aa, Homo sapiens
KASVWNPGMDTLRPDTMSFSPFKVPGIRYNAWNIVDTGKSDDDDGNDDSDDKNDVVGDIDDSGNGDDGCGSIDDDGVNHVSAGYELDALRVSGSDPTSAPWPSFHRCPPVQGPPVIPNTSEPKPCSVSKKGKRACSSCSKTPGPTPLFLGLIDHCSFSFDALLPTRSKRAVGEKQF

SEQ ID NO: 920779 - protein, 142 aa, Homo sapiens
EKARRFKMAEDLDELLDEVESKFCTPDLLRRGMVEQPKGCGGGTHSSDRNQAKAKETLRSTETFKKEDDLDSLINEILEEPNLDKKPSKLKSKSSGNTSVRASIEGLGKSCSPVYLGGSSIPCGIGTNISWRACDHLALYSL

SEQ ID NO: 920780 - protein, 610 aa, Homo sapiens
MARHGCLGLGLFCCVLFAATVGPQPTPSIPGAPATTLTPVPQSEASMLSLNLGLNFKFHLRGPAAVWGSPVTETQPLSLGPGQEPGEEVASGLRTDPLWELLVGSSGNSLTEWGSTEGGSKPRASSLLPESTSRRSGPSDGPTAPYQPRRSTVTWDTALMVTALPSSAPRPHQSELELKFDMALRAGAAPTLGHRTLPLLPSLRASLAEIAGRLGPFGFFGTTLSPLRNFSGLSPPGETTSTSSASGVSGSLGFLGTTLSLPPYSLERKLSSPSPLDPAASLSFASIATTSLDPTVPISGPDDLSPPASLGNPSGQPECGPGSCSVGELPEREGQPPEAPRPLFFLTLEADWAEARARWGLAWEAHVYGRLHRGLPPALPNQPATQHRGGPLQRGPACAWPLPGPCLRGRSAWARTLPHRLAGDRGQGSERSGEASGPAAPPELPSPGAWPAGSSVSSGSFCGLSRDSSSMLLCSSPDRPPRCPLVCVLSPPRPSGSSPSLPASGSYQALSPPSRDSPEPASELQAEEALLQEQFLDACRQIDELSVGSDTIDLPQGPSYKTNESCPVSGMSGVTGSSPLKTLLNRWEVAFHRDGTSPWENQEHPDFLAN

SEQ ID NO: 920781 - protein, 478 aa, Homo sapiens
MARHGCLGLGLFCCVLFAATVGPQPTPSIPGAPATTLTPVPQSEASMLSLNLGLNFKFHLRGPAAVWGSPVTETQPLSLGPGQEPGEEVASGLRTDPLWELLVGSSGNSLTEWGSTEGGSKPRASSLLPESTSRRSGPSDGPTAPYQPRRSTVTWDTALMVTALPSSAPRPHQSELELKFDMALRAGAAPTLGHRTLPLLPSLRASLAEIAGRLGPFGFFGTTLSPLRNFSGLSPPGETTSTSSASGVSGSLGFLGTTLSLPPYSLERKLSSPSPLDPAASLSFASIATTSLDPTVPISGPDDLSPPASLGNPSGQPECGPGSCSVGELPEREGQPPEAPRPLFFLTLEADWAEARARWGLAWEAHVYGVGALFGLVALLALLALALLPWRCPPGAPCLALLDLLLLSAGTTRAFPLFYDAYGHRDRLPALAWLLLQDLPLPCLAAGLGLACLLLARPRPPRCPTGLAALLLLGLGLA

SEQ ID NO: 920782 - protein, 763 aa, Homo sapiens
MARHGCLGLGLFCCVLFAATVGPQPTPSIPGAPATTLTPVPQSEASMLSLNLGLNFKFHLRGPAAVWGSPVTETQPLSLGPGQEPGEEVASGLRTDPLWELLVGSSGNSLTEWGSTEGGSKPRASSLLPESTSRRSGPSDGPTAPYQPRRSTVTWDTALMVTALPSSAPRPHQSELELKFDMALRAGAAPTLGHRTLPLLPSLRASLAEIAGRLGPFGFFGTTLSPLRNFSGLSPPGETTSTSSASGVSGSLGFLGTTLSLPPYSLERKLSSPSPLDPAASLSFASIATTSLDPTVPISGPDDLSPPASLGNPSGQPECGPGSCSVGELPEREGQPPEAPRPLFFLTLEADWAEARARWGLAWEAHVYGVGALFGLVALLALLALALLPWRCPPGAPCLEGPWPWWAFQLGLRLGEVGVALPLALLGLYPALCSPRVPPRCWAKLFRLSPGHAAPLLPGGWVTGPPDKEPLGSAIARGDAELLQLCALAGPGPDLLLQGGGCRGFEGAAANPAPSPASSPCSDYTVDFRPPSPINLRRSIEEALCSEALLAPGLFQGPAFEDALPGLGLYRTASLGTGGRASERSGEASGPAAPPELPSPGAWPAGSSVSSGSFCGLSRDSSSMLLCSSPDRPPRCPLVCVLSPPRPSGSSPSLPASGSYQALSPPSRDSPEPASELQAEEALLQEQFLDACRQIDELSVGSDTIDLPQGPSYKTNESCPVSGMSGVTGSSPLKTLLNRWEVAFHRDGTSPWENQEHPDFLAN

SEQ ID NO: 920783 - protein, 429 aa, Homo sapiens
MARHGCLGLGLFCCVLFAATVGPQPTPSIPGAPATTLTPVPQSEASMLSLNLGLNFKFHLRGPAAVWGSPVTETQPLSLGPGQEPGEEVASGLRTDPLWELLVGSSGNSLTEWGSTEGGSKPRASSLLPESTSRRSGPSDGPTAPYQPRRSTVTWDTALMVTALPSSAPRPHQSELELKFDMALRAGAAPTLGHRTLPLLPSLRASLAEIAGRLGPFGFFGTTLSPLRNFSGLSPPGETTSTSSASGVSGSLGFLGTTLSLPPYSLERKLSSPSPLDPAASLSFASIATTSLDPTVPISGPDDLSPPASLGNPSGQPECGPGSCSVGELPEREGQPPEAPRPLFFLTLEADWAEARARWGLAWEAHVYGRLHRGLPPALPNQPATQHRGGPLQRGPACAWPLPGPCLRGRSAWARTLPHRLAGDRGQGQ

SEQ ID NO: 920784 - protein, 159 aa, Homo sapiens
MRECRKKDTRQRDKRKGSWARGTTTTNVRRPVVAPNALHKKWRSRVFSKLPRGKGDSLSRSAKQPVFFLDTEATARPPSARQQASSQTLAILEYLSQRPEPAPSSVRTSFLAPSAPKKTVRQVMHPRPEGGQQGAVCKLVWRDWADLSIYMLMDHFMAS

SEQ ID NO: 920785 - protein, 125 aa, Homo sapiens
MRGEQMPSERPPLYKHERDPQKWHPGTHVWLHRLMCLLGNRMDPPTCAAPRRPLLASLSGMCCTQAASSGISRWDVLHPGGLFPHLSVGCAAPRRPLPASLGGMCCTQAASSRISRWDVLHPGGL

SEQ ID NO: 920786 - protein, 163 aa, Homo sapiens
GKLPTQASVMVDTPPHTKLGSPTLTSDCCAGNENFKPVVLNLLGSVGVPPTERDHLAPWLQPPLQGSECFCLTGIPGTTGLATPARSGNPLGSTSMLWKLCSFALHNKSCCCSLFGSMPSLRAVTLTAKVRGSILEVSKTMNPPEGTNSGHILATQMGLSPST

SEQ ID NO: 920787 - protein, 274 aa, Homo sapiens
MPSKKPRKQNPLFIESISEQAEVSKNNALQLREKLGNIRNQSDSEEENINLFIKKVKNFLLEENVPPEDIEKVANGVLDIHLPIPSQNLTDELVKIQKHMQLCEDYRTDENRLNEEADGAQKLLVKAKAAEKAANILLNLDKTLNQLQQAQITQGRANSTITQLTANITKIKKNVLQEFVELKKQYAILQRKTSTTGLTKETLGKVKQLKDAAEKLAGDTEAKIRRITDLERKIQDLNLSRQAKADQLRILEDQVVAIKNEIVEQEKKYARCYS

SEQ ID NO: 920788 - protein, 171 aa, Homo sapiens
MGTTDTVDHFRGEGGGTRAEKPSFRNLHTVFHNGRTNLHSPTVLKHVEIELKPNRSGLISHGPVHHQFGSEIRHNLAISSKGLGEPSKRLSNTQRPWGSGRSYHVVFHKKLVHPYQAYTFQPMRMEKKKKLMTDSIITKGCDLETMVLKGEVKEVQSYENRSKYMEVECGA

SEQ ID NO: 920789 - protein, 164 aa, Homo sapiens
MGRTSAGHAVHAKSVVITAPLSAFPNADCQLSPRHSSMDGAWISCSTKSCPALLWVNGPRNEITGIPDLILKMIHSLKSTSPIYVDKNFHAEYNLEKGLWRRNNRFCAISCVSTRSLSWNHLEDVHKHTVPGLQPGPSKPEAKECVSNLHHKVIDAISCVYAIS

SEQ ID NO: 920790 - protein, 127 aa, Homo sapiens
RTQMNNQSHPESPGPLEVGIGHKAQLLEKACTFSYELLLLEKCIQIEFQATFASHLPRPQTEVSQGSQPLGKGRRKKEEKIKGTVSHSAVCKCKKPKIKERLKYNDRKLKTRANKTERLNQHHLFCE

SEQ ID NO: 920791 - protein, 262 aa, Homo sapiens
MTAMIVILKCMAQMAPWMYNLLKAQAHGLSSCSRGKQNEPGLEPWSFENPRPPEFEELRETELEFLIWTESLWNYYKKLFGSGTTLVVTDKQLDADVSPKPTIFLPSIAETKLQKAGTYLCLLEKFFPDVIKIHWQEKKSNTILGSQEGNTMKTNDTYMKFSWLTVPEKSLDKEHRCIVRHENNKNGVDQEIIFPPIKTDVITMDPKDNCSKDANDTLLLQLTNTSAYYMYLLLLLKSVVYFAIITCCLLRRTAFCCNGEKS

SEQ ID NO: 920792 - protein, 262 aa, Homo sapiens; identical to SEQ ID NO: 920791

SEQ ID NO: 920793 - protein, 262 aa, Homo sapiens; identical to SEQ ID NO: 920791

SEQ ID NO: 920794 - protein, 262 aa, Homo sapiens; identical to SEQ ID NO: 920791

SEQ ID NO: 920795 - protein, 151 aa, Homo sapiens
MRSGRLLGARRWPIPCFQAVTLGTHPELGNCAKAQAPPPPEGAEAQGCAEAQVDAKAHVGAGAQEGVEAQMGEEGRGVQRLGGYRGSVGCQGTGGCRGSGGCRDSDACRGSSRCRGSEWVQRLRWVQRLSWVQRLRRVQRLIWVQGLRWMQ

SEQ ID NO: 920796 - protein, 602 aa, Homo sapiens
MAVFQDMDGAGSHCAQQTNAGTENQTPHVLTYKWELNGSSALALSCVRVERKESEREMSLYFAGCCRGPLLDGCFSLASLEMFDRLKPSSLNSSKSFSIQLCSIAGLQSWGSKNKVNLAVEEEEQIPGPFVIPSWQWEQDPALRTVGKRERAPEEDRNMWESLELPRDLLNGFDQNADSDMDNEVQDEMVSDGDKKFIGNWSKDDSCYALVERLGTFCPCPRDLWNFELERDDLGYLVEEISKWQGFQEEAEQKSLENLHPNDVIEKKSPFSGEKFKLAAKIFISNKELNVNHQDNRENVFRACQRPSWQPLPSQAWRPRRKKWFSWLGPGSPCSVQPQDMVPCVPAASAPAMVKRGQGTAWAIASEGASPKPWWFPQSVEPVGTQKSTIEVWEPPPRFQRMYGNAWMSRQKFAVGVELSWKTSARAVWMGNVGSEPSHRVPTKVLPSGAVRRGPLSSGLQNGRSTDSLHSAHGKATDTQCQPVKAARRGTVSCKATGVKIPKAVGAHFLHQHDLPRMQVQGCLAGPWAHGKWPMGLFLGLICGSMAAQLVLDMSAKVAHGAVSQFWNVGSWLLEGVGGGEECTPCAPYLGVVQLHEFLVAL

SEQ ID NO: 920797 - protein, 602 aa, Homo sapiens; identical to SEQ ID NO: 920796

SEQ ID NO: 920798 - protein, 258 aa, Homo sapiens
MGCTHSPTSPNEKNQGDSIQAGEESPFSDSVTLEQTTSNIGGTSGRVSLWMQWVLPKITIKLFAPDPENKGTEVCMVSELEDLSASIDVQDVYTKVKCKIESFNIDHYRSRPGEGWQSGHFEGVFLQCKEKSVTTTKLLDGTHQQHGFLSLTYTKAVTKNVRHKLTSRNERRSFHKLSEGLMDGSPHFLHEILLSAQAFDIVLYFPLLNAIASIFQAKLPKTQKEKRKSPGQPMRTHTLTSRNLPLIYVNTSVIRIFI

SEQ ID NO: 920799 - protein, 283 aa, Homo sapiens
MGCTHSPTSPNEKNQGDSIQAGEESPFSDSVTLEQTTSNIGGTSGRVSLWMQWVLPKITIKLFAPDPENKGTEVCMVSELEDLSASIDVQDVYTKVKCKIESFNIDHYRSSLGEECWSLGQCGGVFLSCTDKLNRRTLLVRPISKQDPFSNCSGFFPSTTTKLLDGTHQQHGFLSLTYTKAVTKNVRHKLTSRNERRSFHKLSEGLMDGSPHFLHEILLSAQAFDIVLYFPLLNAIASIFQAKLPKTQKEKRKSPGQPMRTHTLTSRNLPLIYVNTSVIRIFI

SEQ ID NO: 920800 - protein, 152 aa, Homo sapiens
MGCTHSPTSPNEKNQGDSIQAGEESPFSDSVTLEQTTSNIGGTSGRVSLWMQWVLPKITIKLFAPDPENKGTEVCMVSELEDLSASIDVQDVYTKVKCKIESFNIDHYRSRPGEGWQSGHFEGVFLQCKEKSVPWGRVLVFGAMWRCLPFLY

SEQ ID NO: 920801 - protein, 161 aa, Homo sapiens
IFQVLSVMASLGYEREFPDCLHFPENNCVAAYGEENSKRFNTRMHMLISDRCWSLGTTERGVTQNVVLSGLSETSVRLLPSPCRLVLTLHTSSAPCCGCLAPVPCLGSRSGWSRTLTHIQLRLTLVPIAHTILEDRDSLFKNMDQVATQWKALLSVPGTQR

SEQ ID NO: 920802 - protein, 99 aa, Homo sapiens
ARGHPVVPLAHTRPLSSPLASLAVSAFRSLAEAEARERSKEDYKTQAGKRGVRKRGGWRERERALLLTPGSVDYELAPKSRIRAHRGKYLQYLPRPRFS

SEQ ID NO: 920803 - protein, 174 aa, Homo sapiens
RSWSGTQLRWQCNAGKLYCMKSLSLPLPPSFTWDINLLLTLHVDSSWNYIIGCPGSPACWLQTPGLLSFHNQDANFGAICIRGIDEDQQSLGTQERSGEVSFSSPWAVARQVVNGVWRFSRWVWLKEGKKEFRSTLQEEGDCKVQAEQEGKARRKHEVVKRILKSSFLPKRKKR

SEQ ID NO: 920804 - protein, 162 aa, Homo sapiens
MLQIASVEWLKNEEPIDSEQDENIDTRADHNLIIRQARLSDSGNYTCMAANIVAKRRSLSATVVVYVNGGWSSWTEWSACNVRCGRGWQKRSRTCTNPAPLNGGAFLDGSWEVWSEWSVCSPECEHLRIRECTAPPPRNGGKFCEGLSQESENCTDGLCILV

SEQ ID NO: 920805 - protein, 169 aa, Homo sapiens
SFYLARVLSKGLETNHLVCFPLVGMNPAISRGVVFAGKLVLWHSSWRGHWLHIAADEEQASLFSCTFRDVMSLELGDSLGVKSQSHVGPSIGGLVADEDQTPSLNFLEIYTSQRRLASDQKSTDLVVRDPGHALLPALTGASVAAGENCFLSSLSDWTAHWAQENVTSI

SEQ ID NO: 920806 - protein, 187 aa, Homo sapiens
MAPCSTGLCLSHNLHTTQREPGTAEFVGVNTMSARSPASFTSYWHWQRDFVAPSLGTKAAQRELVPDNQEEKRGNEKETETGCRGQQSREEGTAVHARDSASDQAQQCGACQARAHLEPVARQRRFRPRLSLHTSLRAEGAGSGLASPREGPSQRSRRLKGSLSAARADAEAEPRADTDSTEDKQQH

SEQ ID NO: 920807 - protein, 378 aa, Homo sapiens
LLPSHMQHQSILPVEHFRVTGHRNMLAAVVLSRSEANSILASAEETIQLRGIKIETLPPSLSSHSSPCSHHVKKDMFVSPGASPSLLNYYTECMKMPGCPWKKFTAGAEPSWRTSARTVQKENVGSEPTHRLPTGALPSGAARRGLWSFRPQNGGSTNSLNYAPGKATDTQWQPVKAVERGLLLCKATGAELPKAVGAHPLYHHDLDVRHGVKGDYLGTLRFNDCLTVFQTCMGPFVLDNFSHLEQVYLYNACTSLVSINESVLTRSDEFIRGFPFAELSLLSLLPTYEEGCVCFPFHHDGAFPEASPSLLNLDGTSLLHVLPGVEEKWHRDTSLLGDEKDREAFFIESCQDCSASRSTMKGTRRMNICIFLVHDSST

SEQ ID NO: 920808 - protein, 210 aa, Homo sapiens
MIYLHFCKNKSEVQLITDLSDDIPTKRDKHSVVFFSALIQLCCKFLFSEETPRSMTEIFFPFPFCDVHLSILDACTPELTSHSEHAQHHTLPSSPARTVHSSSCVHPWLSFLFRTAFQAPWTLTLTSYAQKRLWETEVTISGFRMAFFCSRKEPAVPQVLFLVPYSSAPLRIKEVGTVSSLYSYIIESNYFCNLLSSSGYYMNEHSVPFI

SEQ ID NO: 920809 - protein, 187 aa, Homo sapiens
MILLKSKHPDMENLSGKSLLIKSANLLPNKFFPVFERSNPPILDTFGRNEEGTLYAPDWSPTYQSPAFTLHTTILLETTKINLSMLPNLVYVNTRSPGLPDGLTVPANWVNPGLKMATYFSWGPLDSSVVWRYSACRTKVTDDQSWTGGPQKAPSGSQISCQFSGNSWSISGLQEDSALLEEFVAGN

SEQ ID NO: 920810 - protein, 187 aa, Homo sapiens; identical to SEQ ID NO: 920809

SEQ ID NO: 920811 - protein, 332 aa, Homo sapiens
RGANSSGPGASRLFCTMEPEPVQPGMLIDVCKYLGSLQYRVWKKMLASVESADPSASPSQAGSCTLVFSTLPNTSNPPGHRSYWIGDPPPVFILTNMCTTTPFPNKVTLGGTRGWDCRISSGGYSPTPATTPALGHSLHGLGASFDPNTAAGWLSVSDDLTSVTNHGYRVQVENPERFSSAPCLLGSRVFSQGSHAWEVALGGLQSWRVGVVRVRQDSGAEGHSHSCYHDTRSGFWYVCRTQGVEGDHCVTSDPATSPLVLAIPRRLRVELECEEGELSFYDAERHCHLYTFHARFGEVRPYFYLGGARGAGPPEPLRICPLHISVKEELDG

SEQ ID NO: 920812 - protein, 361 aa, Homo sapiens
MSPLPSTLPQGTSCPALPLLLPGRPCAAALFVRHPFPGVPLSFPLTLLIALLSSPLYSSPHSLSSHPQPDLTACKSHPGEMVSLLLGQFPGGPELPGLVDSQQRPGRHGESKTMASEHSAWPAPFLSCLGSQTAQASAFELASPWNLVCNHGANCRTRGREVDGEPFSWQYPEAVLVKRLDSERPERYHTNAVAWRRSGVPLPRDCRRPAAKRVRAPDPRSSPKAMAGHPKERVVTDEVHQNQILRELYLKELRTQKLHTQYHVNPLRKVHRITRKPMSWHDNLEEPADARFLNLIHHAAQGPTKKYPEAQTENQEIGWDSEALVDPERRDHRMNHFRVYSDITLYKAKMWSLGEDDRHND

SEQ ID NO: 920813 - protein, 248 aa, Homo sapiens
KAPVDSGKEKLIPLLQGPSDTKDLHSTKWLNESRKPESLLAPDLMAFTIQVPQYIDYCHNSGAVLLCSIQGLAVNIDPILYTWLIYQPQKRTSRHMQQQPVVAVPLVMPVCRRKEDEVSIGSAPLAKQQSYQASEYASSPVKTKTVTESRPLSVPVKAMLNISESCRSPEERMKEFIGIVWNAVKHLTLQLEVQSCCVFIPNDSLPSPSTIVSGDIPGTVRSWYHGQTSMPGTLVLCLPQIKIISAGH

SEQ ID NO: 920814 - protein, 190 aa, Homo sapiens
KAPVDSGKEKLIPLLQGPSDTKDLHSTKWLNESRKPESLLAPDLMAFTIQVPQYIDYCHNSGAVLLCSIQGLAVNIDPILYTWLIYQPQKRTSRHMQQQPVVAVPLVMPVCRRKEDEVSIGSAPLAKQQSYQASEYASSPVKTKTVTESRPLFVPFQWNEQAPLEGYEAPPGPLSFKLWLVVFWRAVLLI

SEQ ID NO: 920815 - protein, 142 aa, Homo sapiens
KSCVDSKMLLVGLQNHYDVGLAKVLNLWAVDQFHSMACYELGHTKGGAVLLCSIQGLAVNIDPILYTWLIYQPQKRTSRHMQQQPVVAVPLVMPVCRRKEDEVSIGSAPLAKQQSYQASEYASSPVKTKTVTEITTDAEYLL

SEQ ID NO: 920816 - protein, 172 aa, Homo sapiens
KAPVDSGKEKLIPLLQGPSDTKDLHSTKWLNESRKPESLLAPDLMAFTIQVPQYIDYCHNSGAVLLCSIQGLAVNIDPILYTWLIYQPQKRTSRHMQQQPVVAVPLVMPVCRRKEDEVSIGSAPLAKQQSYQASEYASSPVKTKTVTDLPPSLYFEPMYVSAREMGFLNTAH

SEQ ID NO: 920817 - protein, 146 aa, Homo sapiens
MLIVSTSMFPHPHLQSSCICPRVYLVSPPKSSRGFSSHPESSLKNNHYLHGPARCGSGRHLGLSSQSTFPSHRAPAARCAPPYSYGIPNPLSTGALLFPVPGAHISNILTGRTAGSSSKADRLFIPGGPLKGSVIAGGQGQLCRCL

SEQ ID NO: 920818 - protein, 108 aa, Homo sapiens
MLWFSGVGALAERYCRRSPGITCCVLLLLNCSGVPMSLASSFLTGSVAKCENEGEVLQIPFITDNPCIMCVCLNKEVTCKREKCPVLSRDCALAIKQRGACCEQCKGD

SEQ ID NO: 920819 - protein, 139 aa, Homo sapiens
MHPDPVPSAPATPNLLPVSVDLSTSVDVSCRQARHYLASFAVLVAITFLQCQCLLGILLASLGRFQREAALATAAPASSITTCLLHHHLPVTWESGPLPWRWGQTSAKVTQEPARAWEFSLMTRRQQVNILRLTLLGIR

SEQ ID NO: 920820 - protein, 140 aa, Homo sapiens
NIRTMTFKGNQSISSDVDRFVNLVLNVNTVFIMFLLQRSKKQGHQLILRKGEMLKVEEKGMSLCPQLIKQRRKSKTNSVKENVNNKVITGGTSRQQSGITTRSCNVTNQNLMNFFLQSRNSIRFDPRRGELQHMKQIRLE

SEQ ID NO: 920821 - protein, 155 aa, Homo sapiens
MNLFIYLIDFFFFLRRRQSTYLSSKITGRVFQSPSMSRHSAGSGGMLVRYSEFRISRDSWLCVCILGSTWQGSSARVVQTAEAAAGRSRALFESGLYVGNEEAVKTNGPRRATASSIFGAAFRLCLASGPLPWLLPPPVMHCPPGLLPTLRPQFT

SEQ ID NO: 920822 - protein, 722 aa, Homo sapiens
MHQTLCLNPESLKMSACSDFVEHIWKPGSCKNCFCLRSDHQLVAGPPQPRAGSLPPPPRLPPRPENCRLEDEGVNSSPYSKPTIAVKPTMMSSEASDVWTEANLSAEVSQVIWRRAPGKLPLPKQEDAPVVYLGSFRGVQKPAGPSTSPDGNSRCPPAYTMVGLHNLEPRGERNIAFHPVSFPEEKAVHKEKPSFPYQDRPSTQESFRQKLAAFAGTTSGCHQGPGPLRESLPSEDDSDQRCSPSGDSEGGEYCSILDCCPGSPVAKAASQTAGSRGRHGGRDCSPTCWEQGKCSGPAEQEKRGPSFPKECCSQGPTAHPSCLGPKKLSLTSEAAISSDGLSCGSGSGSGSGASSPFVPHLESDYCSLMKEPAPEKQQDPGCPGVTPSRCLGLTGEPQPPAHPREATQPEPIYAESTKRKKAAPVPSKSQAKIEHAAAAQGQGQVCTGNAWAQKAASGWGRDSPDPTPQVSATITVMAAHPEEDHRTIYLSSPDSAVGVQWPRGPVSQNSEVGEEETSAGQGLSSRESHAHSASESKPKERPAIPPKLSKSSPVGSPVSPSAGGPPVSPLADLSDGSSGGSSIGPQPPSQGPADPAPSCRTNGVAISDPSRCPQPAASSASEQRRPRFQAGTWSRQCRIEEEEEVEQELLSHSWGRETKNGPTDHSNSTTWHRLHPTDGSSGQNSKVGTGMSKSASFAFEFPKDRSGIETFSPPPPPPKSRV

SEQ ID NO: 920823 - protein, 639 aa, Homo sapiens
PPVHLLSHLSNSIEQPVNSVQGKFVEAVVWFMLGLGGPSSELAHSPTNSGKKLFAPVPFPSGSTEDVSPSGPQQPPPLPQKKIVSRAASSPDGFFWTQGSPKPGTASPKLNLSHSETNLSKAVATGFRQQGWRATEAAAGALASSAKGPPSASSSQLSVSSQASTGSTQLQLHGLLSNISSKEGTYAKLGGLYTQSLARLVAKCEDLFMGGQKKELHFNENNWSLFKLTCNKPCCDSGDAIYYCATCSEDPGSTYAVKICKAPEPKTVSYCSPSVPVHFNIQQDCGHFVASVPSSMLSSPDAPKDPVPALPTHPPAQEQDCVVVITREVPHQTASDFVRDSAASHQAEPEAYESARVLPASATLQRAGAPEGARRSSIRDLCLENLLLVHCTLQAGPGPAPAPAPAPAAAAPPCSSAAPPAGGTLSPAAGPASPEGPREKQLPRLIISNFLKAKQKPGGTPNLQQKKSQARLAPEIVSASQYRKFDEFQTGILIYELLHQPNPFEVRAQLRERDYRQEDLPPLPALSLYSPGLQQLAHLLLEADPIKRIRIGEAKRVLQCLLWGPRRELVQQPGTSEEALCGTLHNWIDMKRALMMMKFAEKAVDRRRGVELEDWLCCQYLASAEPGALLQSLKLLQLL

SEQ ID NO: 920824 - protein, 154 aa, Homo sapiens
MTHKHMHASLATAPAICSGRLLSPCSNSTALNVPIINPYASSSSTSLTRKMSPDVTNVSWGQNHPHENYSLERTCTLGKEVPYTPVMIEEKEGSWVTKDALHYSQGNNNSLQYKLWKSTEKAQKHASWAFSCCEAQMRKVFMKRLCKFKCYIKI

SEQ ID NO: 920825 - protein, 154 aa, Homo sapiens
SISPFMALNSLEKHSYATRQFLVKNETECGRGILKALIPSSDVRRKARPDSWEIQRLGASAQKAHKDRDHIGLNPISDRGSQHACWMSEPADSDNVNHTLESQRVFGAFTKWQEVQSGCWALNVRVFRFETLRIRWGLCPKRLFSMPKTLDFIH

SEQ ID NO: 920826 - protein, 193 aa, Homo sapiens
EYFKRINESAKADVCVCVCVCGASLSVRMPDPLLWPLSQACAVNAPVLTTSSAQRPQEHGSRKATTILMSQGKATLSDSKINTSSEGDPLSHSKGHSPKLEGTLRKQDLMQKSTQALNAGLGTICAEDPCILVLGTWECGIDSRYPSAVHLELLILGKCYAQAIVCSFAMMYLQNEDEFWGPEHQSWCDEREK

SEQ ID NO: 920827 - protein, 345 aa, Homo sapiens
MPSFVQDFLMETFIMFKDLIGKNVYAKDWMVMNMTQNRVFLRAINQFAEVLTRFFMDQASFELQLWNNYFHLAVAFLTHESLQLETFSQAKRNKIVKKYGDMRKEIGFRIRDMWYNLGPHKIKFIPSMVGPILEVTLTPEVELRKATIPIFFDMMQCEFNFSGNGNFHMFENELITKLDQEVEGGRGDEQYKVLLEKLLLEHCRKHKYLSSSGEVFALLVSSLLENLLDYRTIIMQDESKENRMSCTVNVLNFYKEKKREDIYIRYLYKLRDLHRDCENYTEAAYTLLLHAELLQWSDKPCVPHLLQKDSYYVYTQQELKEKLYQEIISYFDKGKAGLNESLTTQ

SEQ ID NO: 920828 - protein, 591 aa, Homo sapiens
SQDFMTCSMEMSKELSTSLSSLPACSEPLNLKLAMTIKRFHAKSFFLAIKEQIYQSKGQRKVFDLPFGSCLFRSDVYDNGSSFLYDNCTACTCRDSTVVCKRKCSHPGGCDQGQEGCCEECLLRVPPEDIKVCKFGNKIFQDGEMWSSINCTICACVKGRTECRNKQCIPISSCPQGKILNRKGCCPICTEKPGVCTVFGDPHYNTFDGRTFNFQGTCQYVLTKDCSSPASPFQVLVKNDARRTRSFSWTKSVELVLGESRVSLQQHLTVRWNGSRIALPCRAPHFHIDLDGYLLKVTTKAGLEISWDGDSFVEVMAAPHLKGKLCGLCGNYNGHKRDDLIGGDGNFKFDVDDFAESWRVESNEFCNRPQRKPVPELCQGTVKVKLRAHRECQKLKSWEFQTCHSTVDYATFYRSQYQTYLPAVDLGHRIGQALGSLGHNERPGDELCLCGSNWGKFFIPCAYEIPAMGFFPNSTHILEEIVATDLNPFWNKLENNIFTQQVLMRLDEVSLVNPRWNDQGVSFSSSHHQQGLVALVRTGLSAVVSGRPLKNQDIHLGARTPCKQEDLGWVSSEVALCGLVSIRPHTDWLEL

SEQ ID NO: 920829 - protein, 545 aa, Homo sapiens
LAHDSSAAQMLGQRKVFDLPFGSCLFRSDVYDNGSSFLYDNCTACTCRDSTVVCKRKCSHPGGCDQGQEGCCEECLLRVPPEDIKVCKFGNKIFQDGEMWSSINCTICACVKGRTECRNKQCIPISSCPQGKILNRKGCCPICTEKPGVCTVFGDPHYNTFDGRTFNFQGTCQYVLTKDCSSPASPFQVLVKNDARRTRSFSWTKSVELVLGESRVSLQQHLTVRWNGSRIALPCRAPHFHIDLDGYLLKVTTKAGLEISWDGDSFVEVMAAPHLKGKLCGLCGNYNGHKRDDLIGGDGNFKFDVDDFAESWRVESNEFCNRPQRKPVPELCQGTVKVKLRAHRECQKLKSWEFQTCHSTVDYATFYRSQYQTYLPAVDLGHRIGQALGSLGHNERPGDELCLCGSNWGKFFIPCAYEIPAMGFFPNSTHILEEIVATDLNPFWNKLENNIFTQQVLMRLDEVSLVNPRWNDQGVSFSSSHHQQGLVALVRTGLSAVVSGRPLKNQDIHLGARTPCKQEDLGWVSSEVALCGLVSIRPHTDWLEL

SEQ ID NO: 920830 - protein, 144 aa, Homo sapiens [sequence omitted]

SEQ ID NO: 920831 - protein, 228 aa, Homo sapiens
NVSFCFCSKMVLIQLYSPQSLLQSLFVSMNLKCKESVPGPNGELGCYFSQPNNKMQINSGGREFLFLQPVIGRSPGNYRQTNLKLQSFPELIYLPSYMFMYPLSAAEKVQPAISIGLLILQALLPAFSPTKLARLTDSKLTCAKKELLRELSRKCLEMGNMSKTTKKKGTVPSLIKMLLGLEKCINVGVCGSFLMDTVLISQDPPSHEDFPLSLCRALLSDPSQECIF

SEQ ID NO: 920832 - protein, 166 aa, Homo sapiens
TTLFNLPNSQYAKEIAGTGTMWVINQCFLTVGSHGHNSCSSERSGINNSDSRKGVRKKTSGGENIAGRQIICIKEHDAFQKCQVIKYLWNVVSYRVDPASYRVDEYKAGEGSRSQYLGHVTNISCFYAPISDFLLKLFHSYYCPQGLTELVVSNKLFMIVMKQESL

SEQ ID NO: 920833 - protein, 144 aa, Homo sapiens
MVSKDTESLSYGSAKGGDAQSSVLHKDSLLLAKVSYAIMPPTEEEGTKTEKVEPVPQFPSKWTHCYGNCPPTVDKMELVSRKGSYLAHYFWLCEKHGACIRSLLGLHKPSVIVESQVGAGISRGKSGARGCKEVPDSFKQLHVV

SEQ ID NO: 920834 - protein, 156 aa, Homo sapiens
AITFRGASARWGPMALLRIFLLREFGDVPLREAGGSLSETPDEDLEYPQSCVQGNAWKLQRSLLLKRKGQSETYKKNMCRELRAVGWGLLEEVGRWGEAPPSELGAWGVGARGGLERMECVGRAVLVPRALGFLPWQTPQRLRCGRLGGGGPKSSL

SEQ ID NO: 920835 - protein, 176 aa, Homo sapiens
VMAVCPWVPLCPPPTPNRMLFLPSVNMHNTLHLFPGKYQFHLVFEDARINVMAVHEERTGEYELTAKSTVISHCDSVVENANTISGCTYKSASPERRGHCLMVLSDASSVGDLINVVTVFFRPGPHLLLINILNHTFTSAITVSGTTIFGVKMGSTTIPRNLHVFLGIFMNLLPLG

SEQ ID NO: 920836 - protein, 409 aa, Homo sapiens
MPGHNTSRNSSCDPIVTPHLISLYFIVLIGGLVGVISILFLLVKMNTRSVTTMAVINLVVVHSVFLLTVPFRLTYLIKKTWMFGLPFCKFVSAMLHIHMYLTFLFYVVILVTRYLIFFKCKDKVEFYRKLHAVAASAGMWTLVIVIVVPLVVSRYGIHEEYNEEHCFKFHKELAYTYVKIINYMIVIFVIAVAVILLVFQVFIIMLMVQKLRHSLLSHQEFWAQLKNLFFIGVILVCFLPYQFFRIYYLNVVTHSNACNSKVAFYNEIFLSERVGPLDDGEVHKGALLMELAEKPLIGVLEKAVQGEKLHLRPCWASAQGTECLWKLLSEGQGWLSTRRPHALRALGRSLLRESRYQSQGEKPILPQVLLQRLVMMKISLASHPLCEETNPRWRLTLTENHCECLERGF

SEQ ID NO: 920837 - protein, 184 aa, Homo sapiens
MFGIQDTLGRGPTLKEKSLGAEMDSVRSWVRNVGVVDANVAAQSGVALSRAHFEKQPPSNLRKSNFFHFVLALYDRQGQPVEIERTAFVDFVENDKEQGNEKTNNGTHYKLQLLYSNGVRTEQDLYVRLIDSVTKQPIAYEGQNKNPEMCRVLLTHEVMCSRCCEKKSCGNRNETPSDPVIIDR

SEQ ID NO: 920838 - protein, 184 aa, Homo sapiens; identical to SEQ ID NO: 920837

SEQ ID NO: 920839 - protein, 389 aa, Homo sapiens
MADPRDKALRDYRKKVLEHKEIDGRLKELREQLKELTKQYEKSENDLKALRSVGQIVGEVFKQLTEEKFIVKATNGPRYVVGCRQQLDKSKLKPGTRVALDMTTLTIMRYLPREVDPLIYNMSHEDPENVSYSEIGGLSEQIRELREVIELPLTNPELFQRVGIIPPKGCLLYGPPGTGKTLLARAIASQLDCNFLKVVSSSIVDKYIGESAHLIREMFNYARDHQPCIIFMDEIDAIGGRRFSEGTSADREIQRTLTELLNQMDGFDTLHRVKMIMATNRPDTLDPALLCPGRLDRKIHIDLPNEQTRLDILKIHAGPITKHGEIDYEAIVKLSDGFNGADLRNVCTEAGMFAIRADHDFVVQEDFMKAVRKVADSKKLEAKLDYKPV

SEQ ID NO: 920840 - protein, 333 aa, Homo sapiens
YLKTLSEEIAFFCNLRSQQKNLVILVAGDMEEDSLYLGGEWQFNHFSKLTSSQPDAAFPEIQRTSLPEKSPLSSETRVDLCDDLAPVTRQLAPREKLPPSSRRPAAVGAGLQNMGNTCHLNASLQCLTYTPPLANYMLSWELSQMYTFDPYLDIALDIQAAQSVKQALEQLVKPEELNGENAYHCGLCLQKAPAAKTLTLPTSAKVLILVLKRFSDVTGNKLAKNLQYPECVDMQPYMSQQNTGPLFYVLYAVLVITGWSCHNGHYFSCVKLKKASGIKWMMPRSLPLVSLLLRVNRPMSSFTSRRMNLEDPVTGCPQAENQELFVLKTIELW

SEQ ID NO: 920841 - protein, 413 aa, Homo sapiens
GSGNMAKDAGLIEANGELKVFIDQNLSSGKGVVSLVAVHPSTVNPLGKQLLPKTFGQSNVSIAQQVVIGMPQRPAASNTLVVGSSHTPSTHFASQNQPSDSSPRSAGKRNRKGENCKGLRHFSMKVCEKVQRKGTTSYNEVADELVAEFSAADNHILPNESAYDQKNIRRRVYDALNVLMAMNIISKEKKEIKWIGLPTNSAQECQNLEVERQRRLERIKQKQSQLRELILQQIAFKNLVQRNRHAEQQASRPPPPNSVIHLPFIVVNTSKKTVIDCSISNDKLEYLFNFDNTFEIQGDIEVLKRMGMACWLESGSCSAEDLKMARSLVPKALEPYVTEMAQGTVGGVFITAAGSTSKGTRFSASDLTNGADGMLATSSKRSQYSGSRVETPVSYVGEDDEEDDDFNENDKDD

SEQ ID NO: 920842 - protein, 165 aa, Homo sapiens
RKTMVCLGAFAGVGCLSTGFWGTRMVSGTINQDRKSGRRGSELEGKSSFLDLLNVNACAALKKRLVLDIQCPALETRGKERSCLVNPLSVLATSQRHLAYQPQRLLAPFSQPAQREPGVTEGSVDLGDRNRLTLLPDVCASGTVLADGNPASESACAGREAEPKP

SEQ ID NO: 920843 - protein, 155 aa, Homo sapiens
MITFCQIHSLTLHIAGAHQLLFDVHPSGGKQEPHGANCIVGKPTESAQGSLSSPALPATLPSSPHQSSEVRSGFPEREPHGLLCFSSLTSSLPPCLCSPPPCSLLALGLRTNRSPGEHRVADLLVVSCWCLSITSLKSISLWSASSEHHPAVTPR

SEQ ID NO: 920844 - protein, 36 aa, Homo sapiens
MVLDVRVKGAEEGIQVRRWRGHSLTRLHECRPGEDS

SEQ ID NO: 920845 - protein, 131 aa, Homo sapiens
QANFKESPSWIPPGGMEKTYSPIDKQGHLCKCSGGLCTGRRDLNHPIKTVSDLGLTLDATSAKLYTSTVAHNIKLDQVPELDVVGQGDLVDIGSLLYGGHPTVSCNDDAEVLCRLCFSVAPTRYPMVLSIC

SEQ ID NO: 920846 - protein, 313 aa, Homo sapiens
MGCGYCCVFRQNQRFLGLRCCIHLLSPCILRWSHLRIHSNSLPEGDKKNQREQVSYTDKSWAYFINSHNSYCLSSKEQKGIYGQCHIFENLNYKDTALCGGGENTKDLKVFKKENVESVPIGNSTMMIIFLKAACPEFVPSDARMCSEFLPSGGFVVSLASGVKLQTFKVSVTTLKVGRLELFVPPGGFIVSLASGVKLQTFENPVMFSDMEVFWKLLLLVDVEVTVRILQCLVKGFLLPQLGQGHPKATVAHNIKLDQVPELDVVGQGDLVDIGSLLYGGHPTVSCNDDAEVLCRLCFSVAPTRYPMVLSIC

SEQ ID NO: 920847 - protein, 244 aa, Homo sapiens
WFNPLVLVISQPVRMNFGSLYTKRQQFSCLFQMSVVAPLVGKAPEADPVTQSPTSPVIKVYSKSSQATVLLAYLLVGIQLSLASVELPQECQPAPECPGPWEPALKDAAPTGVYPAPDLSSALQRSRGLSDQCDKNPETPNVQKDSRSMVPNLSGTRDWFHGRQFFHRDATSSSCCSSDFFLTDKRMEVALDMGNRRMEVALDMGNRSRSRSGKSQGLFVQAVQGGLITYQSELDLLSLKTKLL

SEQ ID NO: 920848 - protein, 169 aa, Homo sapiens
MQPGSFCRRLWLPGSFPRAVPHFACMPRNTFSYVSKINMSWAVVTAGHGGDTGDGAGGTEDSSLSWNTQDLSTCSTLGVVHSGNTTSRSNRPPTTASCDVTELVSAAGEDTCLAVATAWHQPAPKGLGAECRPRRRTGSSVLMAVLLNQRGVQKLQCRRKAVSVSPDLR

SEQ ID NO: 920849 - protein, 256 aa, Homo sapiens
NSASFEGDNKKMEDAKFYLTLPGTKMEMEEKELQASKNLVTFTPSKDSTKDSFQIATLICSTKLTQNGLLNWRSNSQNIKHNLKKLMEVDGGEIVKFLQDTLDALFNIMMEMSDSETYDFLVFDALVFIISLIGDIKFQHFNPVLETYIYKHFSATLAYVKLSKVLNFYVANADDSSKTELLFAALKALKYLFRFIIQSRVLYLRFYGQSKDGDEFNNSIRQLFLAFNMLMDRPLEEAVKIKVSLAASWVTLLRLW

SEQ ID NO: 920850 - protein, 144 aa, Homo sapiens
MSDTEDRRFLHFQMRYLVHLSGECQKVGAGQWVQCTEHEPKQVKERGDRWHLENRVTLTLILCFSNSLSKWHTRRLYPAPGSEGPTFTEPHLLLAQQSEIKLQGGSKAGRGATAIAWASVGKQSGWEARTGWSPLQLKEACLPL

SEQ ID NO: 920851 - protein, 863 aa, Homo sapiens
MLDFLAENNLCGQAILRIVSCGNAIIAELLRLSEFIPAVFRLKDRADQQKYGDIIFDFSYFKGPELWESKLDAKPELQDLDEEFRENNIEIVTRFYLAFQSVHKYIVDLNRYLDDLNEGVYIQQTLETVLLNEDGKQLLCEALYLYGVMLLVIDQKIEGEVRERMLVSYYRYSAARSSADSNMDDICKLLRSTGYSSQPGAKRPSNYPESYFQRVPINESFISMVIGRLRSDDIYNQVSAYPLPEHRSTALANQAAMLYVILYFEPSILHTHQAKMREIVDKYFPDNWVISIYMGITVNLVDAWEPYKAAKTALNNTLDLSNVREQASRYATVSERVHAQVQQFLKEGYLREEMVLDNIPKLLNCLRDCNVAIRWLMLHTADSACDPNNKRLRQIKDQILTDSRYNPRILFQLLLDTAQFEFILKEMFKQMLSEKQTKWEHYKKEGSERMTELADVFSGVKPLTRVEKNENLQAWFREISKQILSLNYDDSTAAGRKTVQLIQALEEVQEFHQLESNLQVCQFLADTRKFLHQMIRTINIKEEVLITMQIVGDLSFAWQLIDSFTSIMQESIRVNPSMVTKLRATFLKLASALDLPLLRINQANSPDLLSVSQYYSGELVSYVRKVLQIIPESMFTSLLKIIKLQTHDIIEVPTRLDKDKLRDYAQLGPRYEVAKLTHAISIFTEGILMMKTTLVGIIKVDPKAVAGKMDLKDRAVKRVPWPCIGGLISNLRAKPSELMAKLKTGDDMDGFHPSLDYIQDYVNIYGLKMEEEVSRIIHYNVEQECNNFLERRSRWQACTVHHIQYQLPGDDSHVWRSQKSRTAKGVYLDLVTNSAGTAYYPGRQDKRYNTTSEQQGPGIPVDV

SEQ ID NO: 920852 - protein, 716 aa, Homo sapiens
MLLVIDQKIEGEVRERMLVSYYRYSAARSSADSNMDDICKLLRSTGYSSQPGAKRPSNYPESYFQRVPINESFISMVIGRLRSDDIYNQVSAYPLPEHRSTALANQAAMLYVILYFEPSILHTHQAKMREIVDKYFPDNWVISIYMGITVNLVDAWEPYKAAKTALNNTLDLSNVREQASRYATVSERVHAQVQQFLKEGYLREEMVLDNIPKLLNCLRDCNVAIRWLMLHTADSACDPNNKRLRQIKDQILTDSRYNPRILFQLLLDTAQFEFILKEMFKQMLSEKQTKWEHYKKEGSERMTELADVFSGVKPLTRVEKNENLQAWFREISKQILSLNYDDSTAAGRKTVQLIQALEEVQEFHQLESNLQVCQFLADTRKFLHQMIRTINIKEEVLITMQIVGDLSFAWQLIDSFTSIMQESIRVNPSMVTKLRATFLKLASALDLPLLRINQANSPDLLSVSQYYSGELVSYVRKVLQIIPESMFTSLLKIIKLQTHDIIEVPTRLDKDKLRDYAQLGPRYEVAKLTHAISIFTEGILMMKTTLVGIIKVDPKAVAGKMDLKDRACEARAFALHRGTDIQTFEPSQVIDAQAERLGATMDGFHPSLDYIQDYVNIYGLKMEEEVSRIIHYNVEQECNNFLERRSRWQACTVHHIQYQLPGDDSHVWRSQKSRTAKGVYLDLVTNSAGTAYYPGRQDKRYNTTSEQQGPGIPVDV

SEQ ID NO: 920853 - protein, 261 aa, Homo sapiens
MMNMKAFKNCAIVDFFTESSTLLEEGNLSPKTEDTYLPHILSPAVFGGPGTNFKMPGRSSSNSGSTGFISFSGVESALSSLKNFQACINSGMDTASSVALDLVESQRDKFELGTRFLLSFSLKVLQIIPESMFTSLLKIIKLQTHDIIEVPTRLDKDKLRDYAQLGPRYEVLCPSDFCLFMLKTNSHEISQACVTCHILGTTRPILTCCLTFAMRALASSAVAGEWSHDAPPCSQPLRSCDRLGSQGRKSGSDPLQVRDCG

SEQ ID NO: 920854 - protein, 845 aa, Homo sapiens
MLDFLAENNLCGQAILRIVSCGNAIIAELLRLSEFIPAVFRLKDRADQQKYGDIIFDFSYFKGPELWESKLDAKPELQDLDEEFRENNIEIVTRFYLAFQSVHKYIVDLNRYLDDLNEGVYIQQTLETVLLNEDGKQLLCEALYLYGVMLLVIDQKIEGEVRERMLVSYYRYSAARSSADSNMDDICKLLRSTGYSSQPGAKRPSNYPESYFQRVPINESFISMVIGRLRSDDIYNQVSAYPLPEHRSTALANQAAMLYVILYFEPSILHTHQAKMREIVDKYFPDNWVISIYMGITVNLVDAWEPYKAAKTALNNTLDLSNVREQASRYATVSERVHAQVQQFLNCLRDCNVAIRWLMLHTADSACDPNNKRLRQIKDQILTDSRYNPRILFQLLLDTAQFEFILKEMFKQMLSEKQTKWEHYKKEGSERMTELADVFSGVKPLTRVEKNENLQAWFREISKQILSLNYDDSTAAGRKTVQLIQALEEVQEFHQLESNLQVCQFLADTRKFLHQMIRTINIKEEVLITMQIVGDLSFAWQLIDSFTSIMQESIRVNPSMVTKLRATFLKLASALDLPLLRINQANSPDLLSVSQYYSGELVSYVRKVLQIIPESMFTSLLKIIKLQTHDIIEVPTRLDKDKLRDYAQLGPRYEVAKLTHAISIFTEGILMMKTTLVGIIKVDPKAVAGKMDLKDRAVKRVPWPCIGGLISNLRAKPSELMAKLKTGDDMDGFHPSLDYIQDYVNIYGLKMEEEVSRIIHYNVEQECNNFLERRSRWQACTVHHIQYQLPGDDSHVWRSQKSRTAKGVYLDLVTNSAGTAYYPGRQDKRYNTTSEQQGPGIPVDV

SEQ ID NO: 920855 - protein, 137 aa, Homo sapiens
MGRMEGASLGAAALGAGTRLGGGASLRAHSSAFAADLCQQAAASPGPGLPLGSGKKSYANPGSSPNTLQHKASATFTYSNSMQGSRQNMNSQRLIVSLEKKGYENYFYVPVTYSCFKRVKPKEIKKIPILVESYAKN

SEQ ID NO: 920856 - protein, 147 aa, Homo sapiens
MVLGAGDVATVSKGRVSVSSVELVCCHHRYFEKCKGRPGVAPVHTDLNLASRRMKGTVGAVGQLPPEKTSVFSSGFMVPRWEFRAGELYQYHFKSMESLNIGCSRVAPSSSPAVLAASCVFPFLFGVPGVCFSLSQMLTLLWGSHHI

SEQ ID NO: 920857 - protein, 233 aa, Homo sapiens
MYKECNILVLLVVLKVQQHFEFEYQTKMDGLVTLKHFKTPFLKVEPFLPGHYEVFDLKPNDQVASVVMVKYHHCRDEPPHVLYYNVEKLFPGLGLQLVAATLLKQLKEAQVQYPLQTFVIGMEDSPDLLAARKVANHIGSEHHEVLFNSEEGFQALDEVIFSLETYNITTADASGEADQIMKAVWERKVEEEVEGRQIQKTVVTAGGKGIVSASLRNKEKEYKKEILQLGHWG

SEQ ID NO: 920858 - protein, 147 aa, Homo sapiens
MFPNKQNWDMKWWSVWCLFMKKKGLDCKIFPDDMGICDDMGICDMGIPDDMGIWLCVPTQISSQIVIPMCPRRDQMRSSKPIEDIQTKHWFKDVTPIIHNLFQKLEEEETYCKSFYEFVTYALGDADAGLMGTGSTEITIVIIVCQL

SEQ ID NO: 920859 - protein, 1077 aa, Homo sapiens
MAATASAGVPATVSEKQEFYQLLKNLINPSCMVRRQAEEIYENIPGLCKTTFLLDAVRNRRAGYEVRQMAAALLRRLLSSGFEEVYPNLPADVQRDVKIELILAVKLETHASMRKKLCDIFAVLARNLIDEDGTNHWPEGLKFLIDSIYSKNVVLWEVALHVFWHFPGIFGTQERHDLDIIKRLLDQCIQDQEHPAIRTLSARAAAAFVLANENNIALFKDFADLLPGILQAVNDSCYQDDDSVLESLVEIADTVPKYLGPYLEDTLQLSLKLCGDSRLSNLQRQLALEVIVTLSETATPMLKKHTNIIAQAVPHILAMMVDLQDDEDWVNADEMEEDDFDSNAVAAESALDRLACGLGGKVVLPMTKEHIMQMLQSPDWKYRHAGLMALSAIGEGCHQQMESILDETVNSVLLFLQDPHPRVRAAACTTLGQMATDFAPNFQKKFHETVIAALLRTMENQGNQRVQSHAASALIIFIEDCPKSLLVLYVDSMVKNLHSVLVIKLQELIRNGTKLALEQLVTTIASVADTIEEKFVPYYDIFMPSLKHIVELAVQKELKLLRGKTIECISHIGLAVGKEKFMQDASNVMQLLLKTQSDLNNMEDDDPQTSYMVSAWARMCKILGKDFQQYLPLVIEPLIKTASAKPDVALLDTQDVENMSDDDGWQFVNLGDQQSFGIKTSGLEAKATACQMLVYYAKELREGFVEYTEQVVKLMVPLLKFYFHDNVRVAAAESMPFLLECARIRGPEYLAQMWQFICDPLIKAIGTEPDTDVLSEIMNSFAKSIEVMGDGCLNDEHLEELGGILKAKLEGHFKNQELRQVKRQEENYDQQVEMSLQDEDECDVYILTKVSDILHSLFSTYKEKILPWFEQLLPLIVNLICSSRPWPDRQWGLCIFDDIIEHCSPTSFKYVEYFRWPMLLNMRDNNPEVRQAAAYGLGVMAQFGGDDYRSLCSEAVPLLVKVIKCANSKTKKNVIATENCISAIGKILKFKPNCVNVDEVLPHWLSWLPLHEDKEEAIQTLSFLCDLIESNHPVVIGPNNSNLPKIISIIAEGKINETINYEDPCAKRLANVVRQLM

SEQ ID NO: 920860 - protein, 980 aa, Homo sapiens
MAATASAGVPATVSEKQEFYQLLKNLINPSCMVRRQAEEIYENIPGLCKTTFLLDAVRNRRAGYEVRQMAAALLRRLLSSGFEEVYPNLPADVQRDVKIELILAVKLETHASMRKKLCDIFAVLARNLIDEDGTNHWPEGLKFLIDSIYSKNVVLWEVALHVFWHFPGIFGTQERHDLDIIKRLLDQCIQDQEHPAIRTLSARAAAAFVLANENNIALFKDFADLLPGILQAVNDSCYQDDDSVLESLVEIADTVPKYLGPYLEDTLQLSLKLCGDSRLSNLQRQLALEVIVTLSETATPMLKKHTNIIAQAVPHILAMMVDLQDDEDWVNADEMEEDDFDSNAVAAESALDRLACGLGGKVVLPMTKEHIMQMLQSPDWKYRHAGLMALSAIGEGCHQQMESILDETVNSVLLFLQDPHPRVRAAACTTLGQMATDFAPNFQKKFHETVIAALLRTMENQGNQRVQSHAASALIIFIEDCPKSLLVLYVDSMVKNLHSVLVIKLQELIRNGTKLALEQLVTTIASVADTIEEKFVPYYDIFMPSLKHIVELAVQKELKLLRGKTIECISHIGLAVGKEKFMQDASNVMQLLLKTQSDLNNMEDDDPQTSYMVSAWARMCKILGKDFQQYLPLVIEPLIKTASAKPDVALLDTQDVENMSDDDGWQFVNLGDQQSFGIKTSGLEAKATACQMLVYYAKELREGFVEYTEQVVKLMVPLLKFYFHDNVRVAAAESMPFLLECARIRGPEYLAQMWQFICDPLIKAIGTEPDTDVLSEIMNSFAKSIEVMGDGCLNDEHLEELGGILKAKLEGHFKNQELRQVKRQEENYDQQVEMSLQDEDECDVYILTKVSDILHSLFSTYKEKILPWFEQLLPLIVNLICSSRPWPDRQWGLCIFDDIIEHCSPTSFKYVEYFRWPMLLNMRDNNPEVRQAAAYGLGVMAQFGGDDYRSLCSEAVPLLVKVIKCRNDQVLPALNVCLKG

SEQ ID NO: 920861 - protein, 1105 aa, Homo sapiens
MAATASAGVPATVSEKQEFYQLLKNLINPSCMVRRQAEEIYENIPGLCKTTFLLDAVRNRRAGYEVRQMAAALLRRLLSSGFEEVYPNLPADVQRDVKIELILAVKLETHASMRKKLCDIFAVLARNLIDEDGTNHWPEGLKFLIDSIYSKNVVLWEVALHVFWHFPGIFGTQERHDLDIIKRLLDQCIQDQEHPAIRTLSARAAAAFVLANENNIALFKDFADLLPGILQAVNDSCYQDDDSVLESLVEIADTVPKYLGPYLEDTLQLSLKLCGDSRLSNLQRQLALEVIVTLSETATPMLKKHTNIIAQAVPHILAMMVDLQDDEDWVNADEMEEDDFDSNAVAAESALDRLACGLGGKVVLPMTKEHIMQMLQSPDWKYRHAGLMALSAIGEGCHQQMESILDETVNSVLLFLQDPHPRVRAAACTTLGQMATDFAPNFQKKFHETVIAALLRTMENQGNQRVQSHAASALIIFIEDCPKSLLVLYVDSMVKNLHSVLVIKLQELIRNGTKLALEQLVTTIASVADTIEEKFVPYYDIFMPSLKHIVELAVQKELKLLRGKTIECISHIGLAVGKEKFMQDASNVMQLLLKTQSDLNNMEDDDPQTSYMVSAWARMCKILGKDFQQYLPLVIEPLIKTASAKPDVALLDTQDVENMSDDDGWQFVNLGDQQSFGIKTSGLEAKATACQMLVYYAKELREGFVEYTEQVVKLMVPLLKFYFHDNVRVAAAESMPFLLECARIRGPEYLAQMWQFICDPLIKAIGTEPDTDVLSEIMNSFAKSIEVMGDGCLNDEHLEELGGILKAKLEGHFKNQELRQVKRQEENYDQQVEMSLQDEDECDVYILTKVSDILHSLFSTYKEKILPWFEQLLPLIVNLICSSRPWPDRQWGLCIFDDIIEHCSPTSFKYVEYFRWPMLLNMRDNNPEVRQAAAYGLGVMAQFGGDDYRSLCSEAVPLLVKVIKCANSKTKKNVIATENCISAIGKILKFKPNCVNVDEVLPHWLSWLPLHEDKEEAIQTLSFLCDLIESNHPVVIGPNNSNLPKIISIIAEGKINETINYEDPCAKRLANVVRQVQTSEDLWLECVSQLDDEQQEALQELLNFA

SEQ ID NO: 920862 - protein, 149 aa, Homo sapiens
MVCFAFRSTVILSHNAENWEDIKSHGPHFQNVLKTLPSSSLNRQLVLDTKISYLDYCHSFITNPIILNSSCPPVDTQQKSWNFCTRRDLWVRGKNEPLMEGGNEGKRSREQKGSMSGHSEVVLTFPEASLYKQLDSLVQTNIWIFPETS

SEQ ID NO: 920863 - protein, 89 aa, Homo sapiens
SGKKKGKNACLAKSNHKMVEIKSTLQEGLDFSQLEKGEVRAPVPRRPAEGRAAASERRWRAGLEQDVAEPRAGKSRCCSPAEGKSPSLP

SEQ ID NO: 920864 - protein, 170 aa, Homo sapiens
MGCVYFYNIQPNIKGLEKLLQAYLGDIVGLGPTLSSQPQDCVLIVQWQQHSSSFAYASSSDSAAGYMLISCDRVPVGYWVPASVQVFTTVVETAGFQRAKVSYGSKSSLGRWASLAVLYYRHSHTKSSGLHFSWHEAPTTSLSSQRPVVKVACSLPVQLTSSPGVFKGQE

SEQ ID NO: 920865 - protein, 135 aa, Homo sapiens
MEKCHIRAHVKEYADLHETQQEELGATQCSDINEERSCDEKDEEAPEEVMPAKTATNFILKELLLTSLQDCVQSWFLRWVRGLPDFKNAAVDLSENVKLRPSAVAHACNPSSLGGRGRWITSRRWRDLICVKAMK

SEQ ID NO: 920866 - protein, 134 aa, Homo sapiens
MAVIKKTKTKTKNLAITNVGKDVEKLGSSYIAGSYGVGKDVTQLDSELPQGQRKAGHKKQHLIHSVCKTKTSYLREEQHSLSVSPCLSLNAKILLSYTLTSTAELSSFAVVTSAATDIGWFHNAWPHECFMLDG

SEQ ID NO: 920867 - protein, 94 aa, Homo sapiens
SQAHFSAHILYHFGAPQAGSQMAIPCVSVRAAYCALSMNMTGQKCAWVRIQGSSGSLTVVCTCVWGLSVSFTSGSLTVVCRCVVFCLYPSLLVV

SEQ ID NO: 920868 - protein, 157 aa, Homo sapiens
ASLQLKLKMKSQQPTVVEETVREDASSPGAYGFLLTEELQVAGDVTPGSLPRGGNQSWAWKDDRQQGGDGEQPTSSQRSEEEENCQGNKAFRGQITKDLHWDQANPCNQRVEGLKQKAETMVVLRCVEQKVIPGQAHGPEEYLSPSSELFSDASINS

SEQ ID NO: 920869 - protein, 143 aa, Homo sapiens
MRKPQGGALCATKRFFAWRPVFVEPLSALCLGHEAGCQSFLLLWIRFGSVKAWPTIKTNTLQTRRRIPQELFVLQESSGPTSEKMLESFHGSSLRNEATPRYSQQEETGNERWQQSLSLERWPPWTSHPFGTPPLMPLAVARC

SEQ ID NO: 920870 - protein, 157 aa, Homo sapiens
MRMREARAVSPVTVVPTVVLETRPRGLAEQEPSVAVLGCRGSEAPASPLHGVEGNVSGCQESQRADHDDETPGRDGGSSTGSQPQACTDGVGWETRSHYIDQAGLELLALSDPPALASQSAGVTDVSLCAQSILGCSSVEPRMLRNVDTKDEVGTEV

SEQ ID NO: 920871 - protein, 122 aa, Homo sapiens
ETSPRGLAKQEPSVAVLGCRGSEDPASPLHGVDGNVSGCQESQRADHDEETPGGDGGSSTGSQPQACPDGVGWETRSHYIDQAGLELLALSDPPALASQSAGVTDVSLCAQSILGCSSVEVM

SEQ ID NO: 920872 - protein, 138 aa, Homo sapiens
MSTLQPRTRAPEELFVPQESSGSTPEKMLVSFHGSSLRNEATPRYSQQEEAGNGRWQQSLSLERWPPWTSHPLGTPPLMSVAVARCCILPGLWPLLSPPSGSASPVSQGPGCLSLWPNAFKKDDFPVRQGDTSWRSVS

SEQ ID NO: 920873 - protein, 1358 aa, Homo sapiens
AQLLESNAPIHMENLPFPLKLLSASSLNAPSSTPWVLDIFLTLVFALGFFFLLLPYLSYFRCDDPPSPSPGKRKCPVGRRRRPRGRMKNHSLRAGRECRRGLEETSDLLSQLQSLLGPHLDKGDFGQLSGPDPPGEVGERAPDGASQSSHEPMEDAAPILSPLASPDPQAKHPQDLASTPSPGPMTTSVSSLSASQPPEPSLPLEHPSPEPPALFPHPPHTPDPLACSLPPPKGFTAPPLRDSTLITPSHCDSVAFPLGTVPQSLSPHEDLVASVPAISGLGGSNSHVSASSRWQETARTSCAFNSSVQQDHLSRHPPETCQMEAGSLFLLSSDGQNVVGIQVTETAKVNIWEEKENVGSFTNRMTPEKHLNSLRNLAKSLDAEQDTTNPKPFWNMGENSKQLPGPQKLSDPRLWQESFWKNYSQLFWGLPSLHSESLVANAWVTDRSYTLQSPPFLFNEMSNVCPIQRETTMSPLLFQAQPLSHLGPECQPFISSTPQFRPTPMAQAEAQAHLQSSFPVLSPAFPSLIQNTGVACPASQNKVQALSLPETQHPEWPLLRRQLEGRLALPSRVQKSQDVFSVSTPNLPQESLTSILPENFPVSPELRRQLEQHIKKWIIQHWGNLGRIQESLDLMQLRDESPGTSQAKGKPSPWQSSMSTGEGSKEAQKVKFQLERDPCPHLGQILGETPQNLSRDMKSFPRKVLGVTSEELERNLRKPLRSDSGSDLLRCTERTHIENILKAHMGRNLGQTNEGLIPVCVRRSWLAVNQALPVSNTHVKTSNLAAPKSGKACVNTAQVLSFLEPCTQQGLGAHIVRFWAKHRWGLPLRVLKPIQCFKLEKVSSLSLTQLAGPSSATCESGAGSEVEVDMFLRKPPMASLRKQVLTKASDHMPESLLASSPAWKQFQRAPRGIPSWNDHEPLKPPPAGQEGRWPSKPLTYSLTGSIQQSRSLGAQSSKAGETREAVPQCRVPLETCMLANLQATSEDVHGFEAPGTSKSSLHPRVSVSQDPRKLCLMEEVVNEFEPGMATKSETQPQVCAAVVLLPDGQASVVPHASENLVSQVPQGHLQSMPTGNMRASQELHDLMAARRSKLVHEEPRNPNCQGSCKSQRPMFPPIHKSEKSRKPNLEKHEERLEGLRTPQLTPVRKTEDTHQDEGVQLLPSKKQPPSVSPFGENIKQIFQWIFSKKKSKPAPVTAESQKTVKNRSRVYSSSAEAQGLMTAVGQMLDEKMSLCHARHASKVNQHKQKFQAPVCGFPCNHRHLFYSEHGRILSYAASSQQATLKSQGCPNRDRQIRNQQPLKSVRCNNEQWGLRHPQILHPKKAVSPVSPPQHWPKTSGASSHHHHCPRHCLLWEGI

SEQ ID NO: 920874 - protein, 1298 aa, Homo sapiens
AGMKPWWARDWALPSRGQCVCPGETNACLDAEGAGRECRRGLEETSDLLSQLQSLLGPHLDKGDFGQLSGPDPPGEVGERAPDGASQSSHEPMEDAAPILSPLASPDPQAKHPQDLASTPSPGPMTTSVSSLSASQPPEPSLPLEHPSPEPPALFPHPPHTPDPLACSLPPPKGFTAPPLRDSTLITPSHCDSVAFPLGTVPQSLSPHEDLVASVPAISGLGGSNSHVSASSRWQETARTSCAFNSSVQQDHLSRHPPETCQMEAGSLFLLSSDGQNVVGIQVTETAKVNIWEEKENVGSFTNRMTPEKHLNSLRNLAKSLDAEQDTTNPKPFWNMGENSKQLPGPQKLSDPRLWQESFWKNYSQLFWGLPSLHSESLVANAWVTDRSYTLQSPPFLFNEMSNVCPIQRETTMSPLLFQAQPLSHLGPECQPFISSTPQFRPTPMAQAEAQAHLQSSFPVLSPAFPSLIQNTGVACPASQNKVQALSLPETQHPEWPLLRRQLEGRLALPSRVQKSQDVFSVSTPNLPQESLTSILPENFPVSPELRRQLEQHIKKWIIQHWGNLGRIQESLDLMQLRDESPGTSQAKGKPSPWQSSMSTGEGSKEAQKVKFQLERDPCPHLGQILGETPQNLSRDMKSFPRKVLGVTSEELERNLRKPLRSDSGSDLLRCTERTHIENILKAHMGRNLGQTNEGLIPVCVRRSWLAVNQALPVSNTHVKTSNLAAPKSGKACVNTAQVLSFLEPCTQQGLGAHIVRFWAKHRWGLPLRVLKPIQCFKLEKVSSLSLTQLAGPSSATCESGAGSEVEVDMFLRKPPMASLRKQVLTKASDHMPESLLASSPAWKQFQRAPRGIPSWNDHEPLKPPPAGQEGRWPSKPLTYSLTGSIQQSRSLGAQSSKAGETREAVPQCRVPLETCMLANLQATSEDVHGFEAPGTSKSSLHPRVSVSQDPRKLCLMEEVVNEFEPGMATKSETQPQVCAAVVLLPDGQASVVPHASENLVSQVPQGHLQSMPTGNMRASQELHDLMAARRSKLVHEEPRNPNCQGSCKSQRPMFPPIHKSEKSRKPNLEKHEERLEGLRTPQLTPVRKTEDTHQDEGVQLLPSKKQPPSVSPFGENIKQIFQWIFSKKKSKPAPVTAESQKTVKNRSRVYSSSAEAQGLMTAVGQMLDEKMSLCHARHASKVNQHKQKFQAPVCGFPCNHRHLFYSEHGRILSYAASSQQATLKSQGCPNRDRQIRNQQPLKSVRCNNEQWGLRHPQILHPKKAVSPVSPPQHWPKTSGASSHHHHCPRHCLLWEGI

SEQ ID NO: 920875 - protein, 235 aa, Homo sapiens
SVDLGSLKNCSSSLLLIHNMVSGLGECVSAVFVLHLFQFCHSVGPKFLYHIQEELAAMDGPRRSTTSSHCGPWISLGTGSLASRLQAIPGLKVGLHWGPTPFHSGTCLPPLLMPSTCFPWHPGCLSKEMPAGWHQDTLSPLQPPSHALQHPNSRGSQGGRGLVCQCFPKHGTLGWFVTGSVLHLNFAPESELVLGAGRGQAVEEGTSEPVGAVELPGTPRAQRCLSPEPWLGSCS

SEQ ID NO: 920876 - protein, 384 aa, Homo sapiens
AATSDAQAMSHTSRVGDLFLLGPSFLWRLQSVECCECASYIWAQRAPGRKESSSPGEEGADLFTPFVSVEKKFSWLSKRQDWHQFHELRKQFVEKSSCAQPLGELTSLDAHGEFGGGSGSSPSSSSLCTEPLIPTTPIIPSEEMAKIACSLETKELWDKFHELGTEMIITKSGRRMFPTIRVSFSGVDPEAKYIVLMDIVPVDNKRYRYAYHRSSWLVAGKADPPLPARLYVHPDSPFTGEQLLKQMVSFEKVKLTNNELDQHGHIILNSMHKYQPRVHIIKKKDHTASLLNLKSEEFRTFIFPETVFTAVTAYQNQLITKLKIDSNPFAKGFRDSSRLTDIERHFMHTAKFPSGKVVHSSYHSFTSLSDMIVVFSSLPVSFLL

SEQ ID NO: 920877 - protein, 378 aa, Homo sapiens
RAAPSVLGPAASVLSMPGFFCDCWPSLEIRALLYAMGCIQSIGGKARVFREGITVIDVKASIDPVPTSIDESSSVVLRYRTPHFRASAQVVMPPIPKKETWVVGWIQACSHMEFYNQYGEQGMTSPGQGIAAALIHLPSTGNKHWRPRSPEASTDCCWLHQATGSGSVTQAGVQWYDLGSLQPLPPRFKRFSCLSLPSSWDYRSSWELPDLQEGKIQAISDSDGVNYPWYGNTTETCTIVGPTKRDSKFIISMNDNFYPSVTWAVPVSESNVAKLTNIYRDQSFTTWLVATNTSTNDMIILQTLHWRMQLSIEVNPNRPLGQRARLREPIAQDQPKILSKNEPIPPSALVKPNANDAQVLMWRPKYGQPLVVIPPKHR

SEQ ID NO: 920878 - protein, 170 aa, Homo sapiens
GSMVEGATWGQRELFKALIFWVPCQALVGPPVAEALQGLARLHHVAEANSTSAQERPSTPAGRLPPHLLGARQHRGPRSARAQGPNRAQPPDAPRGHRVGLSRACAARPLPGSTGGVKAGTWRRLRMRGLGPSRRLRAGLGEAGSGGAVVRWDRVGPGRAAEEVGTLSCR

SEQ ID NO: 920879 - protein, 134 aa, Homo sapiens
MSRRLEADNLSQFTLQNVAPLLRVKLIKVGELNELMFMTRSLLPSAPSSCLAQAGNRPPCGFPVPLAFHYGVPTQLPGGSFETCQARLWAVFDAFLSFSPNRICAYEQRGVSAHPGPEVAPGLQQVLTASLWRA

SEQ ID NO: 920880 - protein, 209 aa, Homo sapiens
MGSTSSSSTSQNSRLGFLREPSSSQAWPILSGQGPSSVPHSPELPEDRGCSLLQVPAPPADPGSAVTAGPTLEAASVIRAPERTWPQEKPQAGDCAHCPLHPSAGQSHMLGAGPFPLSSRSVALPGTGLSTIEMRPPEVGLLHAWPREEESCAESRGRQQGWLLSCPYPAHSGQVTSSSLVCSNPACLHLPLLVSGTSKDVRSQGRFAV

SEQ ID NO: 920881 - protein, 414 aa, Homo sapiens
FKLQAGSALAGARLARVPDSSLFSSSSINTTLSYSPFKPSMSLNFHGHGTDKDPVFSRTKEKVENSPGGARAMRNILAGPRPNRLTAGNSSFITSCPAATHTAPPLLSGPTTAPVCKRGLGSSAVWPQPSPVVYSFTTHELAPGDWQTLVPGTSHWLSRLMLEHCGTVNSDSWNCYQATTASSNDLAIPSTDVSNMFQTKLRNETWEDLPKMSCTTEIQAAFILSSFVTFFSGLIILLIFRLIWRSVKKWQIIKGTGIILELFTSGTIARSHVRSLHFQGQFRDHIEMLLSAQTFVGQVLVILVFVLSIGSLIIYFINSADPVGSCSSYEDKTIPIDLVFNAFFSFYFGLRFMAADDKIKFWLEMNSIVNIFTIPPTFISYYLKSNWLGLRFLRALRLLELPQILQILRAIKTR

SEQ ID NO: 920882 - protein, 213 aa, Homo sapiens
MAELPRRRPLTRSGLTSLFFIPIGPFVYSLSFLSFAVETATDSDTESRGLREYHSVGVQVEDEKRHGRFKRSNSVTAAVQADLELEGFPGHITTEDKGLQFGSSFQRHSEPSTPTQYSAVRTVRTQGLFSYREDYRTQVDTSTLPPPDPWLEPAIDTVETGRMSPCRRDGSWFLKLLHAETKRMEGWCKEMEREAEENDLSEESKSSGFPRAS

SEQ ID NO: 920883 - protein, 196 aa, Homo sapiens
MDGSEYSLVSGAEPRSPSGTWKMLCGCKEPLVASPSLRCLDQRDSLQWKGLSLAGTFPHLTGLLFRGSPGHGTQCARPCAPIRRGTRGSHGAGVRRGSHRRARVRRWPRLQGFFRGLAFLMADETGAVGKGFPTVRAFVGLLPGVRLLMFQEIGAAVKGFPALPAFEGLLSRVSPLVFGDVRAVPEGLAALGTLEG

SEQ ID NO: 920884 - protein, 196 aa, Homo sapiens
MDGSEYSLVSGAEPRSPSGTWKMLCGCKEPLVASPSLRCLDQRDSLQWKGLSLAGTFPHLTGLLFRGSPGHGTQCARPCAPIRRGTRGSHGAGVRRGSHRRARVRRWPRLQGFFQRVAFLMADETGAVGKGFPTVRAFVGLLPGVRLLMFQEIGAAVKGFPALPAFEGLLSRVSPLVFGDVRAVPEGLAALGTLEG

SEQ ID NO: 920885 - protein, 155 aa, Homo sapiens
MALQWPEDSEHWGVKLPTVMVLTFEEIWEPSESPAAISRHFRGCFPARFQRVLPCTISEGASLHDFTGCFPARFQRVLPCTISEGASLHDFTGCFPARFHRVLPCTISQGASLHDFRGCFPARTLPHTALPGPGACCTEGGSFSSLSSAFLLLFF

SEQ ID NO: 920886 - protein, 547 aa, Homo sapiens
MKTYSFSMLEITLAHLPPLPLSWHGVRSVYFSNQCLPLIPAGAEGDDHSRVRLTQLEGEPHSDYINANLVPGYTRPQEFIASQGPLKKTLENFWRLVREQQVRIIIMPTISMENGRVLCEHYWLTDSTPDTHGHITIHLLAEEPEDEWTKREFQLQHLLRGCPCGVGMGRTGTFVALSRLLQQLEEEQMVDVFHAVYALRMHQPLMIQTLSQYVFLHSCLLNKILEGPFNISESWPISVTDLPQACAKRAASANAGFLKEYEAIKDEAGFSAPPPGYEQDSPVSSPMLIMSLPQGESRKEREVQRLQFPYLEPGHELPATTLLPFLAAVGQCCSRGNNKKPGTLLSHSNKGATQLGTFLAMEQLLQQAGSECTVDIFNVALQQSQACGLMTPTLIGAGGASLLTLCPSPEAVCLPLQLSEQRAGRRAALSQHWSRCRRVEPPGRSPPTAQPAGTGRKQLRTPRPCVCAPGRQVTQQPGRRDAQPAQAPGAVTSRRCVRLPERRLRPPARPGAYRLPGPLPLPGGRHHAVCRLLLSLGCPPYRGTWIP

SEQ ID NO: 920887 - protein, 547 aa, Homo sapiens; identical to SEQ ID NO: 920886

SEQ ID NO: 920888 - protein, 307 aa, Homo sapiens
MLLPTALFSAHTGSPGSLCLRDAAAAAAAAPAVGRALAQDARFRLEMPESVTVQEGLCIFVHCSVFYLEYGWKDSTPAYGHWFREGVSVDQETPVATNNSTQKVQKETQGRFHLLGDPSRNNCSLSIRDARRRDNGSYFFWVARGRTKFSYKYSPLSVYVTALTHRPDILIPEFLKSGHPSNLTCSVPWVCEQGTPPIFSWMSAAPTSLGPRTLHSSVLTIIPRPQDHGTNLICQVTFPGAGVTTERTIQLSVSWKSGTVEEVVVLAVGVVAVKILLLCLCLIILSFHKKKAVRAVEVEENVYAVMG

SEQ ID NO: 920889 - protein, 872 aa, Homo sapiens
LWLLDHTSDSPGQMIKNAGFGTRPIPMELVWSLGPGVCMSNKRPWGYQGTPKFKRVCCCCSALRPRYKRLVDNIFPEDPKDGLVKTDMEKLTFYAVSAPEKLDRIGSYLAERLSRDVVRHRSGYVLIAMEALDQLLMACHSQSIKPFVESFLHMVAKLLESGEPKLQVLGTNSFVKFANIEEDTPSYHRRYDFFVSRFSAMCHSCHSDPEIRTEIRIAGIRGIQGVVRKTVNDELRATIWEPQHMDKIVPSLLFNMQKIEEVDSRIGPPSSPSATDKEENPAVLAENCFRELLGRATFGNMNNAVRPVFAHLDHHKLWDPNEFAVHCFKIIMYSIQAQYSHHVIQEILGHLDARKKDAPRVRAGIIQVLLEAVAIAAKGSIGPTVLEVFNTLLKHLRLSVEFEANDLQGGSVGSVNLNTSSKDNDEKIVQNAIIQTIGFFGSNLPDYQRSEIMMFIMGKVPVFGTSTHTLDISQLGDLGTRRIQIMLLRSLLMVTSGYKAKTIVTALPGSFLDPLLSPSLMEDYELRQLVLEVMHNLMDRHDNRAKLRGIRIIPDVADLKIKREKICRQDTSFMKKNGQQLYRHIYLGCKEEDNVQKNYELLYTSLALITIELANEEVVIDLIRLAIALQDSAIINEDNLPMFHRCGIMALVAAYLNFVSQMIAVPAFCQHVSKVIEIRTMEAPYFLPEHIFRDKCMLPKSLEKHEKDLYFLTNKIAESLGGSGYSVERLSVPYVPQVTDEDRLSRRKSIVDTVSIQVDILSNNVPSDDVVSNTEEITFEALKKAIDTSGMEEQEKEKRRLVIEKFQKAPFEEIAAQCESKANLLHDRLAQILELTIRPPPSPSGTLTITSGHAQYQSVPVYEMKFPDLCVY

SEQ ID NO: 920890 - protein, 785 aa, Homo sapiens
MEKLTFYAVSAPEKLDRIGSYLAERLSRDVVRHRSGYVLIAMEALDQLLMACHSQSIKPFVESFLHMVAKLLESGEPKLQVLGTNSFVKFANIEEDTPSYHRRYDFFVSRFSAMCHSCHSDPEIRTEIRIAGIRGIQGVVRKTVNDELRATIWEPQHMDKIVPSLLFNMQKIEEVDSRIGPPSSPSATDKEENPAVLAENCFRELLGRATFGNMNNAVRPVFAHLDHHKLWDPNEFAVHCFKIIMYSIQAQYSHHVIQEILGHLDARKKDAPRVRAGIIQVLLEAVAIAAKGSIGPTVLEVFNTLLKHLRLSVEFEANDLQGGSVGSVNLNTSSKDNDEKIVQNAIIQTIGFFGSNLPDYQRSEIMMFIMGKVPVFGTSTHTLDISQLGDLGTRRIQIMLLRSLLMVTSGYKAKTIVTALPGSFLDPLLSPSLMEDYELRQLVLEVMHNLMDRHDNRAKLRGIRIIPDVADLKIKREKICRQDTSFMKKNGQQLYRHIYLGCKEEDNVQKNYELLYTSLALITIELANEEVVIDLIRLAIALQDSAIINEDNLPMFHRCGIMALVAAYLNFVSQMIAVPAFCQHVSKVIEIRTMEAPYFLPEHIFRDKCMLPKSLEKHEKDLYFLTNKIAESLGGSGYSVERLSVPYVPQVTDEDRLSRRKSIVDTVSIQVDILSNNVPSDDVVSNTEEITFEALKKAIDTSGMEEQEKEKRRLVIEKFQKAPFEEIAAQCESKANLLHDRLAQILELTIRPPPSPSGTLTITSGHAQYQSVPVYEMKFPDLCVY

SEQ ID NO: 920891 - protein, 692 aa, Homo sapiens
MEKLTFYAVSAPEKLDRIGSYLAERLSRDVVRHRSGYVLIAMEALDQLLMACHSQSIKPFVESFLHMVAKLLESGEPKLQVLGTNSFVKFANIEEDTPSYHRRYDFFVSRFSAMCHSCHSDPEIRTEIRIAGIRGIQGVVRKTVNDELRATIWEPQHMDKIVPSLLFNMQKIEEVDSRIGPPSSPSATDKEENPAVLAENCFRELLGRATFGNMNNAVRPVFAHLDHHKLWDPNEFAVHCFKIIMYSIQAQYSHHVIQEILGHLDARKKDAPRVRAGIIQVLLEAVAIAAKGSIGPTVLEVFNTLLKHLRLSVEFEANDLQGGSVGSVNLNTSSKDNDEKIVQNAIIQTIGFFGSNLPDYQRSEIMMFIMGKVPVFGTSTHTLDISQLGDLGTRRIQIMLLRSLLMVTSGYKAKTIVTALPGSFLDPLLSPSLMEDYELRQLVLEVMHNLMDRHDNRAKLRGIRIIPDVADLKIKREKICRQDTSFMKKNGQQLYRHIYLGCKEEDNVQKNYELLYTSLALITIELANEEVVIDLIRLAIALQDSAIINEDNLPMFHRCGIMALVAAYLNFVSQMIAVPAFCQHVSKVIEIRTMEAPYFLPEHIFRDKCMLPKSLEKHEKDLYFLTNKIAESLGGSGYSVERLSVPYVPQVTDEDRLSRRKSIVDTVSIQVDILSNNVPSDDVNKTTEDSQV

SEQ ID NO: 920892 - protein, 146 aa, Homo sapiens
DLEDPPSRIPQVTDEDRLSRRKSIVDTVSIQVDILSNNVPSDDVVSNTEEITFEALKKAIDTSGMEEQEKEKRRLVIEKFQKAPFEEIAAQCESKANLLHDRLAQILELTIRPPPSPSGTLTITSGHAQYQSVPVYEMKFPDLCVY

SEQ ID NO: 920893 - protein, 785 aa, Homo sapiens; identical to SEQ ID NO: 920890

SEQ ID NO: 920894 - protein, 491 aa, Homo sapiens
MEKLTFYAVSAPEKLDRIGSYLAERLSRDVVRHRSGYVLIAMEALDQLLMACHSQSIKPFVESFLHMVAKLLESGEPKLQVLGTNSFVKFANIEEDTPSYHRRYDFFVSRFSAMCHSCHSDPEIRTEIRIAGIRGIQGVVRKTVNDELRATIWEPQHMDKIVPSLLFNMQKIEEVDSRIGPPSSPSATDKEENPAVLAENCFRELLGRATFGNMNNAVRPVFAHLDHHKLWDPNEFAVHCFKIIMYSIQAQYSHHVIQEILGHLDARKKDAPRVRAGIIQVLLEAVAIAAKGSIGPTVLEVFNTLLKHLRLSVEFEANDLQGGSVGSVNLNTSSKDNDEKIVQNAIIQTIGFFGSNLPDYQRSEIMMFIMGKVPVFGTSTHTLDISQLGDLGTRRIQIMLLRSLLMVTSGYKAKTIVTALPGSFLDPLLSPSLMEDYELRQLVLEVMHNLMDRHDNRAKLRGIRIIPDVADLKIKREKICRQDTSFMKKIR

SEQ ID NO: 920895 - protein, 421 aa, Homo sapiens
MEKLTFYAVSAPEKLDRIGSYLAERLSRDVVRHRSGYVLIAMEALDQLLMACHSQSIKPFVESFLHMVAKLLESGEPKLQVLGTNSFVKFANIEEDTPSYHRRYDFFVSRFSAMCHSCHSDPEIRTEIRIAGIRGIQGVVRKTVNDELRATIWEPQHMDKIVPSLLFNMQKIEEVDSRIGPPSSPSATDKEENPAVLAENCFRELLGRATFGNMNNAVRPVFAHLDHHKLWDPNEFAVHCFKIIMYSIQAQYSHHVIQEILGHLDARKKDAPRVRAGIIQVLLEAVAIAAKGSIGPTVLEVFNTLLKHLRLSVEFEANDLQGGSVGSVNLNTSSKDNDEKIVQNAIIQTIGFFGSNLPDYQRSEIMMFIMGKVPVFGTSTHTLDISQLGDLGTRRIQIMLLRSLLMVTSGYKAKPQKGYRA

SEQ ID NO: 920896 - protein, 890 aa, Homo sapiens
PGEEWAGGGSCRPLGCVTAGSASAPSTLRPSPFASFRPPRPSNGRHGAVGAPCAAPLSLGAAASAVEIAMPTRVCCCCSALRPRYKRLVDNIFPEDPKDGLVKTDMEKLTFYAVSAPEKLDRIGSYLAERLSRDVVRHRSGYVLIAMEALDQLLMACHSQSIKPFVESFLHMVAKLLESGEPKLQVLGTNSFVKFANIEEDTPSYHRRYDFFVSRFSAMCHSCHSDPEIRTEIRIAGIRGIQGVVRKTVNDELRATIWEPQHMDKIVPSLLFNMQKIEEVDSRIGPPSSPSATDKEENPAVLAENCFRELLGRATFGNMNNAVRPVFAHLDHHKLWDPNEFAVHCFKIIMYSIQAQYSHHVIQEILGHLDARKKDAPRVRAGIIQVLLEAVAIAAKGSIGPTVLEVFNTLLKHLRLSVEFEANDLQGGSVGSVNLNTSSKDNDEKIVQNAIIQTIGFFGSNLPDYQRSEIMMFIMGKVPVFGTSTHTLDISQLGDLGTRRIQIMLLRSLLMVTSGYKAKTIVTALPGSFLDPLLSPSLMEDYELRQLVLEVMHNLMDRHDNRAKLRGIRIIPDVADLKIKREKICRQDTSFMKKNGQQLYRHIYLGCKEEDNVQKNYELLYTSLALITIELANEEVVIDLIRLAIALQDSAIINEDNLPMFHRCGIMALVAAYLNFVSQMIAVPAFCQHVSKVIEIRTMEAPYFLPEHIFRDKCMLPKSLEKHEKDLYFLTNKIAESLGGSGYSVERLSVPYVPQVTDEDRLSRRKSIVDTVSIQVDILSNNVPSDDVVSNTEEITFEALKKAIDTSGMEEQEKEKRRLVIEKFQKAPFEEIAAQCESKANLLHDRLAQILELTIRPPPSPSGTLTITSGHAQYQSVPVYEMKFPDLCVY

SEQ ID NO: 920897 - protein, 208 aa, Homo sapiens
MNNAVRPVFAHLDHHKLWDPNEFAVHCFKIIMYSIQAQYSHHVIQEILGHLDARKKDAPRVRAGIIQVLLEAVAIAAKGSIGPTVLEVFNTLLKHLRLSVEFEANDLQGGSVGSVNLNTSSKDNDEKIVQNAIIQTIGFFGSNLPDYQRSEIMMFIMGKVPVFGTSTHTLDISQLGDLGTRRIQIMLLRSLLMVTSGYKAKPQKGYRA

SEQ ID NO: 920898 - protein, 785 aa, Homo sapiens; identical to SEQ ID NO: 920890

SEQ ID NO: 920899 - protein, 785 aa, Homo sapiens; identical to SEQ ID NO: 920890

SEQ ID NO: 920900 - protein, 785 aa, Homo sapiens; identical to SEQ ID NO: 920890

SEQ ID NO: 920901 - protein, 136 aa, Homo sapiens
DHVVHRAKMKALALENGFCGTRGIPVGYPEVPWCQQRLLLGEKRELLRVAGSWKSTEKPQPQLYAASDCFSAASEAKGRRKGNAISSEWQYFVFSNPIQVVTVAKRKNRPTCRMDKNPDYYPNECQLAELNSSPDF

SEQ ID NO: 920902 - protein, 157 aa, Homo sapiens
MGALEEPFSPLLYWRCGGRGASGNRCCARRLRASWSSGWAWAWRAPHWEQPTGPAGPGNEGLSTWASGCGGCTGSPSSASPPALRSISHRALAAFPRGRARDLQPAMPEPPTHSMGSCAARASLMSATPCSTAPSPIDHPRAEECGRPAPDCSLPYC

SEQ ID NO: 920903 - protein, 186 aa, Homo sapiens
AVACYDPCLSPPQAGWILQAAVAVPWPAGQCSAAWPSSGSAAAREKRKEYCMYYNRFGRCNRGERCPYIHDPEKVAVCTRFVRGTCKKTDGTCPFSHHVSKEKMPVCSYFLKGICSNSNCPYSHVYVSRKAEVCSDFLKGYCPWVQSPEVVSAITSTSQVTQRGPATFPGLHSTNTGRGLNHGKKD

SEQ ID NO: 920904 - protein, 185 aa, Homo sapiens
SDAGSRPLLRTGRLDPAGSCSRSLASRAVQRSLAIIRQRGSAEEKRKEYCMYYNRFGRCNRGERCPYIHDPEKVAVCTRFVRGTCKKTDGTCPFSHHVSKEKMPVCSYFLKGICSNSNCPYSHVYVSRKAEVCSDFLKGYCPWVQSPEVVSAITSTSQVTQRGPATFPGLHSTNTGRGLNHGKKD

SEQ ID NO: 920905 - protein, 132 aa, Homo sapiens
MHVQGKAAWWSCQPDADVDSSTTTKGVGPDPESAPQLGHLVGPGSRAANHHKFQLLERPPVRNLEHLLYLLWPFPGPYPTQGSAQNQFSLESNTPSYFQKYRRGKRAPSSLFRKDIDPRHESSATFQKILTS

SEQ ID NO: 920906 - protein, 156 aa, Homo sapiens
LTREMITLSFRTTRSPSLLLYVSSFYEEYLSVILANNGSLQIRYKLDRHQNPDAFTFDFKNMADGQLHQVKINREEAVVMVEVNQSAKKQVILSSGTEFNAVKSLILGKVLGRSGPADEGEPLVNADRRDSAVIGGNKALNDLVLVIIALDNDTIT

SEQ ID NO: 920907 - protein, 111 aa, Homo sapiens
LTREMITLSFRTTRSPSLLLYVSSFYEEYLSVILANNGSLQIRYKLDRHQNPDAFTFDFKNMADGQLHQVKINREEAVVMVENEYVFKFKTASSIFFMDSANYRSFHYEEE

SEQ ID NO: 920908 - protein, 111 aa, Homo sapiens; identical to SEQ ID NO: 920907

SEQ ID NO: 920909 - protein, 171 aa, Homo sapiens
MAHHSGSGCWTALTGGSMYFVIVHWCQVITHWCQVITHWCQVMAHWGHVIAHWCQVITHWCQVITHWCQVITHWCQVMTHWCQVITHWCQVIVHWCQVIARWCQVMMHWCQVIKHWCQVITHWCQVITHWFQVITHRSSHTGFLVFNLVLALCEWFQSCLLNPGLRTSSVT

SEQ ID NO: 920910 - protein, 166 aa, Homo sapiens
KKISFPQYMLLSALSKISWLLFQKTCLQLLKLFLSLDLVYCGSFLMYFVFPSMHYLVSAFLFQLWNAQDPGFCALSPSGSKARWSQPGEGRSSGTWQKAQVRGDSCYTEVLARGKWGHPQWPQSRAGDTVSLSEKIINDPPRLERSDLSLGDSRTHLDHGRASKSV

SEQ ID NO: 920911 - protein, 299 aa, Homo sapiens
MDSSFGEVLLVQEVYTKEFRNNPFFLSDKDDIYPVDTVAIGRTDIEDLDLYATSRERRFRLFASIECEGQLFMTPYDFILAVTTDEPKETPPVWKGSSKLFRNLKEKEPHAGFRIAFNMFDTDGNEMVDKKEFLVLQEIFRKKNEKREIKGDEEKRAMLRADDITSLVTDTTLLVHFFGKKGKAELNFEDFYRFMDNLQTEVLEIEFLSYSNGMNTISEEDFAHILLRYTNVENTSVFLENVRYSIPEEKGITFDEFRSFFQFLNNLEDFAIALNMYNFASRSIGQGNFRTQPETYSSG

SEQ ID NO: 920912 - protein, 223 aa, Homo sapiens
MLLTERTRRLGEPSVAALTTTMPKQGLLGAEGWATSLLKLLVMSQRKPGGCKSVLKEQAPTLGLTVQDCWDQGEPSSAFPGSTQQPRLHNTLSGLLCTCLYHCPAVPCQPPWDCGGAPPPLPPALPQLVSGGERMPVGKEGGWEKEGKGKPMHLGGDFCSGNADLPAQVTDVLSSFLQALGLCLVQGPSYSQTSNTATPKLLAKCSSARKEELRNKTLGLGAT

SEQ ID NO: 920913 - protein, 174 aa, Homo sapiens
MLQGTVCKFKGARLGISTPSLTSMPFGMRLCCPGLCLFKPWTGICSTEFGQGRQWSIREESCGGGFPSPKKDPRIKTEPPISLSPLFRGPFDFGWTLDLTTWSHGNTLGEEENIYHLPITTSRVTTAAPEYNHSECPLNSDSHSCPYILIQEIWDPRNLHSLISLQMIQIHEKQ

SEQ ID NO: 920914 - protein, 135 aa, Homo sapiens
IGKMQAGQRLLLNARLSNRIPYKFSSSLFFSWWWRQEVGRVSGVGDVSWKKWKLTYTFKEGYTLSRQRKDGLVTSFIESSDGNHILEFALRHPATHCFPGWHTSHNGWKHQVALTPSPNLLTGSEPILSKNNSVC

SEQ ID NO: 920915 - protein, 130 aa, Homo sapiens
MATISVAMVMGILQSRQKLPSDHRMALGGAVICRDSLPWEPLAGLTTHFTLKICQKENYREAKQGNGQVAAKKAEPQLKPREGGTSWRKFKPRSLKPGLDNMLPSGFPFNQPHNAKLPSNGSFMVNRHGD

SEQ ID NO: 920916 - protein, 634 aa, Homo sapiens
MALSQADFGGSGKGKAWANLMLNRACFQWCLGQAPAHAITFTEPWVCLTTEGQEVNCLLDTGAAFSVLPSCPGQLFSRSVTIRGVLGQAVTRYFSQERRSSKSRGHYTPEHRRRNTVEWTPEAEAAFQALKKSLTQAPVLSLPVGQDFSLYVTEKTGIALGVLTQVLGTSLQPVAYLSKEIDVVAKSWPHCLWVVAAVAVLVSEAIKIIQGRDLIVWTSHDVNGILTAKGDLWLSDNHLLKYQALLLEGPVLRLHTCATLNPVTFLPDNEEKTERNCQQVIAQTYATRGDLLEVPLTDPYLNLYTDGSSFVEKGLRKAEYAVVSDNGILESNPLTPGTSAQLAELIALTQALELGEGKRVNIYTDSKYAYLVLHAQAAIWREREFLTSEGTPIKHQEAIRRLLLAVQKPKEVAVLHCQGHEKGKEREIGGNRQADIEAKRAARRDPPLEMLIEGPLVWGIDSTHQMAKSLFTGPGLFKTIKQIVRACEMCQRNNPLPYHQAPSGEQRTGHYPGEDWQLDFTHMRKSQGFQYLLVWVHTFTGWAEAFPCRTEKAQESHMNPPELKQRTQTCLWSYLSPKMLHPNCIPGLSWSPSWATLVAPVVWAWLQAAHLAHQCRTSSASCCMIVDTRRALAV

SEQ ID NO: 920917 - protein, 634 aa, Homo sapiens; identical to SEQ ID NO: 920916

SEQ ID NO: 920918 - protein, 147 aa, Homo sapiens
IVTLHAVMGRCPRLAKELHPLGLMTDSAKDAEYDQKSGAIRSWSSKTHSQCSQPLAPRIPKTSVLPSEIQSLEKNLCRQLMRLIENMLIDLLVLFESQNISRLSHTEGGENRVKDLKPEKRPNDSSKPRKYEVAERISNPGLQCQKR

SEQ ID NO: 920919 - protein, 146 aa, Homo sapiens
MWGYGHLRGHLCKMTVSLIVEPSLKNTHVPPVVSSGVRRLRWGRGRQLTGGPFRRRRAWTVAAGWAAPDAEPCAACVPGLPARQGRGAGQRAVSAETRIRDQVCVSVDTEVATAALSLPKPRFLSLKGFQSRSSVKSFHIHGASTN

SEQ ID NO: 920920 - protein, 516 aa, Homo sapiens
MTFQNTLIRRMQDSDWPGSSLRPTPEEEMHSAFLNPDCVTLHSYPLPSPVLSSSDRLPFGIEENGGTPFLTAASGRHHHQHQHQHQHQHHSNYSLSLTLENKEGPLRSPNSSSKSLTKLSPGTPALFSEAAAHLKKLELETVKAAGPWPPLHININKAEEKKVSEKTLQTPLLPSPVADHVKCNILKAQLENASRVNIQGGKEESPFVNINKKSSLQDASVRSPIPIRVETAQPAVEKPEIKPPRSIGSCKLDIWWTSVWEPPIPIPGLPTPAHPPSTPHSLFIIVMSRASCAFSNRSDEDDLPPDLAEAVGVTTSTTTNTTTAATQVSVPLPSPKVQNVSSPHKSEGKGLLSPGAKSPSDRGGAFTLEPGDLLMDFTEATPLAEPASNPHCAHSRCSPPLSLPMKEETTGVCMYPPIKTRLIKTFPVDTMNPFPDTFTTGPQFTADFRDSKLQCCPGPTSPLIPAATLRPLTETVSTVQTIYTTRKPVSLAASAETLRQELEREKMMKRLLMTEL

SEQ ID NO: 920921 - protein, 159 aa, Homo sapiens
FCSHGSFVFFQKTVLPIMPTSAVLFPAALLVLLFEFAPSSQFLQFSNSGSGSSPNGSSNSPSLTSWLPALPPWKCVFHLRLDPGAPLLVQRAAPSPSQMAGLLLAGVERSCASSFSVEAFREHGGDQLCLSARPELTTRVFAKEGWGPTQCEDNKDEDL

SEQ ID NO: 920922 - protein, 528 aa, Homo sapiens
HAHFTGTCTPHPPYAHLTDPAHFTGTCTHHRPSTCHRPMHTPQTQHVSQTHAHLSDPCTPHRSSILHKHMHTSQTQTQHMSQTRAHLTDPAHVTDPLHTSQIQHMSQTRAHLTDPAHVTDPCTPHRSSTCHRPMHTSQTRAHLTDTVHITGTCTPHRPMHTSQTRAHLTDLCTHHRPSTLHRHVHTSQTQHMSQTHAHLTDPYTPHRPSTSQTYAHLTDPAHFIGTCTPHRPMHTSQTRAHLTDLCTHHRPSTLHRHVHTSQTRAHLTDPAHVTDPCTPHRPVHTSQTQHVTDLCTPHRSSTLHRHVHTSQTHAHLTDPVHTSQTCAHITDPAHFIGTCTPHRPVHTSQTQHMSQTHAHLTDPYTPHRPSTSQTYAHLTDPAHFIGTCTPHRPMHTSQTRAHLTDPAHFIGTCTPHRPMHTSQTRAHLTDPAHFIGTCTPHRPMHTSQTRAHLTDPAHFIGTCTPHRPMHTSQTRAHLTDPAHLIGTCTPHRPVHTSQTRAHLTDPAHFIGTCTPHRHIHTSQTQHTS

SEQ ID NO: 920923 - protein, 156 aa, Homo sapiens
MWPVPYTSLGLDDSLNSAADGIEQMGMTWNLTLYNSDTPLSTCPSLPATGPASVPCVLRKGHWLLFYVMTDRRSRPAQQCEQTPCMVPVVGAVVSGCHGRGWGIPGLSPIVPKINWLLGGFCVPLTVLETNFLTYGKTHPGEAKVVEGTESPSRSE

SEQ ID NO: 920924 - protein, 597 aa, Homo sapiens
MEEGGEQLAGHVSLHHRKEGPGHPGGQTPPGKLNRKIHLPGRIPFSSLPSLLGRPCPQAVHAPWNVGVGTRVVQSCHWPSLLAKGQAGSWGPPEGLEGFGLKPRPLSGSVCCGVPGAEADADRPEFVDESTGPASTPQHRRCFSKESKEEQDHREPLSASSSPSTEEIHRSPFTGPRLCHLGELGWQVPRKAHRESTGNPPQPGTYAHPPHPEGNCSSQRPRNTHHTAPTMEIGGLVLPVASKLLFDHDGLSLVWPDTVAQRHEETVALRQGVGRLHTTENEREFKESGTAGTRGVSVLQTQFCDLSLLRHPQRRLGTGRGGQGRPRWQRVLGNCGWDLVFPTVAAPLRARQQSRRHSALGRLGGLEASCPQRRGALCSRWGQSWGERTQTQNRIVLVIVKGCHVRNEEWSPAVGRPGGLLHPDLQEPQILVKGHRCEREAGAGHGKGGGGAAKQTHFPWRTGAGGKRLSTPFPHLRSRGRRAASSVVLSVTQMHCVKVKIALGKARLARRTPIKACVGETGPNSARAQLPLNEGREGFSELEREGTLCIYSLIHNSQAQHVPVEQAEFQKSRHTLLGAAEDSGIVVTSPLELLSPF

SEQ ID NO: 920925 - protein, 172 aa, Homo sapiens
LSNYHRYRTSDTIVLSQKEHLPVTQIVMTDAGQPHSEADYTLGPLLCCGDTRLLKVWRRESVIFEIFPSLFGRLRWEDGLSQGVQHKPGQDESFWNSASFNTETSYLHFPAFHGELTADVCFFFKTTVSSGVFMENLGITDFIRIELRGRLATLDKSQGTHYLAIKALTQQN

SEQ ID NO: 920926 - protein, 177 aa, Homo sapiens
MVMFCKFASQPGERRVLSCVLSSGRQRPEAEIQPCSRQRWVMVFRPGLQKVTLPLGDTLCQVLKCKPLDTDSTSGDIFSGSFGWCSPTALYEQSCEAHKHRGNPSGLYYIDADGSGPLGPFLVYCNMTDSAWTVVRHGGPDAVTLRGAPSGHPRSAVSFAYAAGAGQLRAAVNLAER

SEQ ID NO: 920927 - protein, 177 aa, Homo sapiens; identical to SEQ ID NO: 920926

SEQ ID NO: 920928 - protein, 451 aa, Homo sapiens
MVMFCKFASQPGERRVLSCVLSSGRQRPEAEIQPCSRQRWVMVFRPGLQKVTLPLGDTLCQVLKCKPLDTDSTSGDIFSGSFGWCSPTALYEQSCEAHKHRGNPSGLYYIDADGSGPLGPFLVYCNMTDAQGHRLESAVRSSRPLIPLGLVTDGEADIIKPLYFNRAASYHTCESALPLAAGLCRPVMPLLCPFLLSRLRVDGGAARWPRRGDPPRCPQWAPALGCVLRVRSGRGAAAGRGEPGGALRAAAGSALRDSAAPGLTRTSDTIVLSQKEHLPVTQIVMTDAGQPHSEADYTLGPLLCCGDKSFWNSASFNTETSYLHFPAFHGELTADVCFFFKTTVSSGVFMENLGITDFIRIELRGRLATLDKSQAPTEVTFSFDVGNGPCEVTVQSPTPFNDNQWHHVRAERNVKGASLQVDQLPQKMQPAPADGHVRLQLNSQLFIVFPL

SEQ ID NO: 920929 - protein, 440 aa, Homo sapiens
MVMFCKFASQPGERRVLSCVLSSGRQRPEAEIQPCSRQRWVMVFRPGLQKVTLPLGDTLCQVLKCKPLDTDSTSGDIFSGSFGWCSPTALYEQSCEAHKHRGNPSGLYYIDADGSGPLGPFLVYCNMTDAQGHRLESAVRSSRPLIPLGLVTDGEADIIKPLYFNRAASYHTCESALPLAAGLCRPVMPLLCPFLLSRLRVDGGAARWPRRGDPPRCPQWAPALGCVLRVRSGRGAAAGRGEPGGALRAAAGSALRDSAAPGLTRWNPTELVCWKNNETHTYWGGSLPDAQKCTCGLEGNCIDSQYYCNCDAGRNEWTSDTIVLSQKEHLPVTQIVMTDAGQPHSEADYTLGPLLCCGDKSFWNSASFNTETSYLHFPAFHGELTADVCFFFKTTVSSGVFMENLGITDFIRIELRGRLATLDKSQGTHYLAIKALTQQN

SEQ ID NO: 920930 - protein, 367 aa, Homo sapiens
RPGSSGWWPTSGMDSLDPLTTMDPLRSLHAVLWADYLPWNQPRREPLRLEHKYQPASVRFDNRTTHQDDYPIKGLVKTISCKPLAMPKLCNIPLEDVTNYKMSYVAHPVEKRFVHEAEKFRPCEIPFESLTTQKQSYRGLMGEPAKSLKPLARPPGLDMPFCNTTEFRDKYQAWPMPRMFSKAPITYVPPEDRMDLLTTVQAHYTCPKGAPAQSCRPALQIKKCGRFEGSSTTKDDYKQWSSMRTEPVKPVPQLDLPTEPLDCLTTTRAHYVPHLPINTKSCKPHWSGPRGNVPVESQTTYTISFTPKEMGRCLASYPEPPGYTFEEVDALGHRIYKPVSQAGSQQSSHLSVDDSENPNQRELEVLA

SEQ ID NO: 920931 - protein, 166 aa, Homo sapiens
NSCSQLNLGISGHRMGVVLWQLNFRDEEAPIAPCPWSKTHSNIVPVPKWHNTVAMQATGEALGPAWCLHTHKNNGFSSVLPAGVTVTALIIHGKKYWNGGVPIRCHVQRVVKAKADLIRPGKNEYASCLRAIISCCTYSKVRGFLWEEAHNSKKLKREIRVTFIGY

SEQ ID NO: 920932 - protein, 833 aa, Homo sapiens
MAPWPHENSSLAPWPDLPTLAPNTANTSGLPGVPWEAALAGALLALAVLATVGGNLLVIVAIAWTPRLQTMTNVFVTSLAAADLVMGLLVVPPAATLALTGHWPLGATGCELWTSVDVLCVTASIETLCALAVDRYLAVTNPLRYGALVTKRCARTAVVLVWVVSAAVSFAPIMSQWWRVGADAEAQRCHSNPRCCAFASNMPYVLLSSSVSFYLPLLVMLFVYARVFVVATRQLRLLRGELGRFPPEESPPAPSRSLAPAPVGTCAPPEGVPACGRRPARLLPLREHRALCTLVPGPAFLALNWLGYANSAFNPLIYCRSPDFRSAFRRLLCRCGRRLPPEPCAAARPALFPSGVPAARSSPAQPRLCQRLDGSKGGRAGRRSSPKDPRCATGKRCGVPRTLASPAPLHWGCQGSRKRQDCPAQPWRKTSGQKRNTGAETHSLGSSFVSVMPTLSVFMDVPLAHKLEGSLLKTYKQDDYPNKIFLAYRGTFPQPHGVQERFVCRLSAELSPGGPNQASGAPSVVFLTVCMTNEGHPWVSLVVQKTRLQISQDPSLNYEYLPTMGLKSFIQASLALLFGKHSQAIVENRVGGVHTVGDSGAFQLGVQFLRAWHKDARIVYIISSQKADPTWLCPCDGEHYRLQVDTKWVGKVDVHDKEQADIPIFDIPCQGLYTSDLEEDTRILQYFVSQGFEFFCSQSLSKNFGIYDEGVGMLVVVAVNNQQLLCVLSQLEGLAQALWLNPPNTGARVITSILCNPALLGEWKQSLKEVVENIMLTKEKVKEKLQLLGTPGSWGHITEQSGTHGYLGLNCKGLGGWCPPFLTFGLYLSIKLH

SEQ ID NO: 920933 - protein, 831 aa, Homo sapiens
MAPWPHENSSLAPWPDLPTLAPNTANTSGLPGVPWEAALAGALLALAVLATVGGNLLVIVAIAWTPRLQTMTNVFVTSLAAADLVMGLLVVPPAATLALTGHWPLGATGCELWTSVDVLCVTASIETLCALAVDRYLAVTNPLRYGALVTKRCARTAVVLVWVVSAAVSFAPIMSQWWRVGADAEAQRCHSNPRCCAFASNMPYVLLSSSVSFYLPLLVMLFVYARVFVVATRQLRLLRGELGRFPPEESPPAPSRSLAPAPVGTCAPPEGVPACGRRPARLLPLREHRALCTLVPGPAFLALNWLGYANSAFNPLIYCRSPDFRSAFRRLLCRCGRRLPPEPCAAARPALFPSGVPAARSSPAQPRLCQRLDGSKGGRAGRRSSPKDPRCATGKRCGVPRTLASPAPLHWGCQGSRKRQDCPAQPWRKTSGQKRNTGAETHSLGSSFVSVMPTLSVFMDVPLAHKLEGSLLKTYKQDDYPNKIFLAYRVCMTNEGHPWVSLVVQKTRLQISQDPSLNYEYLPTMGLKSFIQASLALLFGKHSQAIVENRVGGVHTVGDSGAFQLGVQFLRAWHKDARIVYIISSQKELHGLVFQDMGFTVYEYSVWDPKKLCMDPDILLNVVEQIPHGCVLVMGNIIDCKLTPSGWAKLMSMIKSKQIFPFFDIPCQGLYTSDLEEDTRILQYFVSQGFEFFCSQSLSKNFGIYDEGVGMLVVVAVNNQQLLCVLSQLEGLAQALWLNPPNTGARVITSILCNPALLGEWKQSLKEVVENIMLTKEKVKEKLQLLGTPGSWGHITEQSGTHGYLGLNCKGLGGWCPPFLTFGLYLSIKLH

SEQ ID NO: 920934 - protein, 590 aa, Homo sapiens
MAPWPHENSSLAPWPDLPTLAPNTANTSGLPGVPWEAALAGALLALAVLATVGGNLLVIVAIAWTPRLQTMTNVFVTSLAAADLVMGLLVVPPAATLALTGHWPLGATGCELWTSVDVLCVTASIETLCALAVDRYLAVTNPLRYGALVTKRCARTAVVLVWVVSAAVSFAPIMSQWWRVGADAEAQRCHSNPRCCAFASNMPYVLLSSSVSFYLPLLVMLFVYARVFVVATRQLRLLRGELGRFPPEESPPAPSRSLAPAPVGTCAPPEGVPACGRRPARLLPLREHRALCTLVPGPAFLALNWLGYANSAFNPLIYCRSPDFRSAFRRLLCRCGRRLPPEPCAAARPALFPSGVPAARSSPAQPRLCQRLDGSKGGRAGRRSSPKDPRCATGKRCGVPRTLASPAPLHWGCQGSRKRQDCPAQPWRKTSGQKRNTGAETHSLGSSFVSVMPTLSVFMDVPLAHKLEGSLLKTYKQDDYPNKIFLAYRAGRISPGPVAKPPQHGCTCHHLHPLQPCSAGRMEAESKRSCREHHANQGKSEGETPAPGNPWVLGSHHRAEWDPRLSWTQLPAGGIPGQEEAHLYPQERSD

SEQ ID NO: 920935 - protein, 155 aa, Homo sapiens
MVFIAIMLHCFPGYKGTYEINKSMNEFIHLNIIYGVSGTGQTPEWSCNADTNRYNQLEVEMPLGEARDSGCIAGAHAHIATKSLGFGFNQEGKQNASCGDPPPQMRVAGRGVVVNNGVYHTVNDDDENNDNICMIRHGCFYTGGIEESNLAGSGC

SEQ ID NO: 920936 - protein, 536 aa, Homo sapiens
MERSQCGSRDRGVSGRPHLAPGLVVAAPPPPSPALPVPSGMQVPPAFLRPPSLFLRAAAAAAAAAAATSGSGGCPPAPGLESGVGAVGCGYPRTPKCARCRNHGVVSALKGHKRFCRWRDCACAKCTLIAERQRVMAAQVALRRQQAQEESEARGLQRLLCSGLSWPPGGRASGGGGRAENPQSTGGPAAGAALGLGALRQASGSATPAFEVFQQDYPEEKQEQKESKCESCQNGQEELISKSHQLYLGSSSRSNGVIGKQSIGSSISEYSNKPDSILSPHPGEQSGGEESPRSLSSSDLESGNESEWVKDLTATKASLPTVSSRPRDPLDILTKIFPNYRRSRLEGILRFCKGDVVQAIEQVLNGKEHKPDNRNLANSEELENTAFQRASSFSLAGIGFGTLAADLVEFAGGPLQTLFAWVSSAEAAEQQRLLPVLSSGSFIPEGHLPDASRSFPSGLSAVGLLEFAGGPLQTLFTWVSAAEAAEQQILVNSKQVLLPDRSSGSFVSEEYPAVNTIYKDKVYRQNGHAANILHSD

SEQ ID NO: 920937 - protein, 155 aa, Homo sapiens
MYMRVPACMRVCLGRWVKIQTFRSINLEIESGVCISFIIRNSVGKQKMIQKTRPSTAAYQSGCNFDSAKIMKAKLNCEMRHSTPFHPIFGKMRGKMAIAPVQTLSDVSRGLSIRLFSTFNHMYCVFTEREAQKQKGRGNCVSSSLANYLHLLRAT

SEQ ID NO: 920938 - protein, 167 aa, Homo sapiens
MSLFAIFGGMEERHAPECDPYDPFVAICHPLYHSAIMNPCFCGFLVLLSFFSQSLLDAQVHNLIALQMTCFKDVEIPNFFWEPSQLPHLACCDTFTNNIIMYSPAAIFGFLPISGTLFSYYKIVSSILRVSSSVMYTVVTPMPNPFIYSLRNRDIKSVLRRPHGSTV

SEQ ID NO: 920939 - protein, 109 aa, Homo sapiens [sequence omitted]

SEQ ID NO: 920940 - protein, 205 aa, Homo sapiens
ETSEWRLLPIGGCLIYTENPLFGVATFICHLNDFMSQLSLVFHVDPKCQFIYLLGNSDNFRHLVACGVCASAAVANPDPARHQEHGPLARCCRAPYSGSQPSSCRRAGAGAQPHPSGCTVPSARIPRFGRLSRRKKGVVQSSGPWGRPGPALRSWEPCQPTGPSAAGTWCRENLAQGRFFRHAQILASRGGARGQLVEVRMRTGT

SEQ ID NO: 920941 - protein, 171 aa, Homo sapiens
LVYSEDRGGFWKFCFPVKKSSGVENWLSNLSMNQKLLRVSENTDYWVPCQSFLFKPGPLSGLHGGSSMIVTLKMLDFLLVKGKDIKAEPPGTGGVVMQALLLPPPLGPCWVRPEAGLVLGLAEGPSFQCEKPFPVATTSSNLRFPENFFAQLSPLWSSVLKPLATKVSPDP

SEQ ID NO: 920942 - protein, 154 aa, Homo sapiens
MIFLDPLRHSGHGIREIGCSPLACYPAVTAGMLQVCCRYPRRRAQVTSPSRCVCEHEDSPHGGLFLCLVLRGGDNEFQWYFCIKRDFARCISGVTDSETGEAEHKETLVFSLKASGWTCTQMAIQVQFMRSWTVLTNDLGKGIGRELSVPMLRL

SEQ ID NO: 920943 - protein, 159 aa, Homo sapiens
MSGRVPLAEKALSEGYARLRYRDTSLLIWQQQQQKLESVPPGTYLSRSRSMWYSQYGNEAILVRDKNKLELCKFIRKRPRSGTAGSKCIPQMSCQRPGRQQPPAQPESLLRESWLVCSLQLGDLKSDFQDCRMELQREPSSRAVILRRAALHASLQSGS

SEQ ID NO: 920944 - protein, 871 aa, Homo sapiens
TKATLSARRRGGGVGKAMGARTGAKWPWGSSRRLDPGARTGAKWPGSGSGKRRRPARGRCPGPTQLPPAPRAPAPRPSRALQPRPGPAQRPRPLFHRRPARRREAQGCDPRRAHPARQAPWEMRGHSQGPAERAQRRSLPHPRPRRPRNRRTRAVPAGGGGATQAEGTLANFAPPEVASRRPGAHPPAARPRPGARPPQPGRLGRRRCDLRVQSARRAARTPPPRGPPARRALTWDICGRKLMSLRSMEPGERLCSSWHRRTPSRSACARSKTTAEGHTTRWLGGRTLQSMSQRPHCRHCSMAPAGPTGSGQCSSQSAAAAGHPARARAGLRAGAGLRAGCPRSPAAPPCVPSSSSSYSSGSSRAAAPAHVRPRGGQRAARRISPLHTRKCLRAPGRAPRSQSPQRSPIRAAGRRILRSGRPAAAAAPAPPETKARRGRSLRASRAWAARVAAALFAPPAVPTPGAATRRLGGSAAPRLRGAGGAGGAATAGRGRGGAGALAWHLPVSQAPPPPPHFLPRYRPRKLRWAGVAAQAQVRPTFSKGARTLGSPSPWGSDLARGVMAGRPPGCLWSSVEVRRWSLSRWAPSHGRSVTTDSGEGTGLGRSLLSPLGPSSRPGGIPEAEAEGTRAQDSQSPLPVLRPGRGPIGRPPTLHKGQDSPAFGQSPGHSQLPSGQFLASRAEMRDMSEGRKVLSGPGPEAGVRCLRAPTLDSGGILGLYELGLHCSPRTPYPVASLRRGRNGDASAERVPWAQGLRWGKKGASVLTVLGLPALAKRTSQVWDPGSRPQQCHGYLLPPGGAVTTGHLAAPRRGCTENLGLTVEKTQLRRHRLHHSGPEPLRPPWFPGPDRHRTFTGPVHLPESLEALRAGWM

SEQ ID NO: 920945 - protein, 160 aa, Homo sapiens
MPEEDNKIDHFILEHRKTNFDGLPRVKDERCWEIIDNIKGTEYTLSGLKFDSKYMNFRVRACNKAVAGEYSDPVTLETKALNFNLDNSSSHLNLKVEDTCVEWDPTGGKGQESKIKGKENKGSSQQDRRRRQVISAFPTGVPGSSHWDWLDSGCSPWRAS

SEQ ID NO: 920946 - protein, 191 aa, Homo sapiens
TYRYRCSLCGGGVQTRRVTCQKLKASGISTPVSNDMCTQVAKRPVDTQACNQQLCVEWAFSSWGQCNGPCIGPHLAVQHRQVFCQTRDGITLPSEQCSALPRPVSTQNCWSEACSVHWRVSLWTLCTATCGNYGFQSRRVECVHARTNKAVPEHLCSWGPRPANWQRCNITPCENICANTELERPGAVFKA

SEQ ID NO: 920947 - protein, 361 aa, Homo sapiens
ELRAFVKMCKQDPSILHTEEMRFLREWVESMGGKVPPATQKAKSEENTEEEKPDSKKVEEDLKADEPSSEESDLEIDKEGVIEPDTDAPQEMGDENAEITEEMMDQANDKKVAAIEALNDGELQKAIELLTDAIKLNPRLAILYAKRASVFVKLQKPNAATQDCDRAIEINPDSAQPHKWRGKAHRLLGHWGEADHDLALACKLDYDEDASAMLKEVQHRAQKIAEHRRKYERKHEEREIKERVERVKKARKEHERAQREEEARRQSGAQYGSFPGGFPGGMPGNFPRGMPGMGGGMSGMAGMPGFNEILSDPEVLAAMQDPEVMVAFQDVAQNPANVSKYQSNPKVMNLISKLSAKFGAT

SEQ ID NO: 920948 - protein, 586 aa, Homo sapiens
MVTAITVVPSRKGSAATGQQSFTICRHPTQDGMKTPQRRADETDDLEGDVSTTWHSNDDDVYRASPIDRSILPTAPRAAREPNIDRSHLPKSPPYTAFLGNLPYDVTEESIKEFFRGLNISAVRLPCEPSNPVRLKGFGYAEFEDLDSLLSALSLKEESLGNRRIRVDVADQAQDKDRDDCSFGRDRNRDSDKTGTDWRARPATDSFDDYPPRRGDDSFGDKYRDRYDSDRYRDGYRDGYRDGQRRDMDPYGGRDRYDDRGSRDYDRGYDSRIGSGRRAFGSGYRRDDVSEEAGTTMKTDMTDGMIGLGAPEMITLWMIIGVMSTRAASIFGGAKPVDTAAREREVEERLQKEQEKLQHQLDEPKLERRPPERHPSWRSEETQERERSRTGSESSQTGTSTTSGRSKSAQDARRRENEKSLENETLNKEEDCHSPTSKPPKPDQPLKVMPAPPPKENAWVKRSSNPPARSQSSDTEQQSPTSGEGKVAPAQPSEEGPARKDENKVDGMNVPKGQTGNSSRGPGDGGNKDHWKESDRKDGKKDQDSRSAPEPKKPEENPASKFSSASKYAALSVDGEDENEGEDYAE

SEQ ID NO: 920949 - protein, 140 aa, Homo sapiens
MEVSGYWYFFPQGGSEVAGLWETVQEWVGDNARSQHSPEAPSVCLLVAESSGKWRGLREKNEKAESGLSRSALRPKTLSTGKPRTGVGAERAHEAQRLGVSQRPPPGVVFKCEGTQGFLNVRVCVCVCARVCVCVLALNK

SEQ ID NO: 920950 - protein, 113 aa, Homo sapiens
MGIFQLLRDRRISSRGPGLHTPKAEPRRRKGLTTGLMTQAERQKQAHQRQATMRETALWCTGHIRPRTHTHTGTHTQTDRERERNTQRLRDRERRENGRHTHTYTHRHTHRVL

SEQ ID NO: 920951 - protein, 113 aa, Homo sapiens; identical to SEQ ID NO: 920950

SEQ ID NO: 920952 - protein, 197 aa, Homo sapiens
MSTLQPRTRAPEELFVPQESSGSTPEKMLVSFHGSSLRNEATPRYSQQEEAGNGRWQQSLSLERWPPWTSHPLGTPPLMPVAVARCCILPGLWPLLSPPSGSASPVSQGPGCLSLWPNAFKKDDFPVRQGDKHHTHSTPKQSSEGHHIVPGAPENSGTQRAPGAIDGPRTPASWPNGENGRSPKGADKRIGRYRKTR

SEQ ID NO: 920953 - protein, 120 aa, Homo sapiens
ETSPRGLAKQEPSVAVLGCRGSEDPASPLHGVDGNVSGCQESQRADHDEETPGGDGGSSTGSQPQACPDGVGWDRIVVWLHFSEKSREKIQASSLTWVRWSPAGQRAPVGLVSSSAVCSS

SEQ ID NO: 920954 - protein, 150 aa, Homo sapiens
GRRRRTARWLAGRPMAANATSGRPPSIALRQPEATGWRRGIPAKVATKGTQAEREGDVRSGGRARGRCVRLAKRCSPSSLGLRRRRRRTGGRQGDPQIFLGSDFRLLTPANSNPVLENPARTGSRIVIGISRERNLPFCGRSNLPDVSSL

SEQ ID NO: 920955 - protein, 150 aa, Homo sapiens; identical to SEQ ID NO: 920954

SEQ ID NO: 920956 - protein, 150 aa, Homo sapiens; identical to SEQ ID NO: 920954

SEQ ID NO: 920957 - protein, 150 aa, Homo sapiens; identical to SEQ ID NO: 920954

SEQ ID NO: 920958 - protein, 150 aa, Homo sapiens; identical to SEQ ID NO: 920954

SEQ ID NO: 920959 - protein, 209 aa, Homo sapiens
MPRGSRSRTSRMAPPASRAPQMRAAPRPAPVAQPPAAAPPSAVGSSAAAPRQPGLMAQMATTAAGVAVGSAVGHTQGHAVTGGFSGGSNAEPARPDIAYQEPQGTQPAQQQQPCFYGIKQFLECAQNQGDIKLCEDFSKVLKHQPDSMHASPATQQFHFQKHNLQEFPHMSVRRLSKDVHCSPVYNRKEWKQLSSVRNRIIELEINSFL

SEQ ID NO: 920960 - protein, 508 aa, Homo sapiens
MGVAAAERSGLTRMAAATRGCRPWGSLLGLLGLVSAAAAAWDLASLRCTLGAFCECDFRPDLPGLECDLAQHLAGQHLAKALVVKALKAFVRDPAPTKPLVLSLHGWTGTGKSYVSSLLAHYLFQGGLRSPRVHHFSPVLHFPHPSHIERYKKDLKSWVQGNLTACGRSLFLFDEMDKMPPGLMEVLRPFLGSSWVVYGTNYRKAIFIFISNTGGEQINQVALEAWRSRRDREEILLQELEPVISRAVLDNPHHGFSNSGIMEERLLDAVVPFLPLQRHHVRHCVLNELAQLGLEPRDEVVQAVLDSTTFFPEDEQLFSSNGCKTSEDCVFNSDESENVTAVAEVLLYSWQIADISVSEVPVVLTRKGVPKAPIRPAAPALDSSGKRGFPISHWPVAQRLRITKGKDLQITPAQPPATQTLRGGAARALCTGAKSPLAMHKVCGLISGTGLGGDESRAAATMKCLEQASPRPGQPRNSVTPALEPLAPGHPAVSSGAERTPRPAVFDP

SEQ ID NO: 920961 - protein, 334 aa, Homo sapiens
MGVAAAERSGLTRMAAATRGCRPWGSLLGLLGLVSAAAAAWDLASLRCTLGAFCECDFRPDLPGLECDLAQHLAGQHLAKALVVKALKAFVRDPAPTKPLVLSLHGWTGTGKSYVSSLLAHYLFQGGLRSPRVHHFSPVLHFPHPSHIERYKKDLKSWVQGNLTACGRSLFLFDEMDKMPPGLMEVLRPFLGSSWVVYGTNYRKAIFIFISNTGGEQINQVALEAWRSRRDREEILLQELEPVISRAVLDNPHHGFSNSGIMEERLLDAVVPFLPLQRHHVRHCVLNELAQLGLEPRDEVVQAVLDSTTFFPEDEQLFSSNGCKTVASRIAFFL

SEQ ID NO: 920962 - protein, 286 aa, Homo sapiens
AARRPGLDGSRVPPGGHLLVLLRNDGRALEAGRGASGVVGDGRGCCGALGPQPGWRLRRAAAGPGARSSGCSGWSRPRPPPGTWLPCAAPWAPFANATSGPTCRKDLKSWVQGNLTACGRSLFLFDEMDKMPPGLMEVLRPFLGSSWVVYGTNYRKAIFIFISNTGGEQINQVALEAWRSRRDREEILLQELEPVISRAVLDNPHHGFSNSGIMEERLLDAVVPFLPLQRHHVRHCVLNELAQLGLEPRDEVVQAVLDSTTFFPEDEQLFSSNGCKTVASRIAFFL

SEQ ID NO: 920963 - protein, 207 aa, Homo sapiens
AARRPGLDGSRVPPGGHLLVLLRNDGRALEAGRGASGVVGDGRGCCGALGPQPGWRLRRAAAGPGARSSGCSGWSRPRPPPGTWLPCAAPWAPFANATSGPTCRKDLKSWVQGNLTACGRSLFLFDEMDKMPPGLMEVLRPFLGSSWVVYGTNYRKAIFIFIRWLLKLGHHGRAPPRRSGALPPAPAAPRPALRAQRAGPAGPGAKG

SEQ ID NO: 920964 - protein, 334 aa, Homo sapiens; identical to SEQ ID NO: 920961

SEQ ID NO: 920965 - protein, 206 aa, Homo sapiens
AARRPGLDGSRVPPGGHLLVLLRNDGRALEAGRGASGVVGDGRGCCGALGPQPGWRLRRAAAGPGARSSGCSGWSRPRPPPGTWLPCAAPWAPFANATSGPTCRKDLKSWVQGNLTACGRSLFLFDEMDKMPPGLMEVLRPFLGSSWVVYGTNYRKAIFIFISNTGGEQINQVALEAWRSRRDREEILLQELEPVISRAVLDNPHP

SEQ ID NO: 920966 - protein, 308 aa, Homo sapiens
MGVAAAERSGLTRMAAATRGCRPWGSLLGLLGLVSAAAAAWDLASLRCTLGAFCECDFRPDLPGLECDLAQHLAGQHLAKALVVKALKAFVRDPAPTKPLVLSLHGWTGTGKSYVSSLLAHYLFQGGLRSPRVHHFSPVLHFPHPSHIERYKKDLKSWVQGNLTACGRSLFLFDEMDKMPPGLMEVLRPFLGSSWVVYGTNYRKAIFIFISNTGGEQINQVALEAWRSRRDREEILLQELEPVISRAVLDNPHHMVLNWHHGKALERVPSPSGTVAWCQECQWLEHGEVSVVEHFLKRSFSGEKGRRF

SEQ ID NO: 920967 - protein, 118 aa, Homo sapiens
MGVAAAERSGLTRMAAATRGCRPWGSLLGLLGLVSAAAAAWDLASLRCTLGAFCECDFRPDLPGEAPGSPERGAGGRGQTRERWEPWEPGWRRPEKLRTQRVGPRGGARRLGRVEGTR

SEQ ID NO: 920968 - protein, 266 aa, Homo sapiens
MGVAAAERSGLTRMAAATRGCRPWGSLLGLLGLVSAAAAAWDLASLRCTLGAFCECDFRPDLPGLECDLAQHLAGQHLAKALVVKALKAFVRDPAPTKPLVLSLHGWTGTGKSYVSSLLAHYLFQGGLRSPRVHHFSPVLHFPHPSHIERYKKDLKSWVQGNLTACGRSLFLFDEMDKMPPGLMEVLRPFLGSSWVVYGTNYRKAIFIFIRWGPALQWAQWGGHFSEVQLYSLSLCSQQNPVPHGLSWAFPVPSATLRDDIVIPPG

SEQ ID NO: 920969 - protein, 206 aa, Homo sapiens; identical to SEQ ID NO: 920965

SEQ ID NO: 920970 - protein, 116 aa, Homo sapiens
  misc_feature (2)..(3): Xaa can be any naturally occurring amino acid
  misc_feature (28)..(28): Xaa can be any naturally occurring amino acid
KXXAKTGGGPPGEDPPFKELGTRVISPXGFLDNPHHGFSNSGIMEERLLDAVVPFLPLQRHHVRHCVLNELAQLGLEPRDEVVQAVLDSTTFFPEDEQLFSSNGCKTVASRIAFFL

SEQ ID NO: 920971 - protein, 334 aa, Homo sapiens; identical to SEQ ID NO: 920961

SEQ ID NO: 920972 - protein, 156 aa, Homo sapiens
MTGLQRHLECCILGGWGEVRNRMLFLTWQKRERGKRGPNLPFYNSTNPTHEGDALCGNEESSPKSISNSGMSGSNPFWGLSSFLELFETRTEGATVTHAENLGPLGYDMTLHIWVISSVVLRKILSLTKLYSDSSELFYKLILARILLSQKPVWKL

SEQ ID NO: 920973 - protein, 228 aa, Homo sapiens
MGQGTIHQSRPGRWARLPAAGTDRVSPYRISVGRGLSAALAAEGEAPILCCYYCCCFHLILIVLCFLNKKYTYMVQNSKGTKSYTVTNSDRSPHGNLWIYGISMDMPPHGNCPFPFIAYITLNYSCLFMYVSSAPATLGVVVDAVRSFLPYSTSCPNLLMAKQNMVAKSQSPGIPPIAHSQLRFDVPASGTAQASEHSIPSACKLFPPALSAWGIAVPLSKPTQFHPK

SEQ ID NO: 920974 - protein, 172 aa, Homo sapiens
EDSKDCLWVGRSEKQMMGSGSGLITAIFAKQDLDSCHLKKCGKDWPSGSLPRDARGLTEEYPARSALSLWPASSPRGRQVPRMLEDARRPPIPGYRPEPPVPYLTQQQAAAAPLYGTHSNRRKSRRQVLSGGGWLGSCWDVPTVQPQPRLSCDSCRILTARSSLSPGDSSLL

SEQ ID NO: 920975 - protein, 172 aa, Homo sapiens; identical to SEQ ID NO: 920974

SEQ ID NO: 920976 - protein, 120 aa, Homo sapiens
RDMTLSLSKPVSAGLGRSDKPGTLGFHACLRQGSFFGLLVSPHRPGYRREGGGQRRGDGHPQSFHPPHSSRGTRIPYSLFPLSLRHWQGPLPTPVGRCGSKASWADVPDTGLTRQLKRHP

SEQ ID NO: 920977 - protein, 140 aa, Homo sapiens
MSRWKMQVEASSLSPLVCLVETCNKCGCRLGFRAVSLPYLCWDSILAQPDFAAKSFNYKEPTGNSFSMADLHQPHKSLSVGLEQGHLETRPWEARAELEKDLPGEAHLNLSYGNPLPLSLSMFPSCLCPQPVVWKLSAST

SEQ ID NO: 920978 - protein, 152 aa, Homo sapiens
MGVKRRMGRQGTNAGGDFKLKPTLIYYFQSPRAVKNSAKSTLPVLCKWNNDTWTAAYLVYTMVQGVHVQVYYMGKLHVTGVWCTDNFVTQVVKILIFSEVWKKLVPTLTNDFERFNTSVEEVTAHVVETARELELEVVPQDVTELPQSHDQT

SEQ ID NO: 920979 - protein, 284 aa, Homo sapiens
MLLNFTLILKRERKKKRKQKALKRMYVQRALSSPTTTAGLATITPREEPQLPQPAPVTITTTLSSEAETQQPPAACRSPPPALSAGDTTPGTTGSGTGNGGPGGFTSAAPAGGDKKVIATKVLGTVKWFNLRNGYAFINRNDIKEDTFVPQTAKTKNNPRRCYPRRRGPPPNYQQNYQNSESGGKNEGWERAPQGQAQPRRPYSRDIDHDSAGALLAKDSLERTAMKRIKKINEVRPKVSSHLNVGTAATYRRRHTENPKPARKENPKPQGGKETKAADPPADN

SEQ ID NO: 920980 - protein, 182 aa, Homo sapiens
AAAFGVEGGEQQDIMLCTKAHAQLVVVTALTLASLDSYMPGYGEPVLHVMSATGLAMFPPSMVCYIGIRVSWRFAAPIDASSKFLPLIPQPSTGPGVCCSPRCVHELVLNVQLPLMTTGLGKFRLLFLSVIYGRRVGPGLVHLPAEFKVSEAQRNTMTWIKQPKWEEGHFCCIKEAVKLLLS

SEQ ID NO: 920981 - protein, 228 aa, Homo sapiens
MEDSPLPDLRDIELKLGRKVPESLVRSLRGEEPVPRERDRDPCGGSGGGGGGGGGCSSSSSYCSFPPSLSSSSSSSPTSGSPRGSHSSALERLETKLHLLRQEMVNLRATDVRLMRQLLVINESIESIKWMIEEKATITSRGSSLSGSLCSLLESQSTSLRGSYNSLHDGSDGLDGISVGSYLDTLADDVPGHQTPSDLDQFSDSSLIEDSQALHKRPKLDSEYYCFG

SEQ ID NO: 920982 - protein, 114 aa, Homo sapiens
MRQLLVINESIESIKWMIEEKATITSRGSSLSGSLCSLLESQSTSLRGSYNSLHDGSDGLDGISVGSYLDTLADDVPGHQTPSDLDQFSDSSLIEDSQALHKRPKLDSEYYCFG

SEQ ID NO: 920983 - protein, 228 aa, Homo sapiens; identical to SEQ ID NO: 920981

SEQ ID NO: 920984 - protein, 228 aa, Homo sapiens; identical to SEQ ID NO: 920981

SEQ ID NO: 920985 - protein, 160 aa, Homo sapiens
MVLAGPVSSGASLLGLTTHLPAKLHPRRVQKTLYQGSEKYNCKGSHSILKGILSEALLCTPVMTVRTVATELKLPESNWMLGCRVVRAIGNLTYVQTLKGIFRSKRSGSLKSVLARIRLQMPKQEMSAMSCRSLPNRASSGSERRAEEGILKSSCTLPTT

SEQ ID NO: 920986 - protein, 139 aa, Homo sapiens
MGSQKVKMPEKALGVTGDSQMKVQFWCRVPEEGALWTGSVAHAPGACLAPVQGSRCDKHKEERARHHSRRAQHQRDRGKIQNLCGSHLIRYTRAPGALTGQRFLGGVFTLLTGGLECHSLTSGIYTHKLLWLLVSLIAD

SEQ ID NO: 920987 - protein, 138 aa, Homo sapiens
MNALRGGGKYRKKTGTLKDMGSFSDLREQKKELNGDLSYNKPGTEQTTAAAVAGKQNLCWRAGSRQRLQSSAGNHNREASNRRSRRSPGTSTVDSEQVRFELHGSTHMKISFNESYPECACLSCLPFHLLHLYHPCHP

SEQ ID NO: 920988 - protein, 158 aa, Homo sapiens
MRNFVQLAAWAAVATFSLLLVLAGFASSSMSYPSYVRYCVSKIEEPLPPNNEFHPAEATAKAQRHEVSCRLCIVFPSSKPQGMEPPPFGVWLVTAARVRRAAESHSGYKSSHPTVTQVTSTHHPSTVEDMPDFKEGGAGRRGTEMGGDQPCCVSRKSE

SEQ ID NO: 920989 - protein, 672 aa, Homo sapiens
MATDFAPNFQKKFHETVIAALLRTMENQGNQRVQSHAASALIIFIEDCPKSLLVLYVDSMVKNLHSVLVIKLQELIRNGTKLALEQLVTTIASVADTIEEKFVPYYDIFMPSLKHIVELAVQKELKLLRGKTIECISHIGLAVGKEKFMQDASNVMQLLLKTQSDLNNMEDDDPQTSYMVSAWARMCKILGKDFQQYLPLVIEPLIKTASAKPDVALLDTQDVENMSDDDGWQFVNLGDQQSFGIKTSGLEAKATACQMLVYYAKELREGFVEYTEQVVKLMVPLLKFYFHDNVRVAAAESMPFLLECARIRGPEYLAQMWQFICDPLIKAIGTEPDTDVLSEIMNSFAKSIEVMGDGCLNDEHLEELGGILKAKLEGHFKNQELRQVKRQEENYDQQVEMSLQDEDECDVYILTKVSDILHSLFSTYKEKILPWFEQLLPLIVNLICSSRPWPDRQWGLCIFDDIIEHCSPTSFKYVEYFRWPMLLNMRDNNPEVRQAAAYGLGVMAQFGGDDYRSLCSEAVPLLVKVIKCANSKTKKNVIATENCISAIGKILKFKPNCVNVDEVLPHWLSWLPLHEDKEEAIQTLSFLCDLIESNHPVVIGPNNSNLPKIISIIAEGKINETINYEDPCAKRLANVVRQVQTSEDLWLECVSQLDDEQQEALQELLNFA

SEQ ID NO: 920990 - protein, 672 aa, Homo sapiens; identical to SEQ ID NO: 920989

SEQ ID NO: 920991 - protein, 196 aa, Homo sapiens
MAATASAGVPATVSEKQEFYQLLKNLINPSCMVRRQAEEIYENIPGLCKTTFLLDAVRNRRAGYEVRQMAAALLRRLLSSGFEEVYPNLPADVQRDVKIELILAVKLETHASMRKKLCDIFAVLARNLIDEDGTNHWPEGLKFLIDSIYSKNVVLWEVALHVFWHFPGIFGTQERHDLDIIKRLLDQCIQDQEHPA

SEQ ID NO: 920992 - protein, 162 aa, Homo sapiens
MKTSECTGDESCWDWALPFKTVGSLLAQHVSRNVQELEPGMEASGLCLVPYHIMAELASKLQDKVLFTLPSSLLKQSKGISPRAASCTAWSILFASPAGVSLHHVPPSPLALNPAQYQDLPRNYSPYGLDCLASLFRTQRTLVHRGHKRSFQVIYVALELAI

SEQ ID NO: 920993 - protein, 614 aa, Homo sapiens
KSPGGSDMRLASEVEIQSLKILLFPKRRTQKRIKWSLFVPILSPVAVRQGTVAATRSRKRQGTDYPPEPLKGAQPCQHLDLRLLASRTVREQIPILSHQGYGNLLQLPEEDESALDKIIERCLRDDDHGLMEESQQYCGSSEEDHGNQGNSKGRVAQNKTLGSGSRGKKFDPDKSPFGHNFKETSDLIKHLRVYLRKKSRRYNESKKPFSFHSDLVLNRKEKTAGEKSRKSNDGGKVLSHSSALTEHQKRQKIHLGDRSQKCSKCGIIFIRRSTLSRRKTPMCEKCRKDSCQEAALNKDEGNESGEKTHKCSKCGKAFGYSASLTKHRRIHTGEKPYMCNECGKAFSDSSSLTPHHRTHSGEKPFKCDDCGKGFTLSAHLIKHQRIHTGEKPYKCKDCGRPFSDSSSLIQHQRIHTGEKPYTCSNCGKSFSHSSSLSKHQRIHTGEKPYKCGECGKAFRQNSCLTRHQRIHTGEKPYLCNDCGMTFSHFTSVIYHQRLHSGEKPYKCNQCEKAFPTHSLLSRHQRIHTGVKPYKCKECGKSFSQSSSLNEHHRIHTGEKPYECNYCGATFSRSSILVEHLKIHTGRREYECNECEKTFKSNSGLIRHRGFHSAE

SEQ ID NO: 920994 - protein, 470 aa, Homo sapiens
KSPGGSDMRLASEVEIQSLKILLFPKRRTQKRIKWSLFVPILSPVAVRQGTVAATRSRKRQGTDYPPEPLKGAQPCQHLDLRLLASRTVREQIPILSHQGYGNLLQLPEEDESALDKIIERCLRDDDHGLMEESQQYCGSSEEDHGNQGNSKGRVAQNKTLGSGSRGKKFDPDKSPFGHNFKETSDLIKHLRVYLRKKSRRYNESKKPFSFHSDLVLNRKEKTAGEKSRKSNDGGKVLSHSSALTEHQKRQKIHLGDRSQKCSKCGIIFIRRSTLSRRKTPMCEKCRKDSCQEAALNKDEGNESGEKTHKCSKCGKAFGYSASLTKHRRIHTGEKPYMCNECGKAFSDSSSLTPHHRTHSGEKPFKCDDCGKGFTLSAHLIKHQRIHTGEKPYKCKDCGRPFSDSSSLIQHQRIHTGEKPYTCSNCGKSFSHSSSLSKHQRIHTGEKPYKCGECGKGFTLGPHLIKHQRF

SEQ ID NO: 920995 - protein, 738 aa, Homo sapiens
MEDCLHTSSENLSKLVSWAHSHGTICSLIPNLKHLLSEGSHGNLTAMWGCSAGHAYHWPLTATCRAGSQERVCFQDNRSFNSDSPSIIGVPSETQTSPVERYPGRPVKAKLDCNRTRDSCDFSYCSEPSELDETVEEYEDENTLFDMVCESSVTDEDSDFEPQTQRPQSIARKRPGVVPSSLHSSSQTQMVDECSNDVIIKKIKQEIPEDYYIVANAELTGGVDGPALSLTQMAKPKPQTHAGPSCVGSAKLIPHVTSAISTELDPHGMSASPSVISRPIVQKTARVSLASPNRGPPGTHGTNQQVAMQMPVSTSHPNKQISIPLSALQLPGQDEQVASEEFLSHLPSQVSSCEVALSPSVNTEPEVSSSQQQPPVAPAITTEATAQCIPDQDERAAELSREQNEKTIRSTQTALRNFREFLISKYPSETREIYVIPCKELDAYLASFFVDARQKDGSEYEPNSLANYQCGLERYLKEHRYGYSITRDKEFKRSQEALKQKQIELRCKGKGNKPHKSMKLTFADELILRKRGLLSRYNPEGLLNLVWLNNTKAFGHCTGFHGSTLKWGDIRLRVTETGLEYLEWMGQDTGDLNAKTKRGGTDSRVYATQHAPQTCPVQDYKEYAQRRPPAMRYEDAPFYLSIKPVVNLAALHWYNCQALGKNKLAKMVKTMCEKGNIPGRKTNFSVYQSCSTLSEAQSNQLVLICNNLSQQAAQSVAGHSNNGNFIVSASYDSSSDTA

SEQ ID NO: 920996 - protein, 145 aa, Homo sapiens
MRPRLMDLESMWERWKRIIWHPHDEALHPKWLKHQEGSRRHLRHYQDQPLRSSPVIIPQSDDQILNGIKAGNPQPAAGNLLGSPSTLWKLCPCSLHSKPCYHSLFGSVPSLRAVTLTAKVHSFILEVSETMNPPAGTDSGHNGGS

SEQ ID NO: 920997 - protein, 507 aa, Homo sapiens
MSESTGWLVEAQTAGSVSAINYVYRFAYVEPALHLRDEANLIMVQEKVKLTKLNDESKVVQRGGGRSRLQARSPTPLVVVNVYDSPAVFKAPIRPDIVNFVHTNLRKNNRQPYAASELAGHRTSTESWGTGRAVARIPRVRGGGTHRSGQGAFGNMCRGGRRFAPTKTWRRWHRRVNTTQKRYAICSALAASALPALVMSKGHRIEEVPELPLVVEDKVEGYRKTKEAVLLLKKLKARNDIKKVYASQRMRAGKGKMRNRRRIQRRGPCIIYNEDNGIKAFRNIPAITLLNVSKLTISKLAPGGHVGRFCIWTGSAFRKLDELYGTWRKAASLKSNYNLPMHKMINTDLSRILKSPEIQRALRAPSKKIHRRVLKKNPLKNLRIMLKLNPYAKTMRRNTILRQARNHKLRMDKAAAAAAALEAKPDEKAAVAGKKPVVGKKGKKAAVGVKKQKKPLVGKKAAATKKSAPEKKPAEKKPTVEEKKPAALTLKFDYSIKVKSLWTASFE

SEQ ID NO: 920998 - protein, 377 aa, Homo sapiens
MSESTGWLVEAQTAGSVSAINYVYRFAYVEPALHLRDEANLIMVQEKVKLTKLNDESKVVQRGGGRSRLQARSPTPLVVVNVYDSPAVFKAPIRPDIVNFVHTNLRKNNRQPYAASELAGHRTSTESWGTGRAVARIPRVRGGGTHRSGQGAFGNMCRGGRRFAPTKTWRRWHRRVNTTQKRYAICSALAASALPALVMSKGHRIEEVPELPLVVEDKVEGYRKTKEAVLLLKKLKARNDIKKVYASQRMRAGKGKMRNRRRIQRRGPCIIYNEDNGIKAFRNIPAITLLNVSKLTISKLAPGGHVGRFCIWTGSAFRKLDELYGTWRKAASLKSNYNLPMHKMINTDLSRILKSPEIQRALRAPRASRCATQCAPQ

SEQ ID NO: 920999 - protein, 129 aa, Homo sapiens
LLSHQGWSAMTAYIEQSTYYMILFMSPEQAKRTDGDGGQNSSQQDSLCSNITLTEAPAPYGTFLIKAIARKDAVLPQIVNVTYKCRNARVWKWKGQDRSLSGLEHLRSSGKNLSGKQRLQQDPLAKERG

SEQ ID NO: 921000 - protein, 147 aa, Homo sapiens
MTASRTLSERDSTPNLTLFEENVWKLCEYIKNHDQYPLEECYAVFISNERKMTAPLVSHSFCGITALPRMFTNPEHRRLSSPVVLHEVQEPCGKEAKWSVFSFRVHTCIGLSRGLEVLKDVFARGEKNMNRSLRENQYKHFYNSNLG

SEQ ID NO: 921001 - protein, 270 aa, Homo sapiens
MQAQDGLQVSPAQDGHQVTLAQDGLQVTQTQDELHVTQAQDWLQLHIDALCDEGLTDDLEGADWASAIRVAALDCMEEKNQAVCHDYDIHFYPTFRYFKAFTKEFTTGENFKGPDRELRTVRQTMIDFLQNHTEGSRPPACPRLDPIQPSDVLSLLDNRGSHYVAIVFESNSSYLGREVILDLIPYESIVVTRALDGDKAFLEKLGVSSVPSCYLIYPNGTAEPWQALCLCVGCPCAPHEDKPFAPAWGACVPLMRISPLPLRGVPVCPS

SEQ ID NO: 921002 - protein, 455 aa, Homo sapiens
MQAQDGLQVSPAQDGHQVTLAQDGLQVTQTQDELHVTQAQDWLQLHIDALCDEGLTDDLEGADWASAIRVAALDCMEEKNQAVCHDYDIHFYPTFRYFKAFTKEFTTGENFKGPDRELRTVRQTMIDFLQNHTEGSRPPACPRLDPIHVKPLRAFFSSYLKSLPDVRKKSLPLPEKPHKEENSEIVVWREFDKSKLYTVDLESGLHYLLRVELAAHKSLAGAELKTLKDFVTVLAKLFPGRPPVKKLLEMLQEWLASLPLDRIPYNAVLDLVNNKMRISGIFLTNHIKWVGCQGSRSELRGYPCSLWKLFHTLTVEASTHPDALVGTGFEDDPQAVLQTMRRYVHTFFGCKECGEHFEEMAKESMDSVKTPDQAILWLWKKHNMVNGRLAGHLSEDPRFPKLQWPTPDLCPACHEEIKGLASWDEGHVLTFLKQHYGRDNLLDTYSADQGDSSEG

SEQ ID NO: 921003 - protein, 433 aa, Homo sapiens
MQAQDGLQVSPAQDGHQVTLAQDGLQVTQTQDELHVTQAQDWLQLHIDALCDEGLTDDLEGADWASAIRVAALDCMEEKNQAVCHDYDIHFYPTFRYFKAFTKEFTTGENFKGPDRELRTVRQTMIDFLQNHTEGSRPPACPRLDPIHVKPLRAFFSSYLKSLPDVRKKSLPLPEKPHKEENSEIVVWREFDKSKLYTVDLESGLHYLLRVELAAHKSLAGAELKTLKDFVTVLAKLFPGRPPVKKLLEMLQEWLASLPLDRIPYNAVLDLVNNKMRISGIFLTNHIKWVGCQGSRSELRGYPCSLWKLFHTLTVEASTHPDALVGTGFEDDPQAVLQTMRRYVHTFFGCKECGEHFEEMAKESMDSVKTPDQAILWLWKKHNMVNGRLAGEKPLGMGGSARAEGGPGPGTARTARLPWGLSLSFAASCHPLC

SEQ ID NO: 921004 - protein, 178 aa, Homo sapiens
MQAVVPLNKMTAISPEPQTLASTEQNEVPRVVTSGEQEAILRGNAADAESFRQRFRWFCYSEVAGPRKALSQLWELCNQWLRPDIHTKEQILELLVFEQFLTILPGEIRIWVKSQHPESSEEVVTLIEDLTQMLEEKGEIYRWREEAGDIASKSESKFLKRRQFTAKEESEVRSWDWV

SEQ ID NO: 921005 - protein, 265 aa, Homo sapiens
MSRETLGSSAGRMMQGHTERLLCVTCWVRNRRIRASMLRLPGPGREKLTQPSAWKTWASQARGSAHVGQPVTPGFSSHLPEENALRPPCRLWAGALPPPPKDPASPDFTLLQLPSSPPAPLGPAAPSHPTCSNAPSTQRECVTIHASWCHCPAGSRRRLALFSGCAVLCQPHRSCPQVLASAPWVLYSMFTVPTPTVRHGFRVPCAQNSSPRGSAHPQDLSHSHFPRVGLLTLESVRCSGTRSLGSRVVMPVSWWAARVNPNVTP

SEQ ID NO: 921006 - protein, 478 aa, Homo sapiens
LVQVRRFKDLQPGLSGSVGTAARDDSLGSESGLWLRLSACVSSPVGWGIPWHPHDEQDAMGLSPGQTSVSFLWPLLEVRDHNTGRGLVPATVLTPGSPETLLELRQAFLGSRQARHGHDAAPSSGQQGCSVDRTAGRPVLGWRLRNSLTGQEGRQHLHLSGIRTSRKAKEYKPVFFGATEISVLMAVAESLREPPPPQWGWFLSSLFLKIFLKCLEETLGSSAGRMMQGHTERLLCVTCWVRNRRIRASMLRLPGPGREKLTQPSAWKTWASQARGSAHVGQPVTPGFSSHLPEENALRPPCRLWAGALPPPPKDPASPDFTLLQLPSSPPAPLGPAAPSHPTCSNAPSTQRECVTIHASWCHCPAGSRRRLALFSGCAVLCQPHRSCPQVLASAPWVLYSMFTVPTPTVRHGFRVPCAQNSSPRGSAHPQDLSHSHFPRVGLLTLESVRCSGTRSLGSRVVMPVSWWAARVNPNVTP

SEQ ID NO: 921007 - protein, 143 aa, Homo sapiens
MTAGEDARATGRSGHVETEAEAGVKWPKARARLGHQKPDEYRKQPRNMDLSPERFLDVGDPPSVLGGCCCQASETILEFSSVRALPGWAMVYSGCHLDTALSPGHDAVPKAQRRQRPHPTLELQRRFAHFTLPEAQEPGAKTR

SEQ ID NO: 921008 - protein, 123 aa, Homo sapiens
MEPPKQKLSMLIRRKLAGLSLKEESEKPLIERGSRKWPGIKPTEVTIQNKILLQPTSSISTTKTTLGHLAAVEARDAVYLKYLASFEEELKRIQDDCTSQIKEAQRWKDSWKQSLHTIQGLYV

SEQ ID NO: 921009 - protein, 2352 aa, Homo sapiens
ALAEATVASRDGGGCNRTCSIPEELTKALEQKPDDAQYYRQRAYCHILLGNYCGADANFSDWIKRCRSSEWYVISHVCGEYETLVFYWPSLLCLAFLLGRFLHMFVKALRVHLGWELQVEEKSVLEVHQGEHVKQLLRIPRPQEKKKSWFQTRIYEWDPCFQFPSRMIGTIVLAFICLYLFIVIEFCVFVYVRDELDVLENNLESYITFTNHSGVLTPVILQVKELISVTKGVWVATILPAYLTCVSYLFHILVCYRKHMKRLWAGDKHFLPLKFHNPASSESMVAIARYSGWQIAYILWGYLIIHMVQSLCGMAIMYSLVLPIVQTRAWKCCKGWALGCKCWAGILSLTCSESWVPPTAMWTHGLGPDPEMGHDSNSWWGETAFTKGCLSHHSTMPSQPCMGWGIHMSIFQLGKLRFRKVKGEARQYDGRKQGILAKLLDLLCDLGLSFLLCTMGVGMPCKCKDMELTLPLSCRVVNLSPLSHWASEKDLAEGKRLPQDGPTLCFSLTISIVVGLMILQMCIAASFFLQPKLGTADKQKPLALNNRKAFHNFNYFLFFYNVLLGLGACLSRLLISCLLGMWLIARIDRTIMQSGYEGADMGFSAWIGMLYMDHYHINPVLVSFCHILITNHREKKLQQSTKYWCLNQSAESLRICAMRGGENRPPARVQSSSESTFPSRLPPSRESFPGESCPGVPPRGQTSSRLDLNLSLGRAISQPQELELRHQSLDAFPGRRLPGRGIQPAAKMSSVGKVTQVPNGKAYQQIFQAEVQLVHSLAATRKRAAERSVTLKSGRIPMMKKVETPEGEVMSPRQQKWMHSLPNDWIMENPVLHREKERAKREKARESENTIAARERVTSPHPNPPPVNPRGIRLSTWIKGTAEHMAGAQTWKQVAQIPAQLLANLVLQPPMTEFPHMQAEHKRKSYESALASFQEEIAQVGKEMEPLIVDTGGLFLKKLTESDEEMNRLFLKVENDTNLEDYTIQALLELWDKVAGRLLLRKQEIKELDEALHSLEFSRTDKLKSVLKKYAEVIEKTSYLMRPEVYRLINEEAMVMNYALLGNRKALAQLFVNLMESTLQQELDSRHRWQGLVDTWKALKKEALLQSFSEFMASESIHTPPAVTKELEVMLKTQNVLQQRRLKHLCTICDLLPPSYSKTQLTEWHSSLNSLNKELDTYHVDCMMRIRLLYEKTWQECLMHVQNCKKQLLDWKAFTEEEAETLVNQFFFQMVGALQGKVEEDLELLDEVVQLWEAHQSELLVQELELEKRMEQHRQKHSLESQVQEAHLDRLLDQLRQQSDKETLAFHLEKVKDYLKNMKSRYECFHTLLTKEVMEYPAIMLKELNSYSSALSQYFFVREIFEQLKKLRKKQGSKEDMTRSEESISSGTSTARSVEEVEEENDQEMESFITEEVLGQQKKSPLHAKMDESKEGSIQGLEEMQVEREGSLNPSLNEENVKGQGEKKEESEEEDEKEEEEEEEKLEEEKEEKEAQEEQESLSVGEEEDKEEGLEEIYYEDMESFTISSGNTYFVFVPLEEEHCRKSHSTFSAMFINDTSSAKLRAGFFEHLEKWFDQCSLNTRVTVATKINELDSELELHLHLHQPRAQQIEKDIHNVRAAELLLHQEQLDSHCAGVTETLKKKRLMFCQFQEEQNVRSKNFRLKIYDMEHIFLNATRSQKLVTLSNTLHQELLSYVDVTQVSLRSFRQYLEESLGKLRYSNIEFIKHCRLFSEGGNFSPKEINSLCSRLEKEAARIELVESVIMLNMEKLENEYLDQANDVINKFESKFHNLSVDLIFIEKIQRLLTNLQVKIKCQALLSGLQNTILKDQEEDSDILTSSEALEEEAKLDVVTPESFTQLSRVGKPLIEDPAVDVIRKLLQGRGAWACGSRGSSEAGAGGAVCSPPVLCSCPGPSSPKGFKRHRCQPENSGKKAVPSASATSAGRNPGRDPAGSDLPCSVHSLQTTHPPLSHSFTPHPKPNKMERKYRVLGDKPPPAAEQRPPLISPLTLETSSLGVMNLAEKDGCDIRQPRCGLQLAANRGTARYRHCHGAGDSMVNKYRQVHVLDFKGIILTLLWESSENLLTVAEAPRPSGKLTDLAGAQKEVGQWDQAPDKLPSALFPHALHRRNNEGWPWLHSLQVGPGRRHGQTGKEECLLVSLPQGMPRAKARECGGEGRLVDPRSKGQSPMESSPAHGHPLWQEFYRKEKRPVTRPDCMCDTFDQCAENISKKILEYQSQANKYHNSCLIELRIQIRRFEELLPQVCWLVMENFKEHHWKKFFTSVKEIRGQFEEQQKRLEKRKECTRRNGQVFITNLATFTEKFLLQLDEVVTIDDVQVASKRHHQPCVMALGGW

SEQ ID NO: 921010 - protein, 445 aa, Homo sapiens
MILLNSELPNTKWPTHHCDKDPSQTGRGAWACGSRGSSEAGAGGAVCSPPVLCSCPGPSSPKGFKRHRCQPENSGKKAVPSASATSAGSFTPHPKPNKMERKYRVLGDKPPPAAEDFKGIILTLLWESSENLLTVAEEFYRKEKRPVTRPDCMCDTFDQCAENISKKILEYQSQANKYHNSCLIELRIQIRRFEELLPQVCWLVMENFKEHHWKKFFTSVKEIRGQFEEQQKRLEKRKDKNAQKLHLNLGHPVHFQEMESLHLSEEERQEELDSMIRMNKEKLEECTRRNGQVFITNLATFTEKFLLQLDEVVTIDDVQVARMEPPKQKLSMLIRRKLAGLSLKEESEKPLIERGSRKWPGIKPTEVTIQNKILLQPTSSISTTKTTLGHLAAVEARDAVYLKYLASFEEELKRIQDDCTSQIKEAQRWKDSWKQSLHTIQGLYV

SEQ ID NO: 921011 - protein, 123 aa, Homo sapiens; identical to SEQ ID NO: 921008

SEQ ID NO: 921012 - protein, 1443 aa, Homo sapiens
ALAEATVASRDGGGCNRTCSIPEELTKALEQKPDDAQYYRQRAYCHILLGNYCGADANFSDWIKRCRSSEWYVISHVCGEYETLVFYWPSLLCLAFLLGRFLHMFVKALRVHLGWELQVEEKSVLEVHQGEHVKQLLRIPRPQEKKKSWFQTRIYEWDPCFQFPSRMIGTIVLAFICLYLFIVIEFCVFVYVRDELDVLENNLESYITFTNHSGVLTPVILQVKELISVTKGVWVATILPAYLTCVSYLFHILVCYRKHMKRLWAGDKHFLPLKFHNPASSESMVAIARYSGWQIAYILWGYLIIHMVQSLCGMAIMYSLVLPIVQTRAWKCCKGWALGCKCWAGILSLTCSESWVPPTAMWTHGLGPDPEMGHDSNSWWGETAFTKGCLSHHSTMPSQPCMGWGIHMSIFQLGKLRFRKVKGEARQYDGRKQGILAKLLDLLCDLGLSFLLCTMGVGMPCKCKDMELTLPLSCRVVNLSPLSHWASEKDLAEGKRLPQDGPTLCFSLTISIVVGLMILQMCIAASFFLQPKLGTADKQKPLALNNRKAFHNFNYFLFFYNVLLGLGACLSRLLISCLLGMWLIARIDRTIMQSGYEGADMGFSAWIGMLYMDHYHINPVLVSFCHILITNHREKKLQQSTKYWCLNQSAESLRICAMRGGENRPPARVQSSSESTFPSRLPPSRESFPGESCPGVPPRGQTSSRLDLNLSLGRAISQPQELELRHQSLDAFPGRRLPGRGIQPAAKMSSVGKVTQVPNGKAYQQIFQAEVQLVHSLAATRKRAAERSVTLKSGRIPMMKKVETPEGEVMSPRQQKWMHSLPNDWIMENPVLHREKERAKREKARESENTIAAREVRGLMDTIVPEKISTSTFQRQAEHKRKSYESALASFQEEIAQVGKEMEPLIVDTGGLFLKKLTESDEEMNRLFLKVENDTNLEDYTIQALLELWDKVAGRLLLRKQEIKELDEALHSLEFSRTDKLKSVLKKYAEVIEKTSYLMRPEVYRLINEEAMVMNYALLGNRKALAQLFVNLMESTLQQELDSRHRWQGLVDTWKALKKEALLQSFSEFMASESIHTPPAVTKELEVMLKTQNVLQQRRLKHLCTICDLLPPSYSKTQLTEWHSSLNSLNKELDTYHVDCMMRIRLLYEKTWQECLMHVQNCKKQLLDWKAFTEEEAETLVNQFFFQMVGALQGKVEEDLELLDEVVQLWEAHQSELLVQELELEKRMEQHRQKHSLESQVQEAHLDRLLDQLRQQSDKETLAFHLEKVKDYLKNMKSRYECFHTLLTKEVMEYPAIMLKELNSYSSALSQYFFVREIFEQNLAGEVIFKFRQPEAHEKPSQKRVKKLEEEKEEKEAQEEQESLSVGEEEDKEEGLEEIYYEDMESFTISSGNTYFVFVPLEEEHCRKSHSTFSAMFINDTSSAKFIEQVTIPSRLILEIKKQ

SEQ ID NO: 921013 - protein, 1659 aa, Homo sapiens
ALAEATVASRDGGGCNRTCSIPEELTKALEQKPDDAQYYRQRAYCHILLGNYCGADANFSDWIKRCRSSEWYVISHVCGEYETLVFYWPSLLCLAFLLGRFLHMFVKALRVHLGWELQVEEKSVLEVHQGEHVKQLLRIPRPQEKKKSWFQTRIYEWDPCFQFPSRMIGTIVLAFICLYLFIVIEFCVFVYVRDELDVLENNLESYITFTNHSGVLTPVILQVKELISVTKGVWVATILPAYLTCVSYLFHILVCYRKHMKRLWAGDKHFLPLKFHNPASSESMVAIARYSGWQIAYILWGYLIIHMVQSLCGMAIMYSLVLPIVQTRAWKCCKGWALGCKCWAGILSLTCSESWVPPTAMWTHGLGPDPEMGHDSNSWWGETAFTKGCLSHHSTMPSQPCMGWGIHMSIFQLGKLRFRKVKGEARQYDGRKQGILAKLLDLLCDLGLSFLLCTMGVGMPCKCKDMELTLPLSCRVVNLSPLSHWASEKDLAEGKRLPQDGPTLCFSLTISIVVGLMILQMCIAASFFLQPKLGTADKQKPLALNNRKAFHNFNYFLFFYNVLLGLGACLSRLLISCLLGMWLIARIDRTIMQSGYEGADMGFSAWIGMLYMDHYHINPVLVSFCHILITNHREKKLQQSTKYWCLNQSAESLRICAMRGGENRPPARVQSSSESTFPSRLPPSRESFPGESCPGVPPRGQTSSRLDLNLSLGRAISQPQELELRHQSLDAFPGRRLPGRGIQPAAKMSSVGKVTQVPNGKAYQQIFQAEVQLVHSLAATRKRAAERSVTLKSGRIPMMKKVETPEGEVMSPRQQKWMHSLPNDWIMENPVLHREKERAKREKARESENTIAAREVRGLMDTIVPEKISTSTFQRQAEHKRKSYESALASFQEEIAQVGKEMEPLIVDTGGLFLKKLTESDEEMNRLFLKVENDTNLEDYTIQALLELWDKVAGRLLLRKQEIKELDEALHSLEFSRTDKLKSVLKKYAEVIEKTSYLMRPEVYRLINEEAMVMNYALLGNRKALAQLFVNLMESTLQQELDSRHRWQGLVDTWKALKKEALLQSFSEFMASESIHTPPAVTKELEVMLKTQNVLQQRRLKHLCTICDLLPPSYSKTQLTEWHSSLNSLNKELDTYHVDCMMRIRLLYEKTWQECLMHVQNCKKQLLDWKAFTEEEAETLVNQFFFQMVGALQGKVEEDLELLDEVVQLWEAHQSELLVQELELEKRMEQHRQKHSLESQVQEAHLDRLLDQLRQQSDKETLAFHLEKVKDYLKNMKSRYECFHTLLTKEVMEYPAIMLKELNSYSSALSQYFFVREIFEQLKKLRKKQGSKEDMTRSEESISSGTSTARSVEEVEEENDQEMESFITEEVLGQQKKSPLHAKMDESKEGSIQGLEEMQVEREGSLNPSLNEENVKGQGEKKEESEEEDEKEEEEEEEKLEEEKEEKEAQEEQESLSVGEEEDKEEGLEEIYYEDMESFTISSGNTYFVFVPLEEEHCRKSHSTFSAMFINDTSSAKFIEQVTIPSRLILEIKKQLFSEGGNFSPKEINSLCSRLEKEAARIELVESVIMLNMEKLENEYLDQANDVINKFESKFHNLSVDLIFIEKIQRLLTNLQVKIKCQVAKSNSQTNGLNFSLQQLQNKIKTCQESRGEKTVSVQ

SEQ ID NO: 921014 - protein, 199 aa, Homo sapiens
DHGRPAAVVAGPALAASRESLRICAMRGGENRPPARVQSSSEELELRHQSLDAFPGRRLPGRGIQPAAKMSSVGKVTQVPNGKAYQQIFQAEVQLVHSLAATRKRAAERSVTLKSGRIPMMKKVETPEGEVMSPRQQKWMHSLPNDWIMENPVLHREKERAKREKARESENTIAAREVRGLMDTIVPPCSYFRLESAMY

SEQ ID NO: 921015 - protein, 290 aa, Homo sapiens
MILLNSELPNTKWPTHHCDKDPSQTGRGAWACGSRGSSEAGAGGAVCSPPVLCSCPGPSSPKGFKRHRCQPENSGKKAVPSASATSAGSFTPHPKPNKMERKYRVLGDKPPPAAEDFKGIILTLLWESSENLLTVAEEFYRKEKRPVTRPDCMCDTFDQCAENISKKILEYQSQANKYHNSCLIELRIQIRRFEELLPQVCWLVMENFKEHHWKKFFTSVKEIRGQFEEQQKRLEKRKECTRRNGQVFITNLATFTEKFLLQLDEVVTIDDVQVASKRHHQPCVMALGGW

SEQ ID NO: 921016 - protein, 445 aa, Homo sapiens; identical to SEQ ID NO: 921010

SEQ ID NO: 921017 - protein, 368 aa, Homo sapiens
ALAEATVASRDGGGCNRTCSIPEELTKALEQKPDDAQYYRQRAYCHILLGNYCGADANFSDWIKRCRSSEWYVISHVCGEYETLVFYWPSLLCLAFLLGRFLHMFVKALRVHLGWELQVEEKSVLEVHQGEHVKQLLRIPRPQEKKKSWFQTRIYEWDPCFQFPSRMIGTIVLAFICLYLFIVIEFCVFVYVRDELDVLENNLESYITFTNHSGVLTPVILQVKELISVTKGVWVATILPAYLTCVSYLFHILVCYRKHMKRLWAGDKHFLPLKFHNPASSESMVAIARYSGWQIAYILWGYLIIHMVQSLCGMAIMYSLVLPIVQTRAWKCCKGWALGCKCWAGILSLTCSESWGPPNCYVDPWSWP

SEQ ID NO: 921018 - protein, 1347 aa, Homo sapiens
ALAEATVASRDGGGCNRTCSIPEELTKALEQKPDDAQYYRQRAYCHILLGNYCGADANFSDWIKRCRSSEWYVISHVCGEYETLVFYWPSLLCLAFLLGRFLHMFVKALRVHLGWELQVEEKSVLEVHQGEHVKQLLRIPRPQEKKKSWFQTRIYEWDPCFQFPSRMIGTIVLAFICLYLFIVIEFCVFVYVRDELDVLENNLESYITFTNHSGVLTPVILQVKELISVTKGVWVATILPAYLTCVSYLFHILVCYRKHMKRLWAGDKHFLPLKFHNPASSESMVAIARYSGWQIAYILWGYLIIHMVQSLCGMAIMYSLVLPIVQTRAWKCCKGWALGCKCWAGILSLTCSESWVPPTAMWTHGLGPDPEMGHDSNSWWGETAFTKGCLSHHSTMPSQPCMGWGIHMSIFQLGKLRFRKVKGEARQYDGRKQGILAKLLDLLCDLGLSFLLCTMGVGMPCKCKDMELTLPLSCRVVNLSPLSHWASEKDLAEGKRLPQDGPTLCFSLTISIVVGLMILQMCIAASFFLQPKLGTADKQKPLALNNRKAFHNFNYFLFFYNVLLGLGACLSRLLISCLLGMWLIARIDRTIMQSGYEGADMGFSAWIGMLYMDHYHINPVLVSFCHILITNHREKKLQQSTKYWCLNQSAESLRICAMRGGENRPPARVQSSSESTFPSRLPPSRESFPGESCPGVPPRGQTSSRLDLNLSLGRAISQPQELELRHQSLDAFPGRRLPGRGIQPAAKMSSVGKVTQVPNGKAYQQIFQAEVQLVHSLAATRKRAAERSVTLKSGRIPMMKKVETPEGEVMSPRQQKWMHSLPNDWIMENPVLHREKERAKREKARESENTIAAREVRGLMDTIVPEKISTSTFQRQAEHKRKSYESALASFQEEIAQVGKEMEPLIVDTGGLFLKKLTESDEEMNRLFLKVENDTNLEDYTIQALLELWDKVAGRLLLRKQEIKELDEALHSLEFSRTDKLKSVLKKYAEVIEKTSYLMRPEVYRLINEEAMVMNYALLGNRKALAQLFVNLMESTLQQELDSRHRWQGLVDTWKALKKEALLQSFSEFMASESIHTPPAVTKELEVMLKTQNVLQQRRLKHLCTICDLLPPSYSKTQLTEWHSSLNSLNKELDTYHVDCMMRIRLLYEKTWQECLMHVQNCKKQLLDWKAFTEEEAETLVNQFFFQMVGALQGKVEEDLELLDEVVQLWEAHQSELLVQELELEKRMEQHRQKHSLESQVQEAHLDRLLDQLRQQSDKETLAFHLEKVKDYLKNMKSRYECFHTLLTKEVMEYPAIMLKELNSYSSALSQYFFVREIFEQNLAGEVIFKFRQPEAHEKPSQKRVKK

SEQ ID NO: 921019 - protein, 126 aa, Homo sapiens
MSPGLLTTRKEALMAFRDVAVAFTQKEWKLLSSAQRTLYREVMLENYSHLVSLGIAFSKPKLIEQLEQGDEPWREENEHLLDLCPGEWEALGKRGCRAVRSSAGKEGGAIFEVLGGSSSSGLLGHW

SEQ ID NO: 921020 - protein, 111 aa, Homo sapiens
MSPGLLTTRKEALMAFRDVAVAFTQKEWKLLSSAQRTLYREVMLENYSHLVSLGIAFSKPKLIEQLEQGDEPWREENEHLLDLCPESRSVTQAGVQWHDLGSLQPLPPVFK

SEQ ID NO: 921021 - protein, 145 aa, Homo sapiens
MAGRRADASRQLFVLWKVVLARDETGYFTEEISKQNVEEVTWFLPVDCSKMQEERNELKKELLSKNEPEFKDLENSLSVHMTKNEKVCTEENTKGVVDQPFHKEISVAVYHELNQPFQQRPGIQMGLHLQRHCWLGLKKTEHGME

SEQ ID NO: 921022 - protein, 219 aa, Homo sapiens
MGSTECVLLAVMAYDRYVAICNPLRYSIIMNRCVCARMATVSWVTGCLTALLETSFALQIPLCGNLIDHFTCEILAVLKLACTSSLLMNTIMLVVSILLLPIPMLLVCISYIFILSTILRITSAEGRNKAFSTCGAHLTVVILYYGAALSMYLKPSSSNAQKIDKIISLPALTQGTEQIGMEPSVLEWDIDQNGTTKWMRNNPDVRRGLRTEPGNYHNL

SEQ ID NO: 921023 - protein, 187 aa, Homo sapiens
AGRSPQKPPRPSQMLSFSYTSLPPFSLVQSLLCILLSYPPTLTHKYEPLFAFTWAGPDTHQPQQLTWAVLPQAFTDSPHYFSKAQIPSSSVTYLGIVLHENTCALPADHIPGFAILTEPLYKLTKPNLADPIDPKSVCHSSFRSLKTALETVPTLALPDSSQPFSLHTAEVQGCAVGILTQEPDHTL

SEQ ID NO: 921024 - protein, 303 aa, Homo sapiens
MSWLCFGPSLPWPHHGPSCPAPAAALALAWNLVLSRTCPDSAMALALLCLVPGPDPDPDPFLALHWSFPGPELAVAQHRPGSDPGPGLCPAIALALKWTWRCPGPGVTWLCIGLSLPCPYHRLALLCPVPVLTRPRYFPALPCLGYDPGPAPALALALALALDMSVVLTLALPWSCHCLGPALALALPRPWPCPGPSHRPALHRPGPICGLGLALTPAPDPGPAMALALPMTLAALTLALNWPCPGPEVDLQVSYLAMALRLPWTGAGTGMDPGPGPSLLKAIPWPSPGPNLAWLYPGMLFWP

SEQ ID NO: 921025 - protein, 124 aa, Homo sapiens
MARNKNACTYLTGWHDSCLGQVDSLNASTKEQIKEIAEAMQGQRPGRENGCRSRRLQLLLRLLSQAWLGLGTLQSPKGSTITGTHSLKGNLSLSKYRHTHASYRSVSLESPHTVVTSLFLGGAC

SEQ ID NO: 921026 - protein, 209 aa, Homo sapiens
MLPLAALGMASLSALRNSPRNFQAGRRAHRIDEGNGGSTEPPDPVPRVVKRPSCLAAQLQEIVAALESDAPSGAVHGGRRVKAEEEPSHWRVGVGAGIKDNFLEEGLFEPNSENKAATLSCSYKQSCQSEPPPESASNGLNAKEKRPQSSSGACPQSRALDQWLDRHEARSTVTPTYAAGHSWAPQGPWAGSSSPDEKDSKVKSGVLCS

SEQ ID NO: 921027 - protein, 142 aa, Homo sapiens
MLASWWSALPRYTGCRWEIPALATRAFSSFALSHLVPAFIVRAGERGSGGIRFCRAVCPLPIFLCAAKGTSTCPTVGGKPLSGLPLLWDEGTVITWACVTFYHWVKEENDVRDWEKERNLNIQVTENEVAVERRAAITEMEQ

SEQ ID NO: 921028 - protein, 338 aa, Homo sapiens
MAARSWQDELAQQAEEGSARRAGNALGRPRLSAHRAGPRPGAGAETVPRLGDPGGHWRARAAAAVSAGLRLGRGLRRRPQKAEEPAPQAGGGGGRAGRGPDDLALLKNLRSEEQKKKNRKKLSEKPKPNGRTVEVAEGEAVRTPQSVTAKQPPEIDKKNEKFLNASNFKMYFEEVAKSLLQRHFEIGRTKTAAGAWETKISHREKRQQRKRDKVLTDSGSLDSTIPGIENTITVTTEQLTTASFPVGSKKNKVSSGLNENLTVNGGGWNEKSVKLSSQISAGEEKWNSVSPASAGKRKTEPSAWSQDTGDANTNGKDWGRSWSDRSIFSGIGTKIPRC

SEQ ID NO: 921029 - protein, 296 aa, Homo sapiens
GRVVDHASGAWETKISHREKRQQRKRDKVLTDSGSLDSTIPGIENTITVTTEQLTTASFPVGSKKNKGDSHLNVQVSNFKSGKGDSTLQVSSGLNENLTVNGGGWNEKSVKLSSQISAGEEKWNSVSPASAGKRKTEPSAWSQDTGDANTNGKDWGRSWSDRSIFSGIGSTAEPVSQSTTSDYQWDVSRNQPYIDDEWSGLNGLSSADPNSDWNAPAEEWGNWVDEERASLLKSQEPIPDDQKVLQMMIKKGRGSSSLGHPQKKQRRAGEILYGRNLRIERDKETQENYNGKRKGT

SEQ ID NO: 921030 - protein, 586 aa, Homo sapiens
MAARSWQDELAQQAEEGSARRAGNALGRPRLSAHRAGPRPGAGAETVPRLGDPGGHWRARAAAAVSAGLRLGRGLRRRPQKAEEPAPQAGGGGGRAGRGPDDLALLKNLRSEEQKKKNRKKLSEKPKPNGRTVEVAEGEAVRTPQSVTAKQPPEIDKKNEKFLNASNFKMYFEEVAKSLLQRHFEIGRTKTAAGAWETKISHREKRQQRKRDKVLTDSGSLDSTIPGIENTITVTTEQLTTASFPVGSKKNKGDSHLNVQVSNFKSGKGDSTLQVSSGLNENLTVNGGGWNEKSVKLSSQISAGEEKWNSVSPASAGKRKTEPSAWSQDTGDANTNGKDWGRSWSDRSIFSGIGSTAEPVSQSTTSDYQWDVSRNQPYIDDEWSGLNGLSSADPNSDWNAPAEEWGNWVDEERASLLKSQEPIPDDQKVSDDDKEKGEGALPTGKSKKKKKKKKKQGEDNSTAQDTEELEKEIREDLPVNTSKTRPKQEKAFSLKTISTSDPAEVLVKNSQPIKTLPPATSTEPSVILSKSDSDKSSSQVPPILQETDKSKSNTKQNSVPPSQTKSETSWESPKQIKKKKKARRET

SEQ ID NO: 921031 - protein, 582 aa, Homo sapiens
MAARSWQDELAQQAEEGSARRAGNALGRPRLSAHRAGPRPGAGAETVPRLGDPGGHWRARAAAAVSAGLRLGRGLRRRPQKAEEPAPQAGGGGGRAGRGPDDLALLKNLRSEEQKKKNRKKLSEKPKPNGRTVEVAEGEAVRTPQSVTAKQPPEIDKKNEKSKKNKKKSKSDAKAVQNSSRHDGKEVDEGAWETKISHREKRQQRKRDKVLTDSGSLDSTIPGIENTITVTTEQLTTASFPVGSKKNKGDSHLNVQVSNFKSGKGDSTLQVSSGLNENLTVNGGGWNEKSVKLSSQISAGEEKWNSVSPASAGKRKTEPSAWSQDTGDANTNGKDWGRSWSDRSIFSGIGSTAEPVSQSTTSDYQWDVSRNQPYIDDEWSGLNGLSSADPNSDWNAPAEEWGNWVDEERASLLKSQEPIPDDQKVSDDDKEKGEGALPTGKSKKKKKKKKKQGEDNSTAQDTEELEKEIREDLPVNTSKTRPKQEKAFSLKTISTSDPAEVLVKNSQPIKTLPPATSTEPSVILSKSDSDKSSSQVPPILQETDKSKSNTKQNSVPPSQTKSETSWESPKQIKKKKKARRET

SEQ ID NO: 921032 - protein, 549 aa, Homo sapiens
MAARSWQDELAQQAEEGSARRAGNALGRPRLSAHRAGPRPGAGAETVPRLGDPGGHWRARAAAAVSAGLRLGRGLRRRPQKAEEPAPQAGGGGGRAGRGPDDLALLKNLRSEEQKKKNRKKLSEKPKPNGRTVEVAEGEAVRTPQSVTAKQPPEIDKKNEKSKKNKKKSKSDAKAVQNSSRHDGKEVDEGAWETKISHREKRQQRKRDKVLTDSGSLDSTIPGIENTITVTTEQLTTASFPVGSKKNKGDSHLNVQVSNFKSGKGDSTLQVSSGLNENLTVNGGGWNEKSVKLSSQISAGEEKWNSVSPASAGKRKTEPSAWSQDTGDANTNGKDWGRSWSDRSIFSGIDGLSSADPNSDWNAPAEEWGNWVDEERASLLKSQEPIPDDQKVSDDDKEKGEGALPTGKSKKKKKKKKKQGEDNSTAQDTEELEKEIREDLPVNTSKTRPKQEKAFSLKTISTSDPAEVLVKNSQPIKTLPPATSTEPSVILSKSDSDKSSSQVPPILQETDKSKSNTKQNSVPPSQTKSETSWESPKQIKKKKKARRET

SEQ ID NO: 921033 - protein, 582 aa, Homo sapiens; identical to SEQ ID NO: 921031

SEQ ID NO: 921034 - protein, 582 aa, Homo sapiens; identical to SEQ ID NO: 921031

SEQ ID NO: 921035 - protein, 582 aa, Homo sapiens; identical to SEQ ID NO: 921031

SEQ ID NO: 921036 - protein, 582 aa, Homo sapiens; identical to SEQ ID NO: 921031

SEQ ID NO: 921037 - protein, 582 aa, Homo sapiens; identical to SEQ ID NO: 921031

SEQ ID NO: 921038 - protein, 337 aa, Homo sapiens
VDDSRPCGTSLEVRLGALDDSRPLQVSSGLNENLTVNGGGWNEKSVKLSSQISAGEEKWNSVSPASAGKRKTEPSAWSQDTGDANTNGKDWGRSWSDRSIFSGIGSTAEPVSQSTTSDYQWDVSRNQPYIDDEWSGLNGLSSADPNSDWNAPAEEWGNWVDEERASLLKSQEPIPDDQKVSDDDKEKGEGALPTGKSKKKKKKKKKQGEDNSTAQDTEELEKEIREDLPVNTSKTRPKQEKAFSLKTISTSDPAEVLVKNSQPIKTLPPATSTEPSVILSKSDSDKSSSQVPPILQETDKSKSNTKQNSVPPSQTKSETSWESPKQIKKKKKARRET

SEQ ID NO: 921039 - protein, 415 aa, Homo sapiens
STAQDTEELEKEIREDLPVNTSKTRPKQEKAFSLKTISTSDPAEVLVKNSQPIKTLPPATSTEPSVILSKSDSDKSSSQVPPILQETDKSKSNTKQNSVPPSQISSGLNENLTVNGGGWNEKSVKLSSQISAGEEKWNSVSPASAGKRKTEPSAWSQDTGDANTNGKDWGRSWSDRSIFSGIGSTAEPVSQSTTSDYQWDVSRNQPYIDDEWSGLNGLSSADPNSDWNAPAEEWGNWVDEERASLLKSQEPIPDDQKVSDDDKEKGEGALPTGKSKKKKKKKKKQGEDNSTAQDTEELEKEIREDLPVNTSKTRPKQEKAFSLKTISTSDPAEVLVKNSQPIKTLPPATSTEPSVILSKSDSDKSSSQVPPILQETDKSKSNTKQNSVPPSQTKSETSWESPKQIKKKKKARRET

SEQ ID NO: 921040 - protein, 582 aa, Homo sapiens; identical to SEQ ID NO: 921031

SEQ ID NO: 921041 - protein, 149 aa, Homo sapiens
MEIFYRESFLKKKKKKKKQGEDNSTAQDTEELEKEIREDLPVNTSKTRPKQEKAFSLKTISTSDPAEVLVKNSQPIKTLPPATSTEPSVILSKSDSDKSSSQVPPILQETDKSKSNTKQNSVPPSQTKSETSWESPKQIKKKKKARRET

SEQ ID NO: 921042 - protein, 431 aa, Homo sapiens
MAARSWQDELAQQAEEGSARRAGNALGRPRLSAHRAGPRPGAGAETVPRLGDPGGHWRARAAAAVSAGLRLGRGLRRRPQKAEEPAPQAGGGGGRAGRGPDDLALLKNLRSEEQKKKNRKKLSEKPKPNGRTVEVAEGEAVRTPQSVTAKQPPEIDKKNEKSKKNKKKSKSDAKAVQNSSRHDGKEVDEGAWETKISHREKRQQRKRDKVLTDSGSLDSTIPGIENTITVTTEQLTTASFPVGSKKNKGDSHLNVQVSNFKSGKGDSTLQVSSGLNENLTVNGGGWNEKSVKLSSQISAGEEKWNSVSPASAGKRKTEPSAWSQDTGDANTNGKDWGRSWSDRSIFSGIDGLSSADPNSDWNAPAEEWGNWVDEERASLLKSQEPIPDDQKVSDDDKEKGEGALPTGKSKKKKKKKKKQGEDNSTAQTQKN

SEQ ID NO: 921043 - protein, 386 aa, Homo sapiens
MAARSWQDELAQQAEEGSARRAGNALGRPRLSAHRAGPRPGAGAETVPRLGDPGGHWRARAAAAVSAGLRLGRGLRRRPQKAEEPAPQAGGGGGRAGRGPDDLALLKNLRSEEQKKKNRKKLSEKPKPNGRTVEVAEGEAVRTPQSVTAKQPPEIDKKNEKSKKNKKKSKSDAKAVQNSSRHDGKEVDEGAWETKISHREKRQQRKRDKVLTDSGSLDSTIPGIENTITVTTEQLTTASFPVGSKKNKGDSHLNVQVSNFKSGKGDSTLQVSSGLNENLTVNGGGWNEKSVKLSSQISAGEEKWNSVSPASAGKRKTEPSAWSQDTGDANTNGKDWGRSWSDRSIFSGIGSTAEPVSQSTTSDYQWDVSRNQPYIDDEWSGLSMSF

SEQ ID NO: 921044 - protein, 435 aa, Homo sapiens
MAARSWQDELAQQAEEGSARRAGNALGRPRLSAHRAGPRPGAGAETVPRLGDPGGHWRARAAAAVSAGLRLGRGLRRRPQKAEEPAPQAGGGGGRAGRGPDDLALLKNLRSEEQKKKNRKKLSEKPKPNGRTVEVAEGEAVRTPQSVTAKQPPEIDKKNEKSKKNKKKSKSDAKAVQNSSRHDGKEVDEGAWETKISHREKRQQRKRDKVLTDSGSLDSTIPGIENTITVTTEQLTTASFPVGSKKNKGDSHLNVQVSNFKSGKGDSTLQVSSGLNENLTVNGGGWNEKSVKLSSQISAGEEKWNSVSPASAGKRKTEPSAWSQDTGDANTNGKDWGRSWSDRSIFSGIGSTAEPVSQSTTSDYQWDVSRNQPYIDDEWSGLNGLSSADPNSDWNAPAEEWGNWVDEERASLLKSQEPIPDDQKVSIRDSWVFIC

SEQ ID NO: 921045 - protein, 357 aa, Homo sapiens
MAARSWQDELAQQAEEGSARRAGNALGRPRLSAHRAGPRPGAGAETVPRLGDPGGHWRARAAAAVSAGLRLGRGLRRRPQKAEEPAPQAGGGGGRAGRGPDDLALLKNLRSEEQKKKNRKKLSEKPKPNGRTVEVAEGEAVRTPQSVTAKQPPEIDKKNEKSKKNKKKSKSDAKAVQNSSRHDGKEVDEGAWETKISHREKRQQRKRDKVLTDSGSLDSTIPGIENTITVTTEQLTTASFPVGSKKNKGDSHLNVQVSNFKSGKGDSTLQVSSGLNENLTVNGGGWNEKSVKLSSQISAGEEKWNSVSPASAGKRKTEPSAWSQDTGDANTNGKDWGRSWSDRSIFSGIVVRSVRKI

SEQ ID NO: 921046 - protein, 214 aa, Homo sapiens
MAARSWQDELAQQAEEGSARRAGNALGRPRLSAHRAGPRPGAGAETVPRLGDPGGHWRARAAAAVSAGLRLGRGLRRRPQKAEEPAPQAGGGGGRAGRGPDDLALLKNLRSEEQKKKNRKKLSEKPKPNGRTVEVAEGEAVRTPQSVTAKQPPEIDKKNEKHVKDTYEEIKADAKAANQLRLMEEFEELELIVQGNGGGTGGGRLAGHHSGKNH

SEQ ID NO: 921047 - protein, 214 aa, Homo sapiens; identical to SEQ ID NO: 921046

SEQ ID NO: 921048 - protein, 582 aa, Homo sapiens; identical to SEQ ID NO: 921031

SEQ ID NO: 921049 - protein, 582 aa, Homo sapiens; identical to SEQ ID NO: 921031

SEQ ID NO: 921050 - protein, 582 aa, Homo sapiens; identical to SEQ ID NO: 921031

SEQ ID NO: 921051 - protein, 582 aa, Homo sapiens; identical to SEQ ID NO: 921031

SEQ ID NO: 921052 - protein, 582 aa, Homo sapiens; identical to SEQ ID NO: 921031

SEQ ID NO: 921053 - protein, 582 aa, Homo sapiens; identical to SEQ ID NO: 921031

SEQ ID NO: 921054 - protein, 473 aa, Homo sapiens
ERGKLSHLPGVKTLEMLIQMEKTGEGVGGEAVRTPQSVTAKQPPEIDKKNEKSKKNKKKSKSDAKAVQNSSRHDGKEVDEGAWETKISHREKRQQRKRDKVLTDSGSLDSTIPGIENTITVTTEQLTTASFPVGSKKNKGDSHLNVQVSNFKSGKGDSTLQVSSGLNENLTVNGGGWNEKSVKLSSQISAGEEKWNSVSPASAGKRKTEPSAWSQDTGDANTNGKDWGRSWSDRSIFSGIGSTAEPVSQSTTSDYQWDVSRNQPYIDDEWSGLNGLSSADPNSDWNAPAEEWGNWVDEERASLLKSQEPIPDDQKVSDDDKEKGEGALPTGKSKKKKKKKKKQGEDNSTAQDTEELEKEIREDLPVNTSKTRPKQEKAFSLKTISTSDPAEVLVKNSQPIKTLPPATSTEPSVILSKSDSDKSSSQVPPILQETDKSKSNTKQNSVPPSQTKSETSWESPKQIKKKKKARRET

SEQ ID NO: 921055 - protein, 327 aa, Homo sapiens
RRLQRTPSIGGQLTTASFPVGSKKNKGDSHLNVQVSNFKSGKGDSTLQVSSGLNENLTVNGGGWNEKSVKLSSQISAGEEKWNSVSPASAGKRKTEPSAWSQDTGDANTNGKDWGRSWSDRSIFSGIDGLSSADPNSDWNAPAEEWGNWVDEERASLLKSQEPIPDDQKVSDDDKEKGEGALPTGKSKKKKKKKKKQGEDNSTAQDTEELEKEIREDLPVNTSKTRPKQEKAFSLKTISTSDPAEVLVKNSQPIKTLPPATSTEPSVILSKSDSDKSSSQVPPILQETDKSKSNTKQNSVPPSQTKSETSWESPKQIKKKKKARRET

SEQ ID NO: 921056 - protein, 234 aa, Homo sapiens
MLIQMEKTGEGVGVTVQYFLALNQPYIDDEWSGLNGLSSADPNSDWNAPAEEWGNWVDEERASLLKSQEPIPDDQKVSDDDKEKGEGALPTGKSKKKKKKKKKQGEDNSTAQDTEELEKEIREDLPVNTSKTRPKQEKAFSLKTISTSDPAEVLVKNSQPIKTLPPATSTEPSVILSKSDSDKSSSQVPPILQETDKSKSNTKQNSVPPSQTKSETSWESPKQIKKKKKARRET

SEQ ID NO: 921057 - protein, 582 aa, Homo sapiens; identical to SEQ ID NO: 921031

SEQ ID NO: 921058 - protein, 477 aa, Homo sapiens
MAARSWQDELAQQAEEGSARRAGNALGRPRLSAHRAGPRPGAGAETVPRLGDPGGHWRARAAAAVSAGLRLGRGLRRRPQKAEEPAPQAGGGGGRAGRGPDDLALLKNLRSEEQKKKNRKKLSEKPKPNGRTVEVAEGEAVRTPQSVTAKQPPEIDKKNEKSKKNKKKSKSDAKAVQNSSRHDGKEVDEGAWETKISHREKRQQRKRDKVLTDSGSLDSTIPGIENTITVTTEQLTTASFPVGSKKNKGDSHLNVQVSNFKSGKGDSTLQVSSGLNENLTVNGGGWNEKSVKLSSQISAGEEKWNSVSPASAGKRKTEPSAWSQDTGDANTNGKDWGRSWSDRSIFSGIGSTAEPVSQSTTSDYQWDVSRNQPYIDDEWSGLNGLSSADPNSDWNAPAEEWGNWVDEERASLLKSQEPIPDDQKVLQMMIKKGRGSSSLGHPQKKQRRAGEILYGRNLRIERDKETQENYNGKRKGT

SEQ ID NO: 921059 - protein, 409 aa, Homo sapiens
MAARSWQDELAQQAEEGSARRAGNALGRPRLSAHRAGPRPGAGAETVPRLGDPGGHWRARAAAAVSAGLRLGRGLRRRPQKAEEPAPQAGGGGGRAGRGPDDLALLKNLRSEEQKKKNRKKLSEKPKPNGRTVEVAEGEAVRTPQSVTAKQPPEIDKKNEKSKKNKKKSKSDAKAVQNSSRHDGKEVDEGAWETKISHREKRQQRKRDKVLTDSGSLDSTIPGIENTITVTTEQLTTASFPVGSKKNKGDSHLNVQVSNFKSGKGDSTLQVSSGLNENLTVNGGGWNEKSVKLSSQISAGEEKWNSVSPASAGKRKTEPSAWSQDTGDANTNGKDWGRSWSDRSIFSGIGSTAEPVSQSTTSDYQWDVSRNQPYIDDEWSGLNGLSSADPIPSHMAEKKIIIKWLYFLV

SEQ ID NO: 921060 - protein, 357 aa, Homo sapiens; identical to SEQ ID NO: 921045

SEQ ID NO: 921061 - protein, 132 aa, Homo sapiens
SVDSFSFPGMFLWQFLEQKFMVCVYTCHSVRPSGGCKLVLPPIRHFPSIGSTLEVRVPLEKIGDSWNWVPGKAMDTQCQPMNAAGREAVPCKATGVELPKTMGTHLLHQHDLDVRPGVKGDHLAALRFDCPA

SEQ ID NO: 921062 - protein, 115 aa, Homo sapiens
MQAGSGGRGPCTGASLTAPGSIIFTADPAISFPVAPAQAWALALPGLNWVRGPSLSQSLALGGCGISIGQACIKHLGVELPCPHRREAKPPSAIVSPGLGKRISSPLHQKQPEDL

SEQ ID NO: 921063 - protein, 166 aa, Homo sapiens
ALHGTMSCTPGTPRALHPHQYCFLRSSQLPVQSFPKYPQLVTAAALGGQDEEPQAPGSTSDPQSEAARWGPGAPAPVHCEGPRLQAPASSGIRCPADHHPYRTLALQIPSPINLQSYRSLALQSLVLWTEHSTDGGEVWVRGAPLGDAQTAHGQQAEVPSPPHDHH

SEQ ID NO: 921064 - protein, 121 aa, Homo sapiens
MKLSDPAGPGLPCGRTHSLTLNRQVPRAISSSPVQLGPGHGKERNVALPRAPQTHQALHVESARDTHVNAEGGKRARLKPEVEEDPTKEGHFCNKRKEKRRREGQFHITSSRKLPSSPQCN

SEQ ID NO: 921065 - protein, 125 aa, Homo sapiens
MKYCRLAGLSNRNLFAQSSGVWQSNMECFNEDAAKAPTWDSALQEYGTVIQDAVYALDQGCLCSALPLTRKIHGSMDQEDGSRSDPTYHHCQTHLVPLGTSLSNYGYEWTNITTKEEYGYKNTDL

SEQ ID NO: 921066 - protein, 226 aa, Homo sapiens
FWQLRSHLMAEGSRTQAPGKGPPLSIQFLRAQYEGLKRQQRTQAHLLVLPKGGNTPAPAESMVNAVWINKERRSSLSLEEADSEVEGRLEEAAQGCLQAPKSPWHTHLEMHCLVQTSPQDTSHQVHHRGKLVGSDQRLPPEGDTHLFETNQMTQQGTGIPEAAQLPCQVGNTQTKAVESGLKFSTQCPLSIKNPHRSGKPAYYPFPQRKTPRISQAARNLGLYGSA

SEQ ID NO: 921067 - protein, 139 aa, Homo sapiens
MGRARPRTAVCTGPVAAALGVQRIDRRQTSLAVIARALDREGWGRRGLWAGDSGRPEGAAGTSASRTDCAPLPQGGPASTRSSVTVLLLPGRRLPKVAPESTNGSGGSAAGAGAALPTCSFRLIYFSTTMPGTGTLCQA

SEQ ID NO: 921068 - protein, 107 aa, Homo sapiens
MGGCGLTRIPPKDSLYTPRACEQDLFWRWVFADVVELRQGHAGVGPALIQRLGPLAGEGEPWEGARSCDTQILDFWPSELREHTFLRFEATKFLVICSGQEINTRDK

SEQ ID NO: 921069 - protein, 107 aa, Homo sapiens; identical to SEQ ID NO: 921068

SEQ ID NO: 921070 - protein, 163 aa, Homo sapiens
MQSRGVRAVSSPPSPVGSTGRRSPAHSVTKTTFLIISVISTKTEHASNRDHSSFPVYFYPRLTQRLHPRLSRRPLVPHRSTQGCQPPGPSPAPPAPVPPGGRSEGASAGREAQELSPYPSPTPTPSKTRDQYLTTLTLKIRIVLFQGQTQRLNVKVPGLRGVT

SEQ ID NO: 921071 - protein, 188 aa, Homo sapiens
MEPQARPPPRRSQASRQPQQPGPRHRLRGSPGRRKCGARWGRGRGGALGWRRATAGLSFSVTRECLCVLIRSSSPGRYFRREDSERGRGEASRGPGDPCSPVLRPLASRPWAGAASRGWRRAVGRWGGALAPPRAARRFAEAAAVAFLKGWGLEVSFATRKSPLPPAPRWIILDLSAPPPPLSFALAD

SEQ ID NO: 921072 - protein, 142 aa, Homo sapiens
MLNFNNMVQRWTSLTQRAIQEFIYSSMHKVIYSCIYEALIHSFIHEFLNVFINLFSKLPFKAYHAKTAKLSCVWNEDDSPSSQNASLRGEGKDLRIKIVNIRSLQNMCYKSSVKVQKQDLLLFGAEVWGIGSILVRRRRSLS

SEQ ID NO: 921073 - protein, 158 aa, Homo sapiens
AYEYFKMYRTTLELMWFIKMTFCEEGGLQGGTKQSPKRTLAHEKKHTLKNEVFPVISFQSSFPSGNFCIRCDWTLRGDACYAGPGPPVSWNRWFLHTHLNKAVMVLAHKHGTGEPFYTKRKVFLGCCVKINFYSATGFHFRHSLSSFLDISSIDCCSS

SEQ ID NO: 921074 - protein, 133 aa, Homo sapiens
MLITGQAAPARVRASGPTARKGQEKHGHPCDPHAPLCPAGTPVPRTHPCALHAPLCPAHTPVPCTRPCAPQAKPHFAVFDMLSSQKRFCFETTRARRRRGVRVVGLVVQEAALGVESVDHLEACGVPWEAVLT

SEQ ID NO: 921075 - protein, 137 aa, Homo sapiens
MCCPGWPLLDRWTGSRGSSLDFLYQHVDLFSKIEDSFLNYILKNVFQVAHFLFFSVRNASAEVTKCQKRPVPVGTSLQQGQSCWRNLRSSLFQPTFLGSQQDDHCWICSSALGRGQRARDDHLSKSVPRLWCAPFSS

SEQ ID NO: 921076 - protein, 457 aa, Homo sapiens
MSYKPTTPAPSSTPGSSTPGPGTLVPTGSVPSPSGSGPGATAPFRPLFKDFGPPTIGCVQAMKPPGAQGSQSTYTELLLVTGEMGKVIRPTYAGSKSAAERLKREEALKATEDLREEAAQALAQSDRKCHEFNRQVTVQWKEKDFQGMLKCHKEGEALLILNLVTDLKPQMLLDTVPCIPAYILYMCIRLADQTNDDLKVHSLMTSTTNGIKEVLKKHSDDFEMTSFLLSNTCHLLHCLKRYSGDEGFMTQNTAKHNEHCLKNFDLTEYRQVLSDLSIQIYQHLFKIAEGVLQPMIVSAMLENESIQGLSGVKPTGSQKHSSSMADEDNSYRLEAIIRQMNAFHTVMCDQGLDPEIILQVFKQLFYMINAVTLNDLLLRKDVCSWSTGMQLRYNISQLEEWLWGRNLHQSGVVQTMEPLIQAAQLLQLKKKTQEDAEAICSLCASLSTQQIVKILNL

SEQ ID NO: 921077 - protein, 457 aa, Homo sapiens; identical to SEQ ID NO: 921076

SEQ ID NO: 921078 - protein, 2295 aa, Homo sapiens
YLPASCLYQSEMTEPDPPPGGLRRQQKNCLFHSNITSDLKAFTDKFGFDVLILFSSYLSEEQQPRRQIAVYSENMELCSQICCELEECQNPCLELEPFDCGCDEILVYQQEDPSVTCDQVVLVVKEVINRRCPEMVSNSRTSSTEAVAGSAPLSQGSSGIMELYGSDIEPQPSSVNFIENPPDLNDSNQAQVDANVDLVSPDSGLATIRSSRSSKESSVFLSDDSPVGEGAGPHHTLLPGLDSYSPIPEGAVAEEHAWSGEHGEHFDLFNFDPAPMASGQSQQSSHSADYSPADDFFPNSDLSEGQLPAGPEGLDGMGTNMSNYSSSSLLSGAGKDSLVEHDEEFVQRQDSPRDNSERNLSLTDFVGDESPSPERLKNTGKRIPPTPMNSLVESSPSTEEPASLYTEDMTQKATDTGHMGPPQTHARCSSWWGGLEIDSKNIADAWSSSEQESVFQSPESWKEHKPSSIDRRASDSVFQPKSLEFTKSGPWESEFGQPELGSNDIQDKNEESLPFQNLPMEKSPLPNTSPQGTNHLIEDFASLWHSGRSPTAMPEPWGNPTDDGEPAAVAPFPAWSAFGKEDHDEALKNTWNLHPTSSKTPSVRDPNEWAMAKSGFAFSSSELLDNSPSEINNEAAPEIWGKKNNDSRDHIFAPGNPSSDLDHTWTNSKPPKEDQNGLVDPKTRGKVYEKVDSWNLFEENMKKGGSDVLVPWEDSFLSYKCSDYSASNLGEDSVPSPLDTNYSTSDSYTSPTFAGDEKETEHKPFAKEEGFESKDGNSTAEETDIPPQSLQQSSRNRISSGPGNLDMWASPHTDNSSEINTTHNLDENELKTEHTDGKNISMEDDVGESSQSSYDDPSMMQLYNETNRQLTLLHSSTNSRQTAPDSLDLWNRVILEDTQSTATISDMDNDLDWDDCSGGAAIPSDGQTEGYMAEGSEPETRFTVRQLEPWGLEYQEANQVDWELPASDEHTKDSAPSEHHTLNEKSGQLIANSIWDSVMRDKDMSSFMLPGSSHITDSEQRELPPEIPSHSANVKDTHSPDAPAASGTSESEALISHLDKQDTERETLQSDAASLATRLENPGYFPHPDPWKGHGDGQSESEKEAQGATDRGHLDEEEVIASGVENASGISEKGQSDQELSSLVASEHQEICIKSGKISSLAVTFSPQTEEPEEVLEYEEGSYNLDSRDVQTGMSADNLQPKDTHEKHLMSQRNSGETTETSDGMNFTKYVSVPEKDLEKTEECNFLEPENVGGGPPHRVPRSLDFGDVPIDSDVHVSSTCSEITKNLDVKGSENSLPGAGSSGNFDRDTISSEYTHSSASSPELNDSSVALSSWGQQPSSGYQEENQGNWSEQNHQESELITTDGQVEIVTKVKDLEKNRINEFEKSFDRKTPTFLEIWNDSVDGDSFSSLSSPETGKYSEHSGTHQESNLIASYQEKNEHDISATVQPEDARVISTSSGSDDDSVGGEESIEEEIQVANCHVAEDESRAWDSLNESNKFLVTADPKSENIYDYLDSSEPAENENKSNPFCDNQQSSPDPWTFSPLTETEMQITAVEKEKRSSPETGTTGDVAWQISPKASFPKNEDNSQLEMLGFSADSTEWWKASPQEGRLIESPFERELSDSSGVLEINSSVHQNASPWGVPVQGDIEPVETHYTNPFSDNHQSPFLEGNGKNSHEQLWNIQPRQPDPDADKFSQLVKLDQIKEKDSREQTFVSAAGDELTPETPTQEQCQDTMLPVCDHPDTAFTHAEENSCVTSNVSTNEGQETNQWEQEKSYLGEMTNSSIATENFPAVSSPTQLIMKPGSEWDGSTPSEDSRGTFVPDILHGNFQEGGQLASAAPDLWIDAKKPFSLKADGENPDILTHCEHDSNSQASDSPDICHDSEAKQETEKHLSACMGPEVESSELCLTEPEIDEEPIYEPGREFVPSNAELDSENATVLPPIGYQADIKGSSQPASHKGSPEPSEINGDNSTGLQVSEKGASPDMAPILEPVDRRIPRIENVATSIFVTHQEPTPEGDGSWISDSFSPESQPGARALFDGDPHLSTENPALVPDALLASDTCLDISEAAFDHSFSDASGLNTSTGTIDDMSKLTLSEGHPETPVDGDLGKQDICSSEASWGDFEYDVMGQNIDEDLLREPEHFLYGGDPPLEEDSLKQSLAPYTPPFDLSYLTEPAQSAETIEEAGSPEDESLGCRAAEIVLSALPDRRSEGNQAETKNRLPGSQLAVLHIREDPESVYLPVGAGSNILSPSNVDWEVETDNSDLPAGGDIGPPNGKKHSILPLPRNCCVD

SEQ ID NO: 921079 - protein, 153 aa, Homo sapiens
MGQPYWDTAITLLPLTFRLGPVLQGFHHVLHTSEATPGSLALLWLLLGPARRASQGRGRGRMTLSPPSPEKRGVRAAMSGEGGRCHSCARFLLLQGEPELVFWKMRTDALSARFESWILSLLDSAAACSYLGKEGSFRGPSEMSLPATGAQEG

SEQ ID NO: 921080 - protein, 1334 aa, Homo sapiens
MKCDIYVTWGETLSCTYEGMDSFLLLHSTPAPCTPYSSLTPNRTLTSQASADLHTYYQMYRVLSEMVTVAMERNLLYVYPQRLNFVNKLASARNITIKIQFMCGEDASNAMPVIFGKSSGPEFLQEVYTAVTYHNKSPDFYEEVKIKLPAKLTVNHHLLFTFYHISCQQKQGASVETLLGYSKVPLQNPPIKWAEGHKGVFNIEVQAVSSVHTQDNHLEKFFTLCHSLESQVTFPIRVLDQKISEMALEHELKLSIICLNSSRLEPLVLFLHLVLDKLFQLSVQPMVIAGQTANFSQFAFESVVAIANSLHNSKDLSKDQHGRNCLLASYVHYVFRLPEVQRDVPKSDPRSYHTYGRTSAAAVSSKLLQARVMSSSNPDLAGTHSAADEEVKNIMSSKIADRNCSRMSYYCSGSSDAPSSPAAPRPASKKENEQAEKMNISLAFFLYDLLSLMDRGFVFNLIRHYCSQSGTSSLSFLQNSSSCSSFQDQKIASMFDLTSEYRQQHFLTGLLFTELAAALDAEGEGISKVQRKAVSAIHSLLSSHDLDPRCVKPEVKVKIAALYLPLVGIILDALPQLCDFTVADTRRYRTSGSDEEQEGAGAINQNVALAIAGNNFNLKTSGIVLSSLPYKQYNMLNADTTRNLMICFLWIMKNADQSLIRKWIADLPSTQLNRILDLLFICVLCFEYKGKQSSDKVSTQVLQKSRDVKARLEEALLRGEGARGEMMRRRAPGNDRFPGLNENLRWKKEQTHWRQANEKLDKNIQFIGTVQGFNDAVLPFPQASSALDCKDSLLGGVLRVLVNSLNCDQSTTYLTHCFATLRALIAKNFARVKMQVTMSLASLVGRAPDFNEEHLRRSLRTILAYSEEDTAMQMTPFPTQVEELLCNLNSILYDTVKMREFQEDPEMLMDLMYRIAKSYQASPDLRLTWLQNMAEKHTKKKCYTEAAMCLVHAAALVAEYLSMLEDHSYLPVGSVSFQNISSNVLEESVVSEDTLSPDEDGVCAGQYFTESGLVGLLEQAAELFSTGGLYETVNEVYKLVIPILEAHREFRKLTLTHSKLQRAFDSIVNKDHKRMFGTYFRVGFFGSKFGDLDEQEFVYKEPAITKLPEISHRLEAFYGQCFGAEFVEVIKDSTPVDKTKLDPNKAYIQITFVEPYFDEYEMKDRVTYFEKNFNLRRFMYTTPFTLEGRPRGELHEQYRRNTVLTTMHAFPYIKTRISVIQKEEKFEIKVPALLVPSEGCEERVCSRPLSLTCGQPSSPCVSSHHLPSVFVSRFPLLFVLTPIEVAIEDMKKKTLQLAVAINQEPPDAKMLQMVLQGSVGATVNQRNWISPQKF

SEQ ID NO: 921081 - protein, 1753 aa, Homo sapiens
AWAPISLSSFFNVSTLEREVTDVDSVVGRSSVGERRTLAQSRRLSERALSLEENGVGSNFKTSTLSVSSFFKQEGDRLSDEDLFKFLADYKRSSSLQRRVKSIPGLLRLEISTAPEIINCCLTPEMLPVKPFPENRTRPHKEILEFPTREVYVPHTVYRNLLYVYPQRLNFVNKLASARNITIKIQFMCGEDASNAMPVRRETNICLKSGWAAHPCHFTQVRDSSVYKVRLFQANTAQHVQGLLCPGYQWGNRVIFGKSSGPEFLQEVYTAVTYHNKSPDFYEEVKIKLPAKLTVNHHLLFTFYHISCQQKQGASVETLLGYSWLPILLNERLQTGSYCLPVALEKLPPNYSMHSAEKVPLQNPPIKWAEGHKGVFNIEVQAVSSVHTQDNHLEKFFTLCHSLESQVTFPIRVLDQKISEMALEHELKLSIICLNSSRLEPLVLFLHLVLDKLFQLSVQPMVIAGQTANFSQFAFESVVAIANSLHNSKDLSKDQHGRNCLLASYVHYVFRLPEVQRDVPKSGAPTALLDPRSYHTYGRTSAAAVSSKLLQARVMSSSNPDLAGTHSAADEEVKNIMSSKIADRNCSRMSYYCSGSSDAPSSPAAPRPASKKHFHEELALQMVVSTGMVRETVFKYAWFFFELLVKSMAQHVHNMDKRDSFRRTRFSDRFMDDITTIVNVVTSEIAALLVKPQKENEQAEKMNISLAFFLYDLLSLMDRGFVFNLIRHYCSQLSAKLSNLPTLISMRLEFLRILCSHEHYLNLNLFFMNADTAPTSPCPSISSQNSSSCSSFQDQKIASMFDLTSEYRQQHFLTGLLFTELAAALDAEGEGISKVQRKAVSAIHSLLSSHDLDPRCVKPEVKVKIAALYLPLVGIILDALPQLCDFTVADTRRYRTSGSDEEQEGAGAINQNVALAIAGNNFNLKTSGIVLSSLPYKQYNMLNADTTRNLMICFLWIMKNADQSLIRKWIADLPSTQLNRILDLLFICVLCFEYKGKQSSDKVSTQVLQKSRDVKARLEEALLRGEGARGEMMRRRAPGNDRFPGLNENLRWKKEQTHWRQANEKLDKTKAELDQEALISGNLATEAHLIILDMQENIIQASSALDCKDSLLGGVLRVLVNSLNCDQSTTYLTHCFATLRALIAKFGDLLFEEEVEQCFDLCHQVLHHCSSSMDVTRSQACATLYLLMRFSFGATSNFARVKMQVTMSLASLVGRAPDFNEEHLRRSLRTILAYSEEDTAMQMTPFPTQVEELLCNLNSILYDTVKMREFQEDPEMLMDLMYRIAKSYQASPDLRLTWLQNMAEKHTKKKCYTEAAMCLVHAAALVAEYLSMLEDHSYLPVGSVSFQNISSNVLEESVVSEDTLSPDEDGVCAGQYFTESGLVGLLEQAAELFSTGGLYETVNEVYKLVIPILEAHREFRKLTLTHSKLQRAFDSIVNKDHKRMFGTYFRVGFFGSKFGDLDEQEFVYKEPAITKLPEISHRLEAFYGQCFGAEFVEVIKDSTPVDKTKLDPNKAYIQITFVEPYFDEYEMKDRVTYFEKNFNLRRFMYTTPFTLEGRPRGELHEQYRRNTVLTTMHAFPYIKTRISVIQKEEFVLTPIEVAIEDMKKKTLQLAVAINQEPPDAKMLQMVLQGSVGATVNQGPLEVAQVFLAEIPADPKLYRHHNKLRLCFKEFIMRCGEAVEKNKRLITADQREYQQELKKNYNKLKENLRPMIERKIPELYKPIFRVESQKRDSFHRSSFRKCETQLSQGS

SEQ ID NO: 921082 - protein, 1557 aa, Homo sapiens
MPVRRETNICLKSGWAAHPCHFTQVRDSSVYKVRLFQANTAQHVQGLLCPGYQWGNRVIFGKSSGPEFLQEVYTAVTYHNKSPDFYEEVKIKLPAKLTVNHHLLFTFYHISCQQKQGASVETLLGYSWLPILLNERLQTGSYCLPVALEKLPPNYSMHSAEKVPLQNPPIKWAEGHKGVFNIEVQAVSSVHTQDNHLEKFFTLCHSLESQVTFPIRVLDQKISEMALEHELKLSIICLNSSRLEPLVLFLHLVLDKLFQLSVQPMVIAGQTANFSQFAFESVVAIANSLHNSKDLSKDQHGRNCLLASYVHYVFRLPEVQRDVPKSGAPTALLDPRSYHTYGRTSAAAVSSKLLQARVMSSSNPDLAGTHSAADEEVKNIMSSKIADRNCSRMSYYCSGSSDAPSSPAAPRPASKKHFHEELALQMVVSTGMVRETVFKYAWFFFELLVKSMAQHVHNMDKRDSFRRTRFSDRFMDDITTIVNVVTSEIAALLVKPQKENEQAEKMNISLAFFLYDLLSLMDRGFVFNLIRHYCSQLSAKLSNLPTLISMRLEFLRILCSHEHYLNLNLFFMNADTAPTSPCPSISSQNSSSCSSFQDQKIASMFDLTSEYRQQHFLTGLLFTELAAALDAEGEGISKVQRKAVSAIHSLLSSHDLDPRCVKPEVKVKIAALYLPLVGIILDALPQLCDFTVADTRRYRTSGSDEEQEGAGAINQNVALAIAGNNFNLKTSGIVLSSLPYKQYNMLNADTTRNLMICFLWIMKNADQSLIRKWIADLPSTQLNRILDLLFICVLCFEYKGKQSSDKVSTQVLQKSRDVKARLEEALLRGEGARGEMMRRRAPGNDRFPGLNENLRWKKEQTHWRQANEKLDKTKAELDQEALISGNLATEAHLIILDMQENIIQASSALDCKDSLLGGVLRVLVNSLNCDQSTTYLTHCFATLRALIAKFGDLLFEEEVEQCFDLCHQVLHHCSSSMDVTRSQACATLYLLMRFSFGATSNFARVKMQVTMSLASLVGRAPDFNEEHLRRSLRTILAYSEEDTAMQMTPFPTQVEELLCNLNSILYDTVKMREFQEDPEMLMDLMYRIAKSYQASPDLRLTWLQNMAEKHTKKKCYTEAAMCLVHAAALVAEYLSMLEDHSYLPVGSVSFQNISSNVLEESVVSEDTLSPDEDGVCAGQYFTESGLVGLLEQAAELFSTGGLYETVNEVYKLVIPILEAHREFRKLTLTHSKLQRAFDSIVNKDHKRMFGTYFRVGFFGSKFGDLDEQEFVYKEPAITKLPEISHRLEAFYGQCFGAEFVEVIKDSTPVDKTKLDPNKAYIQITFVEPYFDEYEMKDRVTYFEKNFNLRRFMYTTPFTLEGRPRGELHEQYRRNTVLTTMHAFPYIKTRISVIQKEEFVLTPIEVAIEDMKKKTLQLAVAINQEPPDAKMLQMVLQGSVGATVNQGPLEVAQVFLAEIPADPKLYRHHNKLRLCFKEFIMRCGEAVEKNKRLITADQREYQQELKKNYNKLKENLRPMIERKIPELYKPIFRVESQKRDSFHRSSFRKCETQLSQGS

SEQ ID NO: 921083 - protein, 1401 aa, Homo sapiens
MHSAEKVPLQNPPIKWAEGHKGVFNIEVQAVSSVHTQDNHLEKFFTLCHSLESQVTFPIRVLDQKISEMALEHELKLSIICLNSSRLEPLVLFLHLVLDKLFQLSVQPMVIAGQTANFSQFAFESVVAIANSLHNSKDLSKDQHGRNCLLASYVHYVFRLPEVQRDVPKSGAPTALLDPRSYHTYGRTSAAAVSSKLLQARVMSSSNPDLAGTHSAADEEVKNIMSSKIADRNCSRMSYYCSGSSDAPSSPAAPRPASKKHFHEELALQMVVSTGMVRETVFKYAWFFFELLVKSMAQHVHNMDKRDSFRRTRFSDRFMDDITTIVNVVTSEIAALLVKPQKENEQAEKMNISLAFFLYDLLSLMDRGFVFNLIRHYCSQLSAKLSNLPTLISMRLEFLRILCSHEHYLNLNLFFMNADTAPTSPCPSISSQNSSSCSSFQDQKIASMFDLTSEYRQQHFLTGLLFTELAAALDAEGEGISKVQRKAVSAIHSLLSSHDLDPRCVKPEVKVKIAALYLPLVGIILDALPQLCDFTVADTRRYRTSGSDEEQEGAGAINQNVALAIAGNNFNLKTSGIVLSSLPYKQYNMLNADTTRNLMICFLWIMKNADQSLIRKWIADLPSTQLNRILDLLFICVLCFEYKGKQSSDKVSTQVLQKSRDVKARLEEALLRGEGARGEMMRRRAPGNDRFPGLNENLRWKKEQTHWRQANEKLDKTKAELDQEALISGNLATEAHLIILDMQENIIQASSALDCKDSLLGGVLRVLVNSLNCDQSTTYLTHCFATLRALIAKFGDLLFEEEVEQCFDLCHQVLHHCSSSMDVTRSQACATLYLLMRFSFGATSNFARVKMQVTMSLASLVGRAPDFNEEHLRRSLRTILAYSEEDTAMQMTPFPTQVEELLCNLNSILYDTVKMREFQEDPEMLMDLMYRIAKSYQASPDLRLTWLQNMAEKHTKKKCYTEAAMCLVHAAALVAEYLSMLEDHSYLPVGSVSFQNISSNVLEESVVSEDTLSPDEDGVCAGQYFTESGLVGLLEQAAELFSTGGLYETVNEVYKLVIPILEAHREFRKLTLTHSKLQRAFDSIVNKDHKRMFGTYFRVGFFGSKFGDLDEQEFVYKEPAITKLPEISHRLEAFYGQCFGAEFVEVIKDSTPVDKTKLDPNKAYIQITFVEPYFDEYEMKDRVTYFEKNFNLRRFMYTTPFTLEGRPRGELHEQYRRNTVLTTMHAFPYIKTRISVIQKEEFVLTPIEVAIEDMKKKTLQLAVAINQEPPDAKMLQMVLQGSVGATVNQGPLEVAQVFLAEIPADPKLYRHHNKLRLCFKEFIMRCGEAVEKNKRLITADQREYQQELKKNYNKLKENLRPMIERKIPELYKPIFRVESQKRDSFHRSSFRKCETQLSQGS

SEQ ID NO: 921084 - protein, 1753 aa, Homo sapiens; identical to SEQ ID NO: 921081

SEQ ID NO: 921085 - protein, 1755 aa, Homo sapiens
AWAPISLSSFFNVSTLEREVTDVDSVVGRSSVGERRTLAQSRRLSERALSLEENGVGSNFKTSTLSVSSFFKQEGDRLSDEDLFKFLADYKRSSSLQRRVKSIPGLLRLEISTAPEIINCCLTPEMLPVKPFPENRTRPHKEILEFPTREVYVPHTVYRNLLYVYPQRLNFVNKLASARNITIKIQFMCGEDASNAMPVRRETNICLKSGWAAHPCHFTQVRDSSVYKVRLFQANTAQHVQGLLCPGYQWGNRVIFGKSSGPEFLQEVYTAVTYHNKSPDFYEEVKIKLPAKLTVNHHLLFTFYHISCQQKQGASVETLLGYSWLPILLNERLQTGSYCLPVALEKLPPNYSMHSAEKVPLQNPPIKWAEGHKGVFNIEVQAVSSVHTQDNHLEKFFTLCHSLESQVTFPIRVLDQKISEMALEHELKLSIICLNSSRLEPLVLFLHLVLDKLFQLSVQPMVIAGQTANFSQFAFESVVAIANSLHNSKDLSKDQHGRNCLLASYVHYVFRLPEVQRDVPKSGAPTALLDPRSYHTYGRTSAAAVSSKLLQARVMSSSNPDLAGTHSAADEEVKNIMSSKIADRNCSRMSYYCSGSSDAPSSPAAPRPASKKHFHEELALQMVVSTGMVRETVFKYAWFFFELLVKSMAQHVHNMDKRDSFRRTRFSDRFMDDITTIVNVVTSEIAALLVKPQKENEQAEKMNISLAFFLYDLLSLMDRGFVFNLIRHYCSQLSAKLSNLPTLISMRLEFLRILCSHEHYLNLNLFFMNADTAPTSPCPSISSQNSSSCSSFQDQKIASMFDLTSEYRQQHFLTGLLFTELAAALDAEGEGISKVQRKAVSAIHSLLSSHDLDPRCVKPEVKVKIAALYLPLVGIILDALPQLCDFTVADTRRYRTSGSDEEQEGAGAINQNVALAIAGNNFNLKTSGIVLSSLPYKQYNMLNADTTRNLMICFLWIMKNADQSLIRKWIADLPSTQLNRILDLLFICVLCFEYKGKQSSDKVSTQVLQKSRDVKARLEEALLRGEGARGEMMRRRAPGNDRFPGLNENLRWKKEQTHWRQANEKLDKTKAELDQEALISGNLATEAHLIILDMQENIIQASSALDCKDSLLGGVLRVLVNSLNCDQSTTYLTHCFATLRALIAKFGDLLFEEEVEQCFDLCHQVLHHCSSSMDVTRSQACATLYLLMRFSFGATSNFARVKMQVTMSLASLVGRAPDFNEEHLRRSLRTILAYSEEDTAMQMTPFPTQVEELLCNLNSILYDTVKMREFQEDPEMLMDLMYRIAKSYQASPDLRLTWLQNMAEKHTKKKCYTEAAMCLVHAAALVAEYLSMLEDHSYLPVGSVSFQNISSNVLEESVVSEDTLSPDEDGVCAGQYFTESGLVGLLEQAAELFSTGGLYETVNEVYKLVIPILEAHREFRKLTLTHSKLQRAFDSIVNKDHKRMFGTYFRVGFFGSKFGDLDEQEFVYKEPAITKLPEISHRLEAFYGQCFGAEFVEVIKDSTPVDKTKLDPNKAYIQITFVEPYFDEYEMKDRVTYFEKNFNLRRFMYTTPFTLEGRPRGELHEQYRRNTVLTTMHAFPYIKTRISVIQKEEFVLTPIEVAIEDMKKKTLQLAVAINQEPPDAKMLQMVLQGSVGATVNQGPLEVAQVFLAEIPADPKLYRHHNKLRLCFKEFIMRCGEAVEKNKRLITADQREYQQELKKNYNKLKENLRPMIERKIPELYKPIFRVESQKRTLCCLSAYVYQLQNIFNFDFF

SEQ ID NO: 921086 - protein, 791 aa, Homo sapiens
AWAPISLSSFFNVSTLEREVTDVDSVVGRSSVGERRTLAQSRRLSERALSLEENGVGSNFKTSTLSVSSFFKQEGDRLSDEDLFKFLADYKRSSSLQRRVKSIPGLLRLEISTAPEIINCCLTPEMLPVKPFPENRTRPHKEILEFPTREVYVPHTVYRNLLYVYPQRLNFVNKLASARNITIKIQFMCGEDASNAMPVRRETNICLKSGWAAHPCHFTQVRDSSVYKVRLFQANTAQHVQGLLCPGYQWGNRVIFGKSSGPEFLQEVYTAVTYHNKSPDFYEEVKIKLPAKLTVNHHLLFTFYHISCQQKQGASVETLLGYSWLPILLNERLQTGSYCLPVALEKLPPNYSMHSAEKVPLQNPPIKWAEGHKGVFNIEVQAVSSVHTQDNHLEKFFTLCHSLESQVTFPIRVLDQKISEMALEHELKLSIICLNSSRLEPLVLFLHLVLDKLFQLSVQPMVIAGQTANFSQFAFESVVAIANSLHNSKDLSKDQHGRNCLLASYVHYVFRLPEVQRDVPKSGAPTALLDPRSYHTYGRTSAAAVSSKLLQARVMSSSNPDLAGTHSAADEEVKNIMSSKIADRNCSRMSYYCSGSSDAPSSPAAPRPASKKHFHEELALQMVVSTGMVRETVFKYAWFFFELLVKSMAQHVHNMDKRDSFRRTRFSDRFMDDITTIVNVVTSEIAALLVKPQKENEQAEKMNISLAFFLYDLLSLMDRGFVFNLIRHYCSQLSAKLSNLPTLISMRLEFLRILCSHEHYLNLNLFFMNADTAPTSPCPSISSQVIKELFN

SEQ ID NO: 921087 - protein, 257 aa, Homo sapiens
AWAPISLSSFFNVSTLEREVTDVDSVVGRSSVGERRTLAQSRRLSERALSLEENGVGSNFKTSTLSVSSFFKQEGDRLSDEDLFKFLADYKRSSSLQRRVKSIPGLLRLEISTAPEIINCCLTPEMLPVKPFPENRTRPHKEILEFPTREVYVPHTVYRNLLYVYPQRLNFVNKLASARNITIKIQFMCGEDASNAMPVRRETNICLKSGWAAHPCHFTQVRDSSVYKVRLFQANTAQHVQGLLCPGYQWGNRVSLT

SEQ ID NO: 921088 - protein, 103 aa, Homo sapiens [sequence omitted]

SEQ ID NO: 921089 - protein, 222 aa, Homo sapiens
AWAPISLSSFFNVSTLEREVTDVDSVVGRSSVGERRTLAQSRRLSERALSLEENGVGSNFKTSTLSVSSFFKQEGDRLSDEDLFKFLADYKRSSSLQRRVKSIPGLLRLEISTAPEIINCCLTPEMLPVKPFPENRTRPHKEILEFPTREVYVPHTVYRNLLYVYPQRLNFVNKLASARNITIKIQFMCGEDASNAMPVIFGKSSGPEFLQEVYTAVTYHNK

SEQ ID NO: 921090 - protein, 146 aa, Homo sapiens
NCWFFLPEAFYGQCFGAEFVEVIKDSTPVDKTKLDPNKAYIQITFVEPYFDEYEMKDRVTYFEKNFNLRRFMYTTPFTLEGRPRGELHEQYRRNTVLTTMHAFPYIKTRISVIQKEEFVLTPIEVAIEDMKKKTLQLAVAINQDAS

SEQ ID NO: 921091 - protein, 1667 aa, Homo sapiens
MKCDIYVTWGETLSCTYEGMDSFLLLHSTPAPCTPYSSLTPNRTLTSQASADLHTYYQMYRVLSEMVTVAMERNLLYVYPQRLNFVNKLASARNITIKIQFMCGEDASNAMPVRRETNICLKSGWAAHPCHFTQVRDSSVYKVRLFQANTAQHVQGLLCPGYQWGNRVIFGKSSGPEFLQEVYTAVTYHNKSPDFYEEVKIKLPAKLTVNHHLLFTFYHISCQQKQGASVETLLGYSWLPILLNERLQTGSYCLPVALEKLPPNYSMHSAEKVPLQNPPIKWAEGHKGVFNIEVQAVSSVHTQDNHLEKFFTLCHSLESQVTFPIRVLDQKISEMALEHELKLSIICLNSSRLEPLVLFLHLVLDKLFQLSVQPMVIAGQTANFSQFAFESVVAIANSLHNSKDLSKDQHGRNCLLASYVHYVFRLPEVQRDVPKSGAPTALLDPRSYHTYGRTSAAAVSSKLLQARVMSSSNPDLAGTHSAADEEVKNIMSSKIADRNCSRMSYYCSGSSDAPSSPAAPRPASKKHFHEELALQMVVSTGMVRETVFKYAWFFFELLVKSMAQHVHNMDKRDSFRRTRFSDRFMDDITTIVNVVTSEIAALLVKPQKENEQAEKMNISLAFFLYDLLSLMDRGFVFNLIRHYCSQLSAKLSNLPTLISMRLEFLRILCSHEHYLNLNLFFMNADTAPTSPCPSISSQNSSSCSSFQDQKIASMFDLTSEYRQQHFLTGLLFTELAAALDAEGEGISKVQRKAVSAIHSLLSSHDLDPRCVKPEVKVKIAALYLPLVGIILDALPQLCDFTVADTRRYRTSGSDEEQEGAGAINQNVALAIAGNNFNLKTSGIVLSSLPYKQYNMLNADTTRNLMICFLWIMKNADQSLIRKWIADLPSTQLNRILDLLFICVLCFEYKGKQSSDKVSTQVLQKSRDVKARLEEALLRGEGARGEMMRRRAPGNDRFPGLNENLRWKKEQTHWRQANEKLDKTKAELDQEALISGNLATEAHLIILDMQENIIQASSALDCKDSLLGGVLRVLVNSLNCDQSTTYLTHCFATLRALIAKFGDLLFEEEVEQCFDLCHQVLHHCSSSMDVTRSQACATLYLLMRFSFGATSNFARVKMQVTMSLASLVGRAPDFNEEHLRRSLRTILAYSEEDTAMQMTPFPTQVEELLCNLNSILYDTVKMREFQEDPEMLMDLMYRIAKSYQASPDLRLTWLQNMAEKHTKKKCYTEAAMCLVHAAALVAEYLSMLEDHSYLPVGSVSFQNISSNVLEESVVSEDTLSPDEDGVCAGQYFTESGLVGLLEQAAELFSTGGLYETVNEVYKLVIPILEAHREFRKLTLTHSKLQRAFDSIVNKDHKRMFGTYFRVGFFGSKFGDLDEQEFVYKEPAITKLPEISHRLEAFYGQCFGAEFVEVIKDSTPVDKTKLDPNKAYIQITFVEPYFDEYEMKDRVTYFEKNFNLRRFMYTTPFTLEGRPRGELHEQYRRNTVLTTMHAFPYIKTRISVIQKEEFVLTPIEVAIEDMKKKTLQLAVAINQEPPDAKMLQMVLQGSVGATVNQGPLEVAQVFLAEIPADPKLYRHHNKLRLCFKEFIMRCGEAVEKNKRLITADQREYQQELKKNYNKLKENLRPMIERKIPELYKPIFRVESQKRDSFHRSSFRKCETQLSQGS

SEQ ID NO: 921092 - protein, 1278 aa, Homo sapiens
MRPRVERNSLHNSKDLSKDQHGRNCLLASYVHYVFRLPEVQRDVPKSGAPTALLDPRSYHTYGRTSAAAVSSKLLQARVMSSSNPDLAGTHSAADEEVKNIMSSKIADRNCSRMSYYCSGSSDAPSSPAAPRPASKKHFHEELALQMVVSTGMVRETVFKYAWFFFELLVKSMAQHVHNMDKRDSFRRTRFSDRFMDDITTIVNVVTSEIAALLVKPQKENEQAEKMNISLAFFLYDLLSLMDRGFVFNLIRHYCSQLSAKLSNLPTLISMRLEFLRILCSHEHYLNLNLFFMNADTAPTSPCPSISSQNSSSCSSFQDQKIASMFDLTSEYRQQHFLTGLLFTELAAALDAEGEGISKVQRKAVSAIHSLLSSHDLDPRCVKPEVKVKIAALYLPLVGIILDALPQLCDFTVADTRRYRTSGSDEEQEGAGAINQNVALAIAGNNFNLKTSGIVLSSLPYKQYNMLNADTTRNLMICFLWIMKNADQSLIRKWIADLPSTQLNRILDLLFICVLCFEYKGKQSSDKVSTQVLQKSRDVKARLEEALLRGEGARGEMMRRRAPGNDRFPGLNENLRWKKEQTHWRQANEKLDKTKAELDQEALISGNLATEAHLIILDMQENIIQASSALDCKDSLLGGVLRVLVNSLNCDQSTTYLTHCFATLRALIAKFGDLLFEEEVEQCFDLCHQVLHHCSSSMDVTRSQACATLYLLMRFSFGATSNFARVKMQVTMSLASLVGRAPDFNEEHLRRSLRTILAYSEEDTAMQMTPFPTQVEELLCNLNSILYDTVKMREFQEDPEMLMDLMYRIAKSYQASPDLRLTWLQNMAEKHTKKKCYTEAAMCLVHAAALVAEYLSMLEDHSYLPVGSVSFQNISSNVLEESVVSEDTLSPDEDGVCAGQYFTESGLVGLLEQAAELFSTGGLYETVNEVYKLVIPILEAHREFRKLTLTHSKLQRAFDSIVNKDHKRMFGTYFRVGFFGSKFGDLDEQEFVYKEPAITKLPEISHRLEAFYGQCFGAEFVEVIKDSTPVDKTKLDPNKAYIQITFVEPYFDEYEMKDRVTYFEKNFNLRRFMYTTPFTLEGRPRGELHEQYRRNTVLTTMHAFPYIKTRISVIQKEEFVLTPIEVAIEDMKKKTLQLAVAINQEPPDAKMLQMVLQGSVGATVNQGPLEVAQVFLAEIPADPKLYRHHNKLRLCFKEFIMRCGEAVEKNKRLITADQREYQQELKKNYNKLKENLRPMIERKIPELYKPIFRVESQKRDSFHRSSFRKCETQLSQGS

SEQ ID NO: 921093 - protein, 1753 aa, Homo sapiens; identical to SEQ ID NO: 921081

SEQ ID NO: 921094 - protein, 257 aa, Homo sapiens; identical to SEQ ID NO: 921087

SEQ ID NO: 921095 - protein, 140 aa, Homo sapiens
MYLNQIHLLLKELATIYLHQRCPVFTIKDVNLAAPPSKAWGACPGRRSRPRGPGQPPRCPPLLHLLPSSPGPPAPTLKGRSSHSRLLLLQPRLRHGLVPLLRISYVQVHCRLLHHPLQLPGLATGGSFVDLPEIPMVNHL

SEQ ID NO: 921096 - protein, 140 aa, Homo sapiens; identical to SEQ ID NO: 921095

SEQ ID NO: 921097 - protein, 339 aa, Homo sapiens
MTHLNSLDVQLAQELGDFTDDDLDVVFTTKECRTLQPSLPEEGVELDPHVRDCVQTYIREWLIVNRKNQGSPEICGFKKTGSRKDFHKTLPKQTFESETLECSEPAAQAGPRHLNVLCDVSGKGPVTACDFDLRSLQPDKRLENLLQQVSAEDFEKQNEEARRTNRQAELFALYPSVDEEDAVEIRPVPECPKEHLGNRILVKLLTLKFEIEIEPLFASIALYDVKERKKISENFHCDLNSDQFKGFLRAHTPSVAASSQARSAVFSVTYPSSDIYLVVKAILFAVVRKPDPFSVHQNDWLEINKHQIEKVLQQGEIGDCAEPYTVIKESDGGKQGLTA

SEQ ID NO: 921098 - protein, 182 aa, Homo sapiens
MTHLNSLDVQLAQELGDFTDDDLDVVFTTKECRTLQPSLPEEGVELDPHVRDCVQTYIREWLIVNRKNQGSPEICGFKKTGSRKDFHKTLPKQTFESETLECSEPAAQAGPRHLNVLCDVSGKGPVTACDFDLRSLQPDKRLENLLQQVSAEDFEKQNEEARRTNRQAELFALYPSVDEVRD

SEQ ID NO: 921099 - protein, 187 aa, Homo sapiens [sequence omitted]

SEQ ID NO: 921100 - protein, 436 aa, Homo sapiens
SFHGKIMEHVDWIIREGLYLERRHLGRILNELDGHLKEKYSSQKEHCSPVEISSRPAPVAPVTFRNHCPGLFQPPKHSVFTPQFYDPVEPVDFEGLLMTHLNSLDVQLAQELGDFTDDDLDVVFTTKECRTLQPSLPEEGVELDPHVRDCVQTYIREWLIVNRKNQGSPEICGFKKTGSRKDFHKTLPKQTFESETLECSEPAAQAGPRHLNVLCDVSGKGPVTACDFDLRSLQPDKRLENLLQQVSAEDFEKQNEEARRTNRQAELFALYPSVDEEDAVEIRPVPECPKEHLGNRILVKLLTLKFEIEIEPLFASIALYDVKERKKISENFHCDLNSDQFKGFLRAHTPSVAASSQARSAVFSVTYPSSDIYLVVKAILFAVVRKPDPFSVHQNDWLEINKHQIEKVLQQGEIGDCAEPYTVIKESDGGKQGLTA

SEQ ID NO: 921101 - protein, 191 aa, Homo sapiens
MTHLNSLDVQLAQELGDFTDDDLDVVFTTKECRTLQPSLPEEGVELDPHVRDCVQTYIREWLIVNRKNQGSPEICGFKKTGSRKDFHKTLPKQTFESETLECSEPAAQAGPRHLNVLCDVSGKGPVTACDFDLRSLQPDKRLENLLQQVSAEDFEKQNEEARRTNRRMLWKYVQYQNVPRNTWATEYWSSC

SEQ ID NO: 921102 - protein, 162 aa, Homo sapiens
MIYLSNNSPFHWTLCAIKLSFQLTVNNILLILLLQLCRLSDMVFVPPAINESPKLKSRYIITSKLCDLEQVTSTISGSISSFQTEGAGIWEMTVPVAALQGSSAGSANKQCICKIKRVRVERIMASGSGRQVSRLQQALERRFQPHVPGVFLQGVHLSAAGS

SEQ ID NO: 921103 - protein, 147 aa, Homo sapiens
NCRGWQGGLSYADGPRSDRTPESACPCVCAARRTCFRRCSQDCGTGGPSTLQYRLLPLPLGVRAHHDVARLTAFSEVGVPANRTELSMLEPDPRSPFALRPLRAGLGAVYTRRALTRAGLYRLTVRAAAPRHQSVFVLLIAVSPYPY

SEQ ID NO: 921104 - protein, 785 aa, Homo sapiens
APVFQVEPQDMTVRSGDDVALRCQATGEPTPTIEWLQAGQPLRASRRLRTLPDGSLWLENVETGDAGTYDCVAHNLLGSATARAFLVCASHAIVGSRHFRDPQVFCEFVVPPPHFTGEPQGSWGSMTGVINGRKFGVATLNTSVMQEAHSGVSSIHSSIRHVPANVGPLMRVLVVTIAPIYWALARESGEALNGHSLTGGRFRQESHVEFATGELLTMTQVARGLDPDGLLLLDVVVNGVVPESLADADLQVQDFEEHYVQTGPGQLFVGSTQRFFQGGLPSFLRCNHSIQYNAARGPQPQLVQHLRASAISSAFDPEAEALRFQLATALQAEENEVGCPEGFELDSQGAFCVDRDECSGGPSPCSHACLNAPGRFSCTCPTGFALAWDDRNCRDVDECAWDAHLCREGQRCVNLLGSYRCLPDCGPGFRVADGAGCEDVDECLEGLDDCHYNQLCENTPGGHRCSCPRGYRMQGPSLPCLDVNECLQLPKACAYQCHNLQGSYRCLCPPGQTLLRDGKACTSLERNGQNVTTVSHRGPLLPWLRPWASIPGTSYHAWVSLRPGPMALSSVGRAWCPPGFIRQNGVCTDLDECRVRNLCQHACRNTEGSYQCLCPAGYRLLPSGKNCQDINECEEESIECGPGQMCFNTRGSYQCVDTPCPATYRQGPSPGTCFRRCSQDCGTGGPSTLQYRLLPLPLGVRAHHDVARLTAFSEVGVPANRTELSMLEPDPRSPFALRPLRAGLGAVYTRRALTRAGLYRLTVRAAAPRHQSVFVLLIAVSPYPY

SEQ ID NO: 921105 - protein, 155 aa, Homo sapiens
AGVMKILSFNRSSGDRVECATQKPDFSPFSVKSYLFSYMPGPQRRRDTEPSVSVIIFHENRSSGHMVVAGFCRQGAAATARRGMELDPGPRRTSHDTTPHLGSRVERLLQGIYTLPEPAASYGKGSPVTSHEETRPTASLRWPQGEESGPTWCNE

SEQ ID NO: 921106 - protein, 66 aa, Homo sapiens
ALEALAAAAMGPLALPAWLQPRYRKNAYLFIYYLIQFCGHSWIFTNMTVRFFSFGKGKTPKQFFYF

SEQ ID NO: 921107 - protein, 66 aa, Homo sapiens; identical to SEQ ID NO: 921106

SEQ ID NO: 921108 - protein, 183 aa, Homo sapiens [sequence omitted]

SEQ ID NO: 921109 - protein, 145 aa, Homo sapiens
MMLGRGIRPQLPVGRMIRKEFFTCTMKKEVNNLHLTSKCCINLGYNPVFSSYICIFNPRDTDSMVDTFYAIGLVMRLCQSVSLLELLHIYVGIESNHLLPRFLQILAENDVYELLISFQLTQCILTGIFPLMQRGKVEEGSSSAQ

SEQ ID NO: 921110 - protein, 183 aa, Homo sapiens [sequence omitted]

SEQ ID NO: 921111 - protein, 151 aa, Homo sapiens
QVIKVDIMYLHGEEQSITFALSCQEGMAWTLPETHSTECQASLFKTIMAMKKRKEIKAKADKHPPTFKAYYGQVKISPSHNMRAKKQNNCDFQRAGSQVSGKLPSALKGLHTLAGKEPRSCCREFIYTHLEFPDELTACWPRGLIPGLLAS

SEQ ID NO: 921112 - protein, 190 aa, Homo sapiens
MGAHTRIPTRAHTRAPITALARKRAATSEWDSACGGSARYFTISHLRVRLLPCWLHLQPQRFPAGAPELSRPKELLLRHKAQLHTVLQARGDPGRSRALAVPPPRCSGHRETAGARGRDLEARTTFPSSRCKFSLRPPRRPVTSAGTCCPRHHLPHPPGGHAGKLQLPTLRTGAPRRRADGPSHPAGRQP

SEQ ID NO: 921113 - protein, 230 aa, Homo sapiens
CPRQTLLINRSSSKQLHCSILISTAADWPSLILANDLEPLVWLLEGANRFSFSKAQMPSFPSAPLVDQSHSTQQKAGAASQGGTANASSPDLCNAPHSNRTSSFANRDKASRSPGSQGCWRLAVGLANHSGVVNPGLDSRQAPCGCPRHGSCFILNPLQSLWLLLQIQTGPALPTLYLAAASPHKVELSWTPGPAATLPPFALESQPILRDPLWAATLIRSPRRPIAREH

SEQ ID NO: 921114 - protein, 624 aa, Homo sapiens
MLHTAISCWQPFLGLAVVLIFMGSTIGCPARCECSAQNKSVSCHRRRLIAIPEGIPIETKILDLSKNRLKSVNPEEFISYPLLEEIDLSDNIIANVEPGAFNNLFNLRSLRLKGNRLKLVPLGVFTGLSNLTKLDISENKIVILLDYMFQDLHNLKSLEVGDNDLVYISHRAFSGLLSLEQLTLEKCNLTAVPTEALSHLRSLISLHLKHLNINNMPVYAFKRLFHLKHLEIDYWPLLDMMPANSLYGLNLTSLSVTNTNLSTVPFLAFKHLVYLTHLNLSYNPISTIEAGMFSDLIRLQELHIVGAQLRTIEPHSFQGLRFLRVLNVSQNLLETLEENVFSSPRALEVLSINNNPLACDCRLLWILQRQPTLQFGGQQPMCAGPDTIRERSFKDFHSTALSFYFTCKKPKIREKKLQHLLVDEGQTVQLECSADGDPQPVISWVTPRRRFITTKSNGRATVLGDGTLEIRFAQDQDSGMYVCIASNAAGNDTFTASLTVKGFASDRFLYANRTPMYMTDSNDTISNGTNANTFSLDLKTILVSTAMGCFTFLGVVLFCFPSPFLCGAEGKGKHKNSIDLEYVPQKKQWCCCGRGGSWTQEVQHENDLKAHPSHYCLFVNVGNQ

SEQ ID NO: 921115 - protein, 186 aa, Homo sapiens
MRKTHRGACLVLFIFWVLTECGSTNHPSCAVNQFQVLESSGDFASTFLGNWIGRTTLMFIGNKVKTKVWQDADSECSNTQAFRPCPIPQVVGLQGCVQWDTGMTLTGLIWEVNHGKEGARPECLEEVTPEGINFLGLPGGIYSSGQIMLSGREIQEATGLSTQAEKAGVRCTQTLKFEVFRTEIKH

SEQ ID NO: 921116 - protein, 160 aa, Homo sapiens
SYHTVQMMEDGSTRSLRDFFTVSFSWNSPWSCLLVTSIPGQVSTSLPAFRFTPVLVPQTLTIPISQSCTVAQMGQYVSLGPLHFSLANVPVLVHFIFQTAVQKKEWLWQLYEQRAFRKEEQMQGDKMKKPRHRLMSRTLKPVHGGASIQTQHTGRQSPCS

SEQ ID NO: 921117 - protein, 422 aa, Homo sapiens; identical to SEQ ID NO: 852230

SEQ ID NO: 921118 - protein, 146 aa, Homo sapiens
MERLRGSVSLGYFLLPQDLIQCLVRMKQEGTICEPENRPFPGTESDLILDSPDTQFTGFCYSSPNGLRQGDNLLTSHWVAGGDGVVSRKGKDRVPDSLLMKVLSQRLDQQDCIQKGWVLHGVPRDLDQAHLLNRLGYNPNSTLAFS

SEQ ID NO: 921119 - protein, 225 aa, Homo sapiens
LRLYLGKEEQKWVRMKVELLATERTEPEKQGVMKKKQLYSSATTWEMARLMLLKDNFIFGADGAVTTPSRSRALYCSTKVAWSGTVFGNRSLYGAAKASWAKRLVQTLKGLLGQCFAPSPSPPDPPTITNRNRVITTKADQKSKQRVHVIESGFPGALWLTYKVLEAHHLPICCFPYTNKALQTPDAMGEVGETNGKISKAKASSAAAVSPLEFPAVGLYILLQC

SEQ ID NO: 921120 - protein, 225 aa, Homo sapiens; identical to SEQ ID NO: 921119

SEQ ID NO: 921121 - protein, 158 aa, Homo sapiens
MLKTNYLLSLKDSLKAESSQFSFILLGLLHANSLQPAMLSGFSFLFPFSPFPSLSCCQSLTPLLTSSFLLTCCGIRSEVTKLAIILIYQQNKQTPVNTGNALPFAKYEMSFLNTRMPFSAYVILIHFILSVNFGESSVSLFCSVATFKWPLTLIISAE

SEQ ID NO: 921122 - protein, 232 aa, Homo sapiens
MNVSQQAEHKSSENLQPDNVIEEKNPFSEEKFKLAAEICISNKELNVNPQDNGENVSWHVRSLHSSPSHHSLRGLEENGFAGPRGGSPKPWQLPCGVEPVDAQKSRIEVWEHLLRFQKIYGNTWMPMQKFAAGMGPSLTTSARAVRKGNVGWEPPHRVPTGAPPGGPVGRGPPSSRPQNVRSTNNTMCLGKPQTLNTSPQKQPEGRLYPAKPQGQSCPIPWEPTSCICMIRM

SEQ ID NO: 921123 - protein, 82 aa, Homo sapiens
PRSPAGTPKLLLHREPKQKTDQGGPDDRTPMGPTLGLPQAPLVVLFPPTAWGCTAAAAASSSTATPVPAAAASPPFFKGSAA

SEQ ID NO: 921124 - protein, 347 aa, Homo sapiens
MDRYGSTNPIANCTCKGSRLHFPYENLMPDDLRWNSRIQKPSSTVPSMKKIVFRKAGPWCQKSWGPLAWTTEIGYSQIWKLGSPRSRWCVRSWFLQMFVASLTSGVKLHTLAVSVTQLLKVAHPELLIPLAGFVVSLTSGVKLQTFTVSVTALKGGTSGVVCSSVWVRGLSGFKSAAADLHGWQVPPGPLACPEMLSGSKDLEPKALAVYLMYSTAAKLAPTPQYKVLPTLLSPLHRQRGLPLWPPPPLVHGGDWFLPGHHDVRLKPKGSSVSLWSMLQGLELTCKGSGIPSGPAAVPRTLDMTLSPNKIMCENRAHLKRAATEKHYALTERCKSGLNMPGNLNIEK

SEQ ID NO: 921125 - protein, 179 aa, Homo sapiens
MTEQYPLSKQDELYHRFLECGSKIFIPAVGSQPCFSYLLARKQSWPLGYNKPCVHSCRREQGGGCAWRPGVLPTIMGHLWHHVAGRNSFGVGFCPAVMSLKRKALLNICIALKPVPWRYCDLLPVRGKAECALRLPWEKSPRGLSCGRKEGSIPAHTSFSPDREIAHIFGAYSVLGTVL

SEQ ID NO: 921126 - protein, 146 aa, Homo sapiens
PKWMLLPLRGISFNSHVEKGAKWTLVHCHSHTCTDPRVHTDTDPRPPPCPSTKGCGKPYTQRCLFPVFSVKNKNKTPEKAKLPWVAECQPLSSVVHGGLADYCKKGTGQKDYVVSLRKKFVWGLWAVNALGTIWKTGSCLGIYRAG

SEQ ID NO: 921127 - protein, 197 aa, Homo sapiens
METAVIGVVVVLFVVTVAITCVLCCFSCDSRAQDPQGGPGRSFTVATFRQEASLFTGPVRHAQPVPSAQDFWTFMDARVPRICSPAHKRDKHWQRDGPRRAAGRRHWSSGLQSQLCSSGSYDEGCIQCVDVPSPQAGNPLSQSLIFASFISSVSQVVFFHLLLCVHPFEIISIQEKTRWNPVTGHHGHMQGRRRSPQ

SEQ ID NO: 921128 - protein, 321 aa, Homo sapiens; identical to SEQ ID NO: 887525

SEQ ID NO: 921129 - protein, 168 aa, Homo sapiens
MPQGARPHALLFIPQEEASSALFLPLLTLNSEYWLVQFWNFPLDHWPEDWLDEYWLQQIRLPGFFMAVSASTTAESERSLPRGGTRRSGPGKQMFPLLALSNRDSFMVTLEIWAYRSTAQQSGGENTQHKQREKIVTLFIKSCNFQIGLEKQLSNRGTSSTICIQACS

SEQ ID NO: 921130 - protein, 1385 aa, Homo sapiens
MSVTRLRPGAETAHLNSPQNGNSRHPSGYVPGKVVPLRPPPPPKSQASAKFTSIRREDRATFAFSPEEQQAQRESQKQKRHKNTFICFAITSFSFFIALAIILGISSKYAPDENCPDQNPRLRNWDPGQDSAKQVVIKEGDMLRLTSDATVHSIVIQDGGLLVFGDNKDGSRNITLRTHYILIQDGGALHIGAEKCRYKSKATITLYGKSDEGESMPTFGKKFIGVEAGGTLELHGARKASWTLLARTLNSSGLPFGSYTFEKDFSRGLNVRVIDQDTAKILESERFDTHEYRNESRRLQEFLRFQDPGRIVAIAVGDSAAKSLLQGTIQMIQERLGSELIQGLGYRQAWALVGVIDGGSTSCNESVRNYENHSSGGKALAQREFYTVDGQKFSVTAYSEWIEGVSLSGFRVEVVDGVKLNLLDDVSSWKPGDQIVVASTDYSMYQAEEFTLLPCSECSHFQVKVKETPQFLHMGEIIDGVDMRAEVGILTRNIVIQGEVEDSCYAENQCQFFDYDTFGGHIMIMKNFTSVHLSYVELKHMGQQQMGRYPVHFHLCGDVDYKGGYRHATFVDGLSIHHSFSRCITVHGTNGLLIKDTIGFDTLGHCFFLEDGIEQRNTLFHNLGLLTKPGTLLPTDRNNSMCTTMRDKVFGNYIPVPATDCMAVSTFWIAHPNNNLINNAAAGSQDAGIWYLFHKEPTGESSGLQLLAKPELTPLGIFYNNRVHSNFKAGLFIDKGVKTTNSSAADPREYLCLDNSARFRPHQDANPEKPRVAALIDRLIAFKNNDNGAWVRGGDIIVQNSAFADNGIGLTFASDGSFPSDEGSSQEVSESLFVGESRNYGFQGGQNKYVGTGGIDQKPRTLPRNRTFPIRGFQIYDGPIHLTRSTFKKYVPTPDRYSSAIGFLMKNSWQITPRNNISLVKFGPHVSLNVFFGKPGPWFEDCEMDGDKNSIFHDIDGSVTGYKDAYVGRMDNYLIRHPSCVNVSKWNAVICSGTYAQVYVQTWSTQNLSMTITRDEYPSNPMVLRGINQKAAFPQYQPVVMLEKGYTIHWNGPAPRTTFLYLVNFNKNDWIRVGLCYPSNTSFQVTFGYLQRQNGSLSKIEEYEPVHSLEELQRKQSERKFYFDSSTGLLFLYLKAKSHRHGHSYCSSQGCERVKIQAATDSKDISNCMAKAYPQYYRKPSVVKRMPAMLTGLCQGCGTRQVVFTSDPHKSYLPVQFQSPDKAETQRGDPSVISVNGTDFTFRSAGVLLLVVDPCSVPFRLTEKTVFPLADVSRIEEYLKTGIPPRSIVLLSTRGEIKQLNISHLLVPLGLAKPAHLYDKGSTIFLGFSGNFKPSWTKLFTSPAGQGLGVLEQFIPLQLDEYGCPRATTVRRRDLELLKQASKAH

SEQ ID NO: 921131 - protein, 376 aa, Homo sapiens
MTITRDEYPSNPMVLRGINQKAAFPQYQPVVMLEKGYTIHWNGPAPRTTFLYLVNFNKNDWIRVGLCYPSNTSFQVTFGYLQRQNGSLSKIEEYEPVHSLEELQRKQSERKFYFDSSTGLLFLYLKAKSHRHGHSYCSSQGCERVKIQAATDSKDISNCMAKAYPQYYRKPSVVKRMPAMLTGLCQGCGTRQVVFTSDPHKSYLPVQFQSPDKAETQRGDPSVISVNGTDFTFRSAGVLLLVVDPCSVPFRLTEKTVFPLADVSRIEEYLKTGIPPRSIVLLSTRGEIKQLNISHLLVPLGLAKPAHLYDKGSTIFLGFSGNFKPSWTKLFTSPAGQGLGVLEQFIPLQLDEYGCPRATTVRRRDLELLKQASKAH

SEQ ID NO: 921132 - protein, 584 aa, Homo sapiens
  misc_feature (12)..(12): Xaa can be any naturally occurring amino acid
  misc_feature (31)..(31): Xaa can be any naturally occurring amino acid
NATLYWGLNTLXLRKPPAFGFCLNKSSCRRXPGYATTLGYVSGGQNKYVGTGGIDQKPRTLPRNRTFPIRGFQIYDGPIHLTRSTFKKYVPTPDRYSSAIGFLMKNSWQITPRNNISLVKFGPHVSLNVFFGKPGPWFEDCEMDGDKNSIFHDIDGSVTGYKDAYVGRMDNYLIRHPSCVNVSKWNAVICSGTYAQVYVQTWSTQNLSMTITRDEYPSNPMVLRGINQKAAFPQYQPVVMLEKGYTIHWNGPAPRTTFLYLVNFNKNDWIRVGLCYPSNTSFQVTFGYLQRQNGSLSKIEEYEPVHSLEELQRKQSERKFYFDSSTGLLFLYLKAKSHRHGHSYCSSQGCERVKIQAATDSKDISNCMAKAYPQYYRKPSVVKRMPAMLTGLCQGCGTRQVVFTSDPHKSYLPVQFQSPDKAETQRGDPSVISVNGTDFTFRSAGVLLLVVDPCSVPFRLTEKTVFPLADVSRIEEYLKTGIPPRSIVLLSTRGEIKQLNISHLLVPLGLAKPAHLYDKGSTIFLGFSGNFKPSWTKLFTSPAGQGLGVLEQFIPLQLDEYGCPRATTVRRRDLELLKQASKAH

SEQ ID NO: 921133 - protein, 1077 aa, Homo sapiens
MSVTRLRPGAETAHLNSPQNGNSRHPSGYVPGKVVPLRPPPPPKSQASAKFTSIRREDRATFAFSPEEQQAQRESQKQKRHKNTFICFAITSFSFFIALAIILGISSKYAPDENCPDQNPRLRNWDPGQDSAKQVVIKEGDMLRLTSDATVHSIVIQDGGLLVFGDNKDGSRNITLRTHYILIQDGGALHIGAEKCRYKSKATITLYGKSDEGESMPTFGKKFIGVEAGGTLELHGARKASWTLLARTLNSSGLPFGSYTFEKDFSRGLNVRVIDQDTAKILESERFDTHEYRNESRRLQEFLRFQDPGRIVAIAVGDSAAKSLLQGTIQMIQERLGSELIQGLGYRQAWALVGVIDGGSTSCNESVRNYENHSSGGKALAQREFYTVDGQKFSVTAYSEWIEGVSLSGFRVEVVDGVKLNLLDDVSSWKPGDQIVVASTDYSMYQAEEFTLLPCSECSHFQVKVKETPQFLHMGEIIDGVDMRAEVGILTRNIVIQGEVEDSCYAENQCQFFDYDTFGGHIMIMKNFTSVHLSYVELKHMGQQQMGRYPVHFHLCGDVDYKGGYRHATFVDGLSIHHSFSRCITVHGTNGLLIKDTIGFDTLGHCFFLEDGIEQRNTLFHNLGLLTKPGTLLPTDRNNSMCTTMRDKVFGNYIPVPATDCMAVSTFWIAHPNNNLINNAAAGSQDAGIWYLFHKEPTGESSGLQLLAKPELTPLGIFYNNRVHSNFKAGLFIDKGVKTTNSSAADPREYLCLDNSARFRPHQDANPEKPRVAALIDRLIAFKNNDNGAWVRGGDIIVQNSAFADNGIGLTFASDGSFPSDEGSSQEVSESLFVGESRNYGFQGGQNKYVGTGGIDQKPRTLPRNRTFPIRGFQIYDGPIHLTRSTFKKYVPTPDRYSSAIGFLMKNSWQITPRNNISLVKFGPHVSLNVFFGKPGPWFEDCEMDGDKNSIFHDIDGSVTGYKDAYVGRMDNYLIRHPSCVNVSKWNAVICSGTYAQVYVQTWSTQNLSMTITRDEYPSNPMVLRGINQKAAFPQYQPVVMLEKGYTIHWNGPAPRTTFLYLVNFNKYVSVTVISNS

SEQ ID NO: 921134 - protein, 85 aa, Homo sapiens
KDFSRGLNVRVIDQDTAKILESERFDTHEYRNESRRLQEFLRFQDPGRIVAIAVGDSAAKSLLQGTIQMIQERLGSELIQGLGYR

SEQ ID NO: 921135 - protein, 1385 aa, Homo sapiens; identical to SEQ ID NO: 921130

SEQ ID NO: 921136 - protein, 217 aa, Homo sapiens
MAKAYPQYYRKPSVVKRMPAMLTGLCQGCGTRQVVFTSDPHKSYLPVQFQSPDKAETQRGDPSVISVNGTDFTFRSAGVLLLVVDPCSVPFRLTEKTVFPLADVSRIEEYLKTGIPPRSIVLLSTRGEIKQLNISHLLVPLGLAKPAHLYDKGSTIFLGFSGNFKPSWTKLFTSPAGQGLGVLEQFIPLQLDEYGCPRATTVRRRDLELLKQASKAH

SEQ ID NO: 921137 - protein, 1003 aa, Homo sapiens
MSVTRLRPGAETAHLNSPQNGNSRHPSGYVPGKVVPLRPPPPPKSQASAKFTSIRREDRATFAFSPEEQQAQRESQKQKRHKNTFICFAITSFSFFIALAIILGISSKYAPDENCPDQNPRLRNWDPGQDSAKQVVIKEGDMLRLTSDATVHSIVIQDGGLLVFGDNKDGSRNITLRTHYILIQDGGALHIGAEKCRYKSKATITLYGKSDEGESMPTFGKKFIGVEAGGTLELHGARKASWTLLARTLNSSGLPFGSYTFEKDFSRGLNVRVIDQDTAKILESERFDTHEYRNESRRLQEFLRFQDPGRIVAIAVGDSAAKSLLQGTIQMIQERLGSELIQGLGYRQAWALVGVIDGGSTSCNESVRNYENHSSGGKALAQREFYTVDGQKFSVTAYSEWIEGVSLSGFRVEVVDGVKLNLLDDVSSWKPGDQIVVASTDYSMYQAEEFTLLPCSECSHFQVKVKETPQFLHMGEIIDGVDMRAEVGILTRNIVIQGEVEDSCYAENQCQFFDYDTFGGHIMIMKNFTSVHLSYVELKHMGQQQMGRYPVHFHLCGDVDYKGGYRHATFVDGLSIHHSFSRCITVHGTNGLLIKDTIGFDTLGHCFFLEDGIEQRNTLFHNLGLLTKPGTLLPTDRNNSMCTTMRDKVFGNYIPVPATDCMAVSTFWIAHPNNNLINNAAAGSQDAGIWYLFHKEPTGESSGLQLLAKPELTPLGIFYNNRVHSNFKAGLFIDKGVKTTNSSAADPREYLCLDNSARFRPHQDANPEKPRVAALIDRLIAFKNNDNGAWVRGGDIIVQNSAFADNGIGLTFASDGSFPSDEGSSQEVSESLFVGESRNYGFQGGQNKYVGTGGIDQKPRTLPRNRTFPIRGFQIYDGPIHLTRSTFKKYVPTPDRYSSAIGFLMKNSWQITPRNNISLVKFGPHVSLNVFFGKPGPWFEDCEMDGDKNSIFHDIDGSVTGYKDAYVGRMDNYLIRHPSCVNVSKWNAVICSGTYAQVGLANV

SEQ ID NO: 921138 - protein, 1151 aa, Homo sapiens
MSVTRLRPGAETAHLNSPQNGNSRHPSGYVPGKVVPLRPPPPPKSQASAKFTSIRREDRATFAFSPEEQQAQRESQKQKRHKNTFICFAITSFSFFIALAIILGISSKYAPDENCPDQNPRLRNWDPGQDSAKQVVIKEGDMLRLTSDATVHSIVIQDGGLLVFGDNKDGSRNITLRTHYILIQDGGALHIGAEKCRYKSKATITLYGKSDEGESMPTFGKKFIGVEAGGTLELHGARKASWTLLARTLNSSGLPFGSYTFEKDFSRGLNVRVIDQDTAKILESERFDTHEYRNESRRLQEFLRFQDPGRIVAIAVGDSAAKSLLQGTIQMIQERLGSELIQGLGYRQAWALVGVIDGGSTSCNESVRNYENHSSGGKALAQREFYTVDGQKFSVTAYSEWIEGVSLSGFRVEVVDGVKLNLLDDVSSWKPGDQIVVASTDYSMYQAEEFTLLPCSECSHFQVKVKETPQFLHMGEIIDGVDMRAEVGILTRNIVIQGEVEDSCYAENQCQFFDYDTFGGHIMIMKNFTSVHLSYVELKHMGQQQMGRYPVHFHLCGDVDYKGGYRHATFVDGLSIHHSFSRCITVHGTNGLLIKDTIGFDTLGHCFFLEDGIEQRNTLFHNLGLLTKPGTLLPTDRNNSMCTTMRDKVFGNYIPVPATDCMAVSTFWIAHPNNNLINNAAAGSQDAGIWYLFHKEPTGESSGLQLLAKPELTPLGIFYNNRVHSNFKAGLFIDKGVKTTNSSAADPREYLCLDNSARFRPHQDANPEKPRVAALIDRLIAFKNNDNGAWVRGGDIIVQNSAFADNGIGLTFASDGSFPSDEGSSQEVSESLFVGESRNYGFQGGQNKYVGTGGIDQKPRTLPRNRTFPIRGFQIYDGPIHLTRSTFKKYVPTPDRYSSAIGFLMKNSWQITPRNNISLVKFGPHVSLNVFFGKPGPWFEDCEMDGDKNSIFHDIDGSVTGYKDAYVGRMDNYLIRHPSCVNVSKWNAVICSGTYAQVYVQTWSTQNLSMTITRDEYPSNPMVLRGINQKAAFPQYQPVVMLEKGYTIHWNGPAPRTTFLYLVNFNKNDWIRVGLCYPSNTSFQVTFGYLQRQNGSLSKIEEYEPVHSLEELQRKQSERKFYFDSSTGDGVSLCCPGWSAVHRHSCGTLQP

SEQ ID NO: 921139 - protein, 234 aa, Homo sapiens
MYSELFVEIVDPVDIYLNLLQTIFDFHAIKSLLTGPSQLKIRVDAMHGVMEPYVRKVLCDELGAPANSAINCVPLEDFGGQHPDPNLTYAMTLLEAMKGGEYGFGAAFDADGDRYMILGQNGFFVSPSDSLAIIAANLSCIPYFHQMGVRGFGRSMPTSMALDRRSREGLLEEIRHRTKDQKQVSGPDCDAGIRNDTHTCENTYSSEERVTAVIRTQLMAKGYDLANFTANKMC

SEQ ID NO: 921140 - protein, 108 aa, Homo sapiens
MVTRAGGAAGSQTRVPGSRPEFDRGPCARQRGSETKDRGRRGTKPGGGVRVARAGMGPALLLRAGHPLFLFILKEREKRNCYGKRGGRGTQSISPAPLPPGRIGYAGI

SEQ ID NO: 921141 - protein, 108 aa, Homo sapiens; identical to SEQ ID NO: 921140

SEQ ID NO: 921142 - protein, 1335 aa, Homo sapiens
MLSPTFVLWEVGYPLYIYGSIFIVIVIIWQVKRSHHELSSEPKRSCCRCHQKVRQRARDAASTARRRSREEAEKPQKLLSIIKSQGWLPLERSVRRILCADPCCQICNSVALEIQQLLVGENNQISLTLSGPLQGSSCLEMLSTSSMSLDQSLEFHSWHTRELSLSSVTPTLSQLTDQKSLTQSAAQSTYADGIQDYWADHLQLGQEFQVPDVLRGPNTIASSRIEKPRAPLNQEEMTQSNPSLVQGNQGQHHLNSQVSLLSLNPETLNRMHPMALHMVLPAHLPFLSPEVLRLLEVHVKKWMHFQRWGLPRRVEESLRQLMPNPPLYYQPGNDQPVSFNLKNTPQVSLHRFETISLQTWCSCVAGQPIQTFWVSEWSTMNPEQRHHCQQTPNPMALALPSPALKALSGPHPQSGGQDNDSGSDLQQKYSQLFCGLPSLHSESLVATFMGSQGLPKIENVPKPPLKDPFLFNELSFPQLLPKTSPQSAPPSSPLSPNWMSPSDHQRAQINVPFLTLAEYEALEWHLLQRQLQLQWGWPAALQRSQHTQCLMQHEPCGKAQSPETTTASQTGKSISVLTRELLFFPEHARKLLEFHIQKQLIRHRWGLPQKIQQSIQLLLTSTDQQTVSSSSTALANVSIPQPVALEANGACDVLSPIAAPVSIPRPHLLTQVKAILQSHIDSKCGQIHQGKIPACVHRSWDCRISGVLAVAPFPCIPESQFLELQTASDPDLHHKVMPWMPTALDQQQQALPGTVTEHPKLLRVLSVEAIEKLETTLRHKHLAFLSGLPALYYVALPRALAPAVTSQSVITEMEPSPVEIPAEPLIQMVSFEEQCISLGPCPQGNNESCTDVAKEFQPAVPVKGTMETLPLESQTHPTSPHSLQTHILTKLNFHLRKKVLEIQWGIPIRARKSREQTVAAPENISTQKSLESLNHQGETLLQELPIPPDTLPAPNPEGVHLKEQLANDLKAVQQNQKQSNSKAVPQGSAHSVSKISQPSGDMTEAHMPCVQVEANVNKPSLEEPCGPEPQSPSKSKDPAHVPMLAGNREDPEETKAARDHREGDAGFGRSSTREERRPAEDQRPAGMLPNKTPRGSWRWSRSFHLADPCQHSPQHHPQLKLPQLPPRVPGEKESEKDLQDSQTKLTVILEPATIPENAQTVLPQASQGQPFLSQPTQAKPLQGQTLQGQVLHGLVMPVHAQKKPSLTESSFRNKIKCFLQHINPKTKGKGHEDSMFSAAAKVAKTRKENVAKSLAPAKSPVGRSKTEKPTGCSKAQSRPAQKLVGPAFLDGPQSLDDKLRLHSRQPGSASALGYPRHCPRHCPREACANKPGHPT

SEQ ID NO: 921143 - protein, 287 aa, Homo sapiens
MLATKMMRLAERAAPSPAQPHVLLSNLSLMDICGTSSFVPLMLDNFLETQRTISFPGCALQMYLTLALGSTECLLLAVMAYDRYVAICQPLRYPELMSGQTCMQMAALSWGTGFANSLLQSILVWHLPFCGHVINYFYEILAVLKLACGDISLNALALMVATAVLTLAPLLLICLSYLFILSAILRVPSAAGRCKAFSTCSAHRTVVVVFYGTISFMYFKPKAKDPNVDKTVALFYGVVTPSLNPIIYSLRNAEVKAAVLTLLRGGLLSRKASHCYCCPLPLSAGIG

SEQ ID NO: 921144 - protein, 657 aa, Homo sapiens
MTQGVISSRNTASYSVGSLLCTINVPFLTLAEYEALEWHLLQRQLQLQWGWPAALQRSQHTQCLMQHEPCGKAQSPETTTASQTGKSISVLTRELLFFPEHARKLLEFHIQKQSIRHRWGLPQKIQQSIQLLLTSTDQQTVSSSSTALANVSIPQPVALEANGACDVLSPIAAPVSIPRPHLLTQVKAILQSHIDSKCGQIHQGKIPACVHRSWDCRISGVLAVAPFPCIPESQFLVLQTASDPDLHHKVMPWMPTALDQQQQALPGTVTEHPKLLRVLSVEAIEKLETTLRHKHLAFLSGLPALYYVALPRALAPAVTSQSVITEMEPSNNESCTDVAKEFQPAVPVKGTMETLPLESQTHPTSPHSLQTHILTKLNFHLRKKVLEIQWGIPIRARKSREQTAAAPENISTQKSLESLNHQGETLLQELPIPPDTLPAPNPEGVHLKEQLANDLKAVQQNQKQSNSKAVPQGSAHSVSKISQPSGDMTEAHMPCVQVEASVNNPSLEEPCGPEPQSPSKSKDPAHVPMLAGNREDPEETKAARDYREGDAGFGRSSTREERRPAEDQRPAGMLPNKTPRGSWRWSRSFHLADPCQHSPQHHPQFKLPQLPPRVPGEKESEKDLQDSQTKLTVILEPATIPENTQTVVPQLHRVSLS

SEQ ID NO: 921145 - protein, 257 aa, Homo sapiens
MKRKKANSISALCHVKIQQEGGHLQTKKRALTKTLAPSLWELERGGYRRDGRRQRGQSPPDPLDSLWRSQSGEIPGNVTPCDFETTACGLWPVACGQWKEQLHPPFSVMAPGPAGTREPQEAGAAELGKPRERSYSLPGINFNYGLYIRGLDGGVPEAIGRWNVFKQQPTCPHELTRNYIAMNRGAVKAGLVTARENLLYRQLNDIRISDQDDRRMKKEPPPLPPNMTFGIRARKLSKQIEKFRSNITNSREPTTWI

SEQ ID NO: 921146 - protein, 178 aa, Homo sapiens
TANTAERQMLLPDRSSGSFISDGYLAVLQRFLLTFVQLCPAPIGGVYRGRQASLICGGLHTVPASRPLCLPTQASAMVGALPPASLLPCSSISDHCASNVQGSLGMGPSEPCAGYNLLVCHLLRPLEKRSIRVGVTQFSRCLSQLSLARKGNSLTPCTSQFCYLLQDFGYAHNIQGLK

SEQ ID NO: 921147 - protein, 222 aa, Homo sapiens
MSTLCPPPSPAVAKTEIALSGKSPLLAATFAYWDNILGPRVRHIWAPKTEQVLLSDGEITFLANHTLNGEILRNAESGAIDVKFFVLSEKGVIIVSLIFDGNWNGDRSTYGLSIILPQTELSFYLPLHRVCVDRLTHIIRKGRIWMHKERQENVQKIILEGTERMEDQGQSIIPMLTGEVIPVMELLSSMKSHSVPEEIDIADTVLNDDDIGDSCHEGFLLK

SEQ ID NO: 921148 - protein, 222 aa, Homo sapiens; identical to SEQ ID NO: 921147

SEQ ID NO: 921149 - protein, 1051 aa, Homo sapiens
HLLLWGMVLQRGHIPLGLVCPWLLSTYKTLHNFFSSSELVACLSNWHIPGESDSAEDVVARVPGSQLTLGYMEEHGFTEPILVPKKDGLGLAVPAPTFYVSDVENYVGPERSVDVTDVTKQKDCKMKLKEFVDYYYSTNRKRVLNVTNLEFSDTRMSSFVEPPDIVKKLSWVENYWPDDALLAKPKVTKYCLICVKDSYTDFHIDSGGASAWYHVLKGEKTFYLIRPASANISLYERWRSASNHSEMFFADQVDKCYKCIVKQGQTLFIPSGWIYATLTPVDCLAFAGHFLHSLSVEMQMRAYEVERRLKLGSLTQFPNFETACWYMGKHLLEAFKGSHKSGKQLPPHLVQGAKILNGAFRSWTKKQALAEHEDELPEHFKPSQLIKDLAKEIRLSENASKAVRPEVNTVASSDEVCDGDREKEEPPSPIEATPPQSLLEKVSKKKTPKTVKMPKPSKIPKPPKPPKPPRPPKTLKLKDGGKKKGKKSRESASPTIPNLDLLEAHTKEALTKMEPPKKGKATKSVLSVPNKDVVHMQNDVERLEIREQTKSKSEAKWKYKNSKPDSLLKMEEEQKLEKSPLAGNKDNKFSFSFSNKKLLGSKALRPPTSPGVFGALQNFKEDKPKPVRDEYEYVSDDGELKIDEFPIRRKKNAPKRDLSFLLDKKAVLPTPVTKPKLDSAAYKQSDDSSDEGSLHIDTDTKPGRNARVKKESGSSAAGILDLLQASEEVGALEYNPSSQPPASPSTQEAIQGMLSMANLQASDSCLQTTWGAGQAKGSSLAAHGARKNGGGSGKSAGKRLLKRAAKNSVDLDDYEEEQDHLDACFKDSDYVYPSLESDEDNPIFKSRSKKRKGSDDAPYSPTARVGPSVPRQDRPVREGTRVASIETGLAAAAAKLSQQEEQKSKKKKSAKRKLTPNTTSPSTSTSISAGTTSTSTTPASTTPASTTPASTSTASSQASQEGSSPEPPPESHSSSLADHEYTAAGTFTGAQAGRTSQPMAPGVFLTQRRPSASSPNNNTAAKGKRTKKGMATAKQRLGKILKIHRNGKLLL

SEQ ID NO: 921150 - protein, 515 aa, Homo sapiens
PILEDPLAIHRHPKSKSEAKWKYKNSKPDSLLKMEEEQKLEKSPLAGNKDNKFSFSFSNKKLLGSKALRPPTSPGVFGALQNFKEDKPKPVRDEYEYVSDDGELKIDEFPIRRKKNAPKRDLSFLLDKKAVLPTPVTKPKLDSAAYKQSDDSSDEGSLHIDTDTKPGRNARVKKESGSSAAGILDLLQASEEVGALEYNPSSQPPASPSTQEAIQGMLSMANLQASDSCLQTTWGAGQAKGSSLAAHGARKNGGGSGKSAGKRLLKRAAKNSVDLDDYEEEQDHLDACFKDSDYVYPSLESDEDNPIFKSRSKKRKGSDDAPYSPTARVGPSVPRQDRPVREGTRVASIETGLAAAAAKLSQQEEQKSKKKKSAKRKLTPNTTSPSTSTSISAGTTSTSTTPASTTPASTTPASTSTASSQASQEGSSPEPPPESHSSSLADHEYTAAGTFTGAQAGRTSQPMAPGVFLTQRRPSASSPNNNTAAKGKRTKKGMATAKQRLGKILKIHRNGKLLL

SEQ ID NO: 921151 - protein, 226 aa, Homo sapiens
ACLARGTGWGGGRVAPNQEGWTGCGLQLEGAVPFFSTARVGPSVPRQDRPVREGTRVASIETGLAAAAAKLSQQEEQKSKKKKSAKRKLTPNTTSPSTSTSISAGTTSTSTTPASTTPASTTPASTSTASSQASQEGSSPEPPPESHSSSLADHEYTAAGTFTGAQAGRTSQPMAPGVFLTQRRPSASSPNNNTAAKGKRTKKGMATAKQRLGKILKIHRNGKLLL

SEQ ID NO: 921152 - protein, 1051 aa, Homo sapiens; identical to SEQ ID NO: 921149

SEQ ID NO: 921153 - protein, 1051 aa, Homo sapiens; identical to SEQ ID NO: 921149

SEQ ID NO: 921154 - protein, 1051 aa, Homo sapiens; identical to SEQ ID NO: 921149

SEQ ID NO: 921155 - protein, 1051 aa, Homo sapiens; identical to SEQ ID NO: 921149

SEQ ID NO: 921156 - protein, 1051 aa, Homo sapiens; identical to SEQ ID NO: 921149

SEQ ID NO: 921157 - protein, 1051 aa, Homo sapiens; identical to SEQ ID NO: 921149

SEQ ID NO: 921158 - protein, 331 aa, Homo sapiens
GGNNSCAMCSLANISLCGSCNKGYKLYRGRCEPQNVDSERSEQFISFETDLDFQDLELKYLLQKMDSRLYVHTTFISNEIRLDTFFDPRWRKRMSLTLKSNKNRMDFIHMVIGMSMRICQMRNSSLDPMFFVYVNPFSGSHSEGWNMPFGEFGYPRWEKIRLQNSQCYNWTLLLGNRWKTFFETVHIYLRSRTRLPTLLRNETGQGPVDLSDPSKRQFYIKISDVQVFGYSLRFNADLLRSAVQQVNQSYTQGGQFYSSSSVMLLLLDIRDRINRLAPPVAPGKPQLDLFSCMLKHRLKLTNSEIIRVNHALDLYNTEILKQSDQMTAKLC

SEQ ID NO: 921159 - protein, 331 aa, Homo sapiens; identical to SEQ ID NO: 921158

SEQ ID NO: 921160 - protein, 488 aa, Homo sapiens
RRPHGPSAYQGTRMRIGSGSPEDLAEPSADGGLRVAGAERAASWGHVRGGRRLEEGQAAATTLSVAERRKRARPRAAAAMQRRRRPPPPTSRLPEGCGGGGGGSEEVEVQFSAGRWGSAAAVSAAAAAATRSTEEEEERLEREHFWKIINAFRYYGTSMHERVNRTERQFRSLPANQQKLLPQFLLHLDKIRKCIDHNQEILLTIVNDCIHMFENKEYGEDGNGKIMPASTFDMDKLKSTLKQFVRDWSETGKAERDACYQPIIKEILKNFPKERWDPSKVNILVPGAGLGRLAWEIAMLGYACQGNEWSFFMLFSSNFVLNRCSEINKYKLYPWIHQFSNNRRSADQIRPIFFPDVDPHSLPPGSNFSMTAGDFQEIYSECNTWDCIATCFFIDTAHNVIDYIDTIWKILKPGGIWINLGPLLYHFENLANELSIELSYEDIKNVVLQYGFKVEVEKESVLSTYTVNDLSMMKYYYECVLFVVRKPQ

SEQ ID NO: 921161 - protein, 84 aa, Homo sapiens
YSRIKDSEKTTSMHERVNRTERQFRSLPANQQKLLPQFLLHLDKIRKCIDHNQEILLTIVNDCIHMFENKEYGEDDGYSWATPV

SEQ ID NO: 921162 - protein, 275 aa, Homo sapiens
RRPHGPSAYQGTRMRIGSGSPEDLAEPSADGGLRVAGAERAASWGHVRGGRRLEEGQAAATTLSVAERRKRARPRAAAAMQRRRRPPPPTSRLPEGCGGGGGGSEEVEVQFSAGRWGSAAAVSAAAAAATRSTEEEEERLEREHFWKIINAFRYYGTSMHERVNRTERQFRSLPANQQKLLPQFLLHLDKIRKCIDHNQEILLTIVNDCIHMFENKEYGEDGNGKIMPASTFDMDKLKSTLKQFVRDWSETGKAERDACYQPIIKEILKNFPKER

SEQ ID NO: 921163 - protein, 349 aa, Homo sapiens
YVLRLQLESDRHDLLRSTSMHERVNRTERQFRSLPANQQKLLPQFLLHLDKIRKCIDHNQEILLTIVNDCIHMFENKEYGEDGNGKIMPASTFDMDKLKSTLKQFVRDWSETGKAERDACYQPIIKEILKNFPKERWDPSKVNILVPGAGLGRLAWEIAMLGYACQGNEWSFFMLFSSNFVLNRCSEINKYKLYPWIHQFSNNRRSADQIRPIFFPDVDPHSLPPGSNFSMTAGDFQEIYSECNTWDCIATCFFIDTAHNVIDYIDTIWKILKPGGIWINLGPLLYHFENLANELSIELSYEDIKNVVLQYGFKVEVEKESVLSTYTVNDLSMMKYYYECVLFVVRKPQ

SEQ ID NO: 921164 - protein, 488 aa, Homo sapiens; identical to SEQ ID NO: 921160

SEQ ID NO: 921165 - protein, 488 aa, Homo sapiens; identical to SEQ ID NO: 921160

SEQ ID NO: 921166 - protein, 140 aa, Homo sapiens
MKDSCALRVLNHNLLPRLKVTHIVFWPLLFCARNNEFNFMDKKRPGHSYVSCLSFLISLVLFKLSGFWTVTPKPFSLPIPSPPKDQVFFKGFLILESSMHPKSIVVIMGIVGVEQGTSAEADAGTMLLVQPAEPFTFFSG

SEQ ID NO: 921167 - protein, 140 aa, Homo sapiens; identical to SEQ ID NO: 921166

SEQ ID NO: 921168 - protein, 174 aa, Homo sapiens
PSLSGMPQGCLAHAKPSVLSSFSREAPSPIDHPRAEECGRTAQDWQAAPPVALVWDPLGEASWAPKSSGDLENLYVCSFTPEAIETMNPPGGMNNSRRTTLRAVTLTAKVCSFTPEPVRPRTHQKEETLNTSEHQNEQTPDTLPLRTVTLTTRVRSFILDVSETKNPPIPDTKG

SEQ ID NO: 921169 - protein, 174 aa, Homo sapiens; identical to SEQ ID NO: 921168

SEQ ID NO: 921170 - protein, 159 aa, Homo sapiens
EKLMVSLLYLILPFSGIWALNWSRWRGQELEMKSTSFQHSGLLFSALLECENTIEATRTTAFLWAGNQGLEKGVGSREVTVQGGGVGSCQMNAFPSSIILLSECSIYSYSWFPSLCIAPRPASFSHFIFLSFLEFHFDLLKISGLLLNKDQLIETGGSW

SEQ ID NO: 921171 - protein, 407 aa, Homo sapiens
MFSSCFRTRLPHTWHFSHLAQSKKFAGWKAPQVFDCHFLPNEVKYVHNGCPILDEDTVKLRLYRFTERDTFIETFILWVYLLEPDCNIIHMSNNVLEVPEFNGLSQAIDKNLLRFDYDRMASLECTVSLDTARTRLPAHGQMVLGEPRPEEPRGDQPHSFFPDDSLNPVLYILELRAKLKCPGGSCTPGLKKIGSLKVSCEEFLLMGLRYQHLDPPSPNIDYISIQLDLTDTRSKIVYKSESAWLPVYIRAGIPNQIPKAAFMAVFILEVDQFILTSLTTSVLDCEEDETPKPLLVFNITKAPLQGYVTHLLDHTRPISSFTWKDLSDMQIAYQPPNSSHSERRHDEEQDLEPEKVKSGCLNEMWEPQKCESPQKTESTVCGYNPELMLLYPVTLQCVAPLPLFVYR

SEQ ID NO: 921172 - protein, 387 aa, Homo sapiens
MHFDFVGNLTPQVFDCHFLPNEVKYVHNGCPILDEDTVKLRLYRFTERDTFIETFILWVYLLEPDCNIIHMSNNVLEVPEFNGLSQAIDKNLLRFDYDRMASLECTVSLDTARTRLPAHGQMVLGEPRPEEPRGDQPHSFFPDDSLNPVLYILELRAKLKCPGGSCTPGLKKIGSLKVSCEEFLLMGLRYQHLDPPSPNIDYISIQLDLTDTRSKIVYKSESAWLPVYIRAGIPNQIPKAAFMAVFILEVDQFILTSLTTSVLDCEEDETPKPLLVFNITKAPLQGYVTHLLDHTRPISSFTWKDLSDMQIAYQPPNSSHSERRHDEEQDLEPEKVKSGCLNEMWEPQKCESPQKTESTVCGYNPELMLLYPVTLQCVAPLPLFVYR

SEQ ID NO: 921173 - protein, 162 aa, Homo sapiens [sequence omitted]

SEQ ID NO: 921174 - protein, 133 aa, Homo sapiens
KPFMNNHPHDPITSHQAPPPTLGITIQHEIQLTGCTTPTVNPNVNYGLGAIMMHQCRFIHCGECSNLELAAAYHESSQQLNEESFDNFGTDISISLDGYLNGDLDETVSSPLGPHCSQCPQAAAAESGSLLDM

SEQ ID NO: 921175 - protein, 734 aa, Homo sapiens
GPQWTGRCHTGSYSMLAVVSGFSYGTVYRVHPRDSFSWLGAEDYEASQKWPREAGKGPQSLHHRPPQKITCLMLRRSPANTPTPWRCHEERSVLRELPGKPALCSPPRSPGVHRSCGQAGKERWPQAGSVSVPDAKRSPSPARWSPLWRWVDKAAVRRPGKAEEPPRRGPSCLVASVWTPGHVTASAHSTSNSHSSQVARERGPPTRQELPEPAQWMEQTDLEIKVMPRRSKRQPRTSPRATPAHQPGPGPAEACWELALCCFPRQLLASSRAHWSANCFHLFEMEIFSSLYTYCHLYFSPQKWGFGREGGLCVRFRVREQTHLFPLWVGGVGAGRGLQSEPTESTEAETEACGGGRAWAEAAPAGGAEARVPLHQPLTAASGVGVLGTSAPSHGFGGCQSLPQPPPGSWLSLSPPSPCLCTQVPPTPLSGSLGTPLSFQAQLQLASPLQKPPCQSLLYARVPRGLLQTWPCVWGEHRLQSPAASGHLVPCPSPRVLPPRPGSHRCFVGGVEMKTKVTTRIVPPPGAPACTARTRRWNDLQQRPGPGTAGVVRVCFPEVAGPEPQGLKGSGRATWKKLHPKRDTKDGRSYADDKKEEEEEEERKSRQVDEESRSLPKGQSTEWSGWAEEELGLCPLGSDISVCQAWVEGALETSRSPYSLQGTDQGHLPAALKSQCRCPEPGVEEDAEVHSSSAGGTAERHGHGGSVEWTQQNMRLWSTGRGLNMNSGLPACIT

SEQ ID NO: 921176 - protein, 719 aa, Homo sapiens
NGHPCGWAAGYAMLSLLLILSGLGADLRGPTPLIPSKLRGNHTFLLEKQSFLHPHFLVYLYNKSGTLYADSSFSKGHCFYQGYAADIPKSVVALRTCSGLRGLLQLDNISYGIEPLESSPTYKHVVYRIKNDAIGHSSFQENYPVAQYIDQSYRILVKSDINSGAMLSKRTLKIQIIMDKAMYAYMGSTVAVAVEKVFQIFGLINTMFSQLNMTVMLSSLEIWSDQNKISTSGHADEILQRFLPWKEKFLFQRSHDMTYLLIYRNHSTYVGATYHGMACDPKFATGIALYPKKITAEAFSVVMAQLLGINLGLTYDDIYNCYCPGTTCIMNPDAIRSHGMKFFSSCSMDGFKRIVLQPELKCFQDKTVSKMTYRKSSTCGNGILEPTEQCDCGYKEACTHKKCCNPADCTLVRSAECGTGSCCNNKTCTIHERGHVCRKSVDMCDFPEYCNGTSEFCVPDVKAADLEYCSNKTSYCFKGVCRERDRQCSQLFGKFAKSANLLCTEEVNFQNDKFGNCGSRCDFFDILCGKIVCHWIHSELVPMTDLDIQYTYLRGHVCLSAHARNGSKQSETYTEDITACGQHKVCHSRECRNFSELNITKYTTNCGQNGICNEHFHCQCDPGYAPPDCEPAMSSPGGSINDGFWLTVEKSVPLLPKRRAAPKNNGLLISFYIFSPLLILIAIVSLKWNKMKRFWSKVGTVSSRSISEDSSSNSSQSQS

SEQ ID NO: 921177 - protein, 745 aa, Homo sapiens
NGHPCGWAAGYAMLSLLLILSGLGADLRGPTPLIPSKLRGNHTFLLEKQSFLHPHFLVYLYNKSGTLYADSSFSKGHCFYQGYAADIPKSVVALRTCSGLRGLLQLDNISYGIEPLESSPTYKHVVYRIKNDAIGHSSFQENYPVAQYIDQSYRILVKSDINSGAMLSKRTLKIQIIMDKAMYAYMGSTVAVAVEKVFQIFGLINTMFSQLNMTVMLSSLEIWSDQNKISTSGHADEILQRFLPWKEKFLFQRSHDMTYLLIYRNHSTYVGATYHGMACDPKFATGIALYPKKITAEAFSVVMAQLLGINLGLTYDDIYNCYCPGTTCIMNPDAIRSHGMKFFSSCSMDGFKRIVLQPELKCFQDKTVSKMTYRKSSTCGNGILEPTEQCDCGYKEGQDFTMLARLVSNFGPQVIHLPQPLKACTHKKCCNPADCTLVRSAECGTGSCCNNKTCTIHERGHVCRKSVDMCDFPEYCNGTSEFCVPDVKAADLEYCSNKTSYCFKGVCRERDRQCSQLFGKFAKSANLLCTEEVNFQNDKFGNCGSRCDFFDILCGKIVCHWIHSELVPMTDLDIQYTYLRGHVCLSAHARNGSKQSETYTEDITACGQHKVCHSRECRNFSELNITKYTTNCGQNGICNEHFHCQCDPGYAPPDCEPAMSSPGGSINDGFWLTVEKSVPLLPKRRAAPKNNGLLISFYIFSPLLILIAIVSLKWNKMKRFWSKVGTVSSRSISEDSSSNSSQSQS

SEQ ID NO: 921178 - protein, 553 aa, Homo sapiens
MTVMLSSLEIWSDQNKISTSGHADEILQRFLPWKEKFLFQRSHDMTYLLIYRNHSTYVGATYHGMACDPKFATGIALYPKKITAEAFSVVMAQLLGINLGLTYDDIYNCYCPGTTCIMNPDAIRSHGMKFFSSCSMDGFKRIVLQPELKCFQDKTVSKMTYRKSSTCGNGILEPTEQCDCGYKEGQDFTMLARLVSNFGPQVIHLPQPLKFKMGHKAAETVNINSAFGPGTANKHTHSGGSRFAEDRRNLQRSIVATIGNQIATCKEKWIVCDNWQQPAQCLIHYNFLNPGKTIKSEKYAQQIDELHKTCNACSRRWSTERARVFSMTTPGHTSHNQHFKKEAKGQLGLLLQRVEAPSLGSCHMVWSLQVHRSQELRFGSLCKDFRRCMEMPGCSGRSLLQGQGSHGEPLLGQCGRDMWGWSPHRVPTGTLLSGAESRQPQSSRPQNGRSTNGLHRVTGKAADTQHQPVKAVRKKAVSCNATGVELPKTMGTYLLHQHDTSLIHGVKENHFGSLRFDYSAGFWTCMGLVSPLFWPISPIGMSVFTQCLYPHCI

SEQ ID NO: 921179 - protein, 834 aa, Homo sapiens
NGHPCGWAAGYAMLSLLLILSGLGADLRGPTPLIPSKLRGNHTFLLEKQSFLHPHFLVYLYNKSGTLYADSSFSKGHCFYQGYAADIPKSVVALRTCSGLRGLLQLDNISYGIEPLESSPTYKHVVYRIKNDAIGHSSFQENYPVAQYIDQSYRILVKSDINSGAMLSKRTLKIQIIMDKAMYAYMGSTVAVAVEKVFQIFGLINTMFSQLNMTVMLSSLEIWSDQNKISTSGHADEILQRFLPWKEKFLFQRSHDMTYLLIYRNHSTYVGATYHGMACDPKFATGIALYPKKITAEAFSVVMAQLLGINLGLTYDDIYNCYCPGTTCIMNPDAIRSHGMKFFSSCSMDGFKRIVLQPELKCFQDKTVSKMTYRKSSTCGNGILEPTEQCDCGYKEGQDFTMLARLVSNFGPQVIHLPQPLKVLGLQTHKESLAGRLPICLLGDTLRTCKINTSYLLKSTAYTTPFWKRRNRQEEMGNRPQASLKPKRANDGHSDSWIISFDDMSCIFYKQACTHKKCCNPADCTLVRSAECGTGSCCNNKTCTIHERGHVCRKSVDMCDFPEYCNGTSEFCVPDVKAADLEYCSNKTSYCFKGVCRERDRQCSQLFGKFAKSANLLCTEEVNFQNDKFGNCGSRCDFFDILCGKIVCHWIHSELVPMTDLDIQYTYLRGHVCLSAHARNGSKQSETYTEDITACGQHKVCHSRECRNFSELNITKYTTNCGQNGICNEHFHCQCDPGYAPPDCEPAMSSPGGSINDGFWLTVEKSVPLLPKRRAAPKNNGLLISFYIFSPLLILIAIVSLKWNKMKRFWSKVGTVSSRSISEDSSSNSSQSQS

SEQ ID NO: 921180 - protein, 191 aa, Homo sapiens
FSSFSPKMLNRGVKGESRLSHSAGVRSSPWQALAGLFSTQGETGQVSHAGPGCLFPSSFLLWTVDLILILTELSPWRQGRRSWGIFPAPPSPVGPSSQGFPQPQDLGALNFPPRLSQGQNKVICAHCWHLHFSPKIPAEPSASSLTCLGLQYTLSQAGWPLGELVLTKTPQPACAVDWGAPGLSACSPPMS

SEQ ID NO: 921181 - protein, 162 aa, Homo sapiens
MSKITCRQQALPARAPTVLRSLPPMPPALARTSSPGSRLAGHQEPKYPPRTSHTETRCQAGQRQQGPRSSSGSSSRGCWAGGQGSAHPQKRRRRPTRTSACLVLEAWAVRMPRRSGRGSASPPSAAARSCHIPSRRRLSARGGLEVPLPFIDQESEPWAGRV

SEQ ID NO: 921182 - protein, 162 aa, Homo sapiens; identical to SEQ ID NO: 921181

SEQ ID NO: 921183 - protein, 156 aa, Homo sapiens
MHLMCICFGHPLDSVCQGAFVLVTPAVNLWLLPWSSAHPQKESLYVHWGTASRTFSHPTPPSASKAVFPDSGFHVTQSYSFWNVSPKQPRWTLCGRRGSSECKIRMYAKKQTCQPCALLVSVPETEPATSGQSSAQELGQAANIINNSNSNNNNLY

SEQ ID NO: 921184 - protein, 156 aa, Homo sapiens; identical to SEQ ID NO: 921183

SEQ ID NO: 921185 - protein, 187 aa, Homo sapiens
MLLCGFYIKISPSPKWISKFSKYSLPDSMERLSQNCSIKPKVQLCAMNAHITKKFLRILLCSFYLSIVPFPPQTTKGSKYPLQMIQKERFKTAQTKDCTKREIQDWSLKREVQLCELKANLTKMFLRRLLHSVYMTIFAFPQYASNLHNYPLADSTRRVFQNCSIQINFQLCEINAHITKKFLRMLL

SEQ ID NO: 921186 - protein, 149 aa, Homo sapiens
AAGTTVHFLNPHRGMLLKDFSNAGSWTSDNYEINNLDKMRDKETRGEAPQETDIQMGIKIQTGPFYKVLLTHSWSRAEGVEQKVNYRFAEVSPAQLAGYTKIKTFTGKWSGSFPPRIGLEVEVCGEEDLSSMDQHGECRGVLGVTGNSQ

SEQ ID NO: 921187 - protein, 149 aa, Homo sapiens; identical to SEQ ID NO: 921186

SEQ ID NO: 921188 - protein, 184 aa, Homo sapiens
WRTMVSVVSGRTEASSLPSPTRPSCAGSPKAPVGLPCPHLPLRSWRRGKPHVILTDSCAVFRRSEHPPLTLAFCLSSSFTVGMFFIVETHTGQKPYECNECERAFSLGSTIMKHQGNTTGSGARIEVLFGLQLSLRLPWLESYCNKRTPLSLKEKASLCQWARVEQASHGVYLEDSWVFCMSCP

SEQ ID NO: 921189 - protein, 184 aa, Homo sapiens; identical to SEQ ID NO: 921188

SEQ ID NO: 921190 - protein, 184 aa, Homo sapiens; identical to SEQ ID NO: 921188

SEQ ID NO: 921191 - protein, 82 aa, Homo sapiens
MRPNTDASHKQAGGTSTRAKSAAEDIEKYKPPGHGVGDDPTDAQQHGGTHRPRTDTRRNTRQQEPKNHTPTERITEHTHQKQ

SEQ ID NO: 921192 - protein, 144 aa, Homo sapiens
MDVCTKLDISTVTSWDKGLPGCLRRGKPAWVGDKAGHNSQFDQQGVMPVDSHAAGRSCPWTAPQQGDRACKQPRSRGSCLWTVPHQGFVPVDSPAAGRLCLWMAPQQGIVPVDSPAAGGRACGQLPSRGIMPINSPCTPGWETE

SEQ ID NO: 921193 - protein, 147 aa, Homo sapiens
MQSLHLSCTHSRTRIKSEKNKNTKRIHSIPEVLIMKPYFTAVAKPSLLSHKWLPLEKPENPCCYSSDHRTAVPKLLLYRRSTRRKTELTNKELTSAHFTGDLPRRAVWVLGDRTAPHDLPWPTDADEVRVCYYRAEAFNDLPRKPKP

SEQ ID NO: 921194 - protein, 146 aa, Homo sapiens
AVPVSQVVMAPGGGAHKLVAWHLVHRKSRPWDVVLVGTLRELHRGTSLKGGTHVLAHSTGAESSSKVIDADKAFPGFLLSLENRQTLTRAGPEPSRRAAGREAAYQSSWQARKKLSPARRRSISPRREGGGGGREKVFASALNHGI

SEQ ID NO: 921195 - protein, 591 aa, Homo sapiens
CKAACSPAEGVCVGSTPHVAAAFLPPEPYTCGACGIQFQFYNNLLEHMQSHAADNENNIASNQSRSPPAVVEEKWKPQAQRNSANNTTTSGLTPNSMIPEKERQNIAERLLRVMCADLGALSVVSGKEFLKLAQTLVDSGARYGAFSVTEILGNFNTLALKHLPRMYNQVKVKVTCALGSNACLGIGVTCHSQSVGPDSCYILTAYQAEGNHIKSYVLGVKGADIRDSGDLVHHWVQNVLSEFVMSEIRTVYVTDCRVSTSAFSKAGMCLRCSACALNSVVQSVLSKRTLQARSMHEVIELLNVCEDLAGSTGLAKETFGSLEETSPPPCWNSVTDSLLLVHERYEQICEFYSRAKKMNLIQSLNKHLLSNLAAILTPVKQAVIELSNESQPTLQLVLPTYVRLEKLFTAKANDAGTVSKLCHLFLEALKENFKVHPAHKVAMILDPQQKLRPVPPYQHEEIIGKVCELINEVKESWAEEADFEPAAKKPRSAAVENPAAQEDDRLGKNEVYDYLQEPLFQATPDLFQYWSCVTQKHTKLAKLAFWLLAVPAVGARSGCVNMCEQALLIKRRRLLSPEDMNKLMFLKSNML

SEQ ID NO: 921196 - protein, 133 aa, Homo sapiens
MDVCLSPFQKELEVAENKEIVACILDSYFLLKLLLPCPLCRNDPEKLDAFIMDKALLDYEVSIDADCKLLTVGKPFAIEGYGIGLPPNSPLTANISELISQYKSHGFMDMLHDKWYRVVPCGKRSFAVTELSV

SEQ ID NO: 921197 - protein, 175 aa, Homo sapiens
GVLLKEAVWPRFGKAAMLCWGEPTSLRPFGLFKALWLECLELTEKGMVAHPSLLGFCPVSGRPHLVASGWLEFQASEFYLVRCCGSGARGPTLLRPLGSAPFLGVYMDLPPCLSCRHLFRGSWGWNVKLLSLCACLRSCSAEIPHSCVCQTQGTGGVGPQVDLLICGLQRSMGEA

SEQ ID NO: 921198 - protein, 175 aa, Homo sapiens; identical to SEQ ID NO: 921197

SEQ ID NO: 921199 - protein, 742 aa, Homo sapiens
MAAGVLPQNEQPYSTLVNNSECVANMKVSGADSSCLRLLPPSAMQVQDATRRPSAVRFLSSFLQGRRHSTSDPVLRLQQARRGSGLGSGSATKLLSSSSLQVMVAVSSVSHAEGNPTFPERKRNLERPTPKYTKVGERLRHVIPGHMACSMACGGRACKYENPARWSEQEQAIKGVYSSWVTDNILAMARPSSELLEKYHIIDQFLSHGIKTIINLQRPGEHASCGNPLEQESGFTYLPEAFMEAGIYFYNFGWKDYGVASLTTILDMVKVMTFALQEGKVAIHCHAGLGRTGVLIACYLVFATRMTADQAIIFVRAKRPNSIQTRGQLLCVREFTQFLTPLRNIFSCCDPKAHAVTLPQYLIRQRHLLHGYEARLLKHVPKIIHLVCKLLLDLAENRPVMMKDVSEGPGLSAEIEKTMSEMVTMQLDKELLRHDSDVSNPPNPTAVAADFDNRGMIFSNEQQFDPLWKRRNVECLQPLTHLKRRLSYSDSDLKRAENLLEQGETPQTVPAQILVGHKPRQQKLISHCYIPQSPEPDLHKEALVRSTLSFWSQSKFGGLEGLKDNGSPIFHGRIIPKEAQQSGAFSADVSGSHSPGEPVSPSFANVHKDPNPAHQQVSHCQCKTHGVGSPGSVRQNSRTPRSPLDCGSSPKAQFLVEHETQDSKDLSEAASHSALQSELSAEARRILAAKALANLNESVEKEELKRKVEMWQAFGVLEKLSSYLPYVKFQDSGLIVKSYIGC

SEQ ID NO: 921200 - protein, 849 aa, Homo sapiens
MAAGVLPQNEQPYSTLVNNSECVANMKVSGADSSCLRLLPPSAMQVQDATRRPSAVRFLSSFLQGRRHSTSDPVLRLQQARRGSGLGSGSATKLLSSSSLQVMVAVSSVSHAEGNPTFPERKRNLERPTPKYTKVGERLRHVIPGHMACSMACGGRACKYENPARWSEQEQAIKGVYSSWVTDNILAMARPSSELLEKYHIIDQFLSHGIKTIINLQRPGEHASCGNPLEQESGFTYLPEAFMEAGIYFYNFGWKDYGVASLTTILDMVKVMTFALQEGKVAIHCHAGLGRTGVLIACYLVFATRMTADQAIIFVRAKRPNSIQTRGQLLCVREFTQFLTPLRNIFSCCDPKAHAVTLPQYLIRQRHLLHGYEARLLKHVPKIIHLVCKLLLDLAENRPVMMKDVSEGPGLSAEIEKTMSEMVTMQLDKELLRHDSDVSNPPNPTAVAADFDNRGMIFSNEQQFDPLWKRRNVECLQPLTHLKRRLSYSDSDLKRAENLLEQGETPQTVPAQILVGHKPRQQKLISHCYIPQSPEPDLHKEALVRSTLSFWSQSKFGGLEGLKDNGSPIFHGRIIPKEAQQSGAFSADVSGSHSPGEPVSPSFANVHKDPNPAHQQVSHCQCKTHGVGSPGSVRQNSRTPRSPLDCGSSPKAQFLVEHETQDSKDLSEAASHSALQSELSAEARRILAAKALANLNESVEKEELKRKVEMWQKELNSRDGAWERICGERDPFILCSLMWSWVEQLKEPVITKEDVDMLVDRRADAAEALFLLEKGQHQTILCVLHCIVNLQTIPVDVEEAFLAHAIKAFTKVNFDSENGPTVYNTLKKIFKHTLEEKRKMTKDGPKPGL

SEQ ID NO: 921201 - protein, 742 aa, Homo sapiens; identical to SEQ ID NO: 921199

SEQ ID NO: 921202 - protein, 742 aa, Homo sapiens; identical to SEQ ID NO: 921199

SEQ ID NO: 921203 - protein, 145 aa, Homo sapiens
PASILLQMIRQSWEPLPSAVLAEGIQIVKSLITGSYSSSSILQVLMSHLNFLLQFSLIYSSAEAPKPAMPTVGHFLPTLTSLTFGLFCLNKLWYYGHNFEGCRVLTEKRENRLNINKEELWHWSKKQDKLNLCIYSGHQNGAGTI

SEQ ID NO: 921204 - protein, 781 aa, Homo sapiens
MGRLQLVVLGLTCCWAVASAAKLGAVYTEGGFVEGVNKKLGLLGDSVDIFKGIPFAAPTKALENPQPHPGWQGTLKAKNFKKRCLQATITQDSTYGDEDCLYLNIWVPQGRKQGTCCTGTGDRLETGPGGASGVTSRSPISVSRDLPVMIWIYGGAFLMGSGHGANFLNNYLYDGEEIATRGNVIVVTFNYRVGPLGFLSTGDANLPGNYGLRDQHMAIAWVKRNIAAFGGDPNNITLFGESAGGASVSLQTLSPYNKGLIRRAISQSGVALSPWVIQKNPLFWAKKVAEKVGCPVGDAARMAQCLKVTDPRALTLAYKVPLAGLEYPMLHYVGFVPVIDGDFIPADPINLYANAADIDYIAGTNNMDGHIFASIDMPAINKGNKKVTEEDFYKLVSEFTITKGLRGAKTTFDVYTESWAQDPSQENKKKTVVDFETDVLFLVPTEIALAQHRANAKSAKTYAYLFSHPSRMPVYPKWVGADHADDIQYVFGKPFATPTGYRPQDRTVSKAMIAYWTNFAKTGDPNMGDSAVPTHWEPYTTENSGYLEITKKMGSSSMKRSLRTNFLRYWTLTYLALPTVTDQEATPVPPTGDSEATPVPPTGDSETAPVPPTGDSGAPPVPPTGDSGAPPVPPTGDSGAPPVPPTGDSGAPPVPPTGDSGAPPVPPTGDSGAPPVPPTGDSGAPPVPPTGDSGAPPVPPTGDAGPPPVPPTGDSGAPPVPPTGDSGAPPVTPTGDSETAPVPPTGDSGAPPVPPTGDSEAAPVPPTDDSKEAQMPAVIRF

SEQ ID NO: 921205 - protein, 412 aa, Homo sapiens
PQDGGAAAVSLARAAGRGETYGKKGVCESVLRGLAAAPVKTTFDVYTESWAQDPSQENKKKTVVDFETDVLFLVPTEIALAQHRANAKSAKTYAYLFSHPSRMPVYPKWVGADHADDIQYVFGKPFATPTGYRPQDRTVSKAMIAYWTNFAKTGDPNMGDSAVPTHWEPYTTENSGYLEITKKMGSSSMKRSLRTNFLRYWTLTYLALPTVTDQEATPVPPTGDSEATPVPPTGDSETAPVPPTGDSGAPPVPPTGDSGAPPVPPTGDSGAPPVPPTGDSGAPPVPPTGDSGAPPVPPTGDSGAPPVPPTGDSGAPPVPPTGDSGAPPVPPTGDAGPPPVPPTGDSGAPPVPPTGDSGAPPVTPTGDSETAPVPPTGDSGAPPVPPTGDSEAAPVPPTDDSKEAQMPAVIRF

SEQ ID NO: 921206 - protein, 225 aa, Homo sapiens
FEPKYSHCKMGVIILHPQSCYKMRNEGLLIRGKLTPTVSWRVPDHLYLSSVKKKRQEQPLDRPKPCALASHTQHPHPAAIVTTMPKRKGEGDAKGDKSKVKDEPQRKSTKLSAKPAPPKPEPKLKKAPAKKGEKTSFTSRIQSKLLGLAHEPSIIWHLAAHMLEPHGFAHRPLNTCGLLTPLCLCTSFPQPHARPLHCDPGSVFVLLRGITVPYLKLNQDCSLRL

SEQ ID NO: 921207 - protein, 225 aa, Homo sapiens; identical to SEQ ID NO: 921206

SEQ ID NO: 921208 - protein, 598 aa, Homo sapiens
MTTNPGPPELLAPAVVDRQRDRRGSAGPLGPWHRPQGWQNGSVVGVGSTGPSVSWGTVGWEGSGCPHPVPITAEGCAVAGAATERLGCIRLDGDISPPLNETALCCSGTRTQLGLLAPWPQEKLVQISDTKPCEQTRRQGTVHPARPHHPPYHPPPCHLPLLPDLETSGQAEKEPSTAPQQIPGTHAHFYGDRPSKEREEREGLPLKRTDLALDSGSQPGDVWQGLETSVIVTAGEGVLLAPHPMLHYVGFVPVIDGDFIPADPINLYANAADIDYIAGTNNMDGHIFASIDMPAINKGNKKVTEEDFYKLVSEFTITKGLRGAKTTFDVYTESWAQDPSQENKKKTVVDFETDVLFLVPTEIALAQHRANAKSAKTYAYLFSHPSRMPVYPKWVGADHRDEIQYIFGEPFATPLRATGPKTGQDPNMGHSAVPTHWEPYTTENSGYLEITKKMGSSSMKRSLRTNFLRYWTLTYLALPTVTDQEASDSEAPPYPLRVTLRPVPTLGDTEAAPVSPTDDSEEAQMLQSLVSSAKLQEGVDLSYPYSTRWEDKAQGRQVLWPHAAELSRDEPCPLEKQGTPWLAVTTLATLGFLGGCEL

SEQ ID NO: 921209 - protein, 168 aa, Homo sapiens
MKVPPWTFQTRRGSKDTRPIHRVIRANKSPQQNSMASLHPRAHTGEGLLDGSEVSRTGIRQMKKRKGPDTSEEGTKGEHFERVSGVWDGEKKGEGKREKGGEKRGGGIGLHESQIAVTVIALLGLATYQGYWAPGWCWGMSAESCDVIHLQVFQSWIPAPVLVEVAGE

SEQ ID NO: 921210 - protein, 255 aa, Homo sapiens
AGSAAAAAADSGSHCHAPPTTARRAFPIPFGSKSNMATLKDQLIYNLLKEEQTPQNKITVVGVGAVGMACAISILMKDLADELALVDVIEDKLKGEMMDLQHGSLFLRTPKIVSGKDYNVTANSKLVIITAGARQQEGESRLNLVQRNVNIFKFIIPNVVKYSPNCKLLIVSNPVDILTYVAWKISGFPKNRVIGSGCNLDSARFRYLMGERLGVHPLSCHGWVLGEHGDSSVPVWTWNECCWCLSEDSAPRFRD

SEQ ID NO: 921211 - protein, 255 aa, Homo sapiens; identical to SEQ ID NO: 921210

SEQ ID NO: 921212 - protein, 220 aa, Homo sapiens
MATLKDQLIYNLLKEEQTPQNKITVVGVGAVGMACAISILMKDLADELALVDVIEDKLKGEMMDLQHGSLFLRTPKIVSGKDYNVTANSKLVIITAGARQQEGESRLNLVQRNVNIFKFIIPNVVKYSPNCKLLIVSNPVDILTYVAWKISGFPKNRVIGSGCNLDSARFRYLMGERLGVHPLSCHGWVLGEHGDSSVPVWTWNECCWCLSEDSAPRFRD

SEQ ID NO: 921213 - protein, 255 aa, Homo sapiens
LTPSGANKRGWVNPQEAILTPKRQIFLFHANSKSNMATLKDQLIYNLLKEEQTPQNKITVVGVGAVGMACAISILMKDLADELALVDVIEDKLKGEMMDLQHGSLFLRTPKIVSGKDYNVTANSKLVIITAGARQQEGESRLNLVQRNVNIFKFIIPNVVKYSPNCKLLIVSNPVDILTYVAWKISGFPKNRVIGSGCNLDSARFRYLMGERLGVHPLSCHGWVLGEHGDSSVPVWTWNECCWCLSEDSAPRFRD

SEQ ID NO: 921214 - protein, 77 aa, Homo sapiens
KNRLVEAACNLAEAPPTTARRAFPIPFGSKSNMATLKDQLIYNLLKEEQTPQNKITVVGVGAVGMACAISILMKTIM

SEQ ID NO: 921215 - protein, 221 aa, Homo sapiens
LTPSGANKRGWVNPQEAILTPKRQIFLFHANSKSNMATLKDQLIYNLLKEEQTPQNKITVVGVGAVGMACAISILMKDLADELALVDVIEDKLKGEMMDLQHGSLFLRTPKIVSGKDYNVTANSKLVIITAGARQQEGESRLNLVQRNVNIFKFIIPNVVKYSPNCKLLIVSNPVDILTYVAWKISGFPTDGGKAGSSPIKLSWVGPWGTWRFQCACMDVE

SEQ ID NO: 921216 - protein, 255 aa, Homo sapiens; identical to SEQ ID NO: 921210

SEQ ID NO: 921217 - protein, 261 aa, Homo sapiens
FGYYERGLIGRGRAADSGSHCHAPPTTARRAFPIPFGSKSNMATLKDQLIYNLLKEEQTPQNKITVVGVGAVGMACAISILMKDLADELALVDVIEDKLKGEMMDLQHGSLFLRTPKIVSGKDYNVTANSKLVIITAGARQQEGESRLNLVQRNVNIFKFIIPNVVKYSPNCKLLIVSNPVDILTYVAWKISGFPKNRVIGSGCNLDSARFRYLMGERLGVHPLSCHGWVLGEHGDSSVPVWTWNECCWCLSEDSAPRFRD

SEQ ID NO: 921218 - protein, 237 aa, Homo sapiens
DGVGRPTRPPRVRSKSNMATLKDQLIYNLLKEEQTPQNKITVVGVGAVGMACAISILMKDLADELALVDVIEDKLKGEMMDLQHGSLFLRTPKIVSGKDYNVTANSKLVIITAGARQQEGESRLNLVQRNVNIFKFIIPNVVKYSPNCKLLIVSNPVDILTYVAWKISGFPKNRVIGSGCNLDSARFRYLMGERLGVHPLSCHGWVLGEHGDSSVPVWTWNECCWCLSEDSAPRFRD

SEQ ID NO: 921219 - protein, 267 aa, Homo sapiens
AGSAAAAAADSGSHCHAPPTTARRAFPIPFGSKSNMATLKDQLIYNLLKEEQTPQNKITVVGVGAVGMACAISILMKDLADELALVDVIEDKLKGEMMDLQHGSLFLRTPKIVSGKDYNVTANSKLVIITAGARQQEGESRLNLVQRNVNIFKFIIPNVVKYSPNCKLLIVSNPVDILTYVAWKISGFPKNRVIGSGCNLDSARFRYLMGERLGVHPLSCHGWVLGEHGDSSVPVWTWNECCWCLSEEGRLKKSADTLWGIQKELQF

SEQ ID NO: 921220 - protein, 150 aa, Homo sapiens
LCARTWLRQEAGQGSGLLMELASWKSGKGKANMSAFGLRGQKGESLSDQSSWETEAEDCPHSVRSRGMGGSSGHSRDQAGSGRRPRGTPSPAPLVLGWLAYRGRLAKASGKGTFSAGCWIPNYKRQSTLCKDEYRFVTAGGNTPTALKGV

SEQ ID NO: 921221 - protein, 2499 aa, Homo sapiens
MEVLQCDGCDFRAPSYEDLKAHIQDVHTAFLQPTDVAEDNVNELRCGSVNASNQTEVEFSSIKDEFAIAEDLSGQNATSLGTGGYYGHSPGYYGQHIAANPKPTNKFFQCKFCVRYFRSKNLLIEHTRKVHGAQAEGSSSGPPVPGSLNYNIMMHEGFGKVFSCQFCTYKSPRRARIIKHQKMYHKNNLKETTAPPPAPAPMPDPVVPPVSLQDPCKELPAEVVERSILESMVKPLTKSRGNFCCEWCSYQTPRRERWCDHMMKKHRSMVKILSSLRQQQEGTNLPDVPNKSAPSPTSNSTYLTMNAASREIPNTTVSNFRGSMGNSIMRPNSSASKFSPMSYPQMKPKSPHNSGLVNLTERSRYGMTDMTNSSADLETNSMLNDSSSDEELNEIDSENGLSAMDHQTSGLSAEQLMGSDGNKLLETKGIPFRRFMNRFQCPFCPFLTMHRRSISRHIENIHLSGKTAVYKCDECPFTCKSSLKLGAHKQCHTGTTSDWDAVNSQSESISSSLNEGVVSYESSSINGRKSGVMLDPLQQQQPPQPPPPPPPPPPSQPQPLQQPQPPQLQPPHQVPPQPQTQPPPTQQPQPPTQAAPLHPYKCTMCNYSTTTLKGLRVHQQHKHSFCDNLPKFEGQPSSLPLENETDSHPSSSNTVKKSQTSILGLSSKNNFVAKASRKLANDFPLDLSPVKKRTRIDEIASNLQSKINQTKQQEDAVINVEDDEEEEEDNEVEIEVELDREEEPTEPIIEVPTSFSAQQIWHNSENTDFGDSGRLYYCKHCDFNNKSARSVSTHYQRMHPYIKFSFRYILDPNDHSAVYRCLECYIDYTNFEDLQQHYGEHHPEAMNVLNFDHSDLIYRCRFCSYTSPNVRSLMPHYQRMHPTVKINNAMIFSSYVVEQQEGLNTESQTLREILNSAPKNMATSTPVARGGGLPATFNKNTPKTFTPECENQKDPLVNTVVVYDCDVCSFASPNMHSVLVHYQKKHPEEKASYFRIQKTMRMVSVDRGSALSQLSFEVGAPMSPKMSNMGSPPPPQPPPPDLSTELYYCKHCSYSNRSVVGVLVHYQKRHPEIKVTAKYIRQAPPTAAMMRGVEGPQGSPRPPAPIQQLNRSSSERDGPPVENEMFFCQHCDYGNRTVKGVLIHYQKKHRDFKANADVIRQHTATIRSLCDRNQKKPASCVLVSPSNLERDKTKLRALKCRQCSYTSPYFYALRKHIKKDHPALKATVTSIMRWAFLDGLIEAGYHCEWCIYSHTEPNGLLLHYQRRHPEHYVDYTYMATKLWAGPDPSPPSLTMPAEAKTYRCRDCVFEAVSIWDITNHYQAFHPWAMNGDESVLLDIIKEKDAVEKPILSSEELAGPVNCENSIPTPFPEQEAECPEDARLSPEKSLQLASANPAISSTPYQCTVCQSEYNNLHGLLTHYGKKHPGMKVKAADFAQDIDINPGAVYKCRHCPYINTRIHGVLTHYQKRHPSIKVTAEDFVHDVEQSADISQNDVEETSRIFKQGYGAYRCKLCPYTHGTLEKLKIHYEKYHNQPEFDVFSQSPPKLPVPLEPEMTTEVSPSQVSITEEEVGEEPVSTSHFSTSHLVSHTVFRCQLCKYFCSTRKGIARHYRIKHNNVRAQPEGKNNLFKCALCAYTNPIRKGLAAHYQKRHDIDAYYTHCLAASRTISDKPNKVIIPSPPKDDSPQLSEELRRAVEKKKCSLCSFQSFSKKGIVSHYMKRHPGVFPKKQHASKLGGYFTAVYADEHEKPTLMEEEERGNFEKAEVEGEAQEIEWLPFRCIKCFKLSFSTAELLCMHYTDHHSRDLKRDFIILGNGPRLQNSTYQCKHCDSKLQSTAELTSHLNIHNEEFQKRAKRQERRKQLLSKQKYADGAFADFKQERPFGHLEEVPKIKERKVVGYKCKFCVEVHPTLRAICNHLRKHVQYGNVPAVSAAVKEADDPAHLFLDGLEAAKDASGALVGRVDGEHCLLDGMLEDETRPGGYHCSQCDRVLMSMQGLRSHERSHLALAMFTREDKYSCQYCSFVSAFRHNLDRHMQTHHGHHKPFRCKLCSFKSSYNSRLKTHILKAHAGEHAYKCSWCSFSTMTISQLKEHSLKVHGKALTLPRPRIVSLLSSHSHHSSQKATPAEEVEDSNDSSYSEPPDVQQQLNHYQSAALARNNSRVSPVPLSGAAAGTEQKTEAVLHCEFCEFSSGYIQSIRRHYRDKHGGKKLFKCKDCSFYTGFKSAFTMHVEAGHSAVPEEGPKDLRCPLCLYHTKYKRNMIDHIVLHREERVVPIEVCRSKLSKYLQGVVFRCDKCTFTCSSDESLQQHIEKHNELKPYKCQLCYYETKHTEELDSHLRDEHKVSRNFELVGRVNLDQLEQMKEKMESSSSDDEDKEEEMNSKAEDRELMRFSDHGAALNTEKRFPCEFCGRAFSQGSEWERHVLRHGMALNDTKQVSREEIHPKEIMENSVKMPSIEEKEDDEAIGIDFSLKNETVAICVVTADKSLLENAEAKKE

SEQ ID NO: 921222 - protein, 619 aa, Homo sapiens
MRPFGHLEEVPKIKERKVVGYKCKFCVEVHPTLRAICNHLRKHVQYGNVPAVSAAVKEADDPAHLFLDGLEAAKDASGALVGRVDGEHCLLDGMLEDETRPGGYHCSQCDRVLMSMQGLRSHERSHLALAMFTREDKYSCQYCSFVSAFRHNLDRHMQTHHGHHKPFRCKLCSFKSSYNSRLKTHILKAHAGEHAYKCSWCSFSTMTISQLKEHSLKVHGKALTLPRPRIVSLLSSHSHHSSQKATPAEEVEDSNDSSYSEPPDVQQQLNHYQSAALARNNSRVSPVPLSGAAAGTEQKTEAVLHCEFCEFSSGYIQSIRRHYRDKHGGKKLFKCKDCSFYTGFKSAFTMHVEAGHSAVPEEGPKDLRCPLCLYHTKYKRNMIDHIVLHREERVVPIEVCRSKLSKYLQGVVFRCDKCTFTCSSDESLQQHIEKHNELKPYKCQLCYYETKHTEELDSHLRDEHKVSRNFELVGRVNLDQLEQMKEKMESSSSDDEDKEEEMNSKAEDRELMRFSDHGAALNTEKRFPCEFCGRAFSQGSEWERHVLRHGMALNDTKQVSREEIHPKEIMENSVKMPSIEEKEDDEAIGIDFSLKNETVAICVVTADKSLLENAEAKKE

SEQ ID NO: 921223 - protein, 463 aa, Homo sapiens
MQTHHGHHKPFRCKLCSFKSSYNSRLKTHILKAHAGEHAYKCSWCSFSTMTISQLKEHSLKVHGKALTLPRPRIVSLLSSHSHHSSQKATPAEEVEDSNDSSYSEPPDVQQQLNHYQSAALARNNSRVSPVPLSGAAAGTEQKTEAVLHCEFCEFSSGYIQSIRRHYRDKHGGKKLFKCKDCSFYTGFKSAFTMHVEAGHSAVPEEGPKDLRCPLCLYHTKYKRNMIDHIVLHREERVVPIEVCRSKLSKYLQGVVFRCDKCTFTCSSDESLQQHIEKHNELKPYKCQLCYYETKHTEELDSHLRDEHKVSRNFELVGRVNLDQLEQMKEKMESSSSDDEDKEEEMNSKAEDRELMRFSDHGAALNTEKRFPCEFCGRAFSQGSEWERHVLRHGMALNDTKQVSREEIHPKEIMENSVKMPSIEEKEDDEAIGIDFSLKNETVAICVVTADKSLLENAEAKKE

SEQ ID NO: 921224 - protein, 423 aa, Homo sapiens
TGRLYSTGRLYSTGRLYSTGRLYSTGRLYSTGRLYSTGRLYSHHSSQKATPAEEVEDSNDSSYSEPPDVQQQLNHYQSAALARNNSRVSPVPLSGAAAGTEQKTEAVLHCEFCEFSSGYIQSIRRHYRDKHGGKKLFKCKDCSFYTGFKSAFTMHVEAGHSAVPEEGPKDLRCPLCLYHTKYKRNMIDHIVLHREERVVPIEVCRSKLSKYLQGVVFRCDKCTFTCSSDESLQQHIEKHNELKPYKCQLCYYETKHTEELDSHLRDEHKVSRNFELVGRVNLDQLEQMKEKMESSSSDDEDKEEEMNSKAEDRELMRFSDHGAALNTEKRFPCEFCGRAFSQGSEWERHVLRHGMALNDTKQVSREEIHPKEIMENSVKMPSIEEKEDDEAIGIDFSLKNETVAICVVTADKSLLENAEAKKE

SEQ ID NO: 921225 - protein, 271 aa, Homo sapiens
VTERIPLDSSVPEEGPKDLRCPLCLYHTKYKRNMIDHIVLHREERVVPIEVCRSKLSKYLQGVVFRCDKCTFTCSSDESLQQHIEKHNELKPYKCQLCYYETKHTEELDSHLRDEHKVSRNFELVGRVNLDQLEQMKEKMESSSSDDEDKEEEMNSKAEDRELMRFSDHGAALNTEKRFPCEFCGRAFSQGSEWERHVLRHGMALNDTKQVSREEIHPKEIMENSVKMPSIEEKEDDEAIGIDFSLKNETVAICVVTADKSLLENAEAKKE

SEQ ID NO: 921226 - protein, 2354 aa, Homo sapiens
MEVLQCDGCDFRAPSYEDLKAHIQDVHTAFLQPTDVAEDNVNELRCGSVNASNQTEVEFSSIKDEFAIAEDLSGQNATSLGTGGYYGHSPGYYGQHIAANPKPTNKFFQCKFCVRYFRSKNLLIEHTRKVHGAQAEGSSSGPPVPGSLNYNIMMHEGFGKVFSCQFCTYKSPRRARIIKHQKMYHKNNLKETTAPPPAPAPMPDPVVPPVSLQDPCKELPAEVVERSILESMVKPLTKSRGNFCCEWCSYQTPRRERWCDHMMKKHRSMVKILSSLRQQQEGTNLPDVPNKSAPSPTSNSTYLTMNAASREIPNTTVSNFRGSMGNSIMRPNSSASKFSPMSYPQMKPKSPHNSGLVNLTERSRYGMTDMTNSSADLETNSMLNDSSSDEELNEIDSENGLSAMDHQTSGLSAEQLMGSDGNKLLETKGIPFRRFMNRFQCPFCPFLTMHRRSISRHIENIHLSGKTAVYKCDECPFTCKSSLKLGAHKQCHTGTTSDWDAVNSQSESISSSLNEGVVSYESSSINGRKSGVMLDPLQQQQPPQPPPPPPPPPPSQPQPLQQPQPPQLQPPHQVPPQPQTQPPPTQQPQPPTQAAPLHPYKCTMCNYSTTTLKGLRVHQQHKHSFCDNLPKFEGQPSSLPLENETDSHPSSSNTVKKSQTSILGLSSKNNFVAKASRKLANDFPLDLSPVKKRTRIDEIASNLQSKINQTKQQEDAVINVEDDEEEEEDNEVEIEVELDREEEPTEPIIEVPTSFSAQQIWHNSENTDFGDSGRLYYCKHCDFNNKSARSVSTHYQRMHPYIKFSFRYILDPNDHSAVYRCLECYIDYTNFEDLQQHYGEHHPEAMNVLNFDHSDLIYRCRFCSYTSPNVRSLMPHYQRMHPTVKINNAMIFSSYVVEQQEGLNTESQTLREILNSAPKNMATSTPVARGGGLPATFNKNTPKTFTPECENQKDPLVNTVVVYDCDVCSFASPNMHSVLVHYQKKHPEEKASYFRIQKTMRMVSVDRGSALSQLSFEVGAPMSPKMSNMGSPPPPQPPPPDLSTELYYCKHCSYSNRSVVGVLVHYQKRHPEIKVTAKYIRQAPPTAAMMRGVEGPQGSPRPPAPIQQLNRSSSERDGPPVENEMFFCQHCDYGNRTVKGVLIHYQKKHRDFKANADVIRQHTATIRSLCDRNQKKPASCVLVSPSNLERDKTKLRALKCRQCSYTSPYFYALRKHIKKDHPALKATVTSIMRWAFLDGLIEAGYHCEWCIYSHTEPNGLLLHYQRRHPEHYVDYTYMATKLWAGPDPSPPSLTMPAEAKTYRCRDCVFEAVSIWDITNHYQAFHPWAMNGDESVLLDIIKEKDAVEKPILSSEELAGPVNCENSIPTPFPEQEAECPEDARLSPEKSLQLASANPAISSTPYQCTVCQSEYNNLHGLLTHYGKKHPGMKVKAADFAQDIDINPGAVYKCRHCPYINTRIHGVLTHYQKRHPSIKVTAEDFVHDVEQSADISQNDVEETSRIFKQGYGAYRCKLCPYTHGTLEKLKIHYEKYHNQPEFDVFSQSPPKLPVPLEPEMTTEVSPSQVSITEEEVGEEPVSTSHFSTSHLVSHTVFRCQLCKYFCSTRKGIARHYRIKHNNVRAQPEGKNNLFKCALCAYTNPIRKGLAAHYQKRHDIDAYYTHCLAASRTISDKPNKVIIPSPPKDDSPQLSEELRRAVEKKKCSLCSFQSFSKKGIVSHYMKRHPGVFPKKQHASKLGGYFTAVYADEHEKPTLMEEEERGNFEKAEVEGEAQEIEWLPFRCIKCFKLSFSTAELLCMHYTDHHSRDLKRDFIILGNGPRLQNSTYQCKHCDSKLQSTAELTSHLNIHNEEFQKRAKRQERRKQLLSKQKYADGAFADFKQERPFGHLEEVPKIKERKVVGYKCKFCVEVHPTLRAICNHLRKHVQYGNVPAVSAAVKEADDPAHLFLDGLEAAKDASGALVGRVDGEHCLLDGMLEDETRPGGYHCSQCDRVLMSMQGLRSHERSHLALAMFTREDKYSCQYCSFVSAFRHNLDRHMQTHHGHHKPFRCKLCSFKSSYNSRLKTHILKAHAGEHAYKCSWCSFSTMTISQLKEHSLKVHGKALTLPRPRIVSLLSSHSHHSSQKATPAEEVEDSNDSSYSEPPDVQQQLNHYQSAALARNNSRVSPVPLSGAAAGTEQKTEAVLHCEFCEFSSGYIQSIRRHYRDKHGGKKLFKCKDCSFYTGFKSAFTMHVEAGHSAVPEEGPKDLRCPLCLYHTKYKRNMIDHIVLHREERVVPIEVCRSKLSKYLQGVVFRCDKCTFTCSSDESLQQHIEKHNELKPYKCQLCYYETKHTEELDSHLRDEHKMICIIMGKA

SEQ ID NO: 921227 - protein, 2429 aa, Homo sapiens
MEVLQCDGCDFRAPSYEDLKAHIQDVHTAFLQPTDVAEDNVNELRCGSVNASNQTEVEFSSIKDEFAIAEDLSGQNATSLGTGGYYGHSPGYYGQHIAANPKPTNKFFQCKFCVRYFRSKNLLIEHTRKVHGAQAEGSSSGPPVPGSLNYNIMMHEGFGKVFSCQFCTYKSPRRARIIKHQKMYHKNNLKETTAPPPAPAPMPDPVVPPVSLQDPCKELPAEVVERSILESMVKPLTKSRGNFCCEWCSYQTPRRERWCDHMMKKHRSMVKILSSLRQQQEGTNLPDVPNKSAPSPTSNSTYLTMNAASREIPNTTVSNFRGSMGNSIMRPNSSASKFSPMSYPQMKPKSPHNSGLVNLTERSRYGMTDMTNSSADLETNSMLNDSSSDEELNEIDSENGLSAMDHQTSGLSAEQLMGSDGNKLLETKGIPFRRFMNRFQCPFCPFLTMHRRSISRHIENIHLSGKTAVYKCDECPFTCKSSLKLGAHKQCHTGTTSDWDAVNSQSESISSSLNEGVVSYESSSINGRKSGVMLDPLQQQQPPQPPPPPPPPPPSQPQPLQQPQPPQLQPPHQVPPQPQTQPPPTQQPQPPTQAAPLHPYKCTMCNYSTTTLKGLRVHQQHKHSFCDNLPKFEGQPSSLPLENETDSHPSSSNTVKKSQTSILGLSSKNNFVAKASRKLANDFPLDLSPVKKRTRIDEIASNLQSKINQTKQQEDAVINVEDDEEEEEDNEVEIEVELDREEEPTEPIIEVPTSFSAQQIWHNSENTDFGDSGRLYYCKHCDFNNKSARSVSTHYQRMHPYIKFSFRYILDPNDHSAVYRCLECYIDYTNFEDLQQHYGEHHPEAMNVLNFDHSDLIYRCRFCSYTSPNVRSLMPHYQRMHPTVKINNAMIFSSYVVEQQEGLNTESQTLREILNSAPKNMATSTPVARGGGLPATFNKNTPKTFTPECENQKDPLVNTVVVYDCDVCSFASPNMHSVLVHYQKKHPEEKASYFRIQKTMRMVSVDRGSALSQLSFEVGAPMSPKMSNMGSPPPPQPPPPDLSTELYYCKHCSYSNRSVVGVLVHYQKRHPEIKVTAKYIRQAPPTAAMMRGVEGPQGSPRPPAPIQQLNRSSSERDGPPVENEMFFCQHCDYGNRTVKGVLIHYQKKHRDFKANADVIRQHTATIRSLCDRNQKKPASCVLVSPSNLERDKTKLRALKCRQCSYTSPYFYALRKHIKKDHPALKATVTSIMRWAFLDGLIEAGYHCEWCIYSHTEPNGLLLHYQRRHPEHYVDYTYMATKLWAGPDPSPPSLTMPAEAKTYRCRDCVFEAVSIWDITNHYQAFHPWAMNGDESVLLDIIKEKDAVEKPILSSEELAGPVNCENSIPTPFPEQEAECPEDARLSPEKSLQLASANPAISSTPYQCTVCQSEYNNLHGLLTHYGKKHPGMKVKAADFAQDIDINPGAVYKCRHCPYINTRIHGVLTHYQKRHPSIKVTAEDFVHDVEQSADISQNDVEETSRIFKQGYGAYRCKLCPYTHGTLEKLKIHYEKYHNQPEFDVFSQSPPKLPVPLEPEMTTEVSPSQVSITEEEVGEEPVSTSHFSTSHLVSHTVFRCQLCKYFCSTRKGIARHYRIKHNNVRAQPEGKNNLFKCALCAYTNPIRKGLAAHYQKRHDIDAYYTHCLAASRTISDKPNKVIIPSPPKDDSPQLSEELRRAVEKKKCSLCSFQSFSKKGIVSHYMKRHPGVFPKKQHASKLGGYFTAVYADEHEKPTLMEEEERGNFEKAEVEGEAQEIEWLPFRCIKCFKLSFSTAELLCMHYTDHHSRDLKRDFIILGNGPRLQNSTYQCKHCDSKLQSTAELTSHLNIHNEEFQKRAKRQERRKQLLSKQKYADGAFADFKQERPFGHLEEVPKIKERKVVGYKCKFCVEVHPTLRAICNHLRKHVQYGNVPAVSAAVKVGPSSSFCSGKGRVSIWFPSTRIVWWQQKVQDSRSRRLREADDPAHLFLDGLEAAKDASGALVGRVDGEHCLLDGMLEDETRPGGYHCSQCDRVLMSMQGLRSHERSHLALAMFTREDKYSCQYCSFVSAFRHNLDRHMQTHHGHHKPFRCKLCSFKSSYNSRLKTHILKAHADSSYSEPPDVQQQLNHYQSAALARNNSRVSPVPLSGAAAGTEQKTEAVLHCEFCEFSSGYIQSIRRHYRDKHGGKKLFKCKDCSFYTGFKSAFTMHVEAGHSAVPEEGPKDLRCPLCLYHTKYKRNMIDHIVLHREERVVPIEVCRSKLSKYLQGVVFRCDKCTFTCSSDESLQQHIEKHNELKPYKCQLCYYETKHTEELDSHLRDEHKFGNEGPVYKSSGENDGMWEQRAAPSPKESKRRKRPLRPRSCLVLVAKPQSQENDVSRNFELVGRVNLDQLEQMKEKMESSSSDDEDKEEEMNSKAEDRVNKDKPVSKRK

SEQ ID NO: 921228 - protein, 1101 aa, Homo sapiens
ACEHLLIDPERQLLTILHGLLTHYGKKHPGMKVKAADFAQDIDINPGAVYKCRHCPYINTRIHGVLTHYQKRHPSIKVTAEDFVHDVEQSADISQNDVEETSRIFKQGYGAYRCKLCPYTHGTLEKLKIHYEKYHNQPEFDVFSQSPPKLPVPLEPEMTTEVSPSQVSITEEEVGEEPVSTSHFSTSHLVSHTVFRCQLCKYFCSTRKGIARHYRIKHNNVRAQPEGKNNLFKCALCAYTNPIRKGLAAHYQKRHDIDAYYTHCLAASRTISDKPNKVIIPSPPKDDSPQLSEELRRAVEKKKCSLCSFQSFSKKGIVSHYMKRHPGVFPKKQHASKLGGYFTAVYADEHEKPTLMEEEERGNFEKAEVEGEAQEIEWLPFRCIKCFKLSFSTAELLCMHYTDHHSRDLKRDFIILGNGPRLQNSTYQCKHCDSKLQSTAELTSHLNIHNEEFQKRAKRQERRKQLLSKQKYADGAFADFKQERPFGHLEEVPKIKERKVVGYKCKFCVEVHPTLRAICNHLRKHVQYGNVPAVSAAVKEADDPAHLFLDGLEAAKDASGALVGRVDGEHCLLDGMLEDETRPGGYHCSQCDRVLMSMQGLRSHERSHLALAMFTREDKYSCQYCSFVSAFRHNLDRHMQTHHGHHKPFRCKLCSFKSSYNSRLKTHILKAHAGEHAYKCSWCSFSTMTISQLKEHSLKVHGKALTLPRPRIVSLLSSHSHHSSQKATPAEEVEDSNDSSYSEPPDVQQQLNHYQSAALARNNSRVSPVPLSGAAAGTEQKTEAVLHCEFCEFSSGYIQSIRRHYRDKHGGKKLFKCKDCSFYTGFKSAFTMHVEAGHSAVPEEGPKDLRCPLCLYHTKYKRNMIDHIVLHREERVVPIEVCRSKLSKYLQGVVFRCDKCTFTCSSDESLQQHIEKHNELKPYKCQLCYYETKHTEELDSHLRDEHKVSRNFELVGRVNLDQLEQMKEKMESSSSDDEDKEEEMNSKAEDRELMRFSDHGAALNTEKRFPCEFCGRAFSQGSEWERHVLRHGMALNDTKQVSREEIHPKEIMENSVKMPSIEEKEDDEAIGIDFSLKNETVAICVVTADKSLLENAEAKKE

SEQ ID NO: 921229 - protein, 399 aa, Homo sapiens
MQTHHGHHKPFRCKLCSFKSSYNSRLKTHILKAHADSSYSEPPDVQQQLNHYQSAALARNNSRVSPVPLSGAAAGTEQKTEAVLHCEFCEFSSGYIQSIRRHYRDKHGGKKLFKCKDCSFYTGFKSAFTMHVEAGHSAVPEEGPKDLRCPLCLYHTKYKRNMIDHIVLHREERVVPIEVCRSKLSKYLQGVVFRCDKCTFTCSSDESLQQHIEKHNELKPYKCQLCYYETKHTEELDSHLRDEHKVSRNFELVGRVNLDQLEQMKEKMESSSSDDEDKEEEMNSKAEDRELMRFSDHGAALNTEKRFPCEFCGRAFSQGSEWERHVLRHGMALNDTKQVSREEIHPKEIMENSVKMPSIEEKEDDEAIGIDFSLKNETVAICVVTADKSLLENAEAKKE

SEQ ID NO: 921230 - protein, 2299 aa, Homo sapiens
MEVLQCDGCDFRAPSYEDLKAHIQDVHTAFLQPTDVAEDNVNELRCGSVNASNQTEVEFSSIKDEFAIAEDLSGQNATSLGTGGYYGHSPGYYGQHIAANPKPTNKFFQCKFCVRYFRSKNLLIEHTRKVHGAQAEGSSSGPPVPGSLNYNIMMHEGFGKVFSCQFCTYKSPRRARIIKHQKMYHKNNLKETTAPPPAPAPMPDPVVPPVSLQDPCKELPAEVVERSILESMVKPLTKSRGNFCCEWCSYQTPRRERWCDHMMKKHRSMVKILSSLRQQQEGTNLPDVPNKSAPSPTSNSTYLTMNAASREIPNTTVSNFRGSMGNSIMRPNSSASKFSPMSYPQMKPKSPHNSGLVNLTERSRYGMTDMTNSSADLETNSMLNDSSSDEELNEIDSENGLSAMDHQTSGLSAEQLMGSDGNKLLETKGIPFRRFMNRFQCPFCPFLTMHRRSISRHIENIHLSGKTAVYKCDECPFTCKSSLKLGAHKQCHTGTTSDWDAVNSQSESISSSLNEGVVSYESSSINGRKSGVMLDPLQQQQPPQPPPPPPPPPPSQPQPLQQPQPPQLQPPHQVPPQPQTQPPPTQQPQPPTQAAPLHPYKCTMCNYSTTTLKGLRVHQQHKHSFCDNLPKFEGQPSSLPLENETDSHPSSSNTVKKSQTSILGLSSKNNFVAKASRKLANDFPLDLSPVKKRTRIDEIASNLQSKINQTKQQEDAVINVEDDEEEEEDNEVEIEVELDREEEPTEPIIEVPTSFSAQQIWHNSENTDFGDSGRLYYCKHCDFNNKSARSVSTHYQRMHPYIKFSFRYILDPNDHSAVYRCLECYIDYTNFEDLQQHYGEHHPEAMNVLNFDHSDLIYRCRFCSYTSPNVRSLMPHYQRMHPTVKINNAMIFSSYVVEQQEGLNTESQTLREILNSAPKNMATSTPVARGGGLPATFNKNTPKTFTPECENQKDPLVNTVVVYDCDVCSFASPNMHSVLVHYQKKHPEEKASYFRIQKTMRMVSVDRGSALSQLSFEVGAPMSPKMSNMGSPPPPQPPPPDLSTELYYCKHCSYSNRSVVGVLVHYQKRHPEIKVTAKYIRQAPPTAAMMRGVEGPQGSPRPPAPIQQLNRSSSERDGPPVENEMFFCQHCDYGNRTVKGVLIHYQKKHRDFKANADVIRQHTATIRSLCDRNQKKPASCVLVSPSNLERDKTKLRALKCRQCSYTSPYFYALRKHIKKDHPALKATVTSIMRWAFLDGLIEAGYHCEWCIYSHTEPNGLLLHYQRRHPEHYVDYTYMATKLWAGPDPSPPSLTMPAEAKTYRCRDCVFEAVSIWDITNHYQAFHPWAMNGDESVLLDIIKEKDAVEKPILSSEELAGPVNCENSIPTPFPEQEAECPEDARLSPEKSLQLASANPAISSTPYQCTVCQSEYNNLHGLLTHYGKKHPGMKVKAADFAQDIDINPGAVYKCRHCPYINTRIHGVLTHYQKRHPSIKVTAEDFVHDVEQSADISQNDVEETSRIFKQGYGAYRCKLCPYTHGTLEKLKIHYEKYHNQPEFDVFSQSPPKLPVPLEPEMTTEVSPSQVSITEEEVGEEPVSTSHFSTSHLVSHTVFRCQLCKYFCSTRKGIARHYRIKHNNVRAQPEGKNNLFKCALCAYTNPIRKGLAAHYQKRHDIDAYYTHCLAASRTISDKPNKVIIPSPPKDDSPQLSEELRRAVEKKKCSLCSFQSFSKKGIVSHYMKRHPGVFPKKQHASKLGGYFTAVYADEHEKPTLMEEEERGNFEKAEVEGEAQEIEWLPFRCIKCFKLSFSTAELLCMHYTDHHSRDLKRDFIILGNGPRLQNSTYQCKHCDSKLQSTAELTSHLNIHNEEFQKRAKRQERRKQLLSKQKYADGAFADFKQERPFGHLEEVPKIKERKVVGYKCKFCVEVHPTLRAICNHLRKHVQYGNVPAVSAAVKEADDPAHLFLDGLEAAKDASGALVGRVDGEHCLLDGMLEDETRPGGYHCSQCDRVLMSMQGLRSHERSHLALAMFTREDKYSCQYCSFVSAFRHNLDRHMQTHHGHHKPFRCKLCSFKSSYNSRLKTHILKAHAGEHAYKCSWCSFSTMTISQLKEHSLKVHGKALTLPRPRIVSLLSSHSHHSSQKATPAEEVEDSNDSSYSEPPDVQQQLNHYQSAALARNNSRVSPVPLSGAAAGTEQKTEAVLHCEFCEFSSGYIQSIRRHYRDKHGGKKLFKCKDCSFYTGFKSAFTMHVEAGHSAVPEEGPKDLRCPLCLYHTKYKRNMIDHIVLHRGNLSNLVFLDAAGGRQQRWPSRDALSEWQ

SEQ ID NO: 921231 - protein, 2472 aa, Homo sapiens
MEVLQCDGCDFRAPSYEDLKAHIQDVHTAFLQPTDVAEDNVNELRCGSVNASNQTEVEFSSIKDEFAIAEDLSGQNATSLGTGGYYGHSPGYYGQHIAANPKPTNKFFQCKFCVRYFRSKNLLIEHTRKVHGAQAEGSSSGPPVPGSLNYNIMMHEGFGKVFSCQFCTYKSPRRARIIKHQKMYHKNNLKETTAPPPAPAPMPDPVVPPVSLQDPCKELPAEVVERSILESMVKPLTKSRGNFCCEWCSYQTPRRERWCDHMMKKHRSMVKILSSLRQQQEGTNLPDVPNKSAPSPTSNSTYLTMNAASREIPNTTVSNFRGSMGNSIMRPNSSASKFSPMSYPQMKPKSPHNSGLVNLTERSRYGMTDMTNSSADLETNSMLNDSSSDEELNEIDSENGLSAMDHQTSGLSAEQLMGSDGNKLLETKGIPFRRFMNRFQCPFCPFLTMHRRSISRHIENIHLSGKTAVYKCDECPFTCKSSLKLGAHKQCHTGTTSDWDAVNSQSESISSSLNEGVVSYESSSINGRKSGVMLDPLQQQQPPQPPPPPPPPPPSQPQPLQQPQPPQLQPPHQVPPQPQTQPPPTQQPQPPTQAAPLHPYKCTMCNYSTTTLKGLRVHQQHKHSFCDNLPKFEGQPSSLPLENETDSHPSSSNTVKKSQTSILGLSSKNNFVAKASRKLANDFPLDLSPVKKRTRIDEIASNLQSKINQTKQQEDAVINVEDDEEEEEDNEVEIEVELDREEEPTEPIIEVPTSFSAQQIWHNSENTDFGDSGRLYYCKHCDFNNKSARSVSTHYQRMHPYIKFSFRYILDPNDHSAVYRCLECYIDYTNFEDLQQHYGEHHPEAMNVLNFDHSDLIYRCRFCSYTSPNVRSLMPHYQRMHPTVKINNAMIFSSYVVEQQEGLNTESQTLREILNSAPKNMATSTPVARGGGLPATFNKNTPKTFTPECENQKDPLVNTVVVYDCDVCSFASPNMHSVLVHYQKKHPEEKASYFRIQKTMRMVSVDRGSALSQLSFEVGAPMSPKMSNMGSPPPPQPPPPDLSTELYYCKHCSYSNRSVVGVLVHYQKRHPEIKVTAKYIRQAPPTAAMMRGVEGPQGSPRPPAPIQQLNRSSSERDGPPVENEMFFCQHCDYGNRTVKGVLIHYQKKHRDFKANADVIRQHTATIRSLCDRNQKKPASCVLVSPSNLERDKTKLRALKCRQCSYTSPYFYALRKHIKKDHPALKATVTSIMRWAFLDGLIEAGYHCEWCIYSHTEPNGLLLHYQRRHPEHYVDYTYMATKLWAGPDPSPPSLTMPAEAKTYRCRDCVFEAVSIWDITNHYQAFHPWAMNGDESVLLDIIKEKDAVEKPILSSEELAGPVNCENSIPTPFPEQEAECPEDARLSPEKSLQLASANPAISSTPYQCTVCQSEYNNLHGLLTHYGKKHPGMKVKAADFAQDIDINPGAVYKCRHCPYINTRIHGVLTHYQKRHPSIKVTAEDFVHDVEQSADISQNDVEETSRIFKQGYGAYRCKLCPYTHGTLEKLKIHYEKYHNQPEFDVFSQSPPKLPVPLEPEMTTEVSPSQVSITEEEVGEEPVSTSHFSTSHLVSHTVFRCQLCKYFCSTRKGIARHYRIKHNNVRAQPEGKNNLFKCALCAYTNPIRKGLAAHYQKRHDIDAYYTHCLAASRTISDKPNKVIIPSPPKDDSPQLSEELRRAVEKKKCSLCSFQSFSKKGIVSHYMKRHPGVFPKKQHASKLGGYFTAVYADEHEKPTLMEEEERGNFEKAEVEGEAQEIEWLPFRCIKCFKLSFSTAELLCMHYTDHHSRDLKRDFIILGNGPRLQNSTYQCKHCDSKLQSTAELTSHLNIHNEEFQKRAKRQERRKQLLSKQKYADGAFADFKQERPFGHLEEVPKIKERKVVGYKCKFCVEVHPTLRAICNHLRKHVQYGNVPAVSAAVKEADDPAHLFLDGLEAAKDASGALVGRVDGEHCLLDGMLEDETRPGGYHCSQCDRVLMSMQGLRSHERSHLALAMFTREDKYSCQYCSFVSAFRHNLDRHMQTHHGHHKPFRCKLCSFKSSYNSRLKTHILKAHAGEHAYKCSWCSFSTMTISQLKEHSLKVHGKALTLPRPRIVSLLSSHSHHSSQKATPAEEVEDSNDSSYSEPPDVQQQLNHYQSAALARNNSRVSPVPLSGAAAGTEQKTEAVLHCEFCEFSSGYIQSIRRHYRDKHGGKKLFKCKDCSFYTGFKSAFTMHVEAGHSAVPEEGPKDLRCPLCLYHTKYKRNMIDHIVLHREERVVPIEVCRSKLSKYLQGVVFRCDKCTFTCSSDESLQQHIEKHNELKPYKCQLCYYETKHTEELDSHLRDEHKVSRNFELVGRVNLDQLEQMKEKMESSSSDDEDKEEEMNSKAEDRELMRFSDHGAALNTEKRFPCEFCGRAFSQGSEWERHVLRHGMALNDTKQVSREEIHPKEIMENSVKMPSIEDSEVRRDTLESP

SEQ ID NO: 921232 - protein, 548 aa, Homo sapiens
MQISAAGLNFSSENGIIDDAWWFGTVESQQPFQPEYPDSSFQCYSVQRISALMWEVRYIEHNARTFNEPDSPIVKAAKIVTDVLLRFIGDQSCTDILDTYNKIKAEERNSTDAEEDTEIVDLDSDGPGTSSGRKDYQDVIDTPVDFSTVKETLEAGNYGSPLEFYKDVRQIFNNSKAYTSNKKSRIYSMMLRLSALFESHIKNIISEYKSAIQSQKRRRPRYRKRLRSSSSSLSSSGAPSPKGKQKQMKLQPKNDQNTSVSHARTSSPFSSPVSDAAEGLSLYLLDDEPDGPFSSSSFGGYSRSGNSHDPGKAKSFRNRVLPVKQDHSLDGPLTNGDGREPRTGIKRKLLSASEEDENMGGEDKEKKETKEKSHLSTSESGELGSSLSSESTCGSDSDSESTSRTDQDYVDGDHDIANSYKPDLKENSESNMAMEKEIGRPEAQEEEADGEDGVDGVEEAEEEEAGDEGVEEEVEVALGGGEEGEEEEVLLEELPEPNEHVLQMMNLIPCFQDVSVDCLELKQETKAGGLFYIMMILIMTILCPLRIL

SEQ ID NO: 921233 - protein, 135 aa, Homo sapiens
MEENGEKGGRFQACLIADSVTAVLSLSPSSDWDMSLLFTVHWPELNALVQAVTKKAERPRGAHGQSVPRRVPWCLLQEKPASMLCRCSSSAWRGSLWKGAEASADNQHQTIPFSPTGSCEGSSPTFFIDTAISNK

SEQ ID NO: 921234 - protein, 189 aa, Homo sapiens
MRLLWLKYKVPEKTFPNLNGIAVTSKLFLFNTFHLFQTLALSPPASSQLIEKSLESSSAVKAHLISSISGSFKKEQKGRWPPHYWCFAHLHPVLVSDVCPVALDMKSLAISLRKCKPWSQGKPRKGSVGTNHGTEAAEGACFLVGERWNGDSTSESSQVDDLAKSKIQKLFFQIEECRKSNPEDLLPVG

SEQ ID NO: 921235 - protein, 189 aa, Homo sapiens; identical to SEQ ID NO: 921234

SEQ ID NO: 921236 - protein, 255 aa, Homo sapiens [sequence omitted]

SEQ ID NO: 921237 - protein, 78 aa, Homo sapiens
YGHMSTHGVADAWVTHASVTLADPSVSSRLPPLGLHCGDRAKGLGLQFSRLAKMLSAGLVGNCRQAEAAPGLCLCLAQ

SEQ ID NO: 921238 - protein, 255 aa, Homo sapiens [sequence omitted]

SEQ ID NO: 921239 - protein, 147 aa, Homo sapiens
MSAGSGGWALGSSLLSCKMGITETVPGTMRSRCSRKVVSAEGKSQSQKVAYSHSVYLFLFLRQGLALSPRLEYSGAIWAHCNLHLLGSSDPPISDPQGAGATGTCHRVRLIFVFYVETGFHHVAQAGLKLLSSGDPPALACDKIAQK

SEQ ID NO: 921240 - protein, 255 aa, Homo sapiens [sequence omitted]

SEQ ID NO: 921241 - protein, 147 aa, Homo sapiens; identical to SEQ ID NO: 921239

SEQ ID NO: 921242 - protein, 96 aa, Homo sapiens
MSAGSGGWALGSSLLSCKMGITETVPGTMRSRCSRKVVSAEGKSQSQKVAYSHSVYLFLFLRQGLALSPRLEYSEPRSRHYTPVRATEQESIPPPP

SEQ ID NO: 921243 - protein, 255 aa, Homo sapiens [sequence omitted]

SEQ ID NO: 921244 - protein, 255 aa, Homo sapiens [sequence omitted]

SEQ ID NO: 921245 - protein, 255 aa, Homo sapiens [sequence omitted]

SEQ ID NO: 921246 - protein, 90 aa, Homo sapiens
SHSRPAGRSDRGRRRSCLTCALTTVLSGLKPAPTLPFPVLRGPPAPESRLGAAEAGGMARAESAGRKGLTGSAALGCPSRGEPANERAPR

SEQ ID NO: 921247 - protein, 147 aa, Homo sapiens; identical to SEQ ID NO: 921239

SEQ ID NO: 921248 - protein, 255 aa, Homo sapiens [sequence omitted]

SEQ ID NO: 921249 - protein, 255 aa, Homo sapiens [sequence omitted]

SEQ ID NO: 921250 - protein, 199 aa, Homo sapiens
ACCSTLPRVVYSTDTSLLLLCSPSSSAMEEATSKMTEIISEPTVTLENENSDVNPSAGKSGPGLFLVEHLGEGEAVGAASADLNVPARRLCREQRILTRRILPAQNGSSTKGQTASLSGSLTPVPPDWETAPSRGQQTPYTRELQLASGRCLSETKLPDEGAGSSLCCSAASAGDTQANRVWSGPPANYSRHAEKGPDC

SEQ ID NO: 921251 - protein, 150 aa, Homo sapiens
MTGKEGGHKDRFSSSHDLGKRYWFKVLSLESEWLQQVLDGSLGQMTYFLPRNNTLTIYILCLSLATKKIPPALQTAEVCQILHPHQSSFKCQQHDPMNKGAPFVYKQRLSKTDRRSPTWGEVCSSICFSGRGGKRWDEGSKNWIQKRGTI

SEQ ID NO: 921252 - protein, 163 aa, Homo sapiens [sequence omitted]

SEQ ID NO: 921253 - protein, 163 aa, Homo sapiens [sequence omitted]

SEQ ID NO: 921254 - protein, 163 aa, Homo sapiens [sequence omitted]

SEQ ID NO: 921255 - protein, 135 aa, Homo sapiens
VSGKMRHNIYCQVVKSTCSRDGPKETQTRAGCPGQDGTLWSHCIVCCVLAPFGQSALKCLLLSLREQSLYWLAIQQLPTDPIEEQFPVLNVTRYYNANGDVVEEEENSCTYYECHYPPCTVIEKQVGVLQCGRVP

SEQ ID NO: 921256 - protein, 207 aa, Homo sapiens
TLIDEQDIPLVESYSFEARMEVDADGNGAKIFAYAFDKNRGRGSGRLLHELLWERHRGGVAPGFQVVHLNAVTVDNRLDNLQLVPWGWRPKAEETSSKQREQSLYWLAIQQLPTDPIEEQFPVLNVTRYYNANGDVVEEEENSCTYYECHYPPCTVIEKQLREFNICGRCQVARYCGSQCQQKDWPAHKKHCRERKRPFQHELEPER

SEQ ID NO: 921257 - protein, 898 aa, Homo sapiens
CEKDMIMGGAEGKLSTSGGTAALGCLVKDYFPEPVTVSWNSGALTSGVHTFPAVLQSSGLYSLSSVVTVPSSNFGTQTYTCNVDHKPSNTKVDKTVAPPVAGPSVFLFPPKPKDTLMISRTPEVTCVVVDVSHEDPEVQFNWYVDGVEVHNAKTKPREEQFNSTFRVVSVLTVVHQDWLNGKEYKCKVSNKGLPAPIEKTISKTKGQPREPQVYTLPPSREEMTKNQVSLTCLVKGFYPSDIAVEWESNGQPENNYKTTPPMLDSDGSFFLYSKLTVDKSRWQQGNVFSCSVMHEALHNHYTQKSLSLSPELQLEESCAEAQDGELDGLWTTITIFITLFLLSVCYSATITFFKVGRTLSPAVLDIVPHAVTHCPHAVPTMSLTLSPMLSPPVPDTLLRTVSTCAQHCPPRYPPIPNNVPHTVSSCPLSPTLSSTLSPPLPVTVAHAAPTCPNTFLQAVLTCPQHSPPHSLHLSLTLSPMLSPPVPDAVLHTVPTFSLSLSPCCPLSLTLSSMLSSPVPNTLPHCLHLSLTLSPTLSPPVPDAVVCAVHILLVTWLCSPSSSLRAGSGEAVAPGWPEGWGGPWGQGCGLAHPCAVPCLQVKWIFSSVVDLKQTIVPDYRNMIRQGAWATLCGVSRAAQTPTQEPWAMLSHHPGHTCPRPHRPQPHGSLASQSPSDPDTPPFQTLCIAGLPQTSAAWCMQGAGGQDTLLQPRGGVRETAPGVQGGQLLHHRLYPKPKDGVPEMQESFVQRRCQPSGTLLERSPPSALQGALRASRCSGGVGSSPLSEDGRPGQDKERKPRTVPGSGSFRALSRLSWEEADASCSCCPLQGLAPGPGSPGEIGPLPEPPGAHLPLSTWDRASSRGSALLREHHAQPQDPPSTLQQGCPCTPPSSPCCDVT

SEQ ID NO: 921258 - protein, 910 aa, Homo sapiens
CEKDMIMGGAEGKLSTSGGTAALGCLVKDYFPEPVTVSWNSGALTSGVHTFPAVLQSSGLYSLSSVVTVPSSNFGTQTYTCNVDHKPSNTKVDKTVERKCCVECPPCPAPPVAGPSVFLFPPKPKDTLMISRTPEVTCVVVDVSHEDPEVQFNWYVDGVEVHNAKTKPREEQFNSTFRVVSVLTVVHQDWLNGKEYKCKVSNKGLPAPIEKTISKTKGQPREPQVYTLPPSREEMTKNQVSLTCLVKGFYPSDIAVEWESNGQPENNYKTTPPMLDSDGSFFLYSKLTVDKSRWQQGNVFSCSVMHEALHNHYTQKSLSLSPELQLEESCAEAQDGELDGLWTTITIFITLFLLSVCYSATITFFKVGRTLSPAVLDIVPHAVTHCPHAVPTMSLTLSPMLSPPVPDTLLRTVSTCAQHCPPRYPPIPNNVPHTVSSCPLSPTLSSTLSPPLPVTVAHAAPTCPNTFLQAVLTCPQHSPPHSLHLSLTLSPMLSPPVPDAVLHTVPTFSLSLSPCCPLSLTLSSMLSSPVPNTLPHCLHLSLTLSPTLSPPVPDAVVCAVHILLVTWLCSPSSSLRAGSGEAVAPGWPEGWGGPWGQGCGLAHPCAVPCLQVKWIFSSVVDLKQTIVPDYRNMIRQGARATLCGVSRAAQTPTQEPWAMLSHHPGHTCPRPHRPQPHGSLASQSPSDPDTPPFQTLCIAGLPQTSAAWCMQGAGGQDTLLQPRGEVRETAPGVQGGQLLHHRLYPKPKDGVPEMQESFVQRRCQPSGTLLERSPPSALQGALRASRCSGGVGSSPLSEDGRPGQDKERKPRTVPGSGSFRALSRLSWEEADASCSCCPLQGLAPGPGSPGEIGPLPEPPGAHLPLSTWDRASSRGSALLREHHAQPQDPPSTLQQGCPCTPPSSPCCDVT

SEQ ID NO: 921259 - protein, 794 aa, Homo sapiens
MFLWLFLILSALISSTNADSDISVEICNVCSCVSVENVLYVNFSLHLGNNKLQNIEGGAFLGLSALKQLHLNNNELKILRADTFLGIENLEYLQADYNLIKYIERGAFNKLHKLKVLILNDNLISFLPDNIFRFASLTHLDIRGNRIQKLPYIGVLEHIGRVVELQLEDNPWNCSCDLLPLKAWLENMPYNIYIGEAICETPSDLYGRLLKETNKQELCPMGTGSDFDVRILPPSQLENGYTTPNGHTTQTSLHRLVTKPPKTTNPSKISGIVAGKALSNRNLSQIVSYQTRVPPLTPCPAPCFCKTHPSDLGLSVNCQEKNIQSMSELIPKPLNAKKLHVNGNSIKDVDVSDFTDFEGLDLLHLGSNQITVIKGDVFHNLTNLRRLYLNGNQIERLYPEIFSGLHNLQYLYLEYNLIKEISAGTFDSMPNLQLLYLNNNLLKSLPVYIFSGAPLARLNLRNNKFMYLPVSGVLDQLQSLTQIDLEGNPWDCTCDLVALKLWVEKLSDGIVVKELKCETPVQFANIELKSLKNEILCPKLLNKPSAPFTSPAPAITFTTPLGPIRSPPGGPVPLSILILSILVVLILTVFVAFCLLVFVLRRNKKPTVKHEGLGNPDCGSMQLQLRKHDHKTNKKDGLSTEAFIPQTIEQMSKSHTCGLKESETGFMFSDPPGQKVVMRNVADKEKDLLHVDTRKRLSTIDELDELFPSRDSNVFIQNFLESKKEYNSIGVSGFEIRYPEKQPDKKSKKSLIGGNHSKIVVEQRKSEYFELKAKLQSSPDYLQVLEEQTALNKI

SEQ ID NO: 921260 - protein, 146 aa, Homo sapiens
MPRPPLASAPVAVATYRSLYFSQLAPTSTTLHPSQALEGALRRTGQGWPRTSGAMGTLRLSGFPPYPWHLAHCLALYVPTISKSCLLHLQNASRVCPPLPAMVGESKSPSSLSGPLSLLVYLLPVMPLPIHGSWRAGMPLHQCIGV

SEQ ID NO: 921261 - protein, 241 aa, Homo sapiens
MSADEASVSRRKGAAEAAQRTQPCQGEFLGRDLEFSGPHLPTSPPRMSSYPPLSPPPPSPPPALGSRCLVPLGAASSAAAAAAAAAAATRFILLHQMANRVIRLYTVSHYRTPWVFLLLVLMAFPSCVPCRCALSGMDRHRTPLYDLPIEQKMYGESKIEHSMTYIGLILLKPWRTIRMSLPPFLYWLELSEEPETEYEQDTEATVFCNLTMKVTSHHFCHGSFVTSKSLGPTQEEGFTRG

SEQ ID NO: 921262 - protein, 248 aa, Homo sapiens
MAAAPTQIEAELYYLIARFLQSGPCNKSAQVLVQELEEHQLIPRRLDWEGKEHRRSFEDLVAANAHIPPDYLLKICERIGPLLDKEIPQSVPGVQTLLGVGRQSLLRDAKDCKSTLWNGSAFAALHRGRPPELPVNYVKPPNVGAVSQGFRWLGKGNPLTPCTSGVRQCPTLLPLALRGLHPLSNQCQRNEPATSVGNAEITHLLHRSRWELQTGAVPIWPSWNRIHMFCVLRVAVAFDVPTSHALVI

SEQ ID NO: 921263 - protein, 178 aa, Homo sapiens
MLITKTMGKMSPGHVRQLCGSPFHHRPRDLGGKNDFLSQVPGPLAVCSLGTWCPVSQLLQPWLTGPKVQLRLWLQRMQAPILGSFHVVLSLRVHKSQEPRFGNHCLYFRGCMETPERPRRSLLEEQGPHGEPLLGQLRKAAPSVAMEIAADGRILGRLAGSGCPGDAGVAVGGCGNTK

SEQ ID NO: 921264 - protein, 124 aa, Homo sapiens
MLCNKLYIRKNSRFQGSEDRMINSIRGGGCNGIPYSGWLINNRNVLLTVLEAGKSKIKAAVDSVSSEGPFLAPPPNTITLRIWFQHELGEDTNIQTLESLTQHLKIELDPLGNRKEHDEIKTLE

SEQ ID NO: 921265 - protein, 152 aa, Homo sapiens
SWHKAEQEQASHRMRRSHRCREHGLWSQPGCLKLGKSPCLSGPQCPDLQNGQNNGTYILRLLCRGNTLIHMESAQNSAWHIEWNWWLYKKRKRDLSEHAQPPRHVMSFATSVLCRIPAGKKSLTRCSPSTLDVSASTTVLLSSPNQAEWVHL

SEQ ID NO: 921266 - protein, 154 aa, Homo sapiens
MGGVSTCREEALSAATACGACRAAQVNAHPCWSALLHYRPFKEVASRNHPPNRRQQESEKDKVRSLLQIERGWQMTDVGPLLYLHLHKVVLGHVGVSESLVLVQVQCGEPVECRPLTDQPVGAAGWSSGRPGCSEQRLPFPAALLPASLRRGTS

SEQ ID NO: 921267 - protein, 164 aa, Homo sapiens
LILTRKVLLGQISLRSRFNKMKECDLTNYLQVHSFDYVYELQMESAVDTKALFLAMGQGGYLQGLSQPFCRQEVSILQTKKESARKPDCLGKPPLPVSGGVEKNNSTMLPLLATSVPCNNSMAPATAQEMEEMARQVITGIWRLVVEQDRGIHSRSHWYLETCG

SEQ ID NO: 921268 - protein, 252 aa, Homo sapiens
MSSSRLVWDASSGDAETTTAFGFLYTPVIRPPQAQGVGGPELWDILLASFNIAVEVCSLQEPTIDILQPSRIMEQPTSSTNGEKRKSPCESNNKKNDEMQEAPNRVLAPKQSLQKTKTIEYLTIIVYYYRKHTKINSNQLEKDQSRENSINPVQEEEDEGLDSAEGSSQEDEDLDSSEGSSQEDEDLDSSEGSSQEDEDLDSSEGSSQEDEDLDSSEGSSQEDEDLDPPEGSSQEDEDLDSSEGSSQEGGED

SEQ ID NO: 921269 - protein, 1255 aa, Homo sapiens
MQEGLDHKRWREQNLTKTAFNEEMGQDMLAELIQVIILAADLLCKDSDESPVARERNVIVHTNPDPSNTVNRISGTRDSECQTEDILIAAPSRRRIRAQRGQSIAASLSHSAGNISALADKGDTMFTPAVSSRTRSRSLPREGNRGGDAEPKVGAKPSAYEEGESFVGDHERTPNDFSEAPSSPSAQDHQPTLGLACSQHLHSPQHKLSERGRSRLSRMAADSGSCDISSNSDTFGSPIHCISTAGVLLSSHMDQKDDHQSSSGNWSGSSSTCPSQTSETIPPAASPPLTGSSHCDSELSLNTAPHANEDASVFVTEQYNDHLDKVRGHRANSFTSTVADLLDDPNNSNTSDSEWNYLHHHHDASCRQDFSPERPKADSLGCPSFTSMATYDSFLEKSPSDKADTSSHFSVDTEGYYTSMHFDCGLKGNKSYVCHYAALGPENGQGVGASPGLPDCAWQDYLDHKRQGRPSISFRKPKAKPTPPKRSSSLRKSDGNADISEKKEPKISSGQHLPHSSREMKLPLDFANTPSRMENANLPTKQEPSWINQSEQGIKEPQLDASDIPPFKDEVAESTHYADLWLLNDLKTNDPYRSLSNSSTATGTTVIECIKSPESSESQTSQSESRATTPSLPSVDNEFKLASPEKLAGLASPSSGYSSQSETPTSSFPTAFFSGPLSPGGSKRKPKVPERKSSLQQPSLKDGTISLSKDLELPIIPPTHLDLSALHNVLNKPFHHRHPLHVFTHNKQNTVGETLRSNPPPSLAITPTILKSVNLRSINKSEEVKQKEENNTDLPYLEESTLTTAALSPSKIRPHTANKSVSRQYSTEDTILSFLDSSAVEMGPDKLHLEKNSTFDVKNRCDPETITSAGSSLLDSNVTKDQVRTETEPIPENTPTKNCAFPTEGFQRVSAARPNDLDGKIIQYGPGPDETLEQVQKAPSAGLEEVAQPESVDVITSQSDSPTRATDVSNQFKHQFVMSRHHDKVPGTISYESEITSVNSFPEKCSKQENIASGISAKSASDNSKAEETQGNVDEASLKESSPSDDSIISPLSEDSQAEAEGVFVSPNKPRTTEDLFAVIHRSKRKVLGRKDSGDMSVRSKSRAPLSSSSSSASSITSPSSNVTTPNSQRSPGLIYRNAKKSNTSNEEFKLLLLKKGSRSDSSYRMSATEILKSPILPKPPGELTAESPQSTDDAHQGSQGAEALSPLSPCSPRVNAEGFSSKSFATSASARVGRSRAPPAASSSRYNGNKDLKL

SEQ ID NO: 921270 - protein, 179 aa, Homo sapiens
MEMVLPSASEKLGWTNPHPFTLSFTQKMPVGTTASKQMNPALVEMVDYWRTQAENWKLQRGETGFVGLDVVLGVGLWGDAEKVKDNSRASGLDKWWREMLSLRHRKKKKVVGLIQKKVCGLMGRPCKLHREVAYLGLEQKSANSENGQGEDVFCLAGCTILATTTHLHCCSWKAVTDDV

SEQ ID NO: 921271 - protein, 378 aa, Homo sapiens
MTQPALGLSFPKISQPNPRRSCLALRRQDNSLVLALSQCPNRSKEWDKVKGPGSSSAPRLWSQRKTQAEKASLDVFVLPWPAGVGNKGEELRGCTKVAAPSLPGAVRGADRGPFLSPNIRSSAADFSAYLVTKGTCNGLKCGPRGLTRKGWVGDPPGETGQEPMQLATFGQALQPGSLSRREQLDPLRYSRTTLQGNSMFPSWEQDASAVHREVSGVNNARAPSAASKRQDTTRLLPRSLILDCHASTEQGSVGMGPTELCVGYNLLVCHLLRPLKKHSIWVAVTQFSQYSLSRLPLSRKGKSPDPCASWMRRCPNMLWLALHGLHPLSDQSQLEEPGTSIGNAEITCLRHRSRWELQTGAVPIWPPWNGPHNFHTDC

SEQ ID NO: 921272 - protein, 159 aa, Homo sapiens
MMGNISFSKKKKNIFFLSLVVLNVRYFFPWGQKSKVEELKKKEHMHEIFNEILRRINRTKPTGHESRNGVNRTAAVRNVCWAEIVVVPRAVEDFNFPFLFYTHFSNSFPLLSMPTGTPSLEQALLARNFLHVLTSKSGLSGKTEFREMTNDLVTAMKEV

SEQ ID NO: 921273 - protein, 198 aa, Homo sapiens
MPNSSGLMNRRDAIAKTDATVVALLKGAGAIPLGITNCSELCMWYESSNKIYGRSNNPYDLQHIVGGSSGGEGCTLAAACSVIGVGSDIGGSIRMPAFFNGIFGHKPSPDFSCESIWSMSFVHWCSRLQTFPALTIEGHKCKPTGPALPLPQRMHGSGSCRLHNPIHHLRHLSTLPRELRFGLNTLQLPRQLASTWKC

SEQ ID NO: 921274 - protein, 160 aa, Homo sapiens
MAPASLLKHNKSHLCSSSQQVPYLHLRPPQPGLYCQYRYQTFSQSHSVSLWEVPKFTTFSYLLLSLPNYSNLCLLPSSKVATTFLGIFSAIPHSWYQVTVLVRFHAADKDIPETGKKKRFNEPTVPCDWGHLTIMVEGERHVLHVGRQEKRACSRKLPLI

SEQ ID NO: 921275 - protein, 714 aa, Homo sapiens
GDSPFVFAKMCPELVPSGGFLVSLTSRMKPRAFMLGKGPAGQAVGVRIKTAGPQDQTHQDPHDSGSETSSNSKRKKAFSLEVQILSLDEKIKLDSTETKILNKSQIEAIAASLGLQSEDSAPPTEETAYGRSLKVALGILNERTNLSQASTSDEEEITMLSQNVPQKQSDSPPHKKYRKDEGDLPGCLEERENSACLLASSESDDSLYDDKSQAPTMVDTIPSEVETKSLQNSSWCETFPSLSEDNDEKENKNKIDISAVMSVHSAVKEESACVKDEKFAPPLSPLSSDMLIMPKALKEESEDTCLETLAVPSECSAFSENIEDPGEGPSNPCLDTSQNQPSMESEMGAAACPGSCSRECEVSFSASNPVWDYSHLMSSERNFQRLDFEELEEEGQASDKSLLPSRINLSLLDDDEEDEELPRFILHYETHPFETGMIVWFKYQKYPFWPAVIKSIRRKERKASVLFVEANMNSEKKGIRVNFRRLKKFDCKEKQMLVDKAREDYSESIDWCISLICDYRVRIGCGSFTGSLLEYYAADISYPVRKETKQDTFRNKFPKLHNEDAREPMAVTSQTKKMSFQKILPDRMKAARDRANKNLVDFIVNAKGTENHLLAIVNGTKGSRWLKSFLNANRFTPCIETYFEDEDQLDEVVKYLQEVCNQIDQIMPTWIKDDKIKFILEVLLPEAIICSISAVDGLDYEAAEAKYLKGPCLT

SEQ ID NO: 921276 - protein, 144 aa, Homo sapiens
RSMGNGRFLPKDVRVCVAANVGINIEVPDKCPRSPYFIWKKYPDYDSKAKDRRQMIKVVKAPTVPSYTLPTSVVPWVIDQTDFGMLGSHLKQLDPNGFLMPKPHITQMHSRSRRLLLLYLVSAIFYHAAKFYYEELPEMQTNTW

SEQ ID NO: 921277 - protein, 624 aa, Homo sapiens
MSERTQEQDFVIITVDDSDDNNDCSIEMVEVSETADNSTNDIADDSTYVTADNPTDDTATQPNFPGGNDGHHRPLQMSYGSGSVTQAGVQWHDHSSLQPQPLGLKQFFHLSLPSSWDDRRTPPCPVAHGDQIVSQINHPVHLRRYSYNSEEVDFPKRGRFYTPEVQSSISPPAERQETHAWASPAVTSLESAACHELQEADLSESLSYPRIVSSSSLQQYVAQGGSFPCFGMPWNFISGGAESTNAVISFANATTAVPMAVLSRRESSLANNPGVVNYSALPENENVGPGRALSSFCFHPNLAPEAGKFKSKVPAGLCGEGCILCKRGALCPHMAEALLPLNILVKVDTNTENSVNTMNRSTLLDSDSGQDSSSSSVCIPPKYGYLGDPKRNVRVLKIHLLAVQNMAKPKQAACYLVRILFSKEILISSSVDIHLKDSQSLDPNKMAALRDRATKSSKEQQVMTACGRSHPFPSFQIKTVRKNKKRTNRVASASADRNDQRGRDGGEGCSWMFQPMNNSKMREKRNLQPNSNAIPEGMREPSTDNPEEPGEAWKFLQENYPICDLSENGRDWKSCVTSINSGIRSLRHDVRRAEARSQSLPAVTPPELEQESKPGDPDATDPST

SEQ ID NO: 921278 - protein, 179 aa, Homo sapiens
NVPAPRPGCMHGGNSGLQRNRALRAGAQGASRPGLFVCADVKGGAQIKCGNRDDLEGGGAGSPRRTKLLAVGLQRVAEVTATGSCTGGSGGGRGTPGLKRLVGLENSERAPGGGGKKTQPVAKCLAFGYFLRKRISGRSGRGGWGHHRASEMGSEFPSAFWEKPCLPSFPSPHPAEGLR

SEQ ID NO: 921279 - protein, 511 aa, Homo sapiens
MGPRGSGPRCAMKQVNELKEKGNKALGVENIDNALQCYSEAIKLDPHNHVLYSNCSATYAKKGDYQKAYKDGCKTVDLKERCLQEERLTALKHYDKAKELDPSNMTYITNQAAVYFEKGDYNKCWELCEKSIEVGRENREDYLQIAKVCARIGNSYFKEEKYKDAIHFYNKCAQEMPAGRENPEGARTAGLHKPRPGFRREEQRQRVFSERGLSPRHEALYGSHQKEPERCQIIQQSSCLLHQTPGFQLALKDCEECIQLEPTFIKGYTRKAVALEAMKDYTKVMDVYRKALDPDSSCKEAADGYQRCMMAQYNRHHSPEDVKRRAMADPEVQQIMSDIAMHLILEQMQKDPPGTQRTLKESCNRKEDPEADGCGSDCNSTMTCPSPLPFALMRKEERGPRQAARSGRESRGREGLTSLYLYVSPGKTRRFVPALFVLPLPLGPLSTYMVSSQLPLSSVSPFPAPSGCLSCSPIVGYFLFGAVGMYREGRGFFPASGPSCLTLFIPRPLLQ

SEQ ID NO: 921280 - protein, 313 aa, Homo sapiens
ELLLTFLRIPSFIFTVMALFYALIASTLCILPSWYMVQWPGGRILHRHELDTFLAQAVSTQLYEPDRLQELKIEKLDARGIQLAALFMSGVDTALFANDACGQPVPWEHCCPWIYFDGKLFQSKLIKAGRERVSLVELCDGQKKFADLCTRGIRISNLGYGGEGLHPIPPQGGKLEIAGMVVGQWAGSRSSRGRGSFGMQVVSVGGPGKGHGKEQTGRGSKGHKKGNKQGSSDGVSKSLELHQGRSRSQVNGNSGALIKEEKSDHRLPAPSQCALSRDSNECNNGNRYLPMNNREKNHLQEQKLETVAQRKED

SEQ ID NO: 921281 - protein, 142 aa, Homo sapiens
MATRVTSGRPHCSSQLGLACCQSSKVRSKTKISLTSGMSNPDHAVTSSSKTPESGHSSPWSLDKASETFLSQCSRRPLKVKTGGVNSGGNSRSYSCHGSGCSPKKEGVLHMGPALGPRWTFTYLSIPKAHPSAIYTNSYSLT

SEQ ID NO: 921282 - protein, 297 aa, Homo sapiens
MKTPFGKAAAGQRSRTGAGHGSVSVTMIKRKAAHKKHRSRPTSQPRGNIVGCRIQHGWKDGDEPLTQWKGTVLDQVPVNPSLYLIKYDGFDCVYGLELHRDERVSSLEVLPNRVASSRISDTHLAEIMVGKAVEHIFETEEGSKNEWRGMVLAQAPVMNTWFYITYEKDPVLYMYQLLDDYKDGDLRILQDSNDSPLAEREPGEVIDSLVGKQVEYAKDDGSKRTGMVIHQVEAKPSVYFIKFDDDFHIYEQLFFMGDCCETNRMASFLFNPKSGHKVTAPLKAVLNEQNIGLCEQI

SEQ ID NO: 921283 - protein, 78 aa, Homo sapiens
ETAAQQRLVGVRCGRGAAATATAAATRKAEDAGAKSKGRRHGHLRLPRRPLRDTHCLWIILSQLLQAPGCSPADFPPP

SEQ ID NO: 921284 - protein, 78 aa, Homo sapiens; identical to SEQ ID NO: 921283

SEQ ID NO: 921285 - protein, 1433 aa, Homo sapiens
MLYVERFCQDSHLSVSSGENQFSQLLCVQSLAQGTLLSLRSTRGGIALKKCKNDEEEDLRTELNLLRKYSFHKNIVSFYGAFFKLSPPGQRHQLWMVMELCAAGSVTDVVRMTSNQSLKEDWIAYICREILQGLAHLHAHRVIHRDIKGQNVLLTHNAEVKLVDFGVSAQVSRTNGRRNSFIGTPYWMAPEVIDCDEDPRRSYDYRSDVWSVGITAIEMAEGAPPLCNLQPLEALFVILRESAPTVKSSGWSRKFHNFMEKCTIKNFLFRPTSANMLQHPFVRDIKNERHVVESLTRHLTGIIKKRQKKGPSCTHELLRLPTSSRCRPLRVLHGEPSQPRWLPDREEPQVQALQQLQGAARVFMPLQALDSAPKPLKGQAQAPQRLQGAARVFMPLQAQVKAKASKPLQMQIKAPPRLRRAARVLMPLQAQVRAPRLLQVQSQVSKKQQAQTQTSEPQDLDQVPEEFQGQDQVPEQQRQGQAPEQQQRHNQVPEQELEQNQAPEQPEVQEQAAEPAQAETEAEEPESLRVNAQVFLPLLSQDHHVLLPLHLDTQVLIPVEGQTEGSPQAQAWTLEPPQAIGSVQALIEGLSRDLLRAPNSNNSKPLGPLQTLMENLSSNRFYSQPEQAREKKSKVSTLRQALAKRLSPKRFRAKSSWRPEKLELSDLEARRQRRQRRWEDIFNQHEEELRQVDKDKEDESSDNDEVFHSIQAEVQIEPLKPYISNPKKIEVQERSPSVPNNQDHAHHVKFSSSVPQRSLLEQAQKPIDIRQRSSQNRQNWLAASGDSKHKILAGKTQSYCLTIYISEVKKEEFQEGMNQKCQGAQVGLGPEGHCIWQLGESSSEEESPVTGRRSQSSPPYSTIDQKLLVDIHVPDGFKVGKISPPVYLTNEWVGYNALSEIFRNDWLTPAPVIQPPEEDGDYVELYDASADTDGDDDDESNDTFEDTYDHANGNDDLDNQVDQANDVCKDHDDDNNKFVDDVNNNYYEAPRQAMAEMEAASKMVMMEVVEKRKPTEAMEAIQPIEAMEEVQPVRDNAAIGDQEEHAANIGSERRGSEGDGGKGVVRTSEESGALGLNGEENCSETDGPGLKRPASQDFEYLQEEPGGGNEASNAIDSGAAPSAPDHESDNKDISESSTQSDFSANHSSPSKGSGMSADANFASAICHKNRLRVYHLTWLRNKILNNDPESKRRQEEMLKTEEACKAIDKLTGCEHFSVLQHEETTYIAIALKSSIHLYAWAPKSFDESTAIKVFPTLDHKPVTVDLAIGSEKRLKIFFSSADGYHLIDAESEVMSDVTLPKNPLEIIIPQNIIILPDCLGIGMMLTFNAEALSVEANEQLFKKILEMWKDIPSSIAFECTQRTTGWGQKAIEVRSLQSRVLESELKRRSIKKLRFLCTRGDKLFFTSTLRNHHSRVYFMTLGKLEELQSNYDV

SEQ ID NO: 921286 - protein, 138 aa, Homo sapiens
MKVLSAFPYKNSSHESDLILTIPLESCVSADLSAGLQGWACVPGHRWTCGFQGWDPGPQAELCSTREETECAGRGEGFSVAQPNTTFSQGPCPHPRSGCFPPVVSERQRHGSGTEPCGDDCNGSMPVSNKRAVAGRSP

SEQ ID NO: 921287 - protein, 138 aa, Homo sapiens; identical to SEQ ID NO: 921286

SEQ ID NO: 921288 - protein, 138 aa, Homo sapiens; identical to SEQ ID NO: 921286

SEQ ID NO: 921289 - protein, 118 aa, Homo sapiens
MVLTLQFLSHDQGQITKELQQFVVSGSPMRAPEEVTGAQAGVQWRDLGSLQPPPPSSLPWPSKVLRLQPLPGRHPVWEVRSVSAWPPIVWDVRSPSAQQPPRLRSEEPLSPAATPSEK

SEQ ID NO: 921290 - protein, 138 aa, Homo sapiens; identical to SEQ ID NO: 921286

SEQ ID NO: 921291 - protein, 214 aa, Homo sapiens
MESENMDSENMKTENMESQNVDFESVSSVTALEALSKLLNPEEEDDSDYGQTNGLSTIGAMGPGNIGPPQIEELKVIPETSEENNEDIWNSEEIPEGAEYDDMWDVREIPEYEIIFRQQVGTEDIFLGLSKKDSSTGCCSELVAKIKLPNTNPSDIQIDIQETILDLRTPQKKLLITLPELVECTSAKAFYIPETETLEITMTMKRELDIANFF

SEQ ID NO: 921292 - protein, 214 aa, Homo sapiens; identical to SEQ ID NO: 921291

SEQ ID NO: 921293 - protein, 137 aa, Homo sapiens [sequence omitted]

SEQ ID NO: 921294 - protein, 167 aa, Homo sapiens
GPRLLINLGTARARVPPHHCPACGGAQTARALPGCRSRAFPARLPAPPRGAAPGGGVRKAGSRRQRGGRLESRARVLPDLPTPPHGLRGTGLPDLTGFKLKPYVSYLAPESEETPLTAAQLFSEAVAPAIEKDFKDGTFDPDNLEKYGFEPTQEGKLFQLYPRNFLR

SEQ ID NO: 921295 - protein, 137 aa, Homo sapiens [sequence omitted]

SEQ ID NO: 921296 - protein, 137 aa, Homo sapiens [sequence omitted]

SEQ ID NO: 921297 - protein, 137 aa, Homo sapiens [sequence omitted]

SEQ ID NO: 921298 - protein, 137 aa, Homo sapiens [sequence omitted]

SEQ ID NO: 921299 - protein, 137 aa, Homo sapiens [sequence omitted]

SEQ ID NO: 921300 - protein, 137 aa, Homo sapiens [sequence omitted]

SEQ ID NO: 921301 - protein, 137 aa, Homo sapiens [sequence omitted]

SEQ ID NO: 921302 - protein, 173 aa, Homo sapiens
SASTRPASEAEQGRGRVGAGAGAAWSSCGVSGPGRGMGVLAAAARCLVRGADRMSKWTSKRGPRSFRGRKGRGAKGIGFLTSGWRFVQIKEMVPEFVVPDLTGFKLKPYVSYLAPESEETPLTAAQLFSEAVAPAIEKDFKDGTFDPDNLEKYGFEPTQEGKLFQLYPRNFLR

SEQ ID NO: 921303 - protein, 137 aa, Homo sapiens [sequence omitted]

SEQ ID NO: 921304 - protein, 137 aa, Homo sapiens [sequence omitted]

SEQ ID NO: 921305 - protein, 137 aa, Homo sapiens [sequence omitted]

SEQ ID NO: 921306 - protein, 137 aa, Homo sapiens [sequence omitted]

SEQ ID NO: 921307 - protein, 119 aa, Homo sapiens
MGVLAAAARCLVRGADRMSKWTSKRGPRSFRGRKGRGAKGIGFLTSGWRFVQIKEMVPEFVVPDLTGFKLKPYVSYLAPESEETPLTAAQLFSEAVAPAIEKDFKDGTFDPDNLGNFLR

SEQ ID NO: 921308 - protein, 178 aa, Homo sapiens
MPVLLLMTLEDRGSQEGAALHEEEQRRGSKRPTSPDCQLWVDRGGRCPQISDLAKNMADSRAQYDKLARKNREELDKYWSQQIEESTRVVTTQSAKVGAAEMTLTELRHRVQSLEIDLDSTRNLKASLENSLREVEARYALQMEPSLLFSKIIFGRVWEISYLHVFEGKQVVVCWFAY

SEQ ID NO: 921309 - protein, 238 aa, Homo sapiens
MPVLLLMTLEDRGSQEGAALHEEEQRRGSKRPTSPDCQLWVDRGGRCPQISDLAKNMADSRAQYDKLARKNREELDKYWSQQIEESTRVVTTQSAKVGAAEMTLTELRHRVQSLEIDLDSTRNLKASLENSLREVEARYALQMEQLNGILLHLESELAQTRAEGQRQAQEYEALLNIKVKLEAEIATYRRLLEDGEDFNLGDALDSSNSMQTIQKTTTRRIVDGKVVSETNDTKVLRH

SEQ ID NO: 921310 - protein, 1146 aa, Homo sapiens
TSVVPIIMETQKDEAAQAKGAAASGSTREQTAEKGAKNKAAEATEGPTSEPSSSGPGRLKKTAMKLFGGKKGICTLPSFFGGGRSKGSGKGSSKKGLSKSKTHDGLSEAAHGPEDVVSEGTGFSLPLPELPCQFPSSQSAHGALETGSRCKTSVAGATEKAVAEKFPSMPKPKKGLKGFFSSIRRHRKSKVTGAEQSEPGAKGPERVRARPHEHVSSAPQVPCFEETFQAPRKENANPQDAPGPKVSPTPEPSPPATEKMACKDPEKPMEACASAHVQPKPAPEASSLEEPHSPETGEKVVAGEVNPPNGPVGDPLSLLFGDVTSLKSFDSLTGCGDIIAEQDMDSMTDSMASGGQRANRDGTKRSSCLVTYQGGGEEMALPDDDDEEEEEEEEVELEEEEEEVKEEEEDDDLEYLWETAQMYPRPNMNLGYHPTTSPGHHGYMLLDPVRSYPGLAPGELLTPQSDQQESAPNSDEGYYDSTTPGFEDDSGEALGLVRRDCLPRDSYSGDALYEFYEPDDSLENSPPGDDCLYDLHGRSSEMFDPFLNFEPFLSSRPPGAMETEEERLVTIQKQLLYWELRREQLEAQEARAREAHAREAHAREAYTREAYGREAYAREAHTWEAHGREARTREAQAREVRCRETQVRETQARQEKPVLEYQMRPLGPSVMGLAAGVSGTSQISHRGITSAFPTTASSEPDWRDFRPLEKRYEGTCSKKDQSTCLMQLFQSDAMFEPDMQEANFGGSPRRAYPTYSPPEDPEEEEVEKEGNATVSFSQALVEFTSNGNLFSSMSCSSDSDSSFTQNLPELPPMVTFDIADVERDGEGKCEENPEFHNDEDLAASLEAFELGYYHKHAFNNYHSRFYQGLPWGVSSLPRYLGLPGLHPRPPPAAMALNRRSRSLDTAETLEMELSNSHLVQGYLESDELQAQQEDSDEEDEEEEEGEWSRDSPLSLYTEPPGAYDWPAWAPCPLPVGPGPAWISPNQLDRPSSQSPYRQATCCIPPMTMSISLSVPESRAPGESGPQLARPSHLHLPMGPCYNLQPQASQSMRARPRDVLLPVDEPSCSSSSGGFSPSPLPQAKPVGITHGIPQLPRVRPEHPQPQPTHYGPSSLDLSKERAEQGASLATSYSSTAMNGNLANVGER

SEQ ID NO: 921311 - protein, 667 aa, Homo sapiens
MTRGVRTAVVTMKKAAVWTDSRYWTQAERQMDCNWELHKEVGTTPIVTWLLTEIPAGGRVGFDPFLLSIDTWESYDLALQGSNRQLVSITTNLVDLVWGSERPPVPNQPIYALQEAFTGSTWQEKVSGVRSQMQKHQKVPTAVLLSALEETAWLFNLRASDIPYNPFFYSYTLLTDSSIRLFANKSRFSSETLSYLNSSCTGPMCVQIEDYSQVRDSIQAYSLGDVRIWIGTSYTMYGIYEMIPKEKLVTDTYSPVMMTKAVKNSKEQALLKASHVRDAVAVIRYLVWLEKNVPKGTVDEFSGAEIVDKFRGEEQFSSGPSFETISASGLNAALAHYSPTKELNRKLSSDEMYLLDSGGQYWDGTTDITRTVHWGTPSAFQKCSLLLPRGYFRPLTRPQPKLSLILFWKHRGLASWGRGEGIVSVHQRALGVEQRAAVMLHAAGRLWGRHCAGNTERGTKCCPGLQELTEAYTRVLIGNIDLSRLIFPAATSGRMVEAFARRALWDAGLNYGHGTGHGIGNFLCVHEWPVGFQSNNIAMAKGMFTSIEPGYYKDGEFGIRLEDVALVVEAKTKYPGSYLTFEVVSFVPYDRNLIDVSLLSPEHLQYLNRYYQTIREKVGPELQRRQLLEEFEWLQQHTEPLAARAPDTASWASVLVVSTLAILGWSV

SEQ ID NO: 921312 - protein, 143 aa, Homo sapiens
MFRLLSSCCSCLRTTEETRRNVTIPIIGLNNSGKTVLVEAFQKLLPSKTDHCMKSELTTLLLDEYELSIYDLNGDLKGREAWPNYYAQAHGLVFVLDSSDIRRMQEVKIILTHLLSDKRVAGKPILMSHVQPSETLKEETISP

SEQ ID NO: 921313 - protein, 396 aa, Homo sapiens
IFWADRQAVMHGDLACNTPRDLAVVPLDTGHLTAASNAEVRASPEVPDGSGATGSKGGTWATATPQLLSEEDLPWHCDLYQDTCRGDFWQSEPGKCEGGPWGRSSWIPQAEAGNECEAHEEFEEKGRAEGLGVDINPPDPALTTLVLKKEKQQTQKRKHTGKWKHPEHVKDPASPRQCLGPGCVYPTWPGSKYCSDDCGMRLAGAHINNILPQHIQQWQRSPCIANEHGKKMLEHIHHKQQNTYTCLKDMEHHFHELEAIILHGKQQASNKGEKGSKDLQIFCASCRRPISKRVTFHHMEHCFAKYECQLPVGSLYPTCIERATWLFCDVYNLKSKRYCKRLQVLCPEHSWDPKSLNGLDDACPHWSTYRKRGIVPQKLYVMDDTQEPHLHLDLIW

SEQ ID NO: 921314 - protein, 263 aa, Homo sapiens
MPPQRLLPPLFAAVAILKGKQAVPKKELGTGARRASSNLVLCKALRKRQSKLEAKGTGLWQSLNTITKQREMIKSVTRVSANLFKNVVVGDGYTEKVTFQMDFERCVGIPCREKVQTPGQTIFLGFLQFHSRALAPRNLPCWTVHLEQEGCGSSWGGTKGFDSPTGNTNVAPCGCTDERLSTAQPTVLLVVEKRVKGWGWYCTDPNKPLDEYRWQTCGGFPETISVQHSKDTDAGPLTGAQRTNEVTLLGMRVERELGEVVVV

SEQ ID NO: 921315 - protein, 420 aa, Homo sapiens
MLKVDDSNTRILIGCLVAIIFILLAIIVIILWRQFWQKMLEKASRRMLDDEMTVSLSLPSDSSMFNNNRSSSPSEQGSNSTYDRIFPLRPDYQEPSRLIRKLPEFAPGEEESGEDDVVGRASREKPQQASGCSGVVKPVQPSGPEGVPHYAEADIVNLQGVTGGNTYSVPAVTMDLLSGKDVAVEEFPRKLLTFKEKLGEGQFGEVHLCEVEGMEKFKDKDFALDVSANQPVLVAVKMLRADANKNASYTNLKFMATQIASGMKYLSSLNFVHRDLATRNCLVGKNYTIKIADFGMSRNLYRGDYYRIQGRAVLPIRWMSWESILLGKFTTASDVWAFGVTLWETFTFCQEQPYSQLSDEQVIENTGEFFRDQGRQTYLPQPAICPDSVYKLMLSCWRRDTKNRPSFQEIHLLLLQQGDE

SEQ ID NO: 921316 - protein, 182 aa, Homo sapiens
MQSDVELDCDIEPCGHTKFPPTLPLSTTVIVCSCHPVATASTMAEAFSKTTSEEDQSIQEPKEANSMTAQKQKKRHANSGGDIFGDSFAAYFPRVLKQVHQALSLSQEAVSVMDSMVRDILDRIATEAGHLAHYSKCVTITSRDIRMAVCLLLPGKMGKLAESQGTNATLSFLNGRFYQLSF

SEQ ID NO: 921317 - protein, 104 aa, Homo sapiens
RRLSTAGLWAGRLTWCGASLGLSPAYGLSRVFKPSGFLLVKMSDKPDLSEVEKFDRSKLKKTNTEEKNTLPSKEKLHYVRYGKRESEYADIRSKKPSFLPDVCQ

SEQ ID NO: 921318 - protein, 104 aa, Homo sapiens; identical to SEQ ID NO: 921317

SEQ ID NO: 921319 - protein, 104 aa, Homo sapiens; identical to SEQ ID NO: 921317

SEQ ID NO: 921320 - protein, 182 aa, Homo sapiens; identical to SEQ ID NO: 921316

SEQ ID NO: 921321 - protein, 181 aa, Homo sapiens
MNRSGMSPVGGDSTVSFYILLFIPPLEHRAKVGRADTPLSRGSEALESAGTSVGAGSPVPPVRRRTAALPRPLPAPGQGNGARGLAKARGGRCTAPLRAGDALLRGPSAFTSWARLALPCAAARQSRYPARKCLLPGKTAAVCGSGWQSLKPSRTSPGRQKALCLSWGLFRQNEQLKKCRL

SEQ ID NO: 921322 - protein, 326 aa, Homo sapiens
IWHFLVLIMRIVLQLAKMNLMDITKIFSLLQPDKEEEDTDTEEKQALNQAVYDNDSYTLDQLLRQERYKRFINSRSGWGVPGTPLRLAASYGHLSCLQVLLAHGADVDSLDVKAQTPLFTAVSHGHLDCVRVLLEAGASPGGSIYNNCSPVLTAARDGAVAILQELLDHGAEANVKAKLPVWASNIASCSGPLYLAAVYGHLDCFRLLLLHGADPDYNCTDQGLLARVPRPRTLLEICLHHNCEPEYIQLLIDFGANIYLPSLSLDLTSQDDKGIALLLQARATPRSLLSQVRLVVRRALCQAGQPQAINQLDIPPMLISYLKHQL

SEQ ID NO: 921323 - protein, 684 aa, Homo sapiens
CTHVRTYVCAASFDLQKPAATHSVRCLSGWGSGPGKTRAVWMLRGGEQQTSFKMSHQEGSTDGLPDLGTESLFSSPEEQSGAVAATEASSDIDIATSELSVTVTGDGSDSRDGGFPNDASTENRSSDQESASEDIELESLEDFEHFLMSGESLFHYPLVGEEETEREEEDEEIQEEGGEEEEEEEEEEEEEEEEEEEEEEQPRAGPQGSGGNHEQYSLEEDQALEEWVSSETSALPRPRWQVVTALHQRQLGSRPRFVYEACGARAFVQRFRLQYRLADHVGCVNTVHFNQRGTRLASSGDDLKVIVWDWVRQRPVLNFESGHTNNVFQAKFLPNCGDSTLAMCARDGQVRVAELINASYFNNTKCVAQHRGPAHKLALEPDSPYKFLTSGEDAVVFTIDLRQDRPASKVVVTRENDKKVGLYTITVNPANTYQFAVGGQDQFVRIYDQRKIDKKENNGVLKKFTPHHLVNCDFPTNITCVVYSHDGTELLASYNDDDIYLFNSSHSDGAQYSKRFKGHRNNTTVKGVNFYGPRSEFVVSGSDCGHIFFWEKSSCQIIQFLKGSREGTINCLEPHPYLPVLACSGLDHDVKIWTPTAKAATELTGLKKVIKKNKWERDEDSLHHGSLFDQYMLWFLLRHVTQRGRHQDWRSGEAEFPDEESDESSSTSETSEEEVQDRVQCMPS

SEQ ID NO: 921324 - protein, 148 aa, Homo sapiens
MAEASSETTSEEGQSIQEPKEANSTKAQKQKRRGCRGSRRRHANRRGDSFGDSFTPYFPRVLKQVHQGLSLSQEAVSVMDSMIHDILDRIATEAGQLAHYTKRVTITSRDIQMAVRLLLPGKMGKLAEAQGTNAALRTSLCAIWQQRK

SEQ ID NO: 921325 - protein, 216 aa, Homo sapiens
RRAPSPPLPVSAPAAAAAAQRAAQMQAIKGVVVGDGAVGKTCLLISYTTNAFPGEDIPTAFDNYSANVMVDGKLVNLGLWNTAGQEDYDRLRPLSYPQADVFLICFSLVSPASFENVLAKWYPEVQHHCPNTPIILVGTKLDLRDDKDRIQKLKEKKLTPITYPQGLAMAKEMGAVKYLECLALTRRGLKTVFDEAIRAVLCPPPVKKRKRKCLQL

SEQ ID NO: 921326 - protein, 216 aa, Homo sapiens; identical to SEQ ID NO: 921325

SEQ ID NO: 921327 - protein, 159 aa, Homo sapiens
HLGVYVQVTGDAMAWLGLRGLTISICGVTQFPLHDVAPGRHQSAYWLYGLASSEKFLWIGQGTKGRCPSIECRQGTDKCDKHSKEPFAMSGDILSYYHWRVDVASIWWVEPRNAARHPMSAEDGHTTENPPASSVNSTHIENLELKNTKIPHMRSCKSY

SEQ ID NO: 921328 - protein, 351 aa, Homo sapiens
MSDKNQIAARASLIEQLMSKRNFEDLGNHLTELETIYVTKEHLQETDVVRAVYRVLKNCPSVALKKKAKCLLSKWKAVYKQTHSKARNSPKLFPVRGNKEENSGPSHDPSQNETLGICSSNSLSSQDVAKLSEMIVPENRAIQLKPKEEHFGDGDPESTGKRSSELLDPTTPMRTKCIELLYAALTSSSTDQPKADLWQNFAREIEEHVFTLYSKNIKKYKTCIRSKVANLKNPRNSHLQQNLLSGTTSPREFAEMTVMEMANKELKQLRASYTESCIQEHYLPQVIDGTQTNKIKCRRCEKYNCKVTVIDRGTLFLPSWVRNSNPDEQMMTYVICNECGEQWYHSKWVCW

SEQ ID NO: 921329 - protein, 351 aa, Homo sapiens; identical to SEQ ID NO: 921328

SEQ ID NO: 921330 - protein, 138 aa, Homo sapiens
MKIVEEKCSLHKETKKNPPRNQPQLNRSGRCRQVTLHVRSNTLKTKDAWQNPVPFQRQSCVPCLKHRISLSDLFLIMLIVFALKRQSFCQMGHTNKFLKLSLHVYWEIHSFHHNIPKDLTPSNVNSLISHLIIYIWNG

SEQ ID NO: 921331 - protein, 297 aa, Homo sapiens
MPRGQKSKPRAREKRRQAREEPKDVEGAQVTVAEEGESLTSSPHFKDSPERSSAVETPSNEQEPGIALAITTAAAVSCTASNEGIDSQVEERSNASQAQATTGQRASDHLELVFGLDVREVDPNKSIYVLVNKLELGHDTRVNPNRSLPKNGLLMTILSAIFSQGNCAPEEEVWKVLNMMGVYEGQEHVIYGEPRNLLTKDLVQEQYLEYWEVPNSSPPSYEFLWRPRAYAETSKMKVLEFLAKIHGTVPSAFPSHYEEALKDVEERSQARIAARARTATMASARSKATSSSLACSK

SEQ ID NO: 921332 - protein, 161 aa, Homo sapiens
ASFPASMMLEGSWCMCEERCERSTMDPPKTEVKRTMRSVPCGFQHDTSNHTMVWLGPNLIAEMKEPTLPDPQPWTMQLPRTTQAPDVTWGMPKRTTQEAEQILLQTQTPFTPGCKARIRAMTTTPDKPAAAYICALQSIRPDAENRKGEELGIQSGWWEIL

SEQ ID NO: 921333 - protein, 166 aa, Homo sapiens
MAAKDQLEVQVMAAQEMELAGKDPVSHEHEERKPVTETKEGDVTDEHGERGSFAETDEHTGVDTKELEDIAADIKEHLAAKRKRIEKIAKACSEIKNRIKNVLRTTQLKRQKRDYRISLKLPNVLEEFITDEQKDEEGDGEKEEQIKIFQEQQKRWQQDGKGTERD

SEQ ID NO: 921334 - protein, 136 aa, Homo sapiens
MLKPAHIFEKLNIIRTINSSHHRQKRATSLSSEDAAGCRMERRGQEGAKPTGAEANNSQPPTLHGHTTEETEFRIQSYVWINLTIILSEKTSSTELCTKEKPNCAKQYLGIYIDSKVIQTRAAAHSSGTLSTFRLD

SEQ ID NO: 921335 - protein, 376 aa, Homo sapiens
QQNALELMMDHLQKQPNTLRHVVIPDLQSSEAVPKKQQKQHAGQVKRPLPHPKDVKCFCGLSLSNSLKNTGELQEPCVAFNQQQLVQQEQHLKEQQRQLREQLQQLREQRKVQKQKKMQEKKKLQEQKMQEKKKLQEQRRQKKKKLQERKKWQGQMLQKEPEEEQQKQQLQEQPLKHNVIVGNERVQICLQNPRDVSVPLCNHPVRFLQAQPIVPVQRAAEQQPSGFYQDENCGQQEDESQSFYPEAYQGPPVNQLPLIDTSNSEAISSSSIPQFPITSDSTISTLETPQDYIRLWQELSDSLGPVVQVNTWSCDEQGTLHGQPTYHQVQVSEVGVEGPPDPQAFQGPAAYQPDQMRSAEQTRLMPAEQRDSNKPC

SEQ ID NO: 921336 - protein, 237 aa, Homo sapiens
MFGPDLHCTPGVLTPAQIKSICQAILDSGKQYAIKKRKPFPLMYSYYGTEYLAHGLSSILQMLLSYHEHLKPSDRELVWQSVDFLMEQEQNCNWPPELGETIERENELVHWCHGAPGIAYLFAKAYLVSKKPQYLDTCIRCGELTWQKGLLKKGPGICHGVAGSAYVFLLLYRLTGNSKYIYRAQRFAQFLFTEEFKAGSRVLESIYSLYEGFSGTVCFLIDLLQPNQAEFPLFSSL

SEQ ID NO: 921337 - protein, 321 aa, Homo sapiens
TLASFFHLHPVVFSMGEQNHSPGKELQHRTRAEAPGKKSWHSQAYALGAVSNFMSTFLTFPIYKVVFRQQIHAMAVSEAVRQLWHEGPQYFYRGIYPPLLSKTLQGTLLFGTYDSLLCFLSPVGPHTLGHRWAAGLMSGVVEAVALSPFERVQNVLQDGRKQARFPSTFSILKEFNSYGLWGRLSLGYYRGFWPVLARNSLGSALYFSFKDPIQDGLAEQGLPHWVPALVSGSVNGTITCLVLYPLIVLVANMQSHIGWQNMPSLWASAQDVWNTRGRKLLLIYRGGSLVILRSSVTWGLTTAIHDFLQRKSHSRKELKTD

SEQ ID NO: 921338 - protein, 156 aa, Homo sapiens
MLWHLEIFSTSTRNYLSQFPTSSSSSSGTTLAWTSLSISLSAFWSKPFNKSLGSSYPSHIFLSSEPFNFLESSKLSHIFLSSSGPSKLFQPLPVTQFQICFYIFRYPYSSTPLSVVPIYCNVNTVLKWKEINCMENHLGIVIVQVRSSEGLDYIFL

SEQ ID NO: 921339 - protein, 171 aa, Homo sapiens
MESLRGYTHSDIGYRSLAVGEDIEEVNDEKLTVTSLMARGGEDEENTRSKPEYGTEAENNVGTEGSVPSDDQDREGGGGHEPEQQQEEPPLTKPEQQQEEPPLLELKQEQEEPPQTTVEGPQPAEGPQTAEGPQPPERKRRRRTAFTQFQLQELENFFDESQYPDVVARQL

SEQ ID NO: 921340 - protein, 157 aa, Homo sapiens
GCQGFLSGTTFSLHFPGNMTYMTLVISLLLPMYIKRPLCGHNVTGHYTLVVEKNLEVCAEENETLVFEVGLVLNSISGTQGASWGQKRRVRAPPAGHQRQCEILSAHCVADHRDRYKNHCNGVLQSGREIGLNSKYSMGQWDFTAKDQDGGQRMENC

SEQ ID NO: 921341 - protein, 490 aa, Homo sapiens
ATERAAMNTQKGSLTINVHRGSLAMSIQRGSLVPRDMDSSGRDMQLRVIPAEVKFLDTMAGRVYRLPITVHNICRWNQKIRFKEPVKPQFKLMLTSLDKELASGLQMTAMVEYHPDKDEDTFDRLLISIENKTTEIPLIGLIPSCQLEIESVVNFGTLVANSKVYSKEITITNHGKAPGIFKAEYHGQLPILIFPTSGIVDAKSSMVIKVDFCADQPRIVDEEAIVILQGQPEMLLSIKAHVVEQIIELLSMSSDRRLECIHFGPVFFGSSKIKHARVYNNSPEPINWVAIIQDDAVGEELKVELALTGTGLPVLLQFDPGPVLNFKPCFMGERSEIQCIIKNQCELLPVTYHFKKTANFEIDPEKGKITGGGMVDVMCSFVPHQLGVFKVKQMIEIIGLVAEEDLQSLSVKSFHHVYLAFNSICKASTKKVVMKFDPGLFSGPSRLGTSVLEGLKCSWSAGHNIPIGGAVKSTSSGPGWWDALVLAVVV

SEQ ID NO: 921342 - protein, 252 aa, Homo sapiens
TARYEAGCCQDDSWRMESVLSKYEDQITIFTDYLEEYPDTDELVWILGKQHLLKTEKSKLLSDISARLWFTYRRKFSPIGGTGPSSDAGWGCMLRCGQMMLAQALICRHLGRDWSWEKQKEQPKEYQRILQCFLDRKDCCYSIHQMAQMGVGEGKSIGEWFGPNTVAQVLKKLALFDEWNSLAVYVSMDNTVVIEDIKKMCRVLPLSADTAGDRPPDSLTASNQSKGTSAYCSAGKPGVLGLRWVNNHCYWG

SEQ ID NO: 921343 - protein, 398 aa, Homo sapiens
MESVLSKYEDQITIFTDYLEEYPDTDELVWILGKQHLLKTEKSKLLSDISARLWFTYRRKFSPIGGTGPSSDAGWGCMLRCGQMMLAQALICRHLGRDWSWEKQKEQPKEYQRILQCFLDRKDCCYSIHQMAQMGVGEGKSIGEWFGPNTVAQVLKKLALFDEWNSLAVYVSMDNTVVIEDIKKMCRVLPLSADTAGDRPPDSLTASNQSKGTSAYCSAWKPLLLIVPLRLGINQINPVYVDAFKECFKMPQSLGALGGKPNNAYYFIGFLGDELIFLDPHTTQTFVDTEENGTVNDQTFHCLQSPQRMNILNLDPSVALGFFCKEEKDFDNWCSLVQKEILKENLRMFELVQKHPSHWPPFVPPAKPEVTTTGAEFIDSTEQLEEFDLEEDFEILSV

SEQ ID NO: 921344 - protein, 321 aa, Homo sapiens
MLRCGQMMLAQALICRHLGRDWSWEKQKEQPKEYQRILQCFLDRKDCCYSIHQMAQMGVGEGKSIGEWFGPNTVAQVLKKLALFDEWNSLAVYVSMDNTVVIEDIKKMCRVLPLSADTAGDRPPDSLTASNQSKGTSAYCSAWKPLLLIVPLRLGINQINPVYVDAFKECFKMPQSLGALGGKPNNAYYFIGFLGDELIFLDPHTTQTFVDTEENGTVNDQTFHCLQSPQRMNILNLDPSVALGFFCKEEKDFDNWCSLVQKEILKENLRMFELVQKHPSHWPPFVPPAKPEVTTTGAEFIDSTEQLEEFDLEEDFEILSV

SEQ ID NO: 921345 - protein, 321 aa, Homo sapiens; identical to SEQ ID NO: 921344

SEQ ID NO: 921346 - protein, 149 aa, Homo sapiens [sequence omitted]

SEQ ID NO: 921347 - protein, 156 aa, Homo sapiens
MESVLSKYEDQITIFTDYLEEYPDTDELVWILGKQHLLKTEKSKLLSDISARLWFTYRRKFSPIGGTGPSSDAGWGCMLRCGQMMLAQALICRHLGRDWSWEKQKEQPKEYQRILQCFLDRKDCCYSIHQMAQMGVGEGKSIGEWFGPNTVAQVLK

SEQ ID NO: 921348 - protein, 337 aa, Homo sapiens
TARYEAGCCQDDSWRMESVLSKYEDQITIFTDYLEEYPDTDELVWILGKQHLLKTGGTGPSSDAGWGCMLRCGQMMLAQALICRHLGRDWSWEKQKEQPKEYQRILQCFLDRKDCCYSIHQMAQMGVGEGKSIGEWFGPNTVAQVLKKLALFDEWNSLAVYVSMDNTVVIEDIKKMCRVLPLSADTAGDRPPDSLTASNQSKGTSAYCSAWKPLLLIVPLRLGINQINPVYVDAFKECFKMPQSLGALGGKPNNAYYFIGFLGDELIFLDPHTTQTFVDTEENGTVNDQTFHCLQSPQRMNILNLDPSVALGFFCKEEKDFDNWCSLVQKVKLYVFL

SEQ ID NO: 921349 - protein, 348 aa, Homo sapiens
SFQFLATMTSAAKKIILSKYEDQITIFTDYLEEYPDTDELVWILGKQHLLKTEKSKLLSDISARLWFTYRRKFSPIGGTGPSSDAGWGCMLRCGQMMLAQALICRHLGRDWSWEKQKEQPKEYQRILQCFLDRKDCCYSIHQMAQMGVGEGKSIGEWFGPNTVAQVLKKLALFDEWNSLAVYVSMDNTVVIEDIKKMCRVLPLSADTAGDRPPDSLTASNQSDELIFLDPHTTQTFVDTEENGTVNDQTFHCLQSPQRMNILNLDPSVALGFFCKEEKDFDNWCSLVQKEILKENLRMFELVQKHPSHWPPFVPPAKPEVTTTGAEFIDSTEQLEEFDLEEDFEILSV

SEQ ID NO: 921350 - protein, 398 aa, Homo sapiens; identical to SEQ ID NO: 921343

SEQ ID NO: 921351 - protein, 351 aa, Homo sapiens
TARYEAGCCQDDSWRMESVLSKYEDQITIFTDYLEEYPDTDELVWILGKQHLLKTEKSKLLSDISARLWFTYRRKFSPIGGTGPSSDAGWGCMLRCGQMMLAQALICRHLGRDWSWEKQKEQPKEYQRILQCFLDRKDCCYSIHQMAQMGVGEGKSIGEWFGPNTVAQVLKKLALFDEWNSLAVYVSMDNTVVIEDIKKMCRVLPLSADTAGDRPPDSLTASNQSDELIFLDPHTTQTFVDTEENGTVNDQTFHCLQSPQRMNILNLDPSVALGFFCKEEKDFDNWCSLVQKEILKENLRMFELVQKHPSHWPPFVPPAKPEVTTTGAEFIDSTEQLEEFDLEEDFEILSV

SEQ ID NO: 921352 - protein, 321 aa, Homo sapiens; identical to SEQ ID NO: 921344

SEQ ID NO: 921353 - protein, 214 aa, Homo sapiens [sequence omitted]

SEQ ID NO: 921354 - protein, 134 aa, Homo sapiens
MLEVGPGGRCLGHGGGSFMASCCPCYKPRHILFLLRVLVAEGWKLSPFQEFALGKQELAKVTLTRSRTVKFKVWSMGVGYESLAPRLNLGCYIRITPHNGKILKIPWNVNPLEVGMTASNGMADSQIMVTNWLR

SEQ ID NO: 921355 - protein, 104 aa, Homo sapiens
MAQVRETSLPSGSGVRWISGGGGGASPEEAVEKAGKMEEAAAGATKASSRREAEEMKLEPLQEREPAPEENLTWSSSGGDEKVLPSIPLRCHSSSSPVCPRRKP

SEQ ID NO: 921356 - protein, 470 aa, Homo sapiens
MAQVRETSLPSGSGVRWISGGGGGASPEEAVEKAGKMEEAAAGATKASSRREAEEMKLEPLQEREPAPEENLTWSSSGGDEKFMTSGFEDKQSTCETKEQEPKLVKPKKKRRKKSVYTVGLRGLINLGNTCFMNCIVQALTHIPLLKDFFLSDKHKCIMTSPSLCLVCEMSSLFHAMYSGSRTPHIPYKLLHLIWIHAEHLAGYRQQDAHEFLIAILDVLHRHSKDDSGGQEANNPNCCNCIIDQIFTGGLQSDVTCQACHSVSTTIDPCWDISLDLPGSCATFDSQNPERADSTVSRDDHIPGIPSLTDCLQWFTRPEHLGSSAKIKCNSCQSYQESTKQLTMKKLPIVACFHLKRFEHVGKQRRKINTFISFPLELDMTPFLASTKESRMKEGQPPTDCVPNENKYSLFAVINHHGTLESGHYTSFIRQQKDQWFSCDDAIITKATIEDLLYSEGYLLFYHKQGLEKD

SEQ ID NO: 921357 - protein, 537 aa, Homo sapiens
MAVALGCAIQASLNQGSVFQEYDTDCEVFRQRFRQFQYREAAGPHEAFNKLWELCCQWLKPKMRSKEQILELLVLEQFLTILPTEIETWVREHCPENRERVVSLIEDLQRELEIPEQQVDMHDMLLEELAPVGTAHIPPTMHLESPALQVMGPAQEAPVAEAWIPQAGPPELNYGATGECQNFLDPGYPLPKLDMNFSLENREEPWVKELQDSKEMKQLLDSKIGFEIGIENEEDTSKQKKMETMYPFIVTLEGNALQGPILQKDYVQLENQWETPPEDLQTDLAKLVDQQNPTLGETPENSNLEEPLNPKPHKKKSPGEKPHRCPQCGKCFARKSQLTGHQRIHSGEEPHKCPECGKRFLRSSDLYRHQRLHTGERPYECTVCKKRFTRRSHLIGHQRTHSEEETYKCLECGKSFCHGSSLKRHLKTHTGEKPHRCHNCGKSFSRLTALTLHQRTHTEERPFKCNYCGKSFRQRPSLVIHLRIHTGEKPYKCVPCGKKGDSEFCQTIKMCQEHKDEGDVICLKWILQLQQLQPRNI

SEQ ID NO: 921358 - protein, 164 aa, Homo sapiens
MAVALGCAIQASLNQGSVFQEYDTDCEVFRQRFRQFQYREAAGPHEAFNKLWELCCQWLKPKMRSKEQILELLVLEQFLTILPTEIETWVREHCPENRERVVSLIEDLQRELEIPEQQVRKECGIFVIGPKEVAEAAGTRPHICLYVIPQPQDFSRVLFLFLFC

SEQ ID NO: 921359 - protein, 733 aa, Homo sapiens
PDNCVSKETRLQRRMMRCSSLKKHISFHLYQYDTDMIGNAGLVIQQPSILQSEDKSYNGGGIGSSNRIMDFLEEPIPGVGTYDDFNTIDWVREKSRDRDRHREITNKSKESTWALIHSGAFAYIVNYFMYVLWALLFAFLAVSLVKVFAPYACGSGIPEIKTILSGFIIRGYLGKWTLVIKTITLVLAVSSGLSLGKEGPLVHVACCCGNILCHCFNKYRKNEAKRREVLSAAAAAGVSVAFGAPIGGVLFSLEEVSYYFPLKTLWRSFFAALVAAFTLRSINPFGNSRLVLFYVEFHTPWHLFELVPFILLGIFGGLWGALFIRTNIAWCRKRKTTQLGKYPVIEVLVVTAITAILAFPNEYTRMSTSELISELFNDCGLLDSSKLCDYENRFNTSKGGELPDRPAGVGVYSAMWQLALTLILKIVITIFTFGMKIPSGLFIPSMAVGAIAGRLLGVGMEQLAYYHQEWTVFNSWCSQGADCITPGLYAMVGAAACLGGVTRMTVSLVVIMFELTGGLEYIVPLMAAAMTSKWVADALGREGIYDAHIRLNGYPFLEAKEEFAHKTLAMDVMKPRRNDPLLTVLTQDSMTVEDVETIISETTYSGFPVVVSRESQRLVGFVLRRDLIISIENARKKQDGVVSTSIIYFTEHSPPLPPYTPPTLKLRNILDLSPFTVTDLTPMEIVVDIFRKLGLRQCLVTHNGRLLGIITKKDVLKHIAQMANQDPDSILFN

SEQ ID NO: 921360 - protein, 720 aa, Homo sapiens
PDNCVSKETRLQRRMMRCSSLKKHISFHLYQYDTDMIGNAGLVIQQPSILQSEDKSYNGGGIGSSNRIMDFLEEPIPGVGTYDDFNTIDWVREKSRDRDRHREITNKSKESTWALIHSGAFAYIVNYFMYVLWALLFAFLAVSLVKVFAPYACGSGIPEIKTILSGFIIRGYLGKWTLVIKTITLVLAVSSGLSLGKEGPLVHVACCCGNILCHCFNKYRKNEAKRREVLSAAAAAGVSVAFGAPIGGVLFSLEEVSYYFPLKTLWRSFFAALVAAFTLRSINPFGNSRLVLFYVEFHTPWHLFELVPFILLGIFGGLWGALFIRTNIAWCRKRKTTQLGKYPVIEVLVVTAITAILAFPNEYTRMSTSELISELFNDCGLLDSSKLCDYENRFNTSKGGELPDRPAGVGVYSAMWQLALTLILKIVITIFTFGMKIPSGLFIPSMAVGAIAGRLLGVGMEQLAYYHQEWTVFNSWCSQGADCITPGLYAMVGAAACLGGVTRMTVSLVVIMFELTGGLEYIVPLMAAAMTSKWVADALGREGIYDAHIRLNGYPFLEAKEEFAHKTLAMDVMKPRRNDPLLTVLTQDSMTVEDVETIISETTYSGFPVVVSRESQRLVGFVLRRDLIISIENARKKQDGVVSTSIIYFTEHSPPLPPYTPPTLKLRNILDLSPFTVTDLTPMEIVVDIFRKLGLRQCLVTHNGRLLGIITSCLSQGSSD

SEQ ID NO: 921361 - protein, 733 aa, Homo sapiens; identical to SEQ ID NO: 921359

SEQ ID NO: 921362 - protein, 106 aa, Homo sapiens
YDAHIRLNGYPFLEAKEEFAHKTLAMDVMKPRRNDPLLTVLTQDSMTVEDVETIISETTYSGFPVVVSRESQRLVGFVLRRDLIISIGKDFRKGIVESTVELNKYA

SEQ ID NO: 921363 - protein, 200 aa, Homo sapiens
MLPSSNQILTVFGDVAASPTVVADVSEKDTVLSITTGLTTAVTGVSVMSYKVCTRPHSRVTDIPDALPARLSSYSRSQKHNNLLTERRGVRGPRGLQTGRESEELKGRPLTIAEEIKVDAAHALEAHCGDSGEVVLFWHQRCGSRQSWSCACCPLPLRPAAAIQACLSLSLSFMPLSPPHLGTASSKNSCYDTEFNQESA

SEQ ID NO: 921364 - protein, 214 aa, Homo sapiens
MLPSSNQILTVFGDVAASPTVVADVSEKDTVLSITTGLTTAVTGVSVMSYKVCTRPHSRVTDIPDALPARLSSYSRSQKHNNLLTERRGVRGPRGLQTGRESEELKGRPLTIAEEIKVDAAHALEAHCGDSGEVVLFWHQRCGSRQSWSCACCPLPLRPAAAIQACLSLSLSFMPLSPPHLGTASSKNSCYDTEFNQEVMPHSIRNYATAEEVY

SEQ ID NO: 921365 - protein, 200 aa, Homo sapiens; identical to SEQ ID NO: 921363

SEQ ID NO: 921366 - protein, 214 aa, Homo sapiens; identical to SEQ ID NO: 921364

SEQ ID NO: 921367 - protein, 188 aa, Homo sapiens
QQRLPLKMVCLLHFNAGKDPVRDECEERNPFTETREEDVTDEHGEREPFAEKDEHTGQKRDYRHTRKLLNVLKEYIAEKQKDDEAEEAEAAAAAAEAAAAAEAAAAAAEVIVVEDEEEEEKEEEEEKEEEEEEGEEEGGGEEGEEGGGGGEGEETEEEEEEEEEEEEEEQIVESISRKTEEVATTYRC

SEQ ID NO: 921368 - protein, 226 aa, Homo sapiens
IQWVQKAGLLLHRVWKHGMPLSRCQYYALGLPSFQKFDGAVRRGQLSSIPYNGIFTDCLHTAPGKATDTQHHNMKAARRKAVPCKVIGVELPKTMGTHLLQQCDLDMRPGVKRDHFGALKFDWQCKGKMWGCSFHTRSPLGPSGAERRGPLPSRPQNSRSTDSLHCVPGKATDTQYQPQKRPGQKVIFCKATGAGLSKAIVAHLLHQCSVDDTSSATEKWGTDRIH

SEQ ID NO: 921369 - protein, 890 aa, Homo sapiens
MAMNFGDHASGFRHDDVIRFINNEVLRNGGSPAFYTAFRSRPWNEVEDRLRAIVADPRVPRAIKRACTWSALALSVQVAARQQEELLYQVWWLQGHVEECQATSWALTSQLQQLRLEHEEVATQLHLTQAALQQVLNERDGLCGRLLEVERSMQVYPMPQDFVPGPEAGQYGPVAGTLNAEQSEAVATEAQGMPHSEAQVAAPTAVYYMPEPQSGRVQGMQPLLLMQAPHPVPFHMPSPMGLPYSTPLPPPVVMESAAAIAPQMPPAGIYPPGLWATVGSQEETAPPWDQKCHGQDGYPENFQGVYHPGDNRSCNQKEGSECPQGMTSQGDSSSHSLKKDPVMQEGTAPPEFSRSHSLEKKPVMPKEMVPLGDSNSHSLKKDPVVPKEIVPIGDSNSHSLTKNPVVHKEMVSLGDSNSHSMKKDPVMPQKMVPLGDSNSHSLKKDPMMCQEMVPLGDSNSHSLKKDPVVAQGTAPLMYSRRHSQKKVPMMPKEMVPLGESHSHSLKKDLVVPKELVPLGDSKSHRMKKDPVMPQKMVPLGDSRSHSLKKDPVMPQNMIPLEDSNSHSLKKDPVMPQNMIPLEDSNSHSLKKDPMMHQEMVPLGDSNSHSLKKDPVVPQGTAPLMFSRRHSLKKVPVMPKEMVPLGDSHSLKKDPVMPQNMVPLEDSNSHSLKKDPVVPQGTAPLTFSRRHSLKKVPVVPQGTASLGFGRIHSLKKELVMPEEMVPLGDSNSHSMKKDLVMPKEMVPLGDSNSHSLKKDPVVHQEVVSLGDSNSHSLKKHPVIPQGTASLRFSKSHSQKEDQERPQATPLEDSKSHGVKNSPWKHQPQGQKVKEQKRKKASESQQQKPASCSSPVNWACPWCNAMNFPRNKVCSKCKRVRMPVENGSVDPA

SEQ ID NO: 921370 - protein, 145 aa, Homo sapiens
MFLSEKMDMSASFFRLSAPSDFSSCIFDTFVILERLLYSTTMNTWFSSAGLVLQLPAPLNTHLCPVENANGSAHSEWQLHSTVHTRNLAASVDEMISPPFSRGAMKLSNKQCILKSESSGYKKRKTLGNSHYSKTHQYSWQGKFK

SEQ ID NO: 921371 - protein, 137 aa, Homo sapiens
MAQTLPIPELDEILNITLMLECVKTFPAARRRPRHTRRIPSDNEGRDWGYAIASQGIPKIAGKPPETTKRQRRTPLQVSEKKQGSAHSCLRHLASKTVRQYISVVLSYPVCGTLSWQPWALPPLQAAFICGSPPYPS

SEQ ID NO: 921372 - protein, 2083 aa, Homo sapiens
PSADVEGRRWRRRRRKRQRQQRRRRRQRRLLRRRPRRRRRWRRRRRRMPASQARGRQARVSAHPARGRAPGCVTWSRCSRDARGAGPSTPLRVCVTCAITDNFAEGDFTMADYALLEDCPYVDDCVFAAEFMTDDYVRVTQLYCDGVGKQYKDYVQSERNLEFDICSIWCSKPISVLQDYCDAIKINIFWPLLFQHQNSSVISRLHPCVDANNSRASEINLKRLQHLELMEDIVDLAKKAANDSLLIGGLLRIGYKIENKILAMEEALNWIKYAGDVTILTKLGSIDNCWPMLSIFFTEYKYHITKIVMEDCNLLEELKTQSCMDCIEQGELMKMKGNEEFSKERFDIAIIYYTRAIEYRPENHLLYGNRALCFLRTGQFRNALGDGKRATILKNTWPKGHYRYCDALSMLGEYNWALQANITAQKLCKNDPEGIKDLIQQHVKLQKQIEDLQGRTANKNPIKAFYENRAYTPRSLSAPVFSTSLNFVEKERDFRKINHEMANGGNQNLKVMDEALMVDDCDCHPEFSPPSSQPPKHKGKQKSRNNESEKFSSSSQLTLPADLKNILEKQFSKSSRGAHQDFANIMTMLRSLIQDGYTALLEQRCRSAAHAFTELLNGLDPQKIKQLNLAMINYVLVVYGLAISLLGIGQPEELSEAENQFKRIIEHYHNEGLDCLAYCGIGKVYLKKNRFLEALNHFEKARTLIYRLPGVLTWPTSNVIIEESQPEKIKMLLEKFVEECKFPPVPDAICCYQKCCGYSKIQIYITDPDFKGFIRISCCQYCKIEFHMNCWKKLKTTTFNDKIDKDFLQGICLTPDCEGVISKIIIFSSGGQVKCEFEHKVIKEKVPPRPILKQKCSSLEKLRLKEDKKLKRKIQKKEAKKLAQERMEEDLRESNPPKNEEQKETVDNVQHCQFLDDRILQCIKQYADKIKSGIWNTATLLKELLSWKVLSTEDYTTCFSSRNFLNEAVDYVIRHLIQEKNRVKTRIFLHVLSELKEVEPKLAAWIRKLNSFGLDATGPFFSRYEASLKQLDFSIMTFLWNEKYGHKLDSIEGKQLDYFFEPTSSKEARCLIWLLEEHRDKFPALHSALDEFFDIMDSRCTVLRKQDSGEAPFSSTKVKNKGKKKKPKDSKPMLVGSGTTSVTPNNEIITSSEDHSNQNSDTAGPFAVPDHLRQDVEEFEALYDQHSNEYVVRNKKLWDMNPKQKCSTLYDYFSQLLEEHGPLDMSHKMFSEEYEFFPEETRPILEKAGGLKSFLLGCPRFVVIDNCIALKKVASRLKKKRKKKNIKTKVEDISKAGEYLQVKLPLNSAAREFKPDVKSKPVSGSSSAPASEDVKPKPLSANSPKPACEDVKAKPVSDNSSRQVSEDGKPKGFSSNSPKPGSEDANYKRVSSNSPKPVLEDVKPTYWAQSHLVTGYCTYLPFQRFDNTRTSPAYINVLPGLPQYTSIYTPLVSLSPEYQLPRSVPVVPSFVANDRADKNATAYFEGHHLNAENAAGHQIASETQILEDSSLISVKSQCSTGDAHTVLSESNRKDGHCGNSNNKCEVIPESTSAVTNIPQVQMVAIQVSWNITHQEVNTEPYNPFEKQQGEISRIEKEYQVLQDQLKEAYENYEQIKLKGLEETRDLEEKLKRHLEENKISKTELDWLLQDLEREIKKWQEEKKEIQKTLKSLKKKIKKVSNANEMYTQKNDGNDKEHELHLDQSLEISNTLTNEKMKIEECIKKGKKDYEESHQRAVAAEVSVLENWKESEVYKLQIMQSQAEAYLKKLELISHDPAAYPDMESDICSWELFLSNVTKETEKAKYQFEEQIKAIKNGSRLSELSKVQISELSFPACNTVHPELLPESSGHDDQGFMTSASDVTGNQAALHRDPSVFSAGDSPGEAPSALLPGPPPSQPEATQLPGPKGAGQAALSEQSPAADQKQPVPPGCAACSSQSPKKPFNSIIEHLSVVFPCYNSTELAGFIKKVRSKNKNSLSGLSIDEIVQRVTEHILDEQKKKKPNPGKDKRTYEPSSAAHVTRSSQGPPLAVVAPSPKTKGQKAEDVPVRVALGASSCEICHEVFKSKNVLCSSKYKRRIGISVE

SEQ ID NO: 921373 - protein, 140 aa, Homo sapiens
MAPIQKALSPRNVLSKSDTHSKKPEMGIIWAIEVARYRGLLGALLRGTLPGHSCVGDYLPAVQHRTVAVRWRKGGEWRLRKQQVGQEGAKPTGAEANNSQPPTLHGHTTEETEFRIQSYMQINLTIILSEKTSSTELCTK

SEQ ID NO: 921374 - protein, 143 aa, Homo sapiens
MLIYHSKNPGAFKNYAKSTLPVLYKWKDRTWMTAHLFTVWFTDYFKPTVETFCSETREIPFKILLLINNASSHPRALMEMYKDINVVFMPVNTSILLPMNQGKLPQPLQPSASTTLISQQPSTWRQDPTPAKKLPLDEASDDH

SEQ ID NO: 921375 - protein, 120 aa, Homo sapiens
SAAAEPSSAAERLCRHGYTMERPDKAALNALQPPEFRNESSLASTLKTLLFFTALMITVPIGLYFTTKSYIFEGALGMSNRDSYFYAAIVAVVAVHVVLALFVYVAWNEGSRQWREGKQD

SEQ ID NO: 921376 - protein, 143 aa, Homo sapiens; identical to SEQ ID NO: 921374

SEQ ID NO: 921377 - protein, 120 aa, Homo sapiens; identical to SEQ ID NO: 921375

SEQ ID NO: 921378 - protein, 129 aa, Homo sapiens
DVQLFPSLMRGLLPSWSPDPALPLSVPTTRDPGSKTPLIPQPPEFRNESSLASTLKTLLFFTALMITVPIGLYFTTKSYIFEGALGMSNRDSYFYAAIVAVVAVHVVLALFVYVAWNEGSRQWREGKQD

SEQ ID NO: 921379 - protein, 129 aa, Homo sapiens; identical to SEQ ID NO: 921378

SEQ ID NO: 921380 - protein, 120 aa, Homo sapiens; identical to SEQ ID NO: 921375

SEQ ID NO: 921381 - protein, 150 aa, Homo sapiens
MFICGNCLLFVELLTSPLTLKDSHIVFSGILGAVSRPLGQFSMAKVTSEPQKPNEDVDEQTPSTSSTKGRKKGKTPRQRRSRSGVKGLKTTRKAKRPLRGSSSQKAGETNTPAGKPKKARGPILRGRYHRLKEKMKKEEADKEQSETSVL

SEQ ID NO: 921382 - protein, 145 aa, Homo sapiens
GPDAAAPPLSGRGSMLPCARAKRPDLSLSPLSISLCLSSFPDAKAVGTLVTEAGGDEEKKIRSKPEQGAGAEEESHFCAGAADPTIKDNQKRGGGDQEPSQQQPEASSPGLLRGGATTPILAASLQPQCVQQVAPEGARQHFPTL

SEQ ID NO: 921383 - protein, 273 aa, Homo sapiens
SVWHMEILSKLRSTHASNDYVERPPAPCKQALSSPSLIVQTHKSDWSLATMPTSLPRSLSQCHQLQPLPQHLSQSSIASSMSHSTTASDQRLLASITPSPSGQSIIRTQPGAGVHPKADGALKGEAEQSAGHPSEHLFICEECGRCKCVPCTAARPLPSCWLCNQRCLCSAESLLDYGTCLCCVKGLFYHCSTDDEDNCADEPCSCGPSSCFVRWAAMSLISLFLPCLCCYLPTRGCLHLCQQGYDSLRRPGCRCKRHTNTVCRKISSGRTLS

SEQ ID NO: 921384 - protein, 210 aa, Homo sapiens [sequence omitted]

SEQ ID NO: 921385 - protein, 168 aa, Homo sapiens
MLKNFKKGFKGDYDVTMTPGKFRTLCEIDWPALEVGWPSEGRLDRSLVSKVWHKVTHKPGYPDQFPYIDTWLQLVLEPPHTQWLREQQHQRLAEAKKDQQRDRERKETERKGGKDREEKTERKRQRDKEGVKKRERERQRERKRQRQKESQRETESQREKEREKYTSS

SEQ ID NO: 921386 - protein, 145 aa, Homo sapiens
MWAVGASRWGRLPPARGAAAPNHKISNAGQRGLGHHTLQASCRPSRVVERPALIVAPGPVPRTGRQGLRTMALKLIHKEFLELARDPQPHCSAGPVWDDMLHWQATITRPNDSSYLGGVFFLKFPSDYLFKPPKIKFTNGIYHQR

SEQ ID NO: 921387 - protein, 151 aa, Homo sapiens
KIFHFLKDTMGTAAQTLLLDSWLSIQISQAVGRAIELPRDYDLGLCLPGCVEKDHPVGAGIGMAELSLSLGVACCDCCGGWGCGVWSNGVIFPGGLWLLLLNHTVCQQVGESQRSWASPCSHAACSPKGWCHSHCALQQHRVYFRATSDQG

SEQ ID NO: 921388 - protein, 138 aa, Homo sapiens
MTEGVAAFGNVQIRGAQVSALVHRGGRVYEEQQDGHLPPHSCLRSPLSRPSCPHCRVRPPEPSTLAEPGSKEQEEEGETGRDGTDGTAPGLLFLQPHLLSLQGNLKVIRPRSLERSPQTERRLCSLTTSVCSPTIGTM

SEQ ID NO: 921389 - protein, 137 aa, Homo sapiens
QVTWDGKCCQERAGASRRSLQPAAVAAAARSWASAQGAGCGRAGGVWWGAGGVGVCRPGSWEGFCLFGSPCGCCGAAGLRGCGAAGLRGCGAAGLRGCGAAGLRAVGDDGGGSRSGSRGGSGSGSGSAQSLGSPGYL

SEQ ID NO: 921390 - protein, 137 aa, Homo sapiens; identical to SEQ ID NO: 921389

SEQ ID NO: 921391 - protein, 180 aa, Homo sapiens
AAGSVTRTHNYNIKMPKTEETVLQNDPSVAENGAPEPKTPGQSQKSKSFCLDDQSPDLIETVNEVSKLSISHEIVVNQDFYVEETILPPNRLNIPNRKSTMLQNPKHFERQHDAQRKCSLRYTSMLQIFQNPRNPVEGRFAEAMYNAFWNHLKEQLLSTPPDFTCALELLKDVKENPGDE

SEQ ID NO: 921392 - protein, 135 aa, Homo sapiens
MEPCCRSTCKHSSPPYFSGGLQRFPYSGWEDLLQSPREFALAPRWAGTAGGPSAPSTAAGPGAKPLTARGWQRQPAAQTVGPPSPRPPRAHAGLQVLHAALVPARVSPSTPPRKLREPASASASPERGSHSAAVG

SEQ ID NO: 921393 - protein, 243 aa, Homo sapiens
EATSFYRMYKYNPGILVKHTQRLPTFRVLVGIPVQMAMRELNADSCSSPQMGAMWETSGSVKENSSQSKKYSTKIENLGPESACRHFWSFRYHEATGPLETISQLQKLCHQWLRPEIHSKEQILEMLVLEQFLSILPKETQNWVQKHHPQNVKQALVLVEFLQREPDGTKNEVTAHELGKEAVLLGGTAVAPGFKWKPAEPQPMGVFQKEYWNTYRVLQEQLGWNTHKETQPVYEREISLGCL

SEQ ID NO: 921394 - protein, 290 aa, Homo sapiens
EATSFYRMYKYNPGILVKHTQRLPTFRVLVGIPVQMAMRELNADSCSSPQMGAMWETSGSVKENSSQSKKYSTKIENLGPESACRHFWSFRYHEATGPLETISQLQKLCHQWLRPEIHSKEQILEMLVLEQFLSILPKETQNWVQKHHPQNVKQALVLVEFLQREPDGTKNEVTAHELGKEAVLLGGTAVAPGFKWKPAEPQPMGVFQKEYWNTYRVLQEQLGWNTHKETQPVYERAVHDQQMLALSEQKRIKHWKMASKLILPESLVSCYFWLFSGDLTVALPLLVPIA

SEQ ID NO: 921395 - protein, 243 aa, Homo sapiens; identical to SEQ ID NO: 921393

SEQ ID NO: 921396 - protein, 303 aa, Homo sapiens
MLALSEQKRIKHWKMASKLILPESLSLLTFEDVAVYFSEEEWQLLNPLEKTLYNDVMQDIYETVISLGLKLKNDTGNDHPISVSTSEIQTSGCEVSKKTRMKIAQKTMGRENPGDTHSVQKWHRAFPRKKRKKPATCKQELPKLMDLHGKGPTGEKPFKCQECGKSFRVSSDLIKHHRIHTGEKPYKCQQCDRRFRWSSDLNKHFMTHQGIKPYRCSWCGKSFSHNTNLHTHQRIHTGEKPFKCDECGKRFIQNSHLIKHQRTHTGEQPYTCSLCKRNFSRRSSLLRHQKLHRRREACLVSPN

SEQ ID NO: 921397 - protein, 243 aa, Homo sapiens; identical to SEQ ID NO: 921393

SEQ ID NO: 921398 - protein, 131 aa, Homo sapiens
IEFLEFTMIKKEEKGSGEKPIVPSGYDHYPILSVSLITNPVPRMVPGTELLQECTIMAGFSFSLCNSSCIFEGQLSSGDPWHFPPWWDVMPDSSEFIELNKRRQQMAEILIRCGWLMHDLKTPALVILGQI

SEQ ID NO: 921399 - protein, 131 aa, Homo sapiens; identical to SEQ ID NO: 921398

SEQ ID NO: 921400 - protein, 407 aa, Homo sapiens
MGCGQSMVSFPQLAARTLPEIATTLALSQVLILAPAMALALALATGTCIGAGADACFSHGIGPGTGTGTNTGTCHVTNGSCHLGHGVSPPLLSMPHLLPRKGTGGFLGSTKELSEAPEQGLHASEEVLPGLRGALGVPAAGAPVGVSWARRRGAGHRASETRRPWVSPLPRTFSPAALAGPGSRNSGKRCASTGIRRPERCVPGREDSDVAAAAAAAAKKTRSPRVLSRRPPPSDREEEEKEEEEEEEEEEEEQEEEEEEEEEEEEEEEEEEEEEEEAGGEGAKPPPPGSSRSCGNGRAPPRSASSGRKQYRRLQPEGCGGAAPRGGAAHVRLERDHKPKSQAQCKRLITVTCCCDESDHSGLSSYPSFSPVEKAPKSVGISVQRLPLQLPLQIIYLKLLCSVPGLE

SEQ ID NO: 921401 - protein, 138 aa, Homo sapiens
MVLAASDQGLEPAPDHKPPHYKCKQTHSFSASKGACSHDPVSLKVCGFSQLSWYVPAAVLGEKIHSVILHTLLCPSKWELQASPAASYLSKEARRERVYENLDWKATRRMQPYLTLHNLVKGHSLSAVNNRQRKSRRI

SEQ ID NO: 921402 - protein, 435 aa, Homo sapiens
ILRYPSGFLAFLSSMIAPSPKSSEEEGQKDEEVLQGEQGDFNDNDTEPENLGHRPLLMDSEDEEEEEKRSSDSDYEQAKAKYSDMSPVYRDKSGSGPTQDINTILLTSAQLSSDVGVETPKQEFDIFGAVPFFAVCAQQPQQEKNEKSLPQHRFPATGLQQEEFDVFTKAPFSKKVNVQECHAVGPETHPKSIDIFDFTPFQPFLTSTSKSESNEDLFGLVPFEEIMGSQQQKVKQRSLQKLSSRQRRTKQDMSKSNGKRHHGTPTSKKKTLKPTYRTPERARRHKKVGRRVSQTSNEFVTISDSKENIGAAVTDGNDRGNVLQLEESLLDPFGAKPFHPPDLSWHPLHQGLNDIRADHNTVLPKQPRQNSLHGSFHSADVLTMDDFGAMPFTELVVQSITLQQSQQSQPVELDPFESWSKCRSLHTADAQVIAL

SEQ ID NO: 921403 - protein, 258 aa, Homo sapiens
MACSLPSGAGNNSEPPSPTMVLYQGYLNLLLWDLENVEFPETLLMDRIRLQELAFQLHQLTVLASVLLVARSFSGEVLFRSPEFVDRLKCTTKALTEEFISRPEETMLSVSEQVSQEVHQGLKDMGLTTLSSENTASLLGQLQNITKKENCIRSIVGKNLHGRRAEKWQECGAWVGRPYPEYQWIRFFLKCCLLHGMQESLLHFPGGLILIEKELAELGWKFLNLMHHNQQVFGPYYAEILKHIIHPAQAQETDVEPN

SEQ ID NO: 921404 - protein, 137 aa, Homo sapiens [sequence omitted]

SEQ ID NO: 921405 - protein, 111 aa, Homo sapiens
MIWRGRSTYRPRPRRSVPPPELIGPMLEPGDEEPQQEEPPTESRDPAPGQEREEDQGAAETQVPDLEADLQELSQSKTGGECGNGPDDQGKILPKSEQFKMPEGGDRQPQV

SEQ ID NO: 921406 - protein, 140 aa, Homo sapiens
GYSIMARMAVLWRKMRDNFQSKEFREYVSSTHFWGPAFSWGLPLAAFKDMKASPEIISGRMTTALILYSAIFMRFAYRVQPRNLLLMACHCTNVMAQSVQASRYLLYYYGGGGAEAKARDPPATAAAATSPGSQPPKQAS

SEQ ID NO: 921407 - protein, 592 aa, Homo sapiens
MGLVTFEDVAVDFTQEEWQYLNPPQRTLYRDVMLETYSNLVFVGQQVTKPNLILKLEVEECPAEGKIPFWNFPEVCQVDEQIERQHQDDQDKCLLMQVGFSDKKTIITKSARDCHEFGNILHLSTNLVASIQRPDKHESFGNNMVDNLDLFSRSSAENKYDNGCAKLFFHTEYEKTNPGMKPYGYKECGKGLRRKKGLSLHQRIKNGEKPFECTACRKTFSKKSHLIVHWRTHTGEKPFGCTECGKAFSQKSQLIIHLRTHTGERPFECPECGKAFREKSTVIIHYRTHTGEKPYECNECGKAFTQKSNLIVHQKTHTGEKTYECTKCGESFIQKLDLIIHHSTHTGKKPHECNECKKTFSDKSTLIIHQRTHTGEKPHKCTECGKSFNEKSTLIVHQRTHTGEKPYECDVCGKTFTQKSNLGVHQRTHSGEKPFECNECEKAFSQKSYLMLHQRGHTGEKPYECNECEKAFSQKSYLIIHQRTHTEEKPYKCNECGKAFREKERTRERNPMHALSVAKPSEKSQHSLYIKELILERNPINVQNVGKPLPKNQTLLYISEPMQERKPMEEATLGSQSSWHIRELISSIYYGH

SEQ ID NO: 921408 - protein, 161 aa, Homo sapiens
ALKMTKWETEAPVVAETPDIKFFGKWSTDDAQISDISLQDYIAVKEKYTKYLPHSIGLQEPSAGSGECQHQMWPWEDSTYIEQAETVRQQDVDMSPLYHVNQAIWLLYTGQALIHYDCCPYKRRKFEHRHTQRGDHEDTGRRQLSPSQGKRPQKKPILPTP

SEQ ID NO: 921409 - protein, 158 aa, Homo sapiens
MKFGCLSFRQPYAGFVLNGIKTVETRWRPLLSSQRNCTIAVHIAHRDWEGDACRELLVERLGMTPAQIQALLRKGEKFGRGVIAGLVDIGETLQCPEDLTPDEVVELENQAALTNLKQKYLTVISNPRWLLEPIPRKGGKDVFQVDIPEHLIPLGHEV

SEQ ID NO: 921410 - protein, 158 aa, Homo sapiens; identical to SEQ ID NO: 921409

SEQ ID NO: 921411 - protein, 158 aa, Homo sapiens; identical to SEQ ID NO: 921409

SEQ ID NO: 921412 - protein, 158 aa, Homo sapiens; identical to SEQ ID NO: 921409

SEQ ID NO: 921413 - protein, 158 aa, Homo sapiens; identical to SEQ ID NO: 921409

SEQ ID NO: 921414 - protein, 183 aa, Homo sapiens
MSLKGWRVMRFCASAGYGRPGALAKMKFGCLSFRQPYAGFVLNGIKTVETRWRPLLSSQRNCTIAVHIAHRDWEGDACRELLVERLGMTPAQIQALLRKGEKFGRGVIAGLVDIGETLQCPEDLTPDEVVELENQAALTNLKQKYLTVISNPRWLLEPIPRKGGKDVFQVDIPEHLIPLGHEV

SEQ ID NO: 921415 - protein, 158 aa, Homo sapiens; identical to SEQ ID NO: 921409

SEQ ID NO: 921416 - protein, 158 aa, Homo sapiens; identical to SEQ ID NO: 921409

SEQ ID NO: 921417 - protein, 106 aa, Homo sapiens
MITASPSSFQLTDLNVSSSTIVQSFLGKESLKRLWLSSTLTTRWFRSSGGELSWEPGSWLMAWSSCLSKTSLESGFGSGEEPDGPPLVGSPPTDGASLASYSCSVF

SEQ ID NO: 921418 - protein, 158 aa, Homo sapiens; identical to SEQ ID NO: 921409

SEQ ID NO: 921419 - protein, 158 aa, Homo sapiens; identical to SEQ ID NO: 921409

SEQ ID NO: 921420 - protein, 158 aa, Homo sapiens; identical to SEQ ID NO: 921409

SEQ ID NO: 921421 - protein, 146 aa, Homo sapiens
MKFGCLSFRQPYAGFVLNGIKTVETRWRPLLSSQRNCTIAVHIAHRDWEGDACRELLVERLGMTPAQIQALLRKGEKFGRGVIAGLVDIGETLQCPEDLTPDEVVELENQAALTNLKQKYLTVISNPRWLLEPIPRKGGKDVFQNP

SEQ ID NO: 921422 - protein, 158 aa, Homo sapiens; identical to SEQ ID NO: 921409

SEQ ID NO: 921423 - protein, 106 aa, Homo sapiens; identical to SEQ ID NO: 921417

SEQ ID NO: 921424 - protein, 159 aa, Homo sapiens
MKAWGTVVVTLATLMVVTVDAKIYERCELAARLERAGLNGYKGYGVGDWLCMAHYESGFDTAFVDHNPDGSSEYGIFQLNSAWWCDNGITPTKNLCHMDCHDLLNRHILDDIRCAKQIVSSQNGLSAWTSWRLHCSGHDLSEWLKGCDMHVKIDPKIHP

SEQ ID NO: 921425 - protein, 224 aa, Homo sapiens
MSENVSDGLFKESAKTHQNQNGNESDICQAPLLQVCCSFLEVRSRPYLPGYHQQRLQNSKDCCLLLPLEALSQRGSGLMPARALLDPLEEAVCPLAELERCTGKTFSGCTALFRASRQEHLSPLKLCPQPPLPPGALSQGDESFIYKTLTEAVDFLSQMPCPVRKNLERQSGHSCFAALCHVVNAPLSAHAAQICYCRFLLLRMSVTHAPCCLPSVHAELCEKR

SEQ ID NO: 921426 - protein, 169 aa, Homo sapiens
SLSLQPPSPDSHRAPTSPPSDLSPVLTPSLGFSSAMASAGISSAAVSQKRYQVRTKRAHKQHQELQKKEAAAMDQGRGCAHVVRSLPPPCVREHEPPEPPILRHTRHQQHPLEGCRSSAGPLAVPEKKWEVIGHRQCLVLGRRLSPGEGTIEAFNNLLFPLNRFVNVKQ

SEQ ID NO: 921427 - protein, 113 aa, Homo sapiens
GNMSEHVRTRSQSSERGNDQESSQPVGSVIVQEPTEEKRQEEEPPTDNQGIAPSGEIENEGAPAVQGPDMEAFQQELALLKIEDEPGDGPDVREGIMPTFDLTKVLEAGDAQP

SEQ ID NO: 921428 - protein, 113 aa, Homo sapiens; identical to SEQ ID NO: 921427

SEQ ID NO: 921429 - protein, 245 aa, Homo sapiens
MIDGLWIPGTVLRAVPASAQPWGQGVHFQIRPAPEALGKSLGAKKCPGGAPFASTTSVFYPLDASPKEEKCQDEAGPSKEVSVLVQGRGDSPSFYAFSLLAPIVARCLHSLVLPTRSMGPVLASHCSSRETVECCALALEYKALSHKATLMIPGQKGSSVFKPGGGIFPRGLPGFCSCVCWSPGSHGELGSRDRVSICRQAWSQTPRLKCSSDPPTSTSQSAGITGKIVIEHQTSPLLKKTFYKN

SEQ ID NO: 921430 - protein, 196 aa, Homo sapiens
MIDGLWIPGTVLRAVPASAQPWGQGVHFQIRPAPEALGKSLGAKKCPGGAPFASTTSVFYPLDASPKEEKCQDEAGPSKEVSVLVQGRGDSPSFYAFSLLAPIVARCLHSLVLPTRSMGPVLASHCSSRETVECCALALEYKALSHKATLMIPGQKGSSVFKPGGGIFPRGLPGFCSCVCWSPGSHGELGSRENSN

SEQ ID NO: 921431 - protein, 227 aa, Homo sapiens
QFLLYKFKMKQRILKEDMLKIVNPRYQNQFAEIHRRASEHIEVVFAVDLKEVNPTCHLYDLVSKLKLPNNGRIHVGKVLPKTGLLMTFLVVIFLKGNCANKEDTWKFLDMMQIYDGKKYYIYGEPRKLITQDFVRLTYLEYHQVPCSYPAHYQFLWGPRAYTETSKMKVLEYLAKVNDIAPGAFSSQYEEALQDEEESPSQRCSRNWHYCSGQDCLRAKFSSFSQPY

SEQ ID NO: 921432 - protein, 402 aa, Homo sapiens
MASIIARVGNSRRLNAPLPPWAHSMLRSLGRSLGPIMASMADRNMKLFSGRVVPAQGEETFENWLTQVNGVLPDWNMSEEEKLKRLMKTLRGPAREVMRVLQATNPNLSVADFLRAMKLVFGESESSVTAHGKFFNTLQAQGEKASLYVIRLEVQLQNAIQAGIIAEKDANRTRLQQLLLGGELSRDLRLRLKDFLRMYANEQERLPNFLELIRMVREEEDWDDAFIKRKRPKRSESMVERAVSPVAFQGSPPIVIGSADCNVIEIDDTLDDSDEDVILVESQDPPLPSWGAPPLRDRARPQDEVLVIDSPHNSRAQFPSTSGGSGYKNNGPGEMRRARKRKHTIRCSYCGEEGHSKETCDNESDKAQVFENLIITLQELTHTEMERSRVAPGEYNDFSEPL

SEQ ID NO: 921433 - protein, 402 aa, Homo sapiens; identical to SEQ ID NO: 921432

SEQ ID NO: 921434 - protein, 212 aa, Homo sapiens
LPHETLGTAQNSLPASPVFLTPKCRQSSCFWLARMAFRTLARILLVTPWPKPGTATVLWERRPGGQALNNWHEGVRPKEGPEPTQQARGRTAAFGSSPASTGIQVLALPVYQACGGQGNESLLPGRLATICFMDTKTEGNILFREEDSTSLSSAVVGPTSELIAARAVLHCPVSGPEEETDRETSLTWKVPGKGHIMEYHTAVKKNMATCNM

SEQ ID NO: 921435 - protein, 564 aa, Homo sapiens
PFDRRPETQGLLGGNPSFYRKSQTMPALRNRSGVMQARLQHLSSLESSFTLNHSSTTTEADIFHQALLEGNTATEVSLTVLDTISFFTQCFKTQLLNNDGHNPLMKKVFDIHLAFLKNGQSEVSLKHVFASLRAFISKFPSAFFKGRVNMCAAFCYEVLKCCTSKISSTRNEASALLYLLMRNNFEYTKRKTFLRTHLQEVLLELLEQCVDGLWKAERYEIISEISKLIVPIYEKRQRKIISVVFTKPSLQKAVKFPCYPGKRHRHDSILYNLAENLKVLANDSGVDVNEMKHDIKKYIVIEEQKTTYRVFSLKWELNNENPWTQRGEQLTQGLLWEEDGKEYIYKEPKLTGLSEISLRLVKLYGEKFGTENVKIIQDSDKVNAKELDPKYAHIQVTYVKPYFDDKELTERKTEFERNHNISRFVFEAPYTLSGKKQGCIEEQCKRRTILTTSNSFPYVKKRIPINCEQQINLKPIDVATDEIKDKTAELQKLCSSTDVDMIQLQLKLQGCVSVQVNAGPLAYARAFLNDSQASKYPPKKVSELKDMFRPYNYNVIATTTYEAV

SEQ ID NO: 921436 - protein, 147 aa, Homo sapiens
DEEMQKGFKTACDRLLPPLATSPNTRPRRPTTPPPTSIQANHKSYPVGSIQMSHNSFLSATRPWECSIPCLAVTDSPSRAPPSPGGASPTPLRAGKSRALSLPALHWWAAYAPASTALFRLPVPIALQGNRIAGASWAAKRPRGCPA

SEQ ID NO: 921437 - protein, 147 aa, Homo sapiens; identical to SEQ ID NO: 921436

SEQ ID NO: 921438 - protein, 161 aa, Homo sapiens
TCVGRVTTQMLTRTQRHVHQLPAHSCLACSEDHPCCSGRQGLLTNVRLSFLHLRAFHGSLLPTALNPKKSYSLDFEGSPPGAPPSPQSSSSFCLCSLLWPVAILNVTHTTLLPTLQLFTQLPSSSSQRQAPIPASFLYMGAGPTAPLSSHLETKTDAIVLP

SEQ ID NO: 921439 - protein, 194 aa, Homo sapiens
VGGPVLAMPLHIFFPEHMSLCLNFPFCRLGFGAILDLVKSTFRPFEDTSGILGCVIILVKLTGTIPLLYRKQNKQEKVKTQKYQLLVFCCCLWAIVASAAFRSFVLRPLSEVVSEEGLTISEATASGWRALHSTHSSTPVLRPLQFQKSSVVLRILSKSYSSSVYSLFLPPGAHFLLRKLQILVQHGAPGFPKT

SEQ ID NO: 921440 - protein, 169 aa, Homo sapiens
MVRDCVYIASRRPNTPYFICSIQDFKLFTEAVREKDEQKEISFVSLTVPEVSGVWWKGILAPAESMLGCCKEQELAINSEFGCWQLKWGEKGMSHLADHCLRRLTVAVCSVEGGKMVKAPSRRLGLPFVGMFVEDMSQKETTRFTSIQDEAHVQCSSLISQAHPLFQSK

SEQ ID NO: 921441 - protein, 206 aa, Homo sapiens
MEKLYKENEGKPENERNLESEGKPEDEGSTEDEGKSDEEEKPDMEGKTECEGKREDEGEPGDEGQLEDEGNQEKQGKSEGEDKPQSEGKPASQAKPESQPRAAEKRPAEDYVPRKAKRKTDRGTDDSPKDSQEDLQERHLSSEEMMRECGDVSRAQEELRKKQKMGGFHWMQRDVQDPFAPRGQRGVRGVRGGGRGQKDLEDVPYV

SEQ ID NO: 921442 - protein, 528 aa, Homo sapiens
MTSKQAMSSNEQERLLCYNGEVLVFQLSKGNFADKEPTKTPILHVRRMVFDRGTKVFVQKSTGFFTIKEENSHLKIMCCNCVSDFRTGINLPYIVIEKNKKNNVFEYFLLILHSTNKFEMRLSFKLGYEMKDGLRVLNGPLILWRHVKAFFFISSQTGKVVSVSGNFSSIQWAGEIENLGMVLLGLKECCLSEEECTQEPSKSDYAIWNTKFCVYSLESQEVLSDIYIIPPAYSSVVTYVHICATEIIKNQLRISLIALTRKNQLISFQNGTPKNVCQLPFGDPCAVQLMDSGGGNLFFVVSFISNNACAVWKESFQKECLVPLCGEEENSVHILDEKLSDNFQDSEQLVEKIWYRVIDDSLVVGVKTTSSLKLSLNDVTLSLLMDQAHDSRFRLLKCQNRVIKLSTNPFPAPYLMPCEIGLEAKRVTLTPDSKKEESFVCEHPSKKECVQIITAVTSLSPLLTFSKFCCTVLLQIMERESGNCPKDRYVVCGRVFLSLEDLSTGKYLLTFPKKKPIGNFVGTFRLYI

SEQ ID NO: 921443 - protein, 221 aa, Homo sapiens
KDDNTSSAEEKECLVPLCGEEENSVHILDEKLSDNFQDSEQLVEKIWYRVIDDSLVVGVKTTSSLKLSLNDVTLSLLMDQAHDSRFRLLKCQNRVIKLSTNPFPAPYLMPCEIGLEAKRVTLTPDSKKEESFVCEHPSKKECVQIITAVTSLSPLLTFSKFCCTVLLQIMERESGNCPKDRYVVCGRVFLSLEDLSTGKYLLTFPKKKPIGNFVGTFRLYI

SEQ ID NO: 921444 - protein, 248 aa, Homo sapiens
MRMAALVAGTGVSVRAGRDRDPRAGASQPPPREVSPALSPVPGAPAPVAPGAQPQMSSHNSRLAADSYKNCRQSRTARSCASDHLAGAQQRLPIRRTRILTLCGDPHRPWRGSFDRGPESAEWPALGLSAAPGRGGISSVWPGEPRLPSPCPQPGISGNPEGRSPRPGRVSEPGVRAAGFVGPPPPPSPAHAPARALSAFLWLSRGRGACGGGGGGGPGGGECWNAPPGHLQRPWSRTGSRRAAEAQG

SEQ ID NO: 921445 - protein, 163 aa, Homo sapiens
MSEPCGLLCWLTPKRELAECRYSLPGSSTLVLKNRSGFVRMALQHGVPLIPAYAFGETDLYDQHIFTPGGFVNRFQKWFQSMVHIYPCAFYGRGFTKNSWGLLPYSRPVTTIVGEPLPMPKIENPSQEIVAKYHTLYIDALRKLFDQHKTKFGISETQELEII

SEQ ID NO: 921446 - protein, 259 aa, Homo sapiens
SSSFSSPVPHPCLLWHLMPPNSESFLDPPVQIGSHLVGIPLAATTVIAVNLYLVVFTPYWPVTVLILTWLAFDWKTPQRGQETAGGESTLGQAHSGNGQSLAALPLFSGGRRFTCVRHWRLWKHYSDYFPLKLLKTHDICPSRNYILVCHPHGLFAHGWFGHFATEASGFSKIFPGITPYILTLGAFFWMPFLREYVMSTGACSVSRSSIDFLLTHKGTGNMVIVVIGGLAECRYSLPGSSTLVLKNRSGFVRMALQHG

SEQ ID NO: 921447 - protein, 433 aa, Homo sapiens
SSSFSSPVPHPCLLWHLMPPNSESFLDPPVQIGSHLVGIPLAATTVIAVNLYLVVFTPYWPVTVLILTWLAFDWKTPQRGQETAGGESTLGQAHSGNGQSLAALPLFSGGRRFTCVRHWRLWKHYSDYFPLKLLKTHDICPSRNYILVCHPHGLFAHGWFGHFATEASGFSKIFPGITPYILTLGAFFWMPFLREYVMSTGACSVSRSSIDFLLTHKGTGNMVIVVIGGLAECRYSLPGSSTLVLKNRSGFVRMALQHGQPGVGHGAPTLNLDLGTAGLGSEKPEADPGIMRRQRVWHSTRSLPFWASEDMLLLCRVPLIPAYAFGETDLYDQHIFTPGGFVNRFQKWFQSMVHIYPCAFYGRGFTKNSWGLLPYSRPVTTIVGEPLPMPKIENPSQEIVAKYHTLYIDALRKLFDQHKTKFGISETQELEII

SEQ ID NO: 921448 - protein, 376 aa, Homo sapiens
SSSFSSPVPHPCLLWHLMPPNSESFLDPPVQIGSHLVGIPLAATTVIAVNLYLVVFTPYWPVTVLILTWLAFDWKTPQRGQETAGGESTLGQAHSGNGQSLAALPLFSGGRRFTCVRHWRLWKHYSDYFPLKLLKTHDICPSRNYILVCHPHGLFAHGWFGHFATEASGFSKIFPGITPYILTLGAFFWMPFLREYVMSTGACSVSRSSIDFLLTHKGTGNMVIVVIGGLAECRYSLPGSSTLVLKNRSGFVRMALQHGVPLIPAYAFGETDLYDQHIFTPGGFVNRFQKWFQSMVHIYPCAFYGRGFTKNSWGLLPYSRPVTTIVGEPLPMPKIENPSQEIVAKYHTLYIDALRKLFDQHKTKFGISETQELEII

SEQ ID NO: 921449 - protein, 277 aa, Homo sapiens
MSAPGSPDQAYDFLLKFLLVGDRDVGKSEILESLQDGAAESPYSHLGGIDYKTTTILLDGQRVKLKLWDTSGQGRFCTIFRSYSRGAQGVILVYDIANRWSFEGMDRWIKKIEEHAPGVPKILVGNRLHLAFKRQVPREQAQAYAERLGVTFFEVSPLCNFNIIESFTELARIVLLRHRMNWLGRPSKVLSLQDLCCRTIVSCTPVHLVDKLPLPSTLRSHLKSFSMAKGLNARMMRGLSYSLTTSSTHKSSLCKVEIVCPPQSPPKNCTRNSCKIS

SEQ ID NO: 921450 - protein, 309 aa, Homo sapiens
MFYANFSRRTGPAPPLRTTPRAWLRRECGASTMSAPGSPDQAYDFLLKFLLVGDRDVGKSEILESLQDGAAESPYSHLGGIDYKTTTILLDGQRVKLKLWDTSGQGRFCTIFRSYSRGAQGVILVYDIANRWSFEGMDRWIKKIEEHAPGVPKILVGNRLHLAFKRQVPREQAQAYAERLGVTFFEVSPLCNFNIIESFTELARIVLLRHRMNWLGRPSKVLSLQDLCCRTIVSCTPVHLVDKLPLPSTLRSHLKSFSMAKGLNARMMRGLSYSLTTSSTHKSSLCKVEIVCPPQSPPKNCTRNSCKIS

SEQ ID NO: 921451 - protein, 136 aa, Homo sapiens
MFYANFSRRTGPAPPLRTTPRAWLRRECGASTMSAPGSPDQAYDFLLKFLLVGDRDVGKSEILESLQDGAAESPYSHLGGIDYKTTTILLDGQMMRGLSYSLTTSSTHKSSLCKVEIVCPPQSPPKNCTRNSCKIS

SEQ ID NO: 921452 - protein, 277 aa, Homo sapiens; identical to SEQ ID NO: 921449

SEQ ID NO: 921453 - protein, 579 aa, Homo sapiens
PSHQASPAMEEGKTGKCLSRAKTSPRAQLSCSKAGGVESCFLSCPAHTLFVPDSENSYVLSCGVPGPQGKALQKRNGTSSGLGPSCSGKTFLLSALLRVAWGAGDEPGPGPRSQQAAGRVLAQDAPTTPIKQKARFKIRDAKCHLRPHSQARAKETARQPLLDHCHVTFVTLKCDSSKKRRRGRKSPSKEVSHITAEFEIETKMEEASDTCEADCLRKRAEQSLQAAIKTLRKSIGRQQFYVQVSGTEYEVAQRPAKALEGQGACGAGQVLQDSKCGQCSPGFFSADGFKPCQACPVGTYQPEPGRTGCFPCGGGLLTKHEGTTSFQDCEAKDLEGMRGPGDSTPVLPFPCTPPHPPPALCPPAVHCSPGHHYNTTTHRCIRCPVGTYQPEFGQNHCITCPGNTSTDFDGSTNVTHCKNQHCGGELGDYTGYIESPNYPGDYPANAECVWHIAPPPKRRILIVVPEIFLPIEDECGDVLVMRKSASPTSITTYETCQTYERPIAFTSRSRKLWIQFKSNEGNSGKGFQVPYVTYDEDYQQLIEDIVRDGRLYASENHQEILKDKKLIKALFDVLAHPQN

SEQ ID NO: 921454 - protein, 153 aa, Homo sapiens
MSKDLKILCKDPALELSCYRDHQFSGRKFQQEKLLKESSTLNMGNLSFYTTEEKIHELFSRSDIRNIFMGLDKIKKTACGFCFVECHNRADAENAMRFLTGTCLDEWIICTDWDVGFREGQQYGRGKSGGQVRDEFREDFHSGRGGFGRQTQI

SEQ ID NO: 921455 - protein, 490 aa, Homo sapiens
MDPSLKMERICFIYSLYTYLKAILHGISIILCIKQSLCEVLMCRILHLWHHVNAQKALGFGAFQILDFRMRNAQPIPNPVPGPVLGTRDTEKNEAHVSPTGYPRGKDYYIPISQPRKQTSCAAGERRLCPHTQGLPVTAVEGQKRSQEGMNCMNKDHGCAHICRETPKGGVACDCRPGFDLAQNQKDCTLTCNYGNGGCQHSCEDTDTGPTCGCHQKYALHSDGRTCIEKDEAAIERSQFNATSVADVDKRVKRRLLMETCAVNNGGCDRTCKDTATGVRCSCPVGFTLQPDGKTCKDINECLVNNGGCDHFCRNTVGSFECGCRKGYKLLTDERTCQDIDECSFERTCDHICINSPGSFQCLCHRGYILYGTTHCGAASLPSALTPAVLPDVDECSMSNGSCDQGCVNTKGSYECVCPPGRRLHWNGKDCVGMLAALGAPRLSSGRAPAFPGSLYMGPCLGAGAVGLPSWNLHAGSLPRHTLTSPGQPK

SEQ ID NO: 921456 - protein, 144 aa, Homo sapiens
MRRDPGLLLLCHTDSSDLQVDMQHLGSSQVLIRDALGMSHLFLTDFVYDAVCGGQKSLSAILSCPDTFCKILVSISEFSSEGPLLFLINSASSKGRGGTIFGICLYKVMEITPSFDLSLQECRNVMAEKRDVNRLYDVGHRVPP

SEQ ID NO: 921457 - protein, 160 aa, Homo sapiens
SLSFLKSMPDEHLWQASGQCLHLQSQGAHYLLQQLLPCRPALLPLNVHWPHGFPSLGMLKTLQKSRHHQAGKFSLCLVPSQGRQRASFQKLYTGSVEAELDIDECENDYYNGGCVHECINIPGNYRCTCFDGFMLAHDGHNCLETGSCYIAQASGTPGLR

SEQ ID NO: 921458 - protein, 187 aa, Homo sapiens
SLSFLKSMPDEHLWQASGQCLHLQSQGAHYLLQQLLPCRPALLPLNVHWPHGFPSLGMLKTLQKSRHHQAGKFSLCLVPSQGRQRASFQKLYTGSVEAELDIDECENDYYNGGCVHECINIPGNYRCTCFDGFMLAHDGHNCLGMLHKSGTTGSNDHLVFYGFLKGLSKASVVPAGLWVCGRGYWVS

SEQ ID NO: 921459 - protein, 1099 aa, Homo sapiens
MDIDHNCIYLSGLGLFMLYFFYVVLMLCLSTLGKNNDIQKHQGRARRRKKGGTYKDRKSFQREAEEERKLLSILKSFGPPASCSPLGQHHDTTRFHRLLCPDPVCQVCNRATADIQRLLSWESLKDAVPFVSPLASSASATESSFTLASTPSATTPEDLILSPQPKPSLLPHLILSPDLITTLADLFSPSPLRDPLPPQPVSPLDSKFPIDHSLPQQLPSPLFPPHHIQRAEPSLQPEASLSLNTVFLFDSTLSQDMNPLSNISQAMNATDSCAWHHEPPNPSALPLEDCPVTQSKASPTVLKPFPEMLSLGTNAVLVRKSFKVHVPISIIPGDFPLSSEVRKKLEQHIRKRLIQRRWGLPRRIHESLSLLRPQSKISELSVSDSIHGPLNISLVEGQRCNVLKKSASSFPRSFHERSSNMLSMENVGNYQGYSQETAPKDHLLHDPETSSDEDLRSNSERDLETHMMHLSGNDSGVRLGQKQLENALTVRLSKKFEKINEGRMPGTVHSSWHSVKQTMSLPEKSQSQIKHQNLVALVSEDHCVDTSQEISFLSSNKQKMLEAHIKTFRMRMLWGLPCKVLESIEIFKSEEDISNSFSHFYLPSSASFISQGDSKDGVSKSCRRSTFQGEKLGTTSSVPVLNHPQPVSSPIGKEGQGTLRRQFSDIDHDLIETDAKDGASTPLRRGTTYFQGEKLETTSSFSILGHPHLVTSPVDQEKQGTLRREFADTDEDLTESVWTTEDGRQTFLPPTYSIIDEVSQKQTILASRCSAELPILQAGVGRDSRDKRESASNNVNRLQGSGKTFPVTNGSKEMFKEEEICTLQSQTRNNLTTSKSGSCLVTNVKRSTSHETEIFPPRISVPQTPKSSYLKNQMLSQLKLVQRKHSQPQSHFTGMSLALDNLSSKDLLTHAQGISNQDLGTSQVLHVHLEVRGIRVAQQQEHRVPTHVLQKCQVKNFSPAAKRVSPLRPNGGELGGGDAGLGTSQLTRKSLPVHNKASGEVPGSKSSPTLKTQPPSENLFRKWMQTLLQWFNKPSIMCEEQESSWEKGSSLSSSVQNRSRVTSRAAFTGATEAQKIRKDTGEFLEEKLGHSHGIDITCP

SEQ ID NO: 921460 - protein, 188 aa, Homo sapiens
MMKTFWNEIVVMLPLGGRAVYTKSHTAPACACGEVRERVCTHGGGSLDAESGELSSPPPPHPPAAGSPRQSPAKALQKVPSVEDWEADPAPVPPKAPALPWCGWRGPRTLHAVSPASKFTAKYTTSEELGSACCAAAICRDGMLLPLVCSRPPREEGDRLPWRPAHHGEKATDLKTPEGGYAGQMDKC

SEQ ID NO: 921461 - protein, 138 aa, Homo sapiens
MIISLTLRGWGDVLGRDRARGSSRLRGALHWWTGDLVETTPRAGQGDEPPPWPLRRPQQPLPQAEGLTLGSALTARAASATCCSAQSGVCSSPGLDMTVLMQTEACQSMDGCGVGWQAQSPGADEGASLSCTEQLLAP

SEQ ID NO: 921462 - protein, 292 aa, Homo sapiens
MAPKSKNFLNFIASFLQRFLGFACEAVSPRPRASERASQRGRQGGRKGWGGGETDRASDTRTATDSDRSGARDLGDGEVAGREVLGTELQGRRAESRGRSVEGALAAAEARRAAWRRRSGAERGASTERSLGGERRSRRRGSRSRPRKSRLGGRGHALWRSPPPGGPARLRGPGAEGGRGGEELRIARARGEKTEDGKRQSQGHEVAQRAPRGSWDGHHPTLTGPLAVSFELPGRRKVAERSFLLGAYREYLRWFGKGNRGSQTAWVQRSPHAFECRSVETPQPSPPHQALR

SEQ ID NO: 921463 - protein, 157 aa, Homo sapiens
MTSRLFHEMQLQPREPSDAAGRDAEPRAVLAPHVSDWRDEILKVLSLTGIFLTQDQGSTALIGGRVLWRLGSGQQPGYRDVLRPNRTPRAAPAPHRVEPARERPWSHLIPPAADSGELCLAQRCGHHIQAANTRGPPGPARVRSILAWPAWPLAVCM

SEQ ID NO: 921464 - protein, 157 aa, Homo sapiens; identical to SEQ ID NO: 921463

SEQ ID NO: 921465 - protein, 121 aa, Homo sapiens
MAYNGFHLPVLLWFPGGAFETGSASIFDGSSLAAYEDMLVVIVQYRLGIFGFFTTWDQHAPGNWAFKDQVAALSWVQKNIEFFGGDPSSVTIFDSVSHGRRLIPQSRHGEWGGHHPLPEGP

SEQ ID NO: 921466 - protein, 375 aa, Homo sapiens
MWGDPSLAWPGASHPLGHQAVPQPGPLSSPGEAWAPPRHTLGLCRRPCPHQPDHRTLHSSWVLGAAPPDFGAPQPPCPPQQPLMPLDFTWQPWSSLHSQVHVSARSAERMGQGRARGDSLGLRICAHELSDSDGSPHLSGLYPRLHKGDHSRTCLWGHREGGSAPEMIIACGPPHPLESLTPYLPHRLLRLDRLLPPGAPGPRALLCDAAVGRSRPWVTTARPSSSRGQRCLSVGSLESGALVPLAGSSCPIAPQSMWPHPHPLVPAPSQAPSRVHDQAGLEMLLALLTLQGWVELAGFTHGKPYQTKIRREREAFSIIQAEGPIPEDQDQGRGLTAFPGAQRREGVVKASGLGQAADHHPPLPTIQARDNLRTN

SEQ ID NO: 921467 - protein, 136 aa, Homo sapiens
MQVLPSRPLCLLPPGILPERILVLKGNSWGWKPELSGLGLCSAGALGKKDGDLSELQLLSKEDLVYWRSLVTANLMIYESERCHVIRMYSSKETGFTQSHRTSTVSCLHSPPAYLVSVPSSNRNSPHLIISSIGCG

SEQ ID NO: 921468 - protein, 272 aa, Homo sapiens
LLLLLLLLLLPLNNEKFNLMRFIEESYGYQERIWTYSGSRGQHSDGSILNPKLPLRRIVPGPISLALGPRCLDYGSHDEILEAVLRTLAFCLPNSPTVAEFLLASQFWDALLETFQIISYLELISSARQKNEPDAAEFSRDESCWGHRGDRVVVILFLVGFSNFRFQTLRGLFWALLPWLLHTFWAEDNQKASNLMGGTFIAQAESEMSFYISAFRDTWPCRHLEFGFLASRTGYKLEKGKMNHATGQVSITDSQRCPLCGRHFHVDSLQRS

SEQ ID NO: 921469 - protein, 439 aa, Homo sapiens
TPWVLTGSCRQGSRWAVVRMPSPYRFQAPIPLSWGTTASIAWTLPQAGRAGTTWPCSPCAPRVGLPCPTVASLPPHALPNHNRSLSYNNVLNPGSPGGHACLAHPAVGVAGYHSPYLHPGATGDPPWPLPHSFSPVLGPRPQEPSPVLYDILSRTIMASIQERKDREERECLLRSQADSLFGDSGVYDAPSSYSLQQASVLSEGFRGPTLCYSSTDDLVARPGFGGACNPVLQTSLSSLSSSVSRALRTSSSSLQADQNPFRDPAQLAQPLPLCYLRISSWMSSIWSSTPQMSFLRFWGPEEPFRVSRSLLLAGQKRSWQPRPPPWIPSPLPPAPGTGSRLFKLLLEVGCRPLPLVPTEEATLLPMGPVLGGRRALMGPDSRPGPVPSCSLVLLTPLAPLPLTARRRPSPRKPAGSPLIPAPLGGHTNCGCFLTTLGAW

SEQ ID NO: 921470 - protein, 109 aa, Homo sapiens
TTTTKFAAASTSTGGEAEAGSPLVTCRRPRCYPWDRFWAAEEHSWGRIHAPGPFPPALWCSSRHWPHCLSLPVSPCARVLLLEPLSPQLTLRKLARRSPCVVSGRQSLP

SEQ ID NO: 921471 - protein, 263 aa, Homo sapiens
TPWVLTGSCRQGSRWAVVRMPSPYRFQAPIPLSWGTTASIAWTLPQAGRAGTTWPCSPCAPRVGLPCPTVASLPPHALPNHNRSLSYNNVLNPGSPGGHACLAHPAVGVAGYHSPYLHPGATGDPPWPLPHSFSPVLGPRPQEPSPVLYDILSRTIMASIQERKDREERECLLRSQADSLFGDSGVYDAPSSYSLQQASVLSEGFRGPTLCYSSTDDLVARPGFGGACNPVLQTSLSSLSSSVSRALRTSSSSLQADQYRWGS

SEQ ID NO: 921472 - protein, 281 aa, Homo sapiens
MLFPNKAFYFLFVVLLHEEQLLLEGLDLCLQLQPSDIGVINDLAKPMDVVLHRLAHGQLCLILDSKVISSKTGTVDLQNGAGIVHSICRDLSPQVLDGLEVMAPVSDLGSLLLQMLPDFALQLLVLSLQAPHSAQEEMRPLDVAELSEPEEVEVLELEGGFEQFLLPVIHEMPEDIASLTSTGGRTCGSGARCGRWTICSSRSKPRWRLRRSILNRLHNPGDAVEGRVTKRCQKAEEKAKEMVKMAEMLVELAQRIETNESRARSVVYSQWILKMTPYSNY

SEQ ID NO: 921473 - protein, 146 aa, Homo sapiens
KILMDFKWSCFFSWQKPSCLQVVTEDREEGLTVMDLLLTATYSIIPNLQMSKLKHRKFKSLSRRFGCHHLCNTLSLPLNCEFLEDREGTLYLFPISTSSGHRAWHNVEFLLTRTVHAAALHDGTSSLPLMPSANHPSAGTVTTSTA

SEQ ID NO: 921474 - protein, 205 aa, Homo sapiens
MAWQGLAAEFLQVPAVTRAYTAACVLTTAAVQLELLSPFQLYFNPHLVFRKFQVWRLVTNFLFFGPLGFSFFFNMLFVFRYCRMLEEGSFRGRTADFVFMFLFGGVLMTLLGLLGSLFFLGQALMAMLVYVWSRRSPRVRVNFFGLLTFQAPFLPWALMGFSLLLGNSILVDLLGIAVGHIYYFLEDVFPNQPGGKRLLQTPGFL

SEQ ID NO: 921475 - protein, 161 aa, Homo sapiens
MLFVFRYCRMLEEGSFRGRTADFVFMFLFGGVLMTLLGLLGSLFFLGQALMAMLVYVWSRRSPRVRVNFFGLLTFQAPFLPWALMGFSLLLGNSILVDLLGIAVGHIYYFLEDVFPNQPGGKRLLQTPGFLKLLLDAPAEDPNYLPLPEEQPGPHLPPPQQ

SEQ ID NO: 921476 - protein, 165 aa, Homo sapiens
MLFVFRYCRMLEEGSFRGRTADFVFMFLFGGVLMTLLGLLGSLFFLGQALMAMLVYVWSRRSPRVRVNFFGLLTFQAPFLPWALMGFSLLLGNSILVDLLGIAVGHIYYFLEDVFPNQPGGKRLLQTPGFLGLQSSKAPAGSSLTIWTQQSQGGPGTAGELAAPS

SEQ ID NO: 921477 - protein, 191 aa, Homo sapiens
MLFVFRYCRMLEEGSFRGRTADFVFMFLFGGVLMTVSFPQALEPRARAPRRPACVGPGANTAMPERDTVAVSSLVCVEGPLCAQLQGSGLDLQCCMQIQSHAQKSQAPFLPWALMGFSLLLGNSILVDLLGIAVGHIYYFLEDVFPNQPGGKRLLQTPGFLKLLLDAPAEDPNYLPLPEEQPGPHLPPPQQ

SEQ ID NO: 921478 - protein, 116 aa, Homo sapiens
MLFVFRYCRMLEEGSFRGRTADFVFMFLFGGVLMTVSFPQALEPRARAPRRPACVGPGANTAMPERDTVAVSSLVCVEGPLCAQLQGSGLDLQCCMQNTKPCTKEPGGLSGPLAEP

SEQ ID NO: 921479 - protein, 186 aa, Homo sapiens
RRRRFRYCRMLEEGSFRGRTADFVFMFLFGGVLMTVSFPQALEPRARAPRRPACVGPGANTAMPERDTVAVSSLLLGLLGSLFFLGQALMAMLVYVWSRRSPRVRVNFFGLLTFQAPFLPWALMGFSLLLGNSILVDLLGLWAVEGDPTVRGCLTGIAVGHIYYFLEDVFPNQPGGKRLLQTPGFL

SEQ ID NO: 921480 - protein, 127 aa, Homo sapiens
MSKSSWAGNLPLCSRPSSKAQLSPCCAWGSGEFHSLMEGRGPECKLPGKSPMLTCAQRSPPLTSQRPRTPIPNQSSASAPHGALPHFQGAQQPLTLALPWQHGTCQQLRVAAVCAGICARICAHSLQ

SEQ ID NO: 921481 - protein, 235 aa, Homo sapiens
MAWQGLAAEFLQVPAVTRAYTAACVLTTAAVQLELLSPFQLYFNPHLVFRKFQVWRLVTNFLFFGPLGFSFFFNMLFVFRYCRMLEEGSFRGRTADFVFMFLFGGVLMTLLGLLGSLFFLGQALMAMLVYVWSRRSPRVRVNFFGLLTFQAPFLPWALMGFSLLLGNSILVDLLGIAVGHIYYFLEDVFPNQPGGKRLLQTPGFLKLLLDAPAEDPNYLPLPEEQPGPHLPPPQQ

SEQ ID NO: 921482 - protein, 109 aa, Homo sapiens
MLVYVWSRRSPRVRVNFFGLLTFQAPFLPWALMGFSLLLGNSILVDLLGIAVGHIYYFLEDVFPNQPGGKRLLQTPGFLKLLLDAPAEDPNYLPLPEEQPGPHLPPPQQ

SEQ ID NO: 921483 - protein, 117 aa, Homo sapiens
MLFVFRYCRMLEEGSFRGRTADFVFMFLFGGVLMTLLGLLGSLFFLGQALMAMLLLGIAVGHIYYFLEDVFPNQPGGKRLLQTPGFLKLLLDAPAEDPNYLPLPEEQPGPHLPPPQQ

SEQ ID NO: 921484 - protein, 115 aa, Homo sapiens
MVRPRSAELLSPCCAWGSGEFHSLMEGRGPECKLPGKSPMLTCAQRSPPLTSQRPRTPIPNQSSASAPHGALPHFQGAQQPLTLALPWQHGTCQQLRVAAVCAGICARICAHSLQ

SEQ ID NO: 921485 - protein, 148 aa, Homo sapiens
MGEKGSYLHRVMCLASNVKGKGGNPVTSESLLCQDVTSAYNLPATERKCVQNVFAFRLMQVSAFQEYSPKEAVGFKEGTKPSNSNLTHRMMLDQELSRASQFSWSGKWGTKKTACMGKELYSHPIIELLEVGAGSVAGKKGLILSECV

SEQ ID NO: 921486 - protein, 442 aa, Homo sapiens
MPALEPAPPLLADLGPALEPESPAALGPPGYLHSAPGPAPAPGEGPPPGTVLEPQSAPESSCPCRGSVKNQPSEELPDMTTFPPRLLAEQLTLMDAELFKKVVLHECLGCIWGQGHLKGNEHMAPTVRATIAHFNRLTNCITTSCLGDHSMRARDRARVVEHWIKVARECLSLNNFSSVHVIVSALCSNPIGQLHKTWAGVSSKSMKELKELCKKDTAVKRDLLIKEARPLLLLLLLLLLLLLSAAHLHGQGALACTGGEGEQQQRKLMWQGVQYTAQLWRDDGENNGNSYRKLSPQRPCEVAVVCITLYRRGNSLREARLQDWVTHTGSVDLASGMSTVPGGSRHSLGIQVRGGWGVTGGEEESLTVPVADTWQAGSFKVATQERNPQRAQMRLRRQKKGVVPFLGDFLTELQRLDSAIPDDLDGNTNKRSKVSSWGTHVG

SEQ ID NO: 921487 - protein, 274 aa, Homo sapiens
MPALEPAPPLLADLGPALEPESPAALGPPGYLHSAPGPAPAPGEGPPPGTVLEPQSAPESSCPCRGSVKNQPSEELPDMTTFPPRLLAEQLTLMDAELFKKVVLHECLGCIWGQGHLKGNEHMAPTVRATIAHFNRLTNCITTSCLGDHSMRARDRARVVEHWIKVARECLSLNNFSSVHVIVSALCSNPIGQLHKTWAGVSSKSMKELKELCKKDTAVKRDLLIKEARPLLLLLLLLLLLLLSAAHLHGQGALACTGGEGEQQQRKLMWQGVQ

SEQ ID NO: 921488 - protein, 559 aa, Homo sapiens
MPALEPAPPLLADLGPALEPESPAALGPPGYLHSAPGPAPAPGEGPPPGTVLEPQSAPESSCPCRGSVKNQPSEELPDMTTFPPRLLAEQLTLMDAELFKKVVLHECLGCIWGQGHLKGNEHMAPTVRATIAHFNRLTNCITTSCLGDHSMRARDRARVVEHWIKVARECLSLNNFSSVHVIVSALCSNPIGQLHKTWAGVSSKSMKELKELCKKDTAVKRDLLIKEARPLLLLLLLLLLLLLSAAHLHGQGALACTGGEGEQQQRKLMWQGVQYTAQLWRDDGENNGNSYRKLSPQRPCEVAVVCITLYRRGNSLREARLQDWVTHTGSVDLASGMSTVPGGSRHSLGIQVRGGWGVTGGEEESLTVPVADTWQAGSFKVATQERNPQRAQMRLRRQKKGVVPFLGDFLTELQRLDSAIPDDLDGNTNKRSKEVRVLQEMQLLQVAAMNYRLRPLEKFVTYFTRMEQLSDKERLHCSVTISVHCNVCLLGSSPSSASQAAGTTAVHHHVRLFCCCCSATSCPASWSPKTRRLATSCSGWEPTGMLARTPALHHPSPRP

SEQ ID NO: 921489 - protein, 486 aa, Homo sapiens
MPALEPAPPLLADLGPALEPESPAALGPPGYLHSAPGPAPAPGEGPPPGTVLEPQSAPESSCPCRGSVKNQPSEELPDMTTFPPRLLAEQLTLMDAELFKKVVLHECLGCIWGQGHLKGNEHMAPTVRATIAHFNRLTNCITTSCLGDHSMRARDRARVVEHWIKVARECLSLNNFSSVHVIVSALCSNPIGQLHKTWAGVSSKSMKELKELCKKDTAVKRDLLIKEARPLLLLLLLLLLLLLSAAHLHGQGALACTGGEGEQQQRKLMWQGVQYTAQLWRDDGENNGNSYRKLSPQRPCEVAVVCITLYRRGNSLREARLQDWVTHTGSVDLASGMSTVPGGSRHSLGIQVRGGWGVTGGEEESLTVPVADTWQAGSFKVATQERNPQRAQMRLRRQKKGVVPFLGDFLTELQRLDSAIPDDLDGNTNKRSKEVRVLQEMQLLQVAAMNYRLRPLEKFVTYFTRMEQLSDKESYKLSCQLEPENP

SEQ ID NO: 921490 - protein, 176 aa, Homo sapiens
MGSKLTCCLGPSGGLNCDCCRPDVGPCHECEIPETVAATAPASTTAKPAKLDLKAKKAQLMQYLSLPKTPKMLKMSKGLDARSKRWLKIIWRRHGIWPLENIGPTEDVQASAHGGVEENMTSDIEIPEAKHDHRPTEDVQVSAHGGVEENITSDIEISEAKHDHRTYFFLNSFIYV

SEQ ID NO: 921491 - protein, 450 aa, Homo sapiens
MRSHLTIDRLVPAPHEDTVHDITNEDATHDIANEDTVHDIANEAADKGIANEDAAHGIANEDAAHGIASEDAAHGIASEDAAHGIASEDAAQGIANEDAAQGIAKEDAVHGIANEDAAQGIANEDAAQGIAKEDAAQGIANEDAAQGIAKEDAAQGIAKEDAAQGIANEGAAQGIAKEDAAHGIANEDAAQGIANEDAAHGIASEDAAHGIASEDAVQGIAKEDAAQGIANEDAAQGIANEDAAQGIAKEDAAHGIANELYTTSLTRTPYKPHANEDAVHDITNEDSVQAITNEDTVYGIANEDTDAVDDIAYKDTVQDIANEDAVYDIANEDVVYDIANEDALQDIANEVAVYDIANEDIVYDIANEDALYDITNEDAVYNIANEDAVYGIANEDAVYEFANKDAVYDIANEDTVQDICKKEDAANEPLTLENDTYPEITHFLRKKRHL

SEQ ID NO: 921492 - protein, 450 aa, Homo sapiens; identical to SEQ ID NO: 921491

SEQ ID NO: 921493 - protein, 253 aa, Homo sapiens
MLSTDSKISQRELATDASKVAPRPGTVAHACNLSTLGGRGVGAGRREVEWAARRRKQAFRRLLIPRRSSLTPGDLNLKSEAPRVLSNPGVEVGWGIPALSDLGDQKDAHLGEWDLPFQSAHPRGPHLEGRTWRTAPPRRARLTPGAQAMWGVRAGRSVPAPHPASMRTTKPPGPGNRGGAGRGGAGKRRGAGPVTSRPRPRPAPSSRSAPQRSPHLQAQVCALRISKAGQQASENGKCWGEKDGDELLGKPPE

SEQ ID NO: 921494 - protein, 212 aa, Homo sapiens
LKWSEECVTHVRAPCMATWAIIANPGNGAVRASEVGGDITARCSHRRYSCPPPQQSLQYQEVGGFNHLTQKLVGTQGGGDVDLSENQLGVAGAQALCAALTVNQAMRKMQLSGNGLEEQAAQHLAELLLAHTDLKSLDLSYNQLNDQAEPLSGCGVRSMFLGPAAALHTPLPVSLRAIHVYTGPFLLCSGPLGSVDHHHPSCSHQGVCMALS

SEQ ID NO: 921495 - protein, 261 aa, Homo sapiens
MEAVPGISVPASDSHCRDLGVNNDHGGRARDVPASDSQCLDLEVNSKPADEGERVKEEVVISSAYLLEPPDFGGGFHWVSPAPGNRPSHSVDRVVRLRFVDASIFPYIELSEHRLWSQPDLEDFGYVSPTPVSLDFSGCPLGCAENKYADILPFCSLQERTTLPSAVLDLSSNAGLTYCRHLSTERTHLSSLVNYMIMSLDLPCDAGQELTAGIWEQYLQDSTARKLKACGRAYGTFLQMHLVIEAFTGKYLPWLVKSKND

SEQ ID NO: 921496 - protein, 135 aa, Homo sapiens
MTFPDPSPNPHPSCPTVHRDEAAHPGLCDSVHVITCDGTTALFPPCSWANSFSFCRKTTPSSMPWGHWGELSTNLSSAWTNQKKAGARKKLRHHLAYILILQLRKGRLSAAPGNKQLRRNGMFLTRSSRAVIAPL

SEQ ID NO: 921497 - protein, 180 aa, Homo sapiens
MTMFTESHFRILNLRTIINQAAGTPPPGSEALAVLRPAQNWSQGWTPPGGAPGALPTTCSKDTASWKRPWFPFGGELVQGTSRRRRGSRGPGLGGQPSLHHLLRVHRSQPWAFCPFHSKISGLTFISPFHPPQEVGTRLGVAFADPENEYCPAYTAQWPREADEDTEDLRAGKEGRGDIH

SEQ ID NO: 921498 - protein, 180 aa, Homo sapiens; identical to SEQ ID NO: 921497

SEQ ID NO: 921499 - protein, 207 aa, Homo sapiens
LRTEMFILLAALIENLLCARHCPSAKNSPANMTDTPAVISKLASAEGSWRVSNFLQDSIYSLAVIVLCAQRLVFLKHPLPALSTPLLALLPSYLWTDKEEKRGPCNAQWSQDASYVGDKDPPVQEAPGVPPSPGLQCQPLEGKHGCLLSAVEKTFWSRRSKAFWGLQPPRSPPQASPLAPGNEAILRSQAHSLFSLTGHKKLYVELF

SEQ ID NO: 921500 - protein, 174 aa, Homo sapiens
SSPLHLGRNKPTATRGRENAGRIREMGLGDMVEWPGREWLQGLSLGPAGLAGHPRGLLLAPEPVSVRAGWQGQREAEGPRARACGKRGRPLLGSSAAWTLTPCKVLVATACRAVPLAVGRGAGGHWEDLHPSEGKAWSRSSSIPFPPGLLLCAGSTWPCENRAAWWTGQHGTAS

SEQ ID NO: 921501 - protein, 174 aa, Homo sapiens; identical to SEQ ID NO: 921500

SEQ ID NO: 921502 - protein, 129 aa, Homo sapiens [sequence omitted]

SEQ ID NO: 921503 - protein, 443 aa, Homo sapiens
TLLSGTLHSAWRKRWFVLRRGRMSGNPDVLEYYRNKHSSKPIRVIDLSECAVWKHVGPSFVRKEFQNNFVFIVKTTSRTFYLVAKTEQEMQVWVHSISQVCNLGHLEDGADSMESLSYTPSSLQPSSASSLLTAHAASSSLPRDDPNTNAVATEETRSESELLFLPDYLVLSNCETGRLHHTSLPTRCDSWSNSDRSLEQASFDDVFVDCLQPLPSSHLVHPSCHGSGAQEVPSSRPQAALIWSREINGPPRDHLSSSPLLESSLSSTIQVDKNQGSLPCGAKELDIMSNTPPPRPPKPSHLSERRQEEWSTHSGSKKPECTLVPRRISLSGLDNMRTWKADVEGQSLRHRDKRLSLNLPCRFSPMYPTASASIEDSYVPMSPQAGASGLGPHCSPDDYIPMNSGSISSPLPELPANLEPPPVNRDLKPQRKCKHLTRPAVQG

SEQ ID NO: 921504 - protein, 413 aa, Homo sapiens
MSLWISGTYPSPQSYDSWDYSELDPERFRREELMLYRRRLTKGREFSLFAGKRAFSQKPAQSRKFYHPQHHPGKVFTEKSQAVSRKARAFPPPRQPAPLCTLAICHLCAYGEVLLPSQLPVLSVYSFPSPLPYCIYIFSLGGLIWSGSFKYRPYASDPPSPWPLPELVLVYPPAFSATPGGFEEPQSSYPGRVSVLASEAMLPRMMAKPYCLCQGVLLCASVTEDWMLKVLLYSLKNQLLLSTVSPKTGVRILPISSPLLISILKSQAGVVHLQSCAACKSPELTSNLFNIYGKSPLIVYFLQNYASLQQHGKNVLIFHSTGISLTAEATDCTPTYTDVISETLCSMKKRKDNLNQLYQHHWTEWNYFDKHLKELQDNFSRNHTFLFLDLLSVAASGPENAFSSLLFVNCQHH

SEQ ID NO: 921505 - protein, 161 aa, Homo sapiens
LVQGPQSMIQAINSEQTADWPHKARQQPTDRLPLSQGEVPILQGPAPSSGGSPGQRHRCAAGLQERSESYSPASSTELCSSCISVCQPDQQTLELRLKGRVLPSHELIHTGTCVRVWRAPVRWCAVLAAQVVKDGRAAEGAGQGHCPCLPECHYVNHPGIP

SEQ ID NO: 921506 - protein, 1707 aa, Homo sapiens
MATRVEVGSITPLTAVPGLGEMGKEETLTRTYFLQAGEASGAPPARILEAKSPLRSPARLLPLPRLAPKPFSKEQDVKSPVPSLRPSSTGPSPSGGLSEEPAAKDLDNRMPGLVGQEVGSGEGPRTSSPLFNKAVFLRPSSSTMILFETTKSGPALGKAVSEGAEEAKLGVSGSRPEVAAKPALPTQKPAGTLPRSAPLSQDTKPPVPQEEAGQDHPPSKASSVEDTARPLVEPRPRLKRRPVSAIFTESIQPQKPGPGAAATVGKVPPTPPEKTWVRKPRPLSMDLTARFENKEALLRKVADEGSGPTAGDMAGLERPRAASKLDRDCLVKAEAPLHDPDLDFLEVAKKIRERKEKMLSKPEMGSPRALVGGSSGVTPSNDQSPWEEKAKLDPEPEKAAESPSPRLGRGLELAEVKSRVADGEAAAGGEWASRRSVRKCISLFREDSTLALAVGSESPLATPASPSAAPEPEKGVVSVQERIRGWTAESSEAKPEVRRRTFQARPLSADLTKFFELNTCYIFSNEVKYEKSAELSGEFPKEPREKQKEGHSLDGACIPRSPWKPGTLRDKSRQTEQKVSSNQDPDSCRGGSSVEAPCPSDVTPEDDRSFQTVWATVFEHHVERHTVADQSGRCLSTTPPGDMAHARVSEPRPRPEMGSWLGRDPPDMTKLKKENSRGFDNPETEKLGPTTLLNGELRPYHTPLRDKYPLSENHNNNTFLKHLENPPTSQRIEPRYDIVHAVGERVHSEAISPAPEEKAVTLRSLRSWLSLKDRQLSQEVTPADLECGLEGQAGSVQRASLIWEARGMPEASGPKFGGNCPFPKWTGGAVVSSHKATVAVSEEHCAPGATSVRAIKAAIWESQHEGPEGARSKPGVGARGPPQGCPLDPLSRATNGPSDSQARTHPDAFAVQKGPFIVAAREGDPGPAQVPQPAVRMRKAGAMDQRMDRWRRRTLPPNVKFDTFSSLVPEDSPHVGHRRTDYVSPTASALRKPQLSHYRVETQEVNPGASRDQTSPAVKQGSPVEPKATFFAVTYQIPNTQKAKGVVLSGAESLLEHSRKITPPSSPHSLTSTLVSLGHEEALEMAGSKNWMKGREHENASILKTLKPTDRPSSLGAWSLDPFNGRIIDVDALWSHRGSEDGPRPQSNWKESANKMSPSGGAPQTTPTLRSRPKDLPVRRKTDVISDTFPGKIRDGYRSSVLDIDALMAEYQELSLKVPGEAQERRSPTVEPSKQLAETLETAMGTKSSPPFWALPPSAPSERYPGGSPIPADPRKKTGFAEDDRKAFASKHHVAKCQNYLAESKPSGREDPGSGVRVSPKSPPTDQKKGTPRKSTGRGEEDSVAQWGDHPRDCGRVPLDIKRAYSEKGPPANIREGLSIMHEARERRREQPKGRPSLTGENLEAKMGPCWWESGTGDSHKVLPRDLEKEDAPQEKERPLQQVSPVASVPWRSHSFCKDRRSGPFVPRGVRKALAGPCVYGNSHSVGQPRALHAPLLLIPQLAGPNPRLDTHQPVSQDTQRQGYSQAAGIIPPAVPPVQRNQPFCCTFVGQQDPVLWLCCQLGLSSDWYCQLLGSEGSTPGPAPLDEKPEMPRAGLIGPSGGFSVPQAAVAISGADWLVPWPGKLETVLCSPHNLWVLEMEYYYCPSLLKLLRYLWEELRLLNRNEDPGSDVGFPPVLKKTGRTRTTSTYRMPPVCQGQGAIAETKT

SEQ ID NO: 921507 - protein, 126 aa, Homo sapiens
MSHIQVTLILDFIIHFTTSILVKGIQQVARKLQTFSLFQPLPVTQFQSCFNIFGYLYSSTRLSVVLIYCISLFTYCYKELPKTRVNEVGSAFLMPSVSASKLLGNETIYHCEHVDGKRRFPMGLAK

SEQ ID NO: 921508 - protein, 126 aa, Homo sapiens; identical to SEQ ID NO: 921507

SEQ ID NO: 921509 - protein, 218 aa, Homo sapiens
NRSVYLTGRLLAYHRDEVLKMQSRRSSQESVPKATKTGGDSSAILIYLSCKYQTPDHWYPSDLQARARVHEYLGWHADCIRGTFGIPLWVQVLGPLIGVQVPEEKVERNRTAMDQALQWLEDKFLGDRPFLAGQQVTLADLMALEELMQPVALGYELFEGRPRLAAWRGRVEAFLGAELCQEAHSIILSILEQAAKKTLPTPSPEAYQAMLLRIARIP

SEQ ID NO: 921510 - protein, 260 aa, Homo sapiens
ALSAFTAIPAVLAAPAMGLELFLDLVSQPSRAVYIFAKKNGIPLELRTVDLVKGQHKSKEFLQINSLGKLPTLKDGDFILTESSAILIYLSCKYQTPDHWYPSDLQARARVHEYLGWHADCIRGTFGIPLWVQVLGPLIGVQVPEEKVERNRTAMDQALQWLEDKFLGDRPFLAGQQVTLADLMALEELMQPVALGYELFEGRPRLAAWRGRVEAFLGAELCQEAHSIILSILEQAAKKTLPTPSPEAYQAMLLRIARIP

SEQ ID NO: 921511 - protein, 2556 aa, Homo sapiens
MIVLYSCCKELIHSFLKDSKSMQDGWGESDGPVTGARHPSWEEEEDGGVWNTTGSQGSASSHNSASWGQGGKKQMKCSLKGGNNDSWMNPLAKQFSNMGLLSQTEDNPSSKMDLSVGSLSDKKFDVDKRAMNLGDFNDIMRKDRSGFRPPNSKDMGTTDSGPYFEKGGSHGLFGNSTAQSRGLHTPVQPLNSSPSLRAQVPPQFISPQVSASMLKQFPNSGLSPGLFNVGPQLSPQQIAMLSQLPQIPQFQLACQLLLQQQQQQQLLQNQRKISQAVRQQQEQQLARMVSALQQQQQQQQRQPGMKHSPSHPVGPKPHLDNMVPNALNVGLPDLQTKGPIPGYGSGFSSGGMDYGMVGGKEAGTESRFKQWTSMMEGLPSVATQEANMHKNGAIVAPGKTRGGSPYNQFDIIPGDTLGGHTGPAGDSWLPAKSPPTNKIGSKSSNASWPPEFQPGVPWKGIQNIDPESDPYVTPGSVLGGTATSPIVDTDHQLLRDNTTGSNSSLNTSLPSPGAWPYSASDNSFTNVHSTSAKFPDYKSTWSPDPIGHNPTHLSNKMWKNHISSRNTTPLPRPPPGLTNPKPSSPWSSTAPRSVRGWGTQDSRLASASTWSDGGSVRPSYWLVLHNLTPQIDGSTLRTICMQHGPLLTFHLNLTQGTALIRYSTKQEAAKAQTALHMCVLGNTTILAEFATDDEVSRFLAQAQPPTPAATPSAPAAGWQSLETGQNQSDPVGPALNLFGGSTGLGQWSSSAGGSSGADLAGASLWGPPNYSSSLWGVPTVEDPHRMGSPAPLLPGDLLGGGSDSSELRTFNSDLVTFFGDSSSTNLTFSFFFSTCNKYIFKRKKENGEKKRWVIDRLSEHIVASLITSVFSFGICIQKENISLLKYLNHERQPEKDNVKQVHIPFKFKHKKIKKIEFLVFHFFHVIWKLLLRNIYTEKKWLFNFVCTGCVSVLRSTMFGREGNSKELLGEGGGKTVTEPHFKNKNTKNLKKKKRKKFVIGLVDKYQCVLAHVTAQACSFWCVCARVFMCIRVHPSLSLCVCLCSSLLPCPTLTSQKAASLTVCRLAGRPICFLFYFFNYENTQARRATATKATPLGCIKMNRVLFNDESRELLSICNLAWMWGFSGCSFDLAVEWSTAKSKKLEQEDLLEQRCVYFCFFFFLSEWPPGTSEYLLSFMQAFSVSLKWERKITFDDAMSQKQRNFVPSFLMIRFEKFFKKLGEVELHISVGWFSFSFYENRKESSGEQPPESICSYSLCSFLAERYLCQAVARYSSQAITDRNVYLTNVLKPAVYFKRFLLFLCVVYFLCMWFCLGRYNLAKTFKYCTFFLIFDLFPPPCNFAFLISVFKYFFFFLSINVVVLWAEQGSTFNLQFITNMYVLMSESKCIKLLIVKRIIADLKGAKNQIGWGDGCRGRASTCVDIPVCIMLFNIKCRHFVPANTCPFQPLVGADLYCPLELAAIEDKGVFLSLASSVKDTIQQCLMYLTFYLCLCVGGWVGVYRKSQNKLFAFQWFCETKNGKFCSPSGFTLLIINLASKEIDRHDSSECSHIQACMSPLWVGGHTWHLQHGRGPAGCLEHALFLLCNLNHHRAPSTTVPHAKALLPAAPTDLLSVWSKVLSCGDHQVKSSLYSDIQRRLNLSVPGPGAYPKAPASQWRPCPLPLLVHCCVLPHPPLLLPVGSLTCTMGYLSSLRYYGESRVLEPLLFTRHNEGFEICKNKHEKLKCSSIISLKGKKLKTLKKKDQKVRIYIHINIYFEMKTELWEHLTVFFVSVFNICFPALKFASILRNSRVGSQFFEDGLFNHILSKRDGCFFPVNKLLQVPETSESLNNFYLKKCKKKSLQTLLSYWGSHILKHIEIFFKNYQFSSNRKIHYLKNMGEGLSFVRAQIMDSFEIVCSLMGECLVYIDENAITLFLSIETELKSPLVIFIFLKEPFSLSPQPQQQKKGRKEENNSLKKKVICKKYSWIAENLCKEFRKYRLIIFGTNFKYRHYYEENYLWTVLLMKNVCLTSVCLGGGENIEESNKEQVISTFLAPSYCCARFNCCFEDLLLNYPHPLAGDVECFLSVFGDVEFFCIPSWGQGSEFPSMTTASFKHSASQWEGNSSSTGKGSGWGCCLQFLYNRFSAFVHTPRHPEQGGRTCVCVWSSHSTDVRYSPIKEIGVVLDRPQRQWAEFKINKQTSSKLICLCLSNVECQVPSCVVCPPLLCIDSSRCVIVTTAVIWKVSLSWANRRGSCCSALVLRLLPFSPRPPPSFCQLAGSFALLVGSDLRTGYGEDVMEEKSSFRGISLARAMSTKRLGDFSILIKFSESAFFSSTTLWHRYRLAGHLSLHRFILKTFDYVNLSFPFFFFNYFLKHLITSGLEVCTSPEHHKLGFYLPHEYQKKRSTNRERGVSHQTEDLCCQLDPVSGPNFKCGKEFRSLRHCEEMDGSCNISDPSVPNPGRVSFTTFIGVNLAVLQLRFQTKLFNQCPPNKSLIHLLLVSFIYSNLISYEYGSCCKNFPTSSDMNEHKLAIGSSKLLWVEYGIEGMQEEKERKKIKLLPENLEAPLLTHISRRN

SEQ ID NO: 921512 - protein, 193 aa, Homo sapiens
MRLGPSSSANGAGEGDCMAGEGRRNLLLPVPMRALEQCFFAPQQQQFLPVDAPESILQFSQYLEVHLRCILRGVDTGPKLHGSLFPLFPQPWGSSHLYSSISVCPSLDAVASRALNLYCLLWAYGVCSRESLLKDPQTLDSHGQPTVVMEPEPECNSQCDQELEFKSRQQVLLIEGKFSEDAGSLQHSGELKQ

SEQ ID NO: 921513 - protein, 389 aa, Homo sapiens
MNPQIRNPMERMYRDTFYDNFENEPILYGRSYTWLCYEVKIKRGRSNLLWDTGVFRGPVLPKRQSNHRQEVYFRFENHAEMCFLSWFCGNRLPANRRFQITWFVSWNPCLPCVVKVTKFLAEHPNVTLTISAARLYYYRDRDWRWVLLRLHKAGARVKIMDYEDFAYCWENFVCNEGQPFMPWYKFDDNYASLHRTLKEILRNPMEAMYPHIFYFHFKNLLKACGRNESWLCFTMEVTKHHSAVFRKRGVFRNQVDPETHCHAERCFLSWFCDDILSPNTNYEVTWYTSWSPCPECAGEVAEFLARHSNVNLTIFTARLCYFWDTDYQEGLCSLSQEGASVKIMGYKDFVSCWKNFVYSDDEPFKPWKGLQTNFRLLKRRLREILQLFL

SEQ ID NO: 921514 - protein, 286 aa, Homo sapiens
MTGRNSLRDGWICNAMAGGVPGQPAGVGLALIATDSQETRPGRAGPGSGESLSASHLFISDFAYCWENFVCNEGQPFMPWYKFDDNYASLHRTLKEILRNPMEAMYPHIFYFHFKNLLKACGRNESWLCFTMEVTKHHSAVFRKRGVFRNQVDPETHCHAERCFLSWFCDDILSPNTNYEVTWYTSWSPCPECAGEVAEFLARHSNVNLTIFTARLCYFWDTDYQEGLCSLSQEGASVKIMGYKDFVSCWKNFVYSDDEPFKPWKGLQTNFRLLKRRLREILQLFL

SEQ ID NO: 921515 - protein, 107 aa, Homo sapiens
MRIPSRDSMTGRNSLRDGWICNAMAGGVPGQPAGVGLALIATDSQETRPGRAGPGSGESLSASHLFISDFAYCWENFVCNEGQPFMPWYKFDDNYASLHRTLKEILR

SEQ ID NO: 921516 - protein, 149 aa, Homo sapiens
MDDTPPWGARCAQGAALGTLERSLPESPPPAIRCPISETGTGRPAPHRQFRGVTRTQDSDDSMPDPPGRRRSLTAAWGRRRGDQRGPGQLVPGIGQDGPLAGAGGRSRLALLHGHQVMMKPLLWSKLPVNSAQRAGPPTSLLNVPASPP

SEQ ID NO: 921517 - protein, 542 aa, Homo sapiens
MGDIFLCKKVESPKKNLRESKQREEDDEDPDLIYVGVEHVHRDAEVLFVGMISNSKPVVSNILNRVTPGSKSRRKKGHFRQYPAHVSQPANHVTSMAKAIMPVSLSEGRSTDSPVTMKSSSEPGYKMSSPQVVSPNYSDSLPPGTQCLVGAMVSGGGRNESSPDSKRLSTSDINSRDSKRVKLRDGIPGVPSLAVVPSDMSSTISTNTPSQGICNSSNHVQNGVTFPWPDANGKAHFNLTDPERANESGLAMTDISSLASQNKTFDPKKENPIVLLSNFYYGQHKGDGQPEQKTHTTFKCLSCVKVLKNIKFMNHMKHHLEFEKQRNDSWEDHTTCQHCHRQFPTPFQLQCHIDSVHIAMGPSAVCKICELSFETDQVLLQHMKDHHKPGEMPYVCQVCHYRSSVFADVETHFRTCHENTKNLLCLFCLKLFKTAIPYMNHCWRHSRRRVLQCSKCRLQFLTLKEEIEHKTKDHQTFKKPEQLQGFPRETKVIIQTSVQPGSSGMASVIVSNTDPQSSPVKTKKKTAMNTRDSRLPCSKDSS

SEQ ID NO: 921518 - protein, 252 aa, Homo sapiens
MEGHVYWTDDEVWAIRRAYLDGSGAQTLINTKINDPDDIAVNWVARSLYWTHTGTEHIEVTCLNSTSHKILVSEDMDEPRAIALHPEMGLTYWIDWGENPEIKRANLDRQELRVLVNASLGWPNGLALDLQEGKLYWGDAKTDKIEAISVDETKRQTLLKDKLPHIFRFTLLGDFIYWTAWQHHSIKRVHKVKANRDVIIDQLPDLMGLKAVNVDKVVGTNPHADRNGGAATCASSRPTQPGLAAPSRAWNC

SEQ ID NO: 921519 - protein, 252 aa, Homo sapiens; identical to SEQ ID NO: 921518

SEQ ID NO: 921520 - protein, 224 aa, Homo sapiens
MEGHVYWTDDEVWAIRRAYLDGSGAQTLINTKINDPDDIAVNWVARSLYWTHTGTEHIEVTCLNSTSHKILVSEDMDEPRAIALHPEMGLTYWIDWGENPEIKRANLDRQELRVLVNASLGWPNGLALDLQEGKLYWGDAKTDKIEAISVDETKRQTLLKDKLPHIFRFTLLGDFIYWTAWQHHSIKRVHKVKANRDVIIDQLPDLMGLKAVNVDKVVGPGTAE

SEQ ID NO: 921521 - protein, 178 aa, Homo sapiens
MEGHVYWTDDEVWAIRRAYLDGSGAQTLINTKINDPDDIAVNWVARSLYWTHTGTEHIEVTCLNSTSHKILVSEDMDEPRAIALHPEMGLTYWIDWGENPEIKRANLDRQELRVLVNASLGWPNGLALDLQEGKLYWGDAKTDKIEVRLPWRYLILEAWPCPAVPGLLRGQARPPPAA

SEQ ID NO: 921522 - protein, 252 aa, Homo sapiens; identical to SEQ ID NO: 921518

SEQ ID NO: 921523 - protein, 224 aa, Homo sapiens; identical to SEQ ID NO: 921520

SEQ ID NO: 921524 - protein, 132 aa, Homo sapiens
MEGHVYWTDDEVWAIRRAYLDGSGAQTLINTKINDPDDIAVNWVARSLYWTHTGTEHIEVTCLNSTSHKILVSEDMDEPRAIALHPEMGLTYWIDWGENPEIKRAILLSASRRPRPWTLMCPATTSTGQTSA

SEQ ID NO: 921525 - protein, 293 aa, Homo sapiens
APESMWSVVPPAMQILPLIKGQPRGESCGLRQGPQHTSIRKLSLSWMGNHRAGFLLEFMVEREGAEREEFSRPRCSKPLAPVLGPGEPEEQETKDQPRGPQDPFPGGVTCVLSEESEEQQSPGHGGDVPRALPLVTPALALPQPCLIPFASEEGGASMKISILGSSPHPTLTICTIESLEHISHPRQCTHIHTGHMWEGPSGGTQSTDQGHSPEPKPAAPNPALPTHEQEIKSHDLAASPGESPERPGTMKVEEQPGKEKPLCLQDRGSQSKGEIKGTPVTSGRTLHMAGTPF

SEQ ID NO: 921526 - protein, 160 aa, Homo sapiens
ASGMMSEPSPTLLLPAQGSWAALRPPPSKIKIGLERQWDRAVGVPGGSGAGRTKSVPAEGCRYRVQGVAAAGPQLASLNPFLGTAVARPFPLVLFLLETPHSLLGGSRQRKRGCVCGCHYSADTLAPPQRVAGPGNLHLNRPWLSHFGNCPKHLSNMGQV

SEQ ID NO: 921527 - protein, 641 aa, Homo sapiens
MAKAAAIGIDLGTTYSCVGVFQHGKVEIIANDQGNRTTPSYVAFTDTERLIGDAAKNQVALNPQNTVFDAKRLIGRKFGDPVVQSDMKHWPFQVINDGDKPKVQVSYKGETKAFYPEEISSMVLTKMKEIAEAYLGYPVTNAVITVPAYFNDSQRQATKDAGVIAGLNVLRIINEPTAAAIAYGLDRTGKGERNVLIFDLGGGTFDVSILTIDDGIFEVKATAGDTHLGGEDFDNRLVNHFVEEFKRKHKKDISQNKRAVRRLRTACERAKRTLSSSTQASLEIDSLFEGIDFYTSITRARFEELCSDLFRSTLEPVEKALRDAKLDKAQIHDLVLVGGSTRIPKVQKLLQDFFNGRDLNKSINPDEAVAYGAAVQAAILMGDKSENVQDLLLLDVAPLSLGLETAGGVMTALIKRNSTIPTKQTQIFTTYSDNQPGVLIQVYEGERAMTKDNNLLGRFELSGIPPAPRGVPQIEVTFDIDANGILNVTATDKSTGKANKITITNDKGRLSKEEIERMVQEAEKYKAEDEVQRERVSAKNALESYAFNMKSAVEDEGLKGKISEADKKKVLDKCQEVISWLDANTLAEKDEFEHKRKELEQVCNPIISGLYQGAGGPGPGGFGAHGPKGGSGSGPTIEEVD

SEQ ID NO: 921528 - protein, 404 aa, Homo sapiens
MSTQFSHFGSLFDLEHDLPDELINSTELGLTNGGDINQLQTSLGMVQDAASKHKQLSELLRSGSSPNLNMGVGGPGQVMASQAQQSSPGLGLINSMVKSPMTQAGLTSPNMGMGTSGPNQGPTQSTGMMNSPVNQPAMGMNTGMNAGMNPGMLAAGNGQGIMPNQVMNGSIGAGRGRQNMQYPNPGMGSAGNLLTEPLQQGSPQMGGQTGLRGPQPLKMGMMNNPNPYGSPYTQNPGQQIGASGLGLQIQTKTVLSNNLSPFAMDKKAVPGGGMPNMGQQPAPQVQQPGLVTPVAQGMGSGAHTADPEKRKLIQQQLVLLLHAHKCQRREQANGEVRQCNLPHCRTMKNVLNHMTHCQSGKSCQVAHCASSRQIISHWKNCTRHDCPVCLPLKNAGDKRNQQRK

SEQ ID NO: 921529 - protein, 172 aa, Homo sapiens
AAGSWLWVDVVGLGLQIQTKTVLSNNLSPFAMDKKAVPGGGMPNMGQQPAPQVQQPGLVTPVAQGMGSGAHTADPEKRKLIQQQLVLLLHAHKCQRREQANGEVRQCNLPHCRTMKNVLNHMTHCQSGKSCQVAHCASSRQIISHWKNCTRHDCPVCLPLKNAGDKRNQQRK

SEQ ID NO: 921530 - protein, 140 aa, Homo sapiens
RQNMQYPNPGMGSAGNLLTEPLQQGSPQMGGQTGLRGPQPLKVSTVLVCVHNRHACEYCHDGWRVCLTLYSSFHYYTPGIYCAVISFKKCLYLSKTFILQLVFYNFILPNDCWLMLVLSGTSIGMFLSHFQVQFSLVASL

SEQ ID NO: 921531 - protein, 297 aa, Homo sapiens
MSTQFSHFGSLFDLEHDLPDELINSTELGLTNGGDINQLQTSLGMVQDAASKHKQLSELLRSGSSPNLNMGVGGPGQVMASQAQQSSPGLGLINSMVKSPMTQAGLTSPNMGMGTSGPNQGPTQSTGMMNSPVNQPAMGMNTGMNAGMNPGMLAAGNGQGIMPNQVMNGSIGAGRGRQNMQYPNPGMGSAGNLLTEPLQQGSPQMGGQTGLRGPQPLKMGMMNNPNPYGSPYTQNPGQQIGASGLGLQIQTKTVLSNNLSPFAMDKKAVPGGGMPNMVSTNPLQTCFQTGILTKELC

SEQ ID NO: 921532 - protein, 197 aa, Homo sapiens
MRFERKLRPAVKSRTAQFGRYESCRSNSIRRKGDNAFPRGRAARRGANCLDAPPATVPQLASSAQRDSAPQGHREGPDPSAQWDGVAPRVRAELPIWAGPKGHVAGKAGARAASTNRRPPRAASPRLPRPTPGGRLRASYQCQDCQSGRSAARASRDCWTAGSRLEASERSVTAVEEGGAGRQRGTRASGPLSWGAG

SEQ ID NO: 921533 - protein, 197 aa, Homo sapiens; identical to SEQ ID NO: 921532

SEQ ID NO: 921534 - protein, 294 aa, Homo sapiens
AGGWKVVPVTGLAVGAAVAMLSVAARSGPFAPVLSATSRGVAGALRPLVQATVPATPEQPVLDLKRPFLSRESLSGQAVRRPLVASVGLNVPASVCYSHTDIKVPDFSEYRRLEVLDSTKSSRESTEARKGFSYLVTGVTTVGVAYAAKEMPSHQFVSSMSASADVLALAKIEIKLSDIPEGKNMAFKWRGKPLFVRHRTQKEIKQEAAVELSQLRDPQHDLDRVKKPEWVILIGVCTHLGCVPIANAGDFGGYYCPCHGSHYDASGRIRLGPATLNLEVPTYEFTSDDMVIVG

SEQ ID NO: 921535 - protein, 150 aa, Homo sapiens
MKTLIEHTTMHGYRCTAGTINAETHSIPLRTGSETVCIQGENLLGLYSVFGSDVHEGALSIGSFGAMNIAHCFGAQSREVLHQVQAGIQDSIGHSVTKQPELPDSPVVCSGRPQQRSLNGECRINCSSSVKNSSREMQLYPTCTPASHVY

SEQ ID NO: 921536 - protein, 680 aa, Homo sapiens
MHQQDQEVAWAPPITPIHANLEDRSRGCCFNATTRREAEGLCHARVLREGVTSTLAVLQADSSLGVSSTWRTAAGGAARAAAHGQSSPWATPATTPSPEEPKAGEAQHGMKQRSEGHKEPPRAAVHMGETSPTRPRPPVLTDALCEVGVELVSEKGLGQLTEVQLQHACDGVHVHLAHHHRHVLVIWKEHGNAAASLKILINEEKNREGCDMPGPWSTLRSHRGHHCPHLHPVLRRPTLTDVEACLQCLDVRGHPRHAVDAHLLHASALDLLHTLAHDVGHLGPLSPAGGGNVLSVLTALLGHNTGDLLPMCTPGGGVRTVTKVPRSGAAHRAFCMPVLPLQALSSWHVLSQEPFKRPEPLRITHDLCGKKQLKGQAPSVREPKPLPTHLVTTAILTPKTPVCFRDGILFKLNFLLLNLTESFTSIYSGEKGHSPLILLVLIAQGPKDPWDGRQESPTDTYPIHGDDGALPVSVLQGLWVQLKGRSHDWQRPWVKGELSSSNFSNNSWGPGIHSCCLGNSSTIQAASLQELVLNVTRTQSVLVCNTLTVMTKPHVPHPGTLCFPLYGEHKLYVSGSWVLLVNVSQGSELCSQSGTEKQRAAGRLPPGAMWPQALIPHLALKVVRGHTPGLRDPTLRSSICEQGANSHHWAPLPLKTQNWQKQLTSNPESSAPSPPAYPVP

SEQ ID NO: 921537 - protein, 465 aa, Homo sapiens
MGIKNPKANPTVTLFPPSSEELQANKATLVCLISDFYPGAVTVAWKADGSPVKAGVETTKPSKQSNNKYAASSYLSLTPEQWKSHRSYSCQMPPGPLAPASSFTAAVGAGAGASQGGFLYEPVSQCVVFGGGTKLTVLGGHQDSDPLPLIHPAGQPKAAPSVTLFPPSSEELQANKATLVCLISDFYPGAVTVAWKADSSPVKAGVETTTPSKQSNNKYAASSYLSLTPEQWKSHRSYSCQMPGPCHGIPDPMQQASDSVSSRSLDFQGSCCGSQDVTGPLSLWVKCGGHVDSLMSRCHQDHWPQLPPSQLQWGLGLGASQGGFLYEPVSQCWVFGGGTKLTVLGGHQDSDPLPLIHPAGQPKAAPSVTLFPPSSEELQANKATLVCLISDFYPGAVTVAWKADSSPVKAGVETTTPSKQSNNKYAASSYLSLTPEQWKSHRSYSCQVTHEGSTVEKTVAPTECS

SEQ ID NO: 921538 - protein, 211 aa, Homo sapiens
MAAWGLDSLLEPETPTFPTPGPGSWDLQTVAVPGTFLPTTLIGCRHTPWVTALSPRPKGQPEPLSPEVPLSSGLLSTLAWGSPNSSSRVPEAQPPAPSLAETGPPRTCWLPGTPAGEREAGARQVMWAVGWAASLHGTLVTVSSSENEQSGTRALSVLFPLGRGFLGLGETDSCGRWRLHEEPCHTPTCTCTCTCQLIDRVRQESPKPFDL

SEQ ID NO: 921539 - protein, 1320 aa, Homo sapiens
MVVGSQGSLGAGQLWWRKSVYPGTGKRQGLHGLGWEAQGQHEGEGPQVWVSRGINELENGMRLGAVAHACNPSTLGGWGSWITGGQEFETSLANMVKPVSTKNTKISRAWWRVPVILATQETEAGELLEHGRWRLQGADVAPLHSSLGNRVRHWLKKKKKKCQAQWFTPVIPALREAEAGGIMRSRDKDHLGQHGETPSVLKIQKLAWRGGGRLYVPATRVAEAGELLRTQEAEVAVSRDSTTALQPGDRARLLSQKKKRGKEKIKESGVRGCTERRAWGEHTWSFSHSADFPVHFPPTGGEIRSAHDLNVAEAQPLGRRKKRKWGVCKQSSKEITAPFHWTGAAGSPPKQGHADLRASLFSGAPGLCCLSPIHTQSQSSGRWKRSHFNNYLSTWSLMASNSVIILCGGYTLFSTRSIAFQVDVSVYKWSGDSGSFGKLIADEGAVMCCSHCESCGSSALFPSFYLAVGCWHLSVLWDLMLLTLSEMPHEVTGGDPRLAHTPWTCPAMLDKLILGHSLPVLGKALPETLGGPLMCQALTLLIHSEGGGLFGYCRAPQTSWEPETGSCCHTSKALLSSSEEQCPESPLRILPAPLAASPFMCVLGGILGHLGGARRDCTTLPGFLDQGGDPLTLAFGNVFSSAHPHRPLRDAKKVSCGLFVGVDSKWGQIPPAELQRASLRRWASHGEQLVSPVLGGHRSAFCDTLLRGWPGLSHHLTAWSVVEGPEPRAACESSGAPALSSQYVLPRSGNVSLGLEPADPPFLAEPKQTHTQFQRGEGRPGAVGSVSWLWFGSGLRASCGRKESCGDNQGHLVMLGSRCWHSRMRGRPEKGPLRGHPRCSSQTQAAKASWAPLKARRSWSPGDLGVTSDFWEQKRFGERFISILRQTNLAMGFPGRTWETPGAGHQVCPSVHALLSPPSRVLPVVSKERRASSLVVLLHNSFHPIHEFSPPASGSCSRRTKESLCFRPRLLLPKSTVPAAPLPPPAYRGRELQKQSASSQILSIGPPVLSWSHMSTAPVSGHTLAMASPNPAGLGESPRAGVTMPPRTPLRTLHPETKGAPLLRPSLAWRCLSCHCACGCPLAPSSTWAANQCRSPVLLPVLFSGQGRECSSRDLRTSGMSMAGATENQSQLTQPSRRCLLQGVQRQLERQGPPAAGQGGRRGGSLEAANGQHQSQPARPPPARPPASSGCSQAFPSRCLAGRAWPCASCSTWSCRANPLTESPACYLTLEREVLPQAGSHNWGCQVRMVSSTPTASTHQHGGALEAQARSGNHPGLGPEAPREKEDDRQGQHLRQPSTRHPVLADAGMRSDIMPSPVRF

SEQ ID NO: 921540 - protein, 275 aa, Homo sapiens
LWSVQNSLGGSQTLCPCFSSRPTMLPVSLPQGHVTAAAPLDSHGACGPELIFLAGPSPGSSGGERQANEAKVMVQLASLGGTVAFQPDCSSLTSHCAQVEAGPRGEDNSKAGSCKSAFPQQHGMNTIDAHSNLNDSPENYANCEKAIRKSYTNVANSPSDYHHSAFENHCPEPEGWRISMAVGGREKPEGNEEEPGCLQRLRPPVLQGPGLRLRSADSTMRVPTAPPPGSAEAVGNTQGSQTVDICLPMQTSCSLEAGEGTLKKRSRHDSYPEGL

SEQ ID NO: 921541 - protein, 135 aa, Homo sapiens
MSKGCQIVTCACVKVHIPLLLRPWIEHVPTFSCDEMTGPSIENTTFPSAKGLFKFTEVVKCLLPSLHWFLGSSEPIFSKCPEPPVGLSCESPSWLPPIPLKCLNLLSGTSMAPLWNLMIDFDLPSPTDHPWITGH

SEQ ID NO: 921542 - protein, 120 aa, Homo sapiens
MPVLTQERVLSAQILVSADIAKSVSLLVTSSKPQTAVQKSHYTIWDKPNASIFKITMIQLKEDSGSYWCEIYNTSKNIITVLRDVSLVVFAGNQVPPSALAQLAPNSWSLCCVDSSWPRA

SEQ ID NO: 921543 - protein, 167 aa, Homo sapiens
MPVLTQERVLSAQILVSADIANSKPQTAVQKSHYTIWDKPNASIFKITMIQLKEDSGSYWCEIYNTSKNIITVLRDVSLVVFAAPTTSPTWTLTWLPTNTGHDSKFVREERGRGCRLLIVEEPWKRQFNMDFCNETKWNPENVETLDRVGVLKEDLASVLPHYQIHI

SEQ ID NO: 921544 - protein, 173 aa, Homo sapiens
MAQQAADKYLYVDKNFINNPLAQADWAAKKLVWVPSDKSGFEPASLKEEVGEEAIVELVENGKKVKVNKDDIQKMNPPKFSKVEDMAELTCLNEASVLHNLKERYYSGLIYTYSGLFCVVINPYKNLPIYSEEIVEMYKGKKRHEMPPHIYAITDTAYRSMMQGKTLRLSNVY

SEQ ID NO: 921545 - protein, 389 aa, Homo sapiens
MYSISPANSEEGQELYVCTVKDDVNLDTVLLLPFLKEIAVSQLDQLSPEEQLLVKCAAIIGHSFHIDLLQHLLPGWDKNKLLQVLRALVDIHVLCWSDKSQELPAEPILMPSSIDIIDGTKEKKTKLDGGSASLLRLQEELSLPQTEVLEFGVPLLRAAAWELWPKEQQIALHLECACFLQVLACRCGSCHGGDFVPFHHFAVCSTKNSKGTSRFCTYRDTGSVLTQVITEKLQLAFSPRTEEEFLDQVKRKLAQTSPEKDLLTTKPCHCKDILKLVLLPLTQHCLVVGETTCAFYYLLEAAAACLDLSDNYMVCFNMGRITLAKKLARKALRLLKRNFPWTWFGVLFQTFLDKKNLAVLQQQVHCLSLLWQLYNLEATASSYRFACLA

SEQ ID NO: 921546 - protein, 137 aa, Homo sapiens
KKPNTKGYLLYDSVYMKCPERANALKQKANQRMKGGQNGEWLLNECKPGHGPPKFWKAPPPLAPTGSAHHQRLSSKPPPSAYCMDSRSPLPPLPPRKAGLGPIRGCGTFWKAQGFSLGGAGPLIGGGLPEGWGDGRG

SEQ ID NO: 921547 - protein, 137 aa, Homo sapiens; identical to SEQ ID NO: 921546

SEQ ID NO: 921548 - protein, 121 aa, Homo sapiens
MQVIFMCSDIVGTVTAQDQATMKRREAVCAHRHFLGTGKPPHPLGRSIPVEPCPGLPAFAEVDLLSLLVPIKISSTPPSGSRLDPQIASSAFPGLGSLGGQDSSGSLVQRASCELESPYEL

SEQ ID NO: 921549 - protein, 614 aa, Homo sapiens
VEIAVVMSGKGQERNCRGREAVRRLRRSPEQMGAGGGASGLDVLPLLAAPRCPRAALAGGSKGTSVGLDAQQLWPVSSTAVCEGNSTCSENEVCVRPGECRCRHGYFGANCDTSERGVGPVLVGGAESWRDGAGSKVGRGRIRLRGGSPEVAAGVRDAGRFRLAGGTYSSTGAFHPLRSSPAECPRQFWGPDCKELCSCHPHGQCEDVTGQCTCHARRWGARCEHACQCQHGTCHPRSGACRCEPGWWGAQCASACYCSATSRCDPQTGACLCHAGWWGRSCNNQCACNSSPCEQQSGRCQCRERTFGARCDRYCQCFRGRCHPVDGTCACEPGYRGKYCREPCPAGFYGLGCRRRCGQCKGQQPCTVAEGRCLTCEPGWNGTKCDQPCATGFYGEGCSHRCPPCRDGHACNHVTGKCTRCNAGWIGDRCETKCSNGTYGEDCAFVCADCGSGHCDFQSGRCLCSPGVHGPHCNVTCPPGLHGADCAQACSCHEDTCDPVTGACHLETNQRKGVMGAGALLVLLVCLLLSLLGCCCACRGKDPTRRELSLGRKKAPHRLCGRFSRISMKLPRIPLRRQKLPKVVGKDDSAGYLGETPLDAGSCWEMGVRGSRSQ

SEQ ID NO: 921550 - protein, 166 aa, Homo sapiens
MRFPENALQMCLLFPELPAQLVSVVSLMLLLLQLSQCPFPTCHPRPVPQSNESSSGQTDKATQEEICKKIGSRNSVLTSPLSEIYKTVVSMFQLVGVQVSEEQLRDTGQFRICSPGHSCGFHETVNISGLPVTLSNILCKSISAITPSWNDKLLFLNSEQRLPTLQ

SEQ ID NO: 921551 - protein, 166 aa, Homo sapiens; identical to SEQ ID NO: 921550

SEQ ID NO: 921552 - protein, 186 aa, Homo sapiens
MRYVITCTVLTRSNNQQEKNWPSQQEKSVYLCRAADDGMSHLKHAQHSADKAPFTLSLPSEERSIRSPPASVQQAKQNATQGHPEKETKMSLLGIMSLHYQKEDPTYVISGPFNKYFLKEVFLSSSHLRITHLTQTEQRCHEHIKLAAPFASTWQMREKENLVWRPPSIKGKRVKSGRESSQVQQQ

SEQ ID NO: 921553 - protein, 170 aa, Homo sapiens
MNVRMFSLMVGIFSVLNTTQFFIFDLNQKTHICYEAKFSIYVDSKSELVTWTLFHRANISTGLSLTTIIIGCFLFYCIHKNIYMGLLIYAMWIITYELINFSIVLLLNGIIKDHFKTLSYLHWIFQISHMLLHFFCLPFIVKHAYNLYKESQTVGRKRRHRLCSTIAVNS

SEQ ID NO: 921554 - protein, 150 aa, Homo sapiens
MASMRARRSSSSFLLLMASRSCRASEKACKKVSKMPKNSSGCILLSCSPKCIKALANCQGTEQDWWRVPWSMLGSAPEVSWVLARAEPSARLGTVGTGGRAGRGEKTPPSSSGSETRLRRGSSEKLKLDTVMKSLMTGTNLSLGSRTWRL

SEQ ID NO: 921555 - protein, 150 aa, Homo sapiens; identical to SEQ ID NO: 921554

SEQ ID NO: 921556 - protein, 150 aa, Homo sapiens; identical to SEQ ID NO: 921554

SEQ ID NO: 921557 - protein, 150 aa, Homo sapiens; identical to SEQ ID NO: 921554

SEQ ID NO: 921558 - protein, 180 aa, Homo sapiens
MSKLRWLVAGSGVGWGCQLLTRQKERLVQRSCGSHRLGGFKEAQESQVAQESQVAGDPEGRQKEMRVIVPSSGLCSQLRKPQLCPTCSASEGRGSLEVGAQDPDSDISSATENSVTSGKSLLGSWAEDWNILWQAGGLSRDHQDPAHLVQTATASSFLQVTPTSHLTSQSLCFSPVKCVR

SEQ ID NO: 921559 - protein, 231 aa, Homo sapiens
MHTPACSVCALHMYQCACVCKSNCQCVMCMSVYVCVSAYVCKCVSVHVLHRKHDPVSAPGEASGSFYSWWKMKQEQIRKLRHRKVTQDYRGQHREQWNLHLTPGRRNLHDHTTPPQGTGRENNGSSRTKVTFPRVSCCLDLAAVSVLPRRGISMSSGQWQRGRGAPLQCAGWSTGSCQCEDLQQLVYPWSCHQLPEFGAAGATLVVLPCRGSSCLLVSESQLWGCNLKPKA

SEQ ID NO: 921560 - protein, 231 aa, Homo sapiens; identical to SEQ ID NO: 921559

SEQ ID NO: 921561 - protein, 429 aa, Homo sapiens
MGFLEEEGRWNLSFSGAGYLGAHHVGATECLRQRAPRLLQGARRIYGSSSGALNAVSIVCGKSVDFCCSHLLGMVGQLERLSLSILHPAYAPIEHVKQQLQDALPPDAHVLASQRLGISLTRWPDGRNFLVTDFATCDELIQALVCTLYFPFYCGLIPPEFRGERYIDGALSNNLPFADCPSTITVSPFHGTVDICPQSTSPNLHELNVFNFSFQISTENFFLGLICLIPPSLEVVADNCRQGYLDALRFLERRGLTKEPVLWTLVSKEPPAPADGNWDAGCDQRWKGGLSLNWKVPHVQVKDVPNFEQLSPELEAALKKACTRDPSRWARFWHSGPGQVLTYLLLPCTLPFEYIYFRSRRLVVWLPDVPADLWWMQGLLRNMALEVFSRTKAQLLGPISPPATRVLETSPLQPQIAPHREELGPTHQA

SEQ ID NO: 921562 - protein, 147 aa, Homo sapiens
MRLQGAIFVLLPHLGPILVWLFTRDHMSGWCEGPRMLSWCPFYKVLLLVQTAIYSVVGYASYLVWKDLGGGLGWPLALPLGLYAVQLTISWTVLVLFFTVHNPGLLTPGLYAQALLHLLLLYGLVNGNIERLDKYQKNPPSVHLHLL

SEQ ID NO: 921563 - protein, 354 aa, Homo sapiens
MELQKEISGPTSEKMFESFRGSSLRNEATPRYSQQEEARNERWQQSLSLERWPPCTSHPLGTPPLMPVTVASRSCVRAARALEGWGWGEFCRNLFAPPVGIRKRGLERPSGERAAQGHAGRTVLEITDRGTNSGETHPNQHHPGRPEAGFLCCFPRLRWAFLMVVGPLRLLASGDIPVDPVKLLGRSLRSPKPKHAREGSCFAKPRRLVSKTTVGTTVTGEAARASRMRIGCKFTDPSALCLPPPLKEQWPAPLLKALGIRKADRALQVNCKEEQRRILGGDHVTTRGTGLSHSKKSHEKTQASSLTWVRCSPVGQRAPVGALVLVCSGLRDSTLDENDPRMREQPRGTQADLS

SEQ ID NO: 921564 - protein, 518 aa, Homo sapiens
MCPQESSFQPSQFLLLVGVPVASVLLLAQCLRWHCPRRLLGACWTLNGQEEPVSQPTPQLENEVSRQHLPATLPEMVAFYQELHTPTQGQTMVRQLMHKLLVFSAREVDHRGGCLMLQDTGISLLIPPGAVAVGRQERVSLILVWDLSDAPSLSQAQGLVSPVVACGPHGASFLKPCTLTFKHCAEQPSHARTYSSNTTLLDAKVWRPLGRPGAHASRDECRIHLSHFSLYTCVLEAPVGREARKWLQLAVFCSPLVPGQSHLQLRIYFLNNTPCALQWALTNEQPHGGRLRGPCQLFDFNGARGDQCLKLTYISEGWENVDDSSCQLVPHLHIWHGKCPFRSFCFRRKAADENEDCSALTNEIIVTMHTFQDGLETKYMEILRFQASEEESWAAPPPVSQPPPCNRLPPELFEQLRMLLEPNSITGNDWRRLASHLGLCGMKIRFLSCQRSPAAAILELFEEQNGSLQELHYLMTVMERLDCASAIQNYLSGTHGGSPGPERGGARDNQGLELDEKL

SEQ ID NO: 921565 - protein, 518 aa, Homo sapiens; identical to SEQ ID NO: 921564

SEQ ID NO: 921566 - protein, 140 aa, Homo sapiens
MLRQGGALCGLNRGLQQTIAQRGLKPLMVPEKYNNNRNKHQTHKSSVQKAQSPRAPIVGALPSWTSTLIKNCLNPKGISLTAKLQALSLKLPLIGLRRHDLPGAHSFEIRGDPMTCSVCRSDESPPGRSIKDHSAYPFPL

SEQ ID NO: 921567 - protein, 185 aa, Homo sapiens
MEAAADGPAETQSPVEKDSPAKTQSPAQDTSIMSRNNADTGRVLALPEHKKKRKGNLPAESVKILRDWMYKHRFKAYPSEEEKQMLSEKTNLSLLRISNWFINARRRILPDMLQQRRNDPIIGHKTGKDAHATHLQSTEASVPAKSGPVVQTMYKACPCGPCQRARCQERSNQIRSRPLARSSPE

SEQ ID NO: 921568 - protein, 171 aa, Homo sapiens
PVVSQNRMHRTRGPDPEAVCPTEKHLHFLFLWTDKGYTGEEGGKVDTFGSGGWQQGPEGHVVGLGFQWEQCDRGRVGQRGCHRDRVGQQGNREDGFWIKLYYFRSSSSFTFSTDRGPIPIKRSPSSRNGGPPPTKSAPVTRSNSRMGGQDRRSDWIEADIPFHPVLLADSS

SEQ ID NO: 921569 - protein, 171 aa, Homo sapiens; identical to SEQ ID NO: 921568

SEQ ID NO: 921570 - protein, 167 aa, Homo sapiens
MSTCRFYEKRVSKMLKQKKHLKLWDECTHHKVVSQIASVEILCEGVSFSTISLKALKIFTCRFYKKRVSKLLSQRKVQLCRKALKMSTCRFYKKSVSKLHNHKKGSTLGDVCTHPDKFLRMFLSSSYIKAAERSKSQFADSTKKVFPNAQSKERFNYLRCTHTSQAL

SEQ ID NO: 921571 - protein, 167 aa, Homo sapiens; identical to SEQ ID NO: 921570

SEQ ID NO: 921572 - protein, 239 aa, Homo sapiens
MVQPQTSKAESPALAASPNAQMDDVIDTLTSLRLTNSALRREASTLRAEKANLTNMLESVMAELTLLRTRARIPGALQITPPISSITSNGTRPMTTPPTSLPEPFSGDPGRLAGFLMQMDRFMIFQASRFPGEAERVAFLVSRLTGEAEKWAIPHMQPDSPLRNNYQGFLAELRRTYKSPLRHARRAQIRKTSASNRAVRERQMLCRQLASAGTGPCPVHPASNGTSPAPALPARARNL

SEQ ID NO: 921573 - protein, 146 aa, Homo sapiens
VIICQSRKMMRLKPASLSEVPPEVVDVTANEIKDSDTPKGDLAHTLTRQSSTIGCLQAREEGSQQWLSTSLKSSKAGKLTVQPSVCGQRLESHWQTTVVSPRVQRPKISKTSDIEGQEEWKGYPAMEKESQEASLSHLPPALFLLP

SEQ ID NO: 921574 - protein, 139 aa, Homo sapiens
MGVWLCFFCVCVCVCLMKRSTPHQNKTKQKKKKRKKKTGICQCFIVLWPTKKETLSVLSSWPLEFTKNSVHCQAGSSGHETALLHRLGIYPGTYRMMLDVSWLSWGIHIATQPHYWIHFSGLPSPQMASETLFEPHLHL

SEQ ID NO: 921575 - protein, 275 aa, Homo sapiens
MVTFMLMQARVHNEAWCPEDSACTFQQPNERDPPQEECHADEMKQRLDYKEKDKHGCLLFILQELCSTSIEMGEQEFSYWWLKIFVVEVVEPDPEHRQEFNANAPPRKSPSLPSLRDFSVCNSHSHCDASKVSQSVLVPWAVTMTRQVQGGAVSSRIGLASNGCSYRAPTTFHQIVYSPVSDLIATHTLGPRIKSQHDGGVPPHYVKHLLGLEPNSVMKSQDDGGVNPDDRKYLLTYEQNLRNMDVSCGSLREDRQESTTKAPLWRSPSWPRSQD

SEQ ID NO: 921576 - protein, 275 aa, Homo sapiens; identical to SEQ ID NO: 921575

SEQ ID NO: 921577 - protein, 181 aa, Homo sapiens
SCPDSMPGVTGLPQAGAPDPQAKETANLSSSLLAGSPKCGWNQETGETNEGNRTIVFRWPPAQQINTQRLSNEQRKGLTFIHVTKGWEKQDLTKSLQTCRNSYKNSYTSRTKNDGMGREFQEDTDKNLFLLSLFLEPISSGPLPGLAGNVITAVAGLWSESAWSGKDLFFFLLVFLIFPAS

SEQ ID NO: 921578 - protein, 172 aa, Homo sapiens
SCPDSMPGVTGLPQAGAPDPQAKETANLSSSLLAGSPKCGWNQETGETNEGNRTIVFRWPPAQQINTQRLSNEQRKGLTFIHVTKGWEKQDLTKSLQTCRNSYKNSYTSRTKNDGMGREFQEDTDKNLFLLSLFLEPISSGPLPGLAEESSRTKLEAEGVNLNLWTDSSWKP

SEQ ID NO: 921579 - protein, 154 aa, Homo sapiens
VHVLFRDMNGAGNNYSQQANTGTEKQTLPILMHKWEWNNEDTMGPESMPKALGTLGPWKKGGSGVGGGGIWSHCPSGSHCCSPWMAWSLSLQQNQQAFRKQLPPEGARSLRTEHAEPANKLSEEQGVLTVPRIALPSPQDTPERGRGFRVPGDT

SEQ ID NO: 921580 - protein, 145 aa, Homo sapiens
CRSGYRTGQVMAQSQFPRGQGKVLSHDVPLWHPSQESCQNVGSHGQPTDRRSSGVSRIGGFLVSLTSRMKPRTLTWLRGLAGSGVKLQTFAVSVTAHKSKCGPKEFIAKNERTKLPQCGKGPEGVANAGSGSLLLFSYLTQPTSC

SEQ ID NO: 921581 - protein, 165 aa, Homo sapiens
MWCSWRSLPESGAFSSCGVCFPFKLQKSLKRPCVAAVAALRLVLPPLPSTALPASTHSCAPGKQPGASRGREPSQTGSAACRLDVLPPQHAMLARLEGGLQILGKSGPVIGKYMGTKPNPHSDPMGTAAGTRPLCNSGCTTSEGPSDPMCHWRYYMWAGSSGCFS

SEQ ID NO: 921582 - protein, 629 aa, Homo sapiens
MVFANRTLVVKSMTDKDAGDYLCVARNKVGDDCVVLKVDVMMKPAKIEHKEENDHKVFYRGDLKVDCVATGLPNPEISWSLLDGSLVNSFMQSDDSGGRTKHYVVFNNGTLYFSEVGMREEGDYTCFAENQVGKDEMRVRVKMVTPATIWNKTYLAVQVPYGDVVTVTCEAKGEPMPKVTWLSPANRVIPTSSEKYQIYQYGTLLIQKAQCSDSGNYTCLVRNSAGEDRKTVWIHVNLQPPKINGNPNPITTVWEIAAGGSRKLIDCKAEGIPTPRVLWAFPEGVVLPDPYYGNRITVHGNGSLDIRSLRKSDSVQLVCMARNEGGEARLIVQLTVLEPMEKPIFHDPISEKITAMAGHTISLNCSAAGTLTPSLVWVLPNGTDLQSGQQLQRFYHKADGMLHISGLSSVDAGAYRCVARNAAGHTERLVSLKVGLKPEANKQYHNLVSIINGETLKLPCTPPAAGQGHFSWTLPNGMHLEGPQTLGRVSLLDNGTLTVREASVFDRGTYVCRMETAYGPSVTSIPVIVIAYPPRITSEPTPVIYTRPGNTVKLNCMAMGIPKGDITWELPDKLHLKAGVQARLYGNRFLHPQGSLTIQQARRRDAGFYKCTAKNILSSDSKTTYIHVF

SEQ ID NO: 921583 - protein, 345 aa, Homo sapiens
MVFANRTLVVKSMTDKDAGDYLCVARNKVGDDCVVLKVDVMMKPAKIEHKEENDHKVFYRGDLKVDCVATGLPNPEISWSLLDGSLVNSFMQSDDSGGRTKHYVVFNNGTLYFSEVGMREEGDYTCFAENQVGKDEMRVRVKMVTPATIWNKTYLAVQVPYGDVVTVTCEAKGEPMPKVTWLSPANRVIPTSSEKYQIYQYGTLLIQKAQCSDSGNYTCLVRNSAGEDRKTVWIHVNLQPPKINGNPNPITTVWEIAAGGSRKLIDCKAEGIPTPRVLWAFPEGVVLPDPYYGNRITVHGNGSLDIRSLRKSDSVQLVCMARNEGGEARWADHEVRRSRPSWLTW

SEQ ID NO: 921584 - protein, 2702 aa, Homo sapiens
VLLTSKMKLQTLVMCPECLPSGRFMFLFTSLMKLQTLLVRGLAHFLNEAADLTDVSSVSSFWQVHGLAHFKNEAAGLTDVSRVSSFWEFRGLPHFKNEAADLTDMSSVSSFWQVHGLAHFKNEAADFYDVSRVSFFWQVHGVAHFKNEAADLTDVSRDSSFWQFPGLPHFKNEAADFTDVSRVSVFWQVHGLAQFKNEAADISDVSRVTSFWQVHGVAHFKNQAADLTDVSRVSSFWQVRGLAHFFNEAADLTDVSRVSSFWQVRGLAHFTNEAADLTDVSSVSSFWQVHGLPHFKNEAADLTGPEFVSSDVSRVSSFWQFRGLPHFKNEAADLTGECYSTLRCYVQSLFLQMCPECLPSGRFMVLLTSLMKLQTLLVHGLPHFKNEAADLSDVSSVSSFWQVHGLPHFKNEAADLTDVSRVSSFWQVRGVAHFFNEATDLTDVSRVSSFWQFRGLPHFKNEAADLTGECYSTLRCYVQSFFLQMCPECLPSGRFMVLLTSRMKLQTLLVMLQHLKMFPEFLPSGRFVVLLTSLMKLQTLLMCPEFLPSGSFVVFLTSRMKPQTLVLSVTAQCLPSGRFMVLLTSRMKLQTLLMCPEFLPSGSFVVFLTSRMKLQTLVLSVCPGFLSSGRFIVLLTSRMKLPTFVMCPEFLPSWRFVVLFTSLMKLQTLPMCPECLPSGSFMVLLTSLMKLQTLLMCPEVLPSGRFMVLLTSRMKLQTLVMIPEFLPSCRFVVLLTSLMKLQTLLMCPEFLLSGSFVVFLTSRMKLQTLLMCPGFLSSGRFMVLLTSRMNLPTFSDMSSVSSFWQVHGLAHFKNEAADFYDVSRVSFFWQVHGVAHFKNEAADLTDVSRDSSFWQFPGLPHFKNEAADLSDVSRVSSFWQVRGLAHIFNEAADLTDVSRVSSFLQFRGLPHFKNEAADLTGHGLASSKNEAADLTDVSRVSSFLQVRGLAHFLNEAADLTDVSRVFSFWQVRGLAHFLNEAADLTDVSRVSSFLQVRGLAHFLNEAADLNDVSRVSSFWHVHGVAHFKNEAADFSVECYSTYRCYVQCLFLQMCPEFLPSCRFVFLLTSLMKLQTLLVRVLAHFFNEAAELTDVSRVSSFWQFRGLPHFKNEAADLSDVSRVSSFWQVRGLAHFFNEAADLTDVSRVSVFWQVHGLPHFKNEAADLSDVSRVSSFWQVRGLAHIFNEAADLTDVSRVSSFWQFRGLPHFKNEAADLSVECYSTVSSFWQVHGLAHFKNEAADLTDVSRISSFRQFRGLPHFKNEAADLSVECVSRVSVFWQVHRLAHFKNEAADLCDVSRVSSFWQVPGLAHFFNEAADLTDVSRVSSFWQFRGLPHFKNEAADLSVECYSTRFMVFLTSRMKLQTLLVRGVAHFFNEAADLTDVSRVSSFWQFRGLPHFKNEAADLTDVSRVSVFWQVHGLAHFKNEAADFSDVSRVASFWQVRGLAHFLNEAADLTDVSSVSSFWQVHGVAHLKNEAADLPDVSRVSSFLQVRGLAHFLNEAADLNDVSSVSSFWQVHGLAHFKNEAADLTDVSRVSSFWQFRGLPHFKNEAADLSVECYSTVSFFWQVHGLAHFKNEAADLTDVSRVSVFWQVHGLAHFQNEAADFSDVSRVSSFWQVRGLAHFLNEAADLTDVSSVSSFWQVHGVAHFKNEAADLTDVSRVSSFLQVRGLAHFLNEAVDLNGECYSTSRCYVQSFFLQMCPECLPSGRFMVLLTSLTKLQTLLVRGLAHFLNEAADLNDVSRVSVFWQVHGLAHFKNEAAELSDVSRVSSFLQVRGLAHFLNEAADLTDVSSVSSFWQVHGLAHFKNEAAGLTDVSRVSSFWEFRGLPHFKNEAADLTDMSSVSSFWQVHGLAHFKNEAADFYDVSRDSSFWQFPGLPHFKNEAADFTDVSRVSSFWHVHGLAHFTNEAADLTDVSRVYSFLQVRGLAHFLNEAADLTDVSRVCVFWQVHGLAHFKNEAADLSEFVPSDVSRVSSFWQLHGLAHFTNEAADLTDVSRVYSFLQVLGLAHFLNEAADLTDVSRVSVFWQFHGLAHFKNEAADLSDVSRVSSFLQVRGLAHFLNEAADLTDVSSVSSFWQVDCLAHFKNEAADLTDVSRVSSFWQVRDLAHFFNEAADLTDVSRVSSFWQFLGLPHFKNEAADITEFVPSRVSRVSSFWQVRGLAHFFNEAADLTDVSRVSSFWQFRGLPHFKNEAADLTGECYSTYSCYVQSLFLRMCPECLPSGRFMVFLTSLMKLQTLLVRGLAHFLNEAADLTEFVPSDVSRVSSFWQVRGLAHFFNEAADLNDVSRVSSFWQFRGLPHFKNEAADITDVSRVSSFWQVHGVAHFKNEAADLTGISRVSSFWQVRGLPHFFNEAADLTDVSRVSSFWQFRGLPHFKNEAADLTDVSRVSVFWHVHGLAHFKNEAADLSDVSRVSSFLQVRGLAHFLNEAADLTDVSSLSSFWQVHGLAHFKNEAADLTDVSRVSSFWQVRGLAHFFNEAADLTDVSRVSSFWQFRGLPHFKNEAADITDASRVSSFWQVHGVAHFKNEAADLTGFSRVSSFWQVRGLAHFFNEAADLTDVSRVSSFWQFRGLPHFKNEAADLTDVSRVSSFWQVRGLAHFKNDAADLSGECFNTKRCYVQSLFLQKYPGFLPSGRFMVLLTLRMKLQTLLVHGLVHFKNEAADLSDVSRVSSFWQVHGLSHFKNEAADLTGLLILR

SEQ ID NO: 921585 - protein, 150 aa, Homo sapiens
MLLLVYKRAEYFREFSLILTHCLQEYTLVMATLENYLASFTKIIHMHTINPAISFLELSPAKMCTRVYQKICTKMFITALFIVVQLEVALIGKQLRSRQGKTEPSLTREAETVVAQLIEKVLEHGVNSTAWVARQLEEGSNWITGFVSGK

SEQ ID NO: 921586 - protein, 188 aa, Homo sapiens
MPKHEQNYSSHKPCGHLLWEISCAQCLSSSTPVLLAATLHLMGNTLELMGNEAHNNRKCCNIVCAAFSPLYIQHFESTQDQELSSFCLLGSTLDPIVFSTLLRGPHRVCLWQHPKAFTLAPVPAHLYAPSYILWHAADPTEWHSPLPVPVWPLQIQKPDLFLIPGSSYSFRLLAGNKALKLNLLLVPS

SEQ ID NO: 921587 - protein, 223 aa, Homo sapiens
VLTTRQLTQSVTQETASVIMRVPQVEETVKANAKQGRYSHSPAPASRECLVQMTTGIWQAETEFTESLDRAVSVFQADDEEDPSCSHRTGSGNVPALVTGWMEDRANVDVRLCIEIRSRIKVMERVHIRVIAKTLGGAAVHLQDSRYWVMVSMTDVASASRDHTGESNPGQRVTKVRVGECGTTLKDTWLLLRNPHGPALPGKKLKLLSSNTQLAFLIFYRKS

SEQ ID NO: 921588 - protein, 205 aa, Homo sapiens
MVPASASGELSKLSVVVEGKAGPDNSWQEREHKRGDELAAAVVGFTGIDCHLVGEESYIFADSISEMRHCPPSLSSALFCVLLCSWHQIHTLHHSENESPFQNPQGIPRSHSGHIDFSHTFMLASILVRAIERQYLLYPQSLHFQALPREGRCGMNARQISLEPAAKNECGMEKESTKGQCDNKKSNFILQLVQAIPKVDLRWYN

SEQ ID NO: 921589 - protein, 144 aa, Homo sapiens
HFAFPKTMKEKKNQRQKCGISNNELESMEAGEDGNIPGWEKFPERVSRKVWSGPVSGLETISEIHMASEAVVMGDVTPKRGQSHKEKDEKQTNRGGPSRAQTNASLSAFLNTVSYFSCSHFPHNFTGLRFLSPTRIYLDNSPIY

SEQ ID NO: 921590 - protein, 228 aa, Homo sapiens
AIVDSPFMVAKMCPELVPTSGLLVSLTSRMKLQTLTIPSFYGHALVLHHNCQKDWTDPPQMTELKGAKVLFVLQWIQTKALYPLYGLHSKDGLGIQMSFIDKEWISRVLSQQCWHRHYSGLRGSNNSESVTLLSLDALHLMPHDLRQIDVLADSLQIWKTADDWKFLQVKISQMNLQSKPAPPTQKDKRTDPLFSSRLSVYILQPPQRSEQIIILPLTKKNNAFLYIY

SEQ ID NO: 921591 - protein, 152 aa, Homo sapiens
MSPPIAEQIIRSLKLIMGLDGTTQATEPQPIHCSRSQKSELFRWLPIYPSHEVSSPCSLSPACPLPPCSMDPAPSKATPASFPITICPNPTLCSFYSSRCTSTLTCFLSKTACGPSTPRDFCMTCLLHSNKPQVLLLVQGPAFENHCCIMTL

SEQ ID NO: 921592 - protein, 140 aa, Homo sapiens
MRDCHIFLSICEEEQVIRDKNKQSNLKDQPSEYEGFTLFVIKIKPHTILDALFTYSSTLFATNRLSILCEASHFFPAGGNHFSEDAKQGQIPHSPRLLISGGLSSPGAGKQNHKPTVACWMFLNGFSIFKIQEEFHGHTF

SEQ ID NO: 921593 - protein, 159 aa, Homo sapiens
MPSSYPFVKGHDQVTPRFLEDDHLWLETHHPPLWEHQDQMPSKQAAATKGAVQQFLLPRQFGSAFHPIQPQFLLILSGFPMIPCDPENPCGKFPSGLRGKGGRVDWRDVMWEEPNPYCWFEDVGRGPEPRDAVVSRRWGWPSAYSQQANGDHSPTTTRN

SEQ ID NO: 921594 - protein, 164 aa, Homo sapiens
SSGDPVMGLSSRADICRKESEDLAMGPIPKTDAMLPARGLSSHKLSTAAAAEISSKDTEIMTKKQGTINIYQADLKNNHTDVLKVKNITAWVTEQDPISKKRGDERRGEERRGKERKREGRKEERKEKGRKGRKEKRKEKKILMDNLQQPPSPSAFACFTLHFY

SEQ ID NO: 921595 - protein, 681 aa, Homo sapiens
AGMGPKRRQLTFREKSRIIQEVEENPDLRKGEIARRFNIPPSTLSTILKNKRAILASERKYGVASTCRKTNKLSPYDKLEGLLIAWFQQIRAAGLPVKGIILKEKALRIAEELGMDDFTASNGWLDRFRRRHGVVSCSGVARARARNAAPRTPAAPASPAAVPSEGSGGSTTGWRAREEQPPSVAEGYASQDVFSATETSLWYDFLPDQAAGLCGGDGRPRQATQRLSVLLCANADGSEKLPPLVAGKSAKPRAGQAGLPCDYTANSKGGVTTQALAKYLKALDTRMAAESRRVLLLAGRLAAQSLDTSGLRHVQLAFFPPGTVHPLERGVVQQVKGHYRQAMLLKAMAALEGQDPSGLQLGLTEALHFVAAAWQAVEPSDIAACFREAGFGGGPNATITTSLKSEGEEEEEEEEEEEEEEGEGEEEEEEGEEEEEEGGEGEELGEEEEVEEEGDVDSDEEEEEDEESSSEGLEAEDWAQGVVEAGGSFGAYGAQEEAQCPTLHFLEGGEDSDSDSEEEDDEEEDDEDEDDDDDEEDGDEVPVPSFGEAMAYFAMVKRYLTSFPIDDRVQSHILHLEHDLVHVTRKNHARQEPAPPSLPLLTEALRPQQFQPREGLGLSMAGSSGPQTGFPTSPEAGTSLLCFLPIPGPPLPPSFSSPTLGMLMGEYPVHLLSLACPGYGP

SEQ ID NO: 921596 - protein, 601 aa, Homo sapiens
AGMGPKRRQLTFREKSRIIQEVEENPDLRKGEIARRFNIPPSTLSTILKNKRAILASERKYGVASTCRKTNKLSPYDKLEGLLIAWFQQIRAAGLPVKGIILKEKALRIAEELGMDDFTASNGWLDRFRRRHGVVSCSGVARARARNAAPRTPAAPASPAAVPSEGSGGSTTGWRAREEQPPSVAEGYASQDVFSATETSLWYDFLPDQAAGLCGGDGRPRQATQRLSVLLCANADGSEKLPPLVAGKSAKPRAGQAGLPCDYTANSKGGVTTQALAKYLKALDTRMAAESRRVLLLAGRLAAQSLDTSGLRHVQLAFFPPGTVHPLERGVVQQVKGHYRQAMLLKAMAALEGQDPSGLQLGLTEALHFVAAAWQAVEPSDIAACFREAGFGGGPNATITTSLKSEGEEEEEEEEEEEEEEGEGEEEEEEGEEEEEEGGEGEELGEEEEVEEEGDVDSDEEEEEDEESSSEGLEAEDWAQGVVEAGGSFGAYGAQEEAQCPTLHFLEGGEDSDSDSEEEDDEEEDDEDEDDDDDEEDGDEVPVPSFGEAMAYFAMVKRYLTSFPIDDRVQSHILHLEHDLVHVTRKNHARQAGVRGLGHQS

SEQ ID NO: 921597 - protein, 601 aa, Homo sapiens; identical to SEQ ID NO: 921596

SEQ ID NO: 921598 - protein, 148 aa, Homo sapiens
RLGRRLGLNRPREESSSEGLEAEDWAQGVVEAGGSFGAYGAQEEAQCPTLHFLEGGEDSDSDSEEEDDEEEDDEDEDDDDDEEDGDEVPVPSFGEAMAYFAMVKRYLTSFPIDDRVQSHILHLEHDLVHVTRKNHARQAGVRGLGHQS

SEQ ID NO: 921599 - protein, 134 aa, Homo sapiens
RLGRRLGLNRPRRGVVEAGGSFGAYGAQEEAQCPTLHFLEGGEDSDSDSEEEDDEEEDDEDEDDDDDEEDGDEVPVPSFGEAMAYFAMVKRYLTSFPIDDRVQSHILHLEHDLVHVTRKNHARQAGVRGLGHQS

SEQ ID NO: 921600 - protein, 601 aa, Homo sapiens; identical to SEQ ID NO: 921596

SEQ ID NO: 921601 - protein, 603 aa, Homo sapiens
AGMGPKRRQLTFREKSRIIQEVEENPDLRKGEIARRFNIPPSTLSTILKNKRAILASERKYGVASTCRKTNKLSPYDKLEGLLIAWFQQIRAAGLPVKGIILKEKALRIAEELGMDDFTASNGWLDRFRRRHGVVSCSGVARARARNAAPRTPAAPASPAAVPSEGSGGSTTGWRAREEQPPSVAEGYASQDVFSATETSLWYDFLPDQAAGLCGGDGRPRQATQRLSVLLCANADGSEKLPPLVAGKSAKPRAGQAGLPCDYTANSKGGVTTQALAKYLKALDTRMAAESRRVLLLAGRLAAQSLDTSGLRHVQLAFFPPGTVHPLERGVVQQVKGHYRQAMLLKAMAALEGQDPSGLQLGLTEALHFVAAAWQAVEPSDIAACFREAGFGGGPNATITTSLKSEGEEEEEEEEEEEEEEGEGEEEEEEGEEEEEEGGEGEELGEEEEVEEEGDVDSDEEEEEDEESSSEGLEAEDWAQGVVEAGGSFGAYGAQEEAQCPTLHFLEGGEDSDSDSEEEDDEEEDDEDEDDDDDEEDGDEVPVPSFGEAMAYFAMVKRYLTSFPIDDRVQSHILHLEHDLVHVTRKNHARQDWRFPRGPPPWK

SEQ ID NO: 921602 - protein, 239 aa, Homo sapiens
MVEAGVYRRGRWQAVEPSDIAACFREAGFGGGPNATITTSLKSEGEEEEEEEEEEEEEEGEGEEEEEEGEEEEEEGGEGEELGEEEEVEEEGDVDSDEEEEEDEESSSEGLEAEDWAQGVVEAGGSFGAYGAQEEAQCPTLHFLEGGEDSDSDSEEEDDEEEDDEDEDDDDDEEDGDEVPVPSFGEAMAYFAMVKRYLTSFPIDDRVQSHILHLEHDLVHVTRKNHARQAGVRGLGHQS

SEQ ID NO: 921603 - protein, 601 aa, Homo sapiens; identical to SEQ ID NO: 921596

SEQ ID NO: 921604 - protein, 130 aa, Homo sapiens
MEIGRVFGKGVVEAGGSFGAYGAQEEAQCPTLHFLEGGEDSDSDSEEEDDEEEDDEDEDDDDDEEDGDEVPVPSFGEAMAYFAMVKRYLTSFPIDDRVQSHILHLEHDLVHVTRKNHARQAGVRGLGHQS

SEQ ID NO: 921605 - protein, 601 aa, Homo sapiens; identical to SEQ ID NO: 921596

SEQ ID NO: 921606 - protein, 597 aa, Homo sapiens
AGMGPKRRQLTFREKSRIIQEVEENPDLRKGEIARRFNIPPSTLSTILKNKRAILASERKYGVASTCRKTNKLSPYDKLEGLLIAWFQQIRAAGLPVKGIILKEKALRIAEELGMDDFTASNGWLDRFRRRHGVVSCSGVARARARNAAPRTPAAPASPAAVPSEGSGGSTTGWRAREEQPPSVAEGYASQDVFSATETSLWYDFLPDQAAGLCGGDGRPRQATQRLSVLLCANADGSEKLPPLVAGKSAKPRAGQAGLPCDYTANSKGGVTTQALAKYLKALDTRMAAESRRVLLLAGRLAAQSLDTSGLRHVQLAFFPPGTVHPLERGVVQQVKGHYRQAMLLKAMAALEGQDPSGLQLGLTEALHFVAAAWQAVEPSDIAACFREAGFGGGPNATITTSLKSEGEEEEEEEEEEEEEEGEGEEEEEEGEEEEEEGGEGEELGEEEEVEEEGDVDSDEEEEEDEESSSEGLEAEDWAQGVVEAGGSFGAYGAQEEAQCPTLHFLEGGEDSDSDSEEEDDEEEDDEDEDDDDDEEDGDEVPVPSFGEAMAYFAMVKRYLTSFPIDDRVQSHILHLEHDLVHVIHGYVPASRHAGTV

SEQ ID NO: 921607 - protein, 178 aa, Homo sapiens
HFPCSSKRRWILSCGLCMVLNIIMAKPYEFNWQKEVPSFLQEGAVFDRYEESFFTFPDTFFLTVKHFLSLNLKKKTSKFKSLLILELFGSPFTSNSPTQTLLRSSLLHKPESQSMSLKHTKSKKSFILKKETAIIDKCSPTELSTMIEMVYICVAVMAATCGCSAFEMWLLGLRDLSF

SEQ ID NO: 921608 - protein, 363 aa, Homo sapiens
MLGCARRRKPWQRGGWKGEQRHCPRPHLLSCGKASKNMLQSSQLSPVTACFKEVTDEVSISTLPLASSNIQRRSLNHKHENAIPEGWSKSSNNLNVGSDTTSETSFSLSKEAPREHLDHQAAHQPFPRPRFRQETGHPSLQRDFPRSFLLDLPNFPDLSKADINGQNPNIQVTIEVVDGPDSEADKDQHPENKPSWSVPSPDWRAWWQRSLSLARANSGDQDYKYDSTSDDSNFLNPPRGWDHTAPGHRTFETKDQPEYDSTDGEGDWSLWSVCSVTCGNGNQKRTRSCGYACTATESRTCDRPNCPEKKKEKEEEEEKGKGMEEEKEEEEGEEEEEEEEAATKTICDPQNLKYVPSDPLKKA

SEQ ID NO: 921609 - protein, 179 aa, Homo sapiens
EDTAMPNWPRHQVWPCVSASKDPKPAWGCPIESVESPELLHRRPCPKAVAPSPLAALRPQPPPRAPASLWPLHSARGLCSNSHLHPHGGAAEETFLDQGQAQAQAQSCLSKRKGGATRWNGLAASVATPTWGPSPWSWRPRTASLGTLEGTPGTAWVGLSPARASVTLFPGQSRGSALN

SEQ ID NO: 921610 - protein, 179 aa, Homo sapiens; identical to SEQ ID NO: 921609

SEQ ID NO: 921611 - protein, 131 aa, Homo sapiens
CWEMVQNAFATLKILLRLILKQNAVVSATASGEGVLGHWNPPDLYRLQATDNFIRWADMNQGSGRDTLTLKDTTFPDAVFLVTKTVDFVLLILFFWLYSLTCSDKFCCHPESCTTERPTWQGTEGYLYCSL

SEQ ID NO: 921612 - protein, 220 aa, Homo sapiens
HLAIDWSGMINFILQRDNVDANDLKQFFETNYSQIYFIFYENFIALENSLKLKDMPKRSCTVLPLSEKIRCEGIRLFLLWLQALQTNCAEEQVLIFACLVPGFPAVMSSRGPCTLETLINPSPSVADVKIYPEEITPLLPAISGEKIAEDQTCFFLQILLKYMVIQAASLEWKNKENQDTGFKFLFTLFRKYYLPHLFPSFTKLTNIYKPVLGKYCWSRV

SEQ ID NO: 921613 - protein, 145 aa, Homo sapiens
MVSGHLGCALQQCDEGQLDADEPRPAFLTWLPGCCSQSSPSSQETWRVFSRESVQPKKKELKVLKSAVSQKHGPSGVSYSGAADAECGMRSSNTGGYRVAADSGKDLLHLAVQDVHCSTSDHAILFIFSVDDIEIERNQDNLEPL

SEQ ID NO: 921614 - protein, 144 aa, Homo sapiens
STIVEVGTRMKLEIIILSKLSQGQMRTGCPLLSLVFKIVLGIQARTIRQENDMKDIQIEKEEDTISNIKIRGFMYVNNELAKKEIKRVISFVIGKKYLGIYLTKEVKDLYKENCKAWVKEIEEDTYKWKGIPCTRIRRNLMLLK

SEQ ID NO: 921615 - protein, 164 aa, Homo sapiens
MAAATTEIELQVLQKENDYSRQKPADCKAKLQPFLNATIGNGGSVALGALRGAGDLTCEWFYPQSKGAGVFIHNFLPSLCFHKSDSALSLIDFAFQNEMTCLLSNIITDYDNNHSQQLVWSHNISPQMGFGGYVCDNENSNFPVQSKGSISLRNWSSLRAGTNG

SEQ ID NO: 921616 - protein, 164 aa, Homo sapiens; identical to SEQ ID NO: 921615

SEQ ID NO: 921617 - protein, 165 aa, Homo sapiens
MPTICWMLCGPWKTPAFNMVGVIPDTEITIKQQMAFVNIQLQCCKKEHERQDLETGLVWATWKAPGGSNIEQASHAGLACNYLQCGKKKNFHILTLKFSLRPVCQYINFNSDIGSTVSSSYVISGGLGGSACQGAGGFYCLPGGRDPPGLLKPQRQVFLEGENRT

SEQ ID NO: 921618 - protein, 225 aa, Homo sapiens [sequence omitted]

SEQ ID NO: 921619 - protein, 225 aa, Homo sapiens [sequence omitted]

SEQ ID NO: 921620 - protein, 166 aa, Homo sapiens
GGRREYDNMMPSFQIGSTEDTQTRIRFPGSRSQLSLPCSAPRAAGHLACQPKVLSWADFPLFTNRRRHSRMPCPVPDLGASPHPSLEKRAGARGGASPGGVAGWPARGAWRGGAARSRLTTCEPVRAPLGVCRPWGRSPSRRREHGRWEGALRPRPWEAGAGRCPD

SEQ ID NO: 921621 - protein, 178 aa, Homo sapiens
VVMSGVGHAGAQRAEPSSTAGTDTKPGPKEAWLPKWQATNHASPDPGWGSSVSEKNRKLGHTRFPPPGYLVSGNIYWTCWTHFLKNPLYPSGKPGKEQASNRYKSGGISQPLKLRFSAYPPLQLNHFEYSLMVQETVSLFPSLAFLCVRVPGVQWSLAGGNDSLDHGRPRSGQARKFL

SEQ ID NO: 921622 - protein, 97 aa, Homo sapiens
  misc_feature (6)..(6): Xaa can be any naturally occurring amino acid
  misc_feature (10)..(10): Xaa can be any naturally occurring amino acid
RHSNAXKLGXYPDPILYPGICRFMAKRPGPPGSREMESPACSGASLGEMTAWTMGARGLDKRGSFFKRITEELSDTTKTRPATSFEETTLLKSGYTE

SEQ ID NO: 921623 - protein, 139 aa, Homo sapiens
MDQRNEKLPTATLRAEIPSHIKLPDAKEHRSGAIASLELGRPPPPLGLLKQRAGRKVGEPEPREEQKARGGGGGTQEGGRGSGLVTAPPPRRLQSATAATEPRGASKASPGSRGLPWAFQTACAHFRGSPRGAVLWLHY

SEQ ID NO: 921624 - protein, 139 aa, Homo sapiens; identical to SEQ ID NO: 921623

SEQ ID NO: 921625 - protein, 138 aa, Homo sapiens
REDGKKEGSEEEKKQERKEEEKKRKREERKRKRATERERERKTDKGGRKGGTKRRRKERKKEPRKKGKKKGRKEKKEKRRKEGRKEARKKERKGGKERREGGREGRKEGSKEEGREGREEGGRTRHEQILLDLGQVGL

SEQ ID NO: 921626 - protein, 138 aa, Homo sapiens; identical to SEQ ID NO: 921625

SEQ ID NO: 921627 - protein, 138 aa, Homo sapiens
ALSQLWKLCCEWLRPEIHTKEQMLDLLLLELFLAILPEELLAWMHEYHPKNGEEAVVLLEVRKGPIHLGRTAWRGCPSWSFVGSLGIMYTVAPSDAQMSLLVLRFQPRPMCRKCFLFFLFFLFFFFLGGEKSFHLAPR

SEQ ID NO: 921628 - protein, 68 aa, Homo sapiens
ALSQLWKLCCEWLRPEIHTKEQMLDLLLLELFLAILPEELLAWMHEYHPKNGEEAVVLLEIMLSESIK

SEQ ID NO: 921629 - protein, 269 aa, Homo sapiens
MDPHQKVPSIYNGDTLQTPEYEKVSQYEDQLERHEGRHMEERRYKCNECGKKFAQSSGLVRHQRIHTGEKPYECDHYGKAFSVRSTLTVHERIHTGEKPYTCNECKKAFSVRAHLIIHQRIHNGEKPYECNECGKAFSVSSDLIKHQRIHTGEKPYECDECGKAFSVSSALIKHQRIHTGEKPYEYKECGKAFYVNSALINHQRIHSGEKPYECGECGKAFSQISTLIHHQRIHTGEKPYECEECGKAFHGSSNLTKHQKTHAKGKCHQ

SEQ ID NO: 921630 - protein, 269 aa, Homo sapiens; identical to SEQ ID NO: 921629

SEQ ID NO: 921631 - protein, 145 aa, Homo sapiens
RGRSTKVTASAAEETPALAMAEEKPKEGVKTENNDHINLKVAGQDGSVVQFKIKRHTPLSKLMKAYCERQGLSMRQIRFRFDGQPMKQTHLHSWKWRMKIQLMCSNSRREVSTEKGTCFFTPELCSLKTKITFSIRKLQFASTTS

SEQ ID NO: 921632 - protein, 402 aa, Homo sapiens
MYTSEEKCNQRTQKRKIYNVCPRKGKKIFIHMHEIIQIDGHIYQCLECKQNFCENLALIMCERTHTGEKPYKCDMCEKTFVQSSDLTSHQRIHNYEKPYKCSKCEKSFWHHLALSGHQRTHAGKKFYTCDICGKNFGQSSDLLVHQRSHTGEKPYLCSECDKCFSRSTNLIRHRRTHTGEKPFKCLECEKAFSGKSDLISHQRTHTGERPYKCNKCEKSYRHRSAFIVHKRVHTGEKPYKCGACEKCFGQKSDLIVHQRVHTGEKPYKCLECMRSFTRSANLIRHQATHTHTFKCLEYEKSFNCSSDLIVHQRIHMEEKPHQWSACESGFLLGMDFVAQQKMRTQTEELHYKYTVCDKSFHQSSALLQHQTVHIGEKPFVCNVSEKGLELSPPHASEASQMS

SEQ ID NO: 921633 - protein, 402 aa, Homo sapiens; identical to SEQ ID NO: 921632

SEQ ID NO: 921634 - protein, 174 aa, Homo sapiens
MADLVSIKLFLYCNVVVFLGAVDRKDSLGSYTPIPTMVGFFLLGKPPAVGNTALLFLSTQTKNGIGLSRSLSCWFCHWVKAKLELQHQSYAIKWSCWHLKYSNCGSFKKGQHLMGQVGLNKKMSGVGAATGKKKSECQPRRRLWGWSEQATHPVRVRRGCDTPHQIQTGPRPEL

SEQ ID NO: 921635 - protein, 1453 aa, Homo sapiens
KLGMEAVSRVFPALAGQAPEEQGEIIKVKVKEEDHTWDQESALRRNLSYTRELSRQRFRQFCYQETPGPREALSQLRELCRQWLNPEIHTKEQILELLVLEQFLTILPEELQSWVREHNPESGEEVVTLLEDLERELDEPRQQSLLEADALKGICGEFGCIDPEWKYSGLCAILGFTIHGHFPTRCSWKNTSLAMTNYNYLYCLPNAPTCPQVSQGTYGQEVSMEEMIPLDSAKESLGTQLQSMEDRMECESPEPHPLQDNDDLNLVVHYCYRTKRVHLPGTGKPNIHINRRKEGIYLQSVKQGELVPSKLRPSFPNGSFLWFSMMSQSMGGDNLSSLDTNEAEIEPENMREKFFRSLARLLENKSNNTKIFSKAKYCQLIKEVKEAKAKAKKESVDYRRLARFDVILVQGNEKLIEAVNGETDKIRYYLHSEDLFDILHNTHLSIGHGGRTRMEKELQAKYKNITKEVIMLYLTLCKPCQQKNSKLKKVLTSKSIKEVSSRCQVDLIDMQLNPDGEYRFILHYQDLCTKLTFLRSLKSKRPTEVAHALLDIFTIIGAPSVLQSDNGREFSSQVVSELSNIWPELKIVHGKSQTCQSQSSAEQTEDIRKRIFSWMQTNNSSHWTEFLWFIQMSQNQPYHRSMQQTPCESAFSSEAKLGLSHSQLTEELVASLHTENELDQADKELENTLRAQYEENIETGTDSSDIEENLSVTPKVAEKSPPESRLRFLSCVVCEKECTGVNSCISCDGNIHAICGVPSQHGTEGCGRQITCSLCYETSTMKRKHDEIQRSLPVKPSKMLKPSGTPFSPDKVGDWMAKQASLDFFVKKRHAFSEHSSSNKRNVNNRSYPEEGKTKRVHASFTRKYDPSYIEFGFVAVIDGEVLKPQCIICGDVLANEAMKPSKLKRHLYSKHKEISSQPKEFFERKSSELKSQPKQVFNVSHINISALRASYKVALPVAKSKTPYTIAETLVKDCIKEVCLEMLGESAAKKVAQVPLSNDTIARRIQELANDMEDQLIEQIKLAKYFSLQLDECRDIANMIILLVYVRFEHDDDIKEEFFFSASLPTNTTSSELYEAVKNYIVNKCGLEFKFCVGVCSDGAASMTGKHSEVVTQIKELAPECKTTHCFIHRESLAMKKISAELNSVLNDIVKIVNYIKSNSLNSRLFSLLCDNMEADHKQLLLHAEIRWLSRGKVLSRMFEIRNELLVFLQGKKPMWSQLFKDVNWTARLAYLSDIFSIFNDLNASMQGKNATYFSMADKVEGQKQKLEAWKNRISTDCYDMFHNLTTIINEVGNDLDIAHLRKVISEHLTNLLECFEFYFPSKEDPRIGNLWIQNPFLSSKDNLNLTVTLQDKLLKLATDEGLKISFENTASLPSFWIKAKNDYPELAEIALKLLLLFPSTYLCETGFSTLSVIKTKHRNSLNIHYPLRVALSSIQPRLDKLTSKKQAHLSH

SEQ ID NO: 921636 - protein, 1397 aa, Homo sapiens
KLGMEAVSRVFPALAGQAPEEQGEIIKVKVKEEDHTWDQESALRRNLSYTRELSRQRFRQFCYQETPGPREALSQLRELCRQWLNPEIHTKEQILELLVLEQFLTILPEELQSWVREHNPESGEEVVTLLEDLERELDEPRQQSLLEADALKGICGEFGCIDPEWKYSGLCAILGFTIHGHFPTRCSWKNTSLAMTNYNYLYCLPNAPTCPQVSQGTYGQEVSMEEMIPLDSAKESLGTQLQSMEDRMECESPEPHPLQDNGSFLWFSMMSQSMGGDNLSSLDTNEAEIEPENMREKFFRSLARLLENKSNNTKIFSKAKYCQLIKEVKEAKAKAKKESVDYRRLARFDVILVQGNEKLIEAVNGETDKIRYYLHSEDLFDILHNTHLSIGHGGRTRMEKELQAKYKNITKEVIMLYLTLCKPCQQKNSKLKKVLTSKSIKEVSSRCQVDLIDMQLNPDGEYRFILHYQDLCTKLTFLRSLKSKRPTEVAHALLDIFTIIGAPSVLQSDNGREFSSQVVSELSNIWPELKIVHGKSQTCQSQSSAEQTEDIRKRIFSWMQTNNSSHWTEFLWFIQMSQNQPYHRSMQQTPCESAFSSEAKLGLSHSQLTEELVASLHTENELDQADKELENTLRAQYEENIETGTDSSDIEENLSVTPKVAEKSPPESRLRFLSCVVCEKECTGVNSCISCDGNIHAICGVPSQHGTEGCGRQITCSLCYETSTMKRKHDEIQRSLPVKPSKMLKPSGTPFSPDKVGDWMAKQASLDFFVKKRHAFSEHSSSNKRNVNNRSYPEEGKTKRVHASFTRKYDPSYIEFGFVAVIDGEVLKPQCIICGDVLANEAMKPSKLKRHLYSKHKEISSQPKEFFERKSSELKSQPKQVFNVSHINISALRASYKVALPVAKSKTPYTIAETLVKDCIKEVCLEMLGESAAKKVAQVPLSNDTIARRIQELANDMEDQLIEQIKLAKYFSLQLDECRDIANMIILLVYVRFEHDDDIKEEFFFSASLPTNTTSSELYEAVKNYIVNKCGLEFKFCVGVCSDGAASMTGKHSEVVTQIKELAPECKTTHCFIHRESLAMKKISAELNSVLNDIVKIVNYIKSNSLNSRLFSLLCDNMEADHKQLLLHAEIRWLSRGKVLSRMFEIRNELLVFLQGKKPMWSQLFKDVNWTARLAYLSDIFSIFNDLNASMQGKNATYFSMADKVEGQKQKLEAWKNRISTDCYDMFHNLTTIINEVGNDLDIAHLRKVISEHLTNLLECFEFYFPSKEDPRIGNLWIQNPFLSSKDNLNLTVTLQDKLLKLATDEGLKISFENTASLPSFWIKAKNDYPELAEIALKLLLLFPSTYLCETGFSTLSVIKTKHRNSLNIHYPLRVALSSIQPRLDKLTSKKQAHLSH

SEQ ID NO: 921637 - protein, 208 aa, Homo sapiens
RLSQIPVSRMATCVLLECLMRDAKCLNFLTLPVRPLPQTHMIHHSVSDYKATLRCWALGFYPVEITLAWQQDGEDQTRDMELLETRPAGDGTFQKWAAVVVPSGEEQRYPCHVQHEGLPKPLTLRWEQSSQPTIPIVGIVAGLVLLGAVVTGAVVSAVMCRKKNSGSDHAQGSDVSLTACKVGAQATVRFMWSLLSWVIFAALLSLAV

SEQ ID NO: 921638 - protein, 160 aa, Homo sapiens
MEHVKQAEIDKHNCEFFASPPIRRPSGFHQLYLQFNPRLHTQFRGGKIAATFSVLDLQLQGTVSRMLRTECLVVSGEDSVREPPPFTLLPARRGPGPVLGEFFSPAGRLDAVDTRDPSPPGLLALEGFPDVAVGELGFHVAAGAFRKSIRAASFSLSPNP

SEQ ID NO: 921639 - protein, 423 aa, Homo sapiens
MAVMAPRTLLLLLSGALALTQTWAGPGEPRRDEGRAGLSHCSPPGSHSMRYFFTSVSRPGRGEPRFIAVGYVDDTQFVRFDSDAASQRMEPRAPWIEQEGPEYWDQETRNVKAQSQTDRVDLGTLRGYYNQSEAVSGSEIHPEAAGPRDPCPGRGPGAFTRFHFQFRPKIPPGWSGLGGARGTGLTAGSGPGSHTIQIMYGCDVGSDGRFLRGYRQDAYDGKDYIALNEDLRSWTAADMAAQITKRKWEAAHEAEQLRAYLDGTCVEWLRRYLENGKETLQRTDPPKTHMTHHPISDHEATLRCWALGFYPAEITLTWQRDGEDQTQDTELVETRPAGDGTFQKWAAVVVPSGEEQRYTCHVQHEGLPKPLTLRWELSSQPTIPIVGIIAGLVLLGAVITGAVVAAVMWRRKSSGGEGVKGGV

SEQ ID NO: 921640 - protein, 141 aa, Homo sapiens
MIPLQKDNQEEGVCPICQESLKEAVSTNCGHLFCRVCLTQHVEKASASGVFCCPLCRKPCSEEVLGTGYICPNHQKRVCRFCEESRLLLCVECLVSPEHMSHHELTIENALSHYKLNNGHLSLFLLLHPVLDPCLAFLCIF

SEQ ID NO: 921641 - protein, 153 aa, Homo sapiens
MVCVARAIACGEKGQAGFSRFHLFGQFLLRAGSRARGATAPKVHFIIQRTQMQGIWVAFSMSLRLAENLSKDLEQSLNSFRLGFNCAKRTNCAKAIKVCFALSGIHPQSWSLPGRARGYKAVQHVAELNTVGNCNTVVFVYPNIRKLLQGADP

SEQ ID NO: 921642 - protein, 153 aa, Homo sapiens; identical to SEQ ID NO: 921641

SEQ ID NO: 921643 - protein, 405 aa, Homo sapiens
MNLKPRHNLDTDDIYTLNVFQIGGFELNQSINTNQTVSEELEFSGSAMESLRGNTAQGPTNEEDYKNEGQLSRQTKCPAQKKSSFENTVVRKVSVTLKEIFTGEEGPESSEFSLSPNLDAQQKIPKGHGSPISRKNSKDNSDLIKHQRLFSQRKPCKCNECEKAFSYQSDLLVHSRIHGGEKPFECNKCGKSFSRSTHLIEHQRTHTGEKPYECNECGKAFSRSTHLSLHQRIHTGEKPYECSECGKAFSRSTNLSQHQRTHTQERPYKCNECGKAFGDRSTIIQHQRIHTGENPYECSKCGKAFSWISSLTEHQRTHTGENPYECSECGKVFSRSSSLTEHQRIHSGEKPHECRVCGKGFSRSSSLIIHQRTHTGEKPYKCNDCGKAFCQSSTLIRHQHLHTKE

SEQ ID NO: 921644 - protein, 125 aa, Homo sapiens
MISSSLSGRVPVILGNLMGVGAAVRRMGFSLILPTSPSPAHSGSAPSAGPARGVSGVLGRRRPVSEAYRAPGPRWVLLEVLEGGNTGSSRETGERVAGGLAAGRVRRHLHGWDAAWRGVMKPLSP

SEQ ID NO: 921645 - protein, 351 aa, Homo sapiens
KNHQVQKHQQPCHLQRGLLISNTDLTWEFLTNAEYLHPILHLQRSEDNIVRDAHSSLCQCFLRSLQLVLSGTSGNLERQPAGRRGNRCTDPASQHTQSAVAASKTAVPPNQAPDAVARACNPSSPGGWGRRIVGARGFGATALCGAGVRTGPGTNMVLPGEPGSTRLSKEGGTRPRPDTEQVKLPVLGDGGTAPASNACSSARDIRRDPGMMIHSVSGSRKKLSSLQDGAADIDKEAGNLHGGRLAAAPIEKVYLGETSLQFTGRASLYPFPRSRLCYDQGIVTPVTHTYTSRRSPGARKSGTTGKPQKKKNSSFTNFPNYSYGIATPSAVQILLVGAKQEVSEYESMTVH

SEQ ID NO: 921646 - protein, 170 aa, Homo sapiens
MQLRIRPRQEEGSPDWKRRGFDPRTGQVFSVAFITRMDSNPDIDLNVYLCVSPGLTLPRENGSVNLVRPRLLDSEGKVRRVKGTWSINSWNKRQRHGNLRGFQSGPGNDARGCKPFCPFLLPLKLTVSGRVFLEVGFRDRGDQRPELLCPKGIARFFDADRKGLAPEPTT

SEQ ID NO: 921647 - protein, 170 aa, Homo sapiens; identical to SEQ ID NO: 921646

SEQ ID NO: 921648 - protein, 170 aa, Homo sapiens; identical to SEQ ID NO: 921646

SEQ ID NO: 921649 - protein, 170 aa, Homo sapiens; identical to SEQ ID NO: 921646

SEQ ID NO: 921650 - protein, 276 aa, Homo sapiens
MPDPAKSAPAPKKGSKKAVTKAQKKDGKKRKRSRKESYSVYVYKVLKQVHPDTGISSKAMGIMNSFVNDIFERIAGEASRLAHYNKRSTITSREIQTAVRLLLPGELAKHAVSEGTKAVTKNQKLSLQLKMQSIWSNTSTSLELKSLKKEGRKNHHLPYCLLLLPQPRHYPGKDTKEETEDFPNSPPPINREEDKRYTTVMGPCLRQAALEGELLACPVMEDQQANWVHEPITFNTFKEIRKSIRENGPASPFTRGLIEVIADNYHIDSMGLVSAS

SEQ ID NO: 921651 - protein, 143 aa, Homo sapiens
MDGKDNLINKVKILNQPVRLVQFLEGQHQSSATKPRRSGKESVREPWGRVPGALGVAFGQAGQSDFEWGPAQIGHGLGGILGCGHSLAQWPDFRHLKQDPGGGGPGGMPGHCGLGGGKASKGCCQTSHGLGWVFIFDEKEPKR

SEQ ID NO: 921652 - protein, 162 aa, Homo sapiens
IPSESSDGLEFCPMKINKDSVAYTASLLFAQVVFPLWVVSPHLPSFSKCSPSGTRTNSHPIIQAITDNSKEASQKIKSRTTISSINLTNGYISKGNEIVQNINIWGKLYITQCSFHIMLTPFLYLSIYFKRHLLMQRRLNSEGSHSESCPQSVQFTPYPKER

SEQ ID NO: 921653 - protein, 744 aa, Homo sapiens
MAKREDSPGPEVQPMDKQFLVCSICLDRYQCPKVLPCLHTFCERCLQNYIPAQSLTLSCPVCRQTSILPEQGVSALQNNFFISSLMEAMQQAPDGAHDPEDPHPLSVVAGRPLSCPNHEGKTMEFYCEACETAMCGECRAGEHREHGTVLLRDVVEQHKAALQRQLEAVRGRLPQLSAAIALVGGISQQLQERKAEALAQISAAFEDLEQALQQRKQALVSDLETICGAKQKVLQSQLDTLRQGQEHIGSSCSFAEQALRLGSAPEVLLVRKHMRERLAALAAQAFPERPHENAQLELVLEVDGLRRSVLNLGALLTTSATAHETVATGEGLRQALVGQPASLTVTTKDKDGRLVRTGSAELRAEITGPDGTRLPVPVVDHKNGTYELVYTARTEGELLLSVLLYGQPVRGSPFRVRALRPGDLPPSPDDVKRRVKSPGGPGSHVRQKAVRRPSSMYSTGGKRKDNPIEDELVFRVGSRGREKGEFTNLQGVSAASSGRIVVADSNNQCIQVFSNEGQFKFRFGVRGRSPGQLQRPTGVAVDTNGDIIVADYDNRWVSIFSPEGKFKTKIGAGRLMGPKGVAVDRNGHIIVVDNKSCCVFTFQPNGKLVGRFGGRGATDRHFAGPHFVAVSNKNEVVVTDFHNHSEKVYSADGEFLFKFGSHGEGNGQFNAPTGVAVDSNGNIIVADWGNSRIQVFDSSGSFLSYINTSAEPLYGPQGLALTSDGHVVVADAGNHCFKAYRYLQ

SEQ ID NO: 921654 - protein, 744 aa, Homo sapiens; identical to SEQ ID NO: 921653

SEQ ID NO: 921655 - protein, 665 aa, Homo sapiens
MAKREDSPGPEVQPMDKQFLVCSICLDRYQCPKVLPCLHTFCERCLQNYIPAQSLTLSCPVCRQTSILPEQGVSALQNNFFISSLMEAMQQAPDGAHDPEDPHPLSVVAGRPLSCPNHEGKTMEFYCEACETAMCGECRAGEHREHGTVLLRDVVEQHKAALQRQLEAVRGRLPQLSAAIALVGGISQQLQERKAEALAQISAAFEDLEQALQQRKQALVSDVDGLRRSVLNLGALLTTSATAHETVATGEGLRQALVGQPASLTVTTKDKDGRLVRTGSAELRAEITGPDGTRLPVPVVDHKNGTYELVYTARTEGELLLSVLLYGQPVRGSPFRVRALRPGDLPPSPDDVKRRVKSPGGPGSHVRQKAVRRPSSMYSTGGKRKDNPIEDELVFRVGSRGREKGEFTNLQGVSAASSGRIVVADSNNQCIQVFSNEGQFKFRFGVRGRSPGQLQRPTGVAVDTNGDIIVADYDNRWVSIFSPEGKFKTKIGAGRLMGPKGVAVDRNGHIIVVDNKSCCVFTFQPNGKLVGRFGGRGATDRHFAGPHFVAVSNKNEVVVTDFHNHSEKVYSADGEFLFKFGSHGEGNGQFNAPTGVAVDSNGNIIVADWGNSRIQVFDSSGSFLSYINTSAEPLYGPQGLALTSDGHVVVADAGNHCFKAYRYLQ

SEQ ID NO: 921656 - protein, 733 aa, Homo sapiens
MAKREDSPGPEVQPMDKQFLVCSICLDRYQCPKVLPCLHTFCERCLQNYIPAQSLTLSCPVCRQTSILPEQGVSALQNNFFISSLMEAMQQAPDGAHDPEDPHPLSVVAGRPLSCPNHEGKTMEFYCEACETAMCGECRAGEHREQHKAALQRQLEAVRGRLPQLSAAIALVGGISQQLQERKAEALAQISAAFEDLEQALQQRKQALVSDLETICGAKQKVLQSQLDTLRQGQEHIGSSCSFAEQALRLGSAPEVLLVRKHMRERLAALAAQAFPERPHENAQLELVLEVDGLRRSVLNLGALLTTSATAHETVATGEGLRQALVGQPASLTVTTKDKDGRLVRTGSAELRAEITGPDGTRLPVPVVDHKNGTYELVYTARTEGELLLSVLLYGQPVRGSPFRVRALRPGDLPPSPDDVKRRVKSPGGPGSHVRQKAVRRPSSMYSTGGKRKDNPIEDELVFRVGSRGREKGEFTNLQGVSAASSGRIVVADSNNQCIQVFSNEGQFKFRFGVRGRSPGQLQRPTGVAVDTNGDIIVADYDNRWVSIFSPEGKFKTKIGAGRLMGPKGVAVDRNGHIIVVDNKSCCVFTFQPNGKLVGRFGGRGATDRHFAGPHFVAVSNKNEVVVTDFHNHSEKVYSADGEFLFKFGSHGEGNGQFNAPTGVAVDSNGNIIVADWGNSRIQVFDSSGSFLSYINTSAEPLYGPQGLALTSDGHVVVADAGNHCFKAYRYLQ

SEQ ID NO: 921657 - protein, 658 aa, Homo sapiens
MAKREDSPGPEVQPMDKQFLVCSICLDRYQCPKVLPCLHTFCERCLQNYIPAQSLTLSCPVCRQTSILPEQGVSALQNNFFISSLMEAMQQAPDGAHDPEDPHPLSVVAGRPLSCPNHEGKTMEFYCEACETAMCGECRAGEHREHGTVLLRDVVEQHKAALQRQLEAVRGRLPQLSAAIALVGGISQQLQERKAEALAQISAAFEDLEQALQQRKQALVSDLETICGAKQKVLQSQLDTLRQGQEHIGSSCSFAEQALRLGSAPEVLLVRKHMRERLAALAAQAFPERPHENAQLELVLEVDGLRRSVLNLGALLTTSATAHETVATGEGLRQALVGQPASLTVTTKDKDGRLVRTGSAELRAEITGPDGTRLPVPVVDHKNGSRGREKGEFTNLQGEFTNLQGVSAASSGRIVVADSNNQCIQVFSNEGQFKFRFGVRGRSPGQLQRPTGVAVDTNGDIIVADYDNRWVSIFSPEGKFKTKIGAGRLMGPKGVAVDRNGHIIVVDNKSCCVFTFQPNGKLVGRFGGRGATDRHFAGPHFVAVSNKNEVVVTDFHNHSEKVYSADGEFLFKFGSHGEGNGQFNAPTGVAVDSNGNIIVADWGNSRIQVFDSSGSFLSYINTSAEPLYGPQGLALTSDGHVVVADAGNHCFKAYRYLQ

SEQ ID NO: 921658 - protein, 740 aa, Homo sapiens
MAKREDSPGPEVQPMDKQFLVCSICLDRYQCPKVLPCLHTFCERCLQNYIPAQSLTLSCPVCRQTSILPEQGVSALQNNFFISSLMEAMQQAPDGAHDPEDPHPLSVVAGRPLSCPNHEGKTMEFYCEACETAMCGECRAGEHREQHKAALQRQLEAVRGRLPQLSAAIALVGGISQQLQERKAEALAQISAAFEDLEQALQQRKQALVSDLETICGAKQKVLQSQLDTLRQGQEHIGSSCSFAEQALRLGSAPEVLLVRKHMRERLAALAAQAFPERPHENAQLELVLEVDGLRRSVLNLGALLTTSATAHETVATGEGLRQALVGQPASLTVTTKDKDGRLVRTGSAELRAEITGPDGTRLPVPVVDHKNGTYELVYTARTEGELLLSVLLYGQPVRGSPFRVRALRPGDLPPSPDDVKRRVKSPGGPGSHVRQKAVRRPSSMYSTGGKRKDNPIEDELVFRVGSRGREKGEFTNLQGEFTNLQGVSAASSGRIVVADSNNQCIQVFSNEGQFKFRFGVRGRSPGQLQRPTGVAVDTNGDIIVADYDNRWVSIFSPEGKFKTKIGAGRLMGPKGVAVDRNGHIIVVDNKSCCVFTFQPNGKLVGRFGGRGATDRHFAGPHFVAVSNKNEVVVTDFHNHSEKVYSADGEFLFKFGSHGEGNGQFNAPTGVAVDSNGNIIVADWGNSRIQVFDSSGSFLSYINTSAEPLYGPQGLALTSDGHVVVADAGNHCFKAYRYLQ

SEQ ID NO: 921659 - protein, 250 aa, Homo sapiens
MDASSVTFSTRRNAFLVSSVVRPYQVPVMGVRGRSPGQLQRPTGVAVDTNGDIIVADYDNRWVSIFSPEGKFKTKIGAGRLMGPKGVAVDRNGHIIVVDNKSCCVFTFQPNGKLVGRFGGRGATDRHFAGPHFVAVSNKNEVVVTDFHNHSEKVYSADGEFLFKFGSHGEGNGQFNAPTGVAVDSNGNIIVADWGNSRIQVFDSSGSFLSYINTSAEPLYGPQGLALTSDGHVVVADAGNHCFKAYRYLQ

SEQ ID NO: 921660 - protein, 181 aa, Homo sapiens
AHETVATGEGLRQALVGQPASLTVTTKDKDGRLVRTGSAELRAEITGPDGTRLPVPVVDHKNGTYELVYTARTEGELLLSVLLYGQPVRGSPFRVRALRPGDLPPSPDDVKRRVKSPGGPGSHVRQKAVRRPSSMYSTGGKRKDNPIEDELVFRVGSRGRESQMGQAQVVGGEGREVQDDL

SEQ ID NO: 921661 - protein, 202 aa, Homo sapiens
LPEVAIGSKAVVASISHHHTAIRGQCQALRNIQWHREMGSKKDRKEPELSNYQDAACRPSQPNGKLVGRFGGRGATDRHFAGPHFVAVSNKNEVVVTDFHNHSEKVYSADGEFLFKFGSHGEGNGQFNAPTGVAVDSNGNIIVADWGNSRIQVFDSSGSFLSYINTSAEPLYGPQGLALTSDGHVVVADAGNHCFKAYRYLQ

SEQ ID NO: 921662 - protein, 505 aa, Homo sapiens
MAKREDSPGPEVQPMDKQFLVCSICLDRYQCPKVLPCLHTFCERCLQNYIPAQSLTLSCPVCRQTSILPEQGVSALQNNFFISSLMEAMQQAPDGAHDPEDPHPLSVVAGRPLSCPNHEGKTMEFYCEACETAMCGECRAGEHREHGTVLLRDVVEQHKAALQRQLEAVRGRLPQLSAAIALVGGISQQLQERKAEALAQISAAFEDLEQALQQRKQALVSDLETICGAKQKVLQSQLDTLRQGQEHIGSSCSFAEQALRLGSAPEVLLVRKHMRERLAALAAQAFPERPHENAQLELVLEVDGLRRSVLNLGALLTTSATAHETVATGEGLRQALVGQPASLTVTTKDKDGRLVRTGSAELRAEITGPDGTRLPVPVVDHKNGTYELVYTARTEGELLLSVLLYGQPVRGSPFRVRALRPGDLPPSPDDVKRRVKSPGGPGSHVRQKAVRRPSSMYSTGGKRKDNPIEDELVFRVGSRGREKGEFTNLQGVVPAASSGRKFISF

SEQ ID NO: 921663 - protein, 633 aa, Homo sapiens
MAKREDSPGPEVQPMDKQFLVCSICLDRYQCPKVLPCLHTFCERCLQNYIPAQSLTLSCPVCRQTSILPEQGVSALQNNFFISSLMEAMQQAPDGAHDPEDPHPLSVVAGRPLSCPNHEGKTMEFYCEACETAMCGECRAGEHREHGTVLLRDVVEQHKAALQRQLEAVRGRLPQLSAAIALVGGISQQLQERKAEALAQISAAFEDLEQALQQRKQALVSDLETICGAKQKVLQSQLDTLRQGQEHIGSSCSFAEQALRLGSAPEVLLVRKHMRERLAALAAQAFPERPHENAQLELVLEVDGLRRSVLNLGALLTTSATAHETVATGEGLRQALVGQPASLTVTTKDKDGRLVRTGSAELRAEITGPDGTRLPVPVVDHKNGTYELVYTARTEGELLLSVLLYGQPVRGSPFRVRALRPGDLPPSPDDVKRRVKSPGGPGSHVRQKAVRRPSSMYSTGGKRKDNPIEDELVFRVGSRGREKGEFTNLQGVSAASSGRIVVADSNNQCIQVFSNEGQFKFRFGVRGRSPGQLQRPTGVAVDTNGDIIVADYDNRWVSIFSPEGKFKTKIGAGRLMGPKGVAVDRNGHIIVVDNKSCCVFTFQPNGKLVGRFGGRGATDRHFAGIGGQLQDLC

SEQ ID NO: 921664 - protein, 772 aa, Homo sapiens
MSVRAAGGFFGLWLLTGWCEWREPSVGAMAKREDSPGPEVQPMDKQFLVCSICLDRYQCPKVLPCLHTFCERCLQNYIPAQSLTLSCPVCRQTSILPEQGVSALQNNFFISSLMEAMQQAPDGAHDPEDPHPLSVVAGRPLSCPNHEGKTMEFYCEACETAMCGECRAGEHREHGTVLLRDVVEQHKAALQRQLEAVRGRLPQLSAAIALVGGISQQLQERKAEALAQISAAFEDLEQALQQRKQALVSDLETICGAKQKVLQSQLDTLRQGQEHIGSSCSFAEQALRLGSAPEVLLVRKHMRERLAALAAQAFPERPHENAQLELVLEVDGLRRSVLNLGALLTTSATAHETVATGEGLRQALVGQPASLTVTTKDKDGRLVRTGSAELRAEITGPDGTRLPVPVVDHKNGTYELVYTARTEGELLLSVLLYGQPVRGSPFRVRALRPGDLPPSPDDVKRRVKSPGGPGSHVRQKAVRRPSSMYSTGGKRKDNPIEDELVFRVGSRGREKGEFTNLQGVSAASSGRIVVADSNNQCIQVFSNEGQFKFRFGVRGRSPGQLQRPTGVAVDTNGDIIVADYDNRWVSIFSPEGKFKTKIGAGRLMGPKGVAVDRNGHIIVVDNKSCCVFTFQPNGKLVGRFGGRGATDRHFAGPHFVAVSNKNEVVVTDFHNHSEKVYSADGEFLFKFGSHGEGNGQFNAPTGVAVDSNGNIIVADWGNSRIQVFDSSGSFLSYINTSAEPLYGPQGLALTSDGHVVVADAGNHCFKAYRYLQ

SEQ ID NO: 921665 - protein, 744 aa, Homo sapiens; identical to SEQ ID NO: 921653

SEQ ID NO: 921666 - protein, 858 aa, Homo sapiens
ALSSQSSTQEIGEELINGVIYSISLRKVQLHHGGNKGQRWLGYENESALNLYETCKVRTVKAGTLEKLVEHLVPAFQGSDLSYVTIFLCTYRAFTTTQQVLDLLFKRYGRCDALTASSRYGCILPYSDEDGGPQDQLKNAISSILGTWLDQYSEDFCQPPDFPCLKQLVAYVQLNMPGSDLERRAHLLLAQLEHSEPIEAEPEALSPVPALKPTPELELALTPARAPSPVPAPAPEPEPAPTPAPGSELEVAPAPAPELQQAPEPAVGLESAPAPALELEPAPEQDPAPSQTLELEPAPAPVPSLQPSWPSPVVAENGLSEEKPHLLVFPPDLVAEQFTLMDAELFKKVVPYHCLGSIWSQRDKKGKEHLAPTIRATVTQFNSVANCVITTCLGNRSTKAPDRARVVEHWIEVARECRILKNFSSLYAILSALQSNSIHRLKKTWEDVSRDSFRIFQKLSEIFSDENNYSLSRELLIKEGTSKFATLEMNPKRAQKRPKETGIIQGTVPYLGTFLTDLVMLDTAMKDYLYGRLINFEKRRKEFEVIAQIKLLQSACNNYSIAPDEQFGAWFRAVERLSETESYNLSCELEPPSESASNTLRTKKNTAIVKRWSDRQAPSTELSTSGSSHSKSCDQLRCGPYLSSGDIADALSVHSAGSSSSDVEEINISFVPESPDGQEKKFWESASQSSPETSGISSASSSTSSSSASTTPVAATRTHKRSVSGLCNSSSALPLYNQQVGDCCIIRVSLDVDNGNMYKSILVTSQDKAPAVIRKAMDKHNLEEEEPEDYELLQILSDDRKLKIPENANVFYAMNSTANYDFVLKKRTFTKGVKVKHGASSTLPRMKQKGLKIAKGIF

SEQ ID NO: 921667 - protein, 883 aa, Homo sapiens
ALSSQSSTQEIGEELINGVIYSISLRKVQLHHGGNKGQRWLGSSTQEIGEELINGVIYSISPRKLQLHHGGNKGQRWLGYENESALNLYETCKVRTVKAGTLEKLVEHLVPAFQGSDLSYVTIFLCTYRAFTTTQQVLDLLFKRYGCILPYSDEDGGPQDQLKNAISSILGTWLDQYSEDFCQPPDFPCLKQLVAYVQLNMPGSDLERRAHLLLAQLEHSEPIEAEPEALSPVPALKPTPELELALTPARAPSPVPAPAPEPEPAPTPAPGSELEVAPAPAPELQQAPEPAVGLESAPAPALELEPAPEQDPAPSQTLELEPAPAPVPSLQPSWPSPVVAENGLSEEKPHLLVFPPDLVAEQFTLMDAELFKKVVPYHCLGSIWSQRDKKGKEHLAPTIRATVTQFNSVANCVITTCLGNRSTKAPDRARVVEHWIEVARECRILKNFSSLYAILSALQSNSIHRLKKTWEDVSRDSFRIFQKLSEIFSDENNYSLSRELLIKEGTSKFATLEMNPKRAQKRPKETGIIQGTVPYLGTFLTDLVMLDTAMKDYLYGRLINFEKRRKEFEVIAQIKLLQSACNNYSIAPDEQFGAWFRAVERLSETESYNLSCELEPPSESASNTLRTKKNTAIVKRWSDRQAPSTELSTSGSSHSKSCDQLRCGPYLSSGDIADALSVHSAGSSSSDVEEINISFVPESPDGQEKKFWESASQSSPETSGISSASSSTSSSSASTTPVAATRTHKRSVSGLCNSSSALPLYNQQVGDCCIIRVSLDVDNGNMYKSILVTSQDKAPAVIRKAMDKHNLEEEEPEDYELLQILSDDRKLKIPENANVFYAMNSTANYDFVLKKRTFTKGVKVKHGASSTLPRMKQKGLKIAKGIF

SEQ ID NO: 921668 - protein, 810 aa, Homo sapiens
MPGRRTDPSWSLHSSEEGVLGDMQSCGRGFLGGGERCSPLTRGLLGSFSWTAKGAWAGAGGLQMDRGRLRSPAWLRGAQASDSAATHLSPGAISSILGTWLDQYSEDFCQPPDFPCLKQLVAYVQLNMPGSDLERRAHLLLAQLEHSEPIEAEPEALSPVPALKPTPELELALTPARAPSPVPAPAPEPEPAPTPAPGSELEVAPAPAPELQQAPEPAVGLESAPAPALELEPAPEQDPAPSQTLELEPAPAPVPSLQPSWPSPVVAENGLSEEKPHLLVFPPDLVAEQFTLMDAELFKKVVPYHCLGSIWSQRDKKGKEHLAPTIRATVTQFNSVANCVITTCLGNRSTKAPDRARVVEHWIEVARECRILKNFSSLYAILSALQSNSIHRLKKTWEDVSRDSFRIFQKLSEIFSDENNYSLSRELLIKEGTSKFATLEMNPKRAQKRPKETGIIQGTVPYLGTFLTDLVMLDTAMKDYLYGRLINFEKRRKEFEVIAQIKLLQSACNNYSIAPDEQFGAWFRAVERLSETESYNLSCELEPPSESASNTLRTKKNTAIVKRWSDRQAPSTELSTSGSSHSKSCDQLRCGPYLSSGDIADALSVHSAGSSSSDVEEINISFVPESPDGQEKKFWESASQSSPETSGISSASSSTSSSSASTTPVAATRTHKRSVSGLCNSSSALPLYNQQVGDCCIIRVSLDVDNGNMYKSILVTSQDKAPAVIRKAMDKHNLEEEEPEDYELLQILSDDRKLKIPENANVFYAMNSTANYDFVLKKRTFTKGVKVKHGASSTLPRMKQKGLKIAKGIF

SEQ ID NO: 921669 - protein, 786 aa, Homo sapiens
ALSSQSSTQEIGEELINGVIYSISLRKVQLHHGGNKGQRWLGYENESALNLYETCKVRTVKAGTLEKLVEHLVPAFQGSDLSYVTIFLCTYRAFTTTQQVLDLLFKRYGRCDALTASSRYGCILPYSDEDGGPQDQLKNAISSILGTWLDQYSEDFCQPPDFPCLKQLVAYVQLNMPGSDLERRAHLLLAQLEHSEPIEAEPEALSPVPALKPTPELELALTPARAPSPVPAPAPEPEPAPTPAPGSELEVAPAPAPELQQAPEPAVGLESAPAPALELEPAPEQDPAPSQTLELEPAPAPVPSLQPSWPSPVVAENGLSEEKPHLLVFPPDLVAEQFTLMDAECRILKNFSSLYAILSALQSNSIHRLKKTWEDVSRDSFRIFQKLSEIFSDENNYSLSRELLIKEGTSKFATLEMNPKRAQKRPKETGIIQGTVPYLGTFLTDLVMLDTAMKDYLYGRLINFEKRRKEFEVIAQIKLLQSACNNYSIAPDEQFGAWFRAVERLSETESYNLSCELEPPSESASNTLRTKKNTAIVKRWSDRQAPSTELSTSGSSHSKSCDQLRCGPYLSSGDIADALSVHSAGSSSSDVEEINISFVPESPDGQEKKFWESASQSSPETSGISSASSSTSSSSASTTPVAATRTHKRSVSGLCNSSSALPLYNQQVGDCCIIRVSLDVDNGNMYKSILVTSQDKAPAVIRKAMDKHNLEEEEPEDYELLQILSDDRKLKIPENANVFYAMNSTANYDFVLKKRTFTKGVKVKHGASSTLPRMKQKGLKIAKGIF

SEQ ID NO: 921670 - protein, 848 aa, Homo sapiens
ALSSQSSTQEIGEELINGVIYSISLRKVQLHHGGNKGQRWLGYENESALNLYETCKVRTVKAGTLEKLVEHLVPAFQGSDLSYVTIFLCTYRAFTTTQQVLDLLFKRYGRCDALTASSRYGCILPYSDEDGGPQDQLKNAISSILGTWLDQYSEDFCQPPDFPCLKQLVAYVQLNMPGSDLERRAHLLLAQLEHSEPIEAEPEALSPVPALKPTPELELALTPARAPSPVPAPAPEPEPAPTPAPGSELEVAPAPAPELQQAPEPAVGLESAPAPALELEPAPEQDPAPSQTLELEPAPAPVPSLQPSWPSPVVAENGLSEEKPHLLVFPPDLVAEQFTLMDAELFKKVVPYHCLGSIWSQRDKKGKEHLAPTIRATVTQFNSVANCVITTCLGNRSTKAPDRARVVEHWIEVARECRILKNFSSLYAILSALQSNSIHRLKKTWEDVSRDSFRIFQKLSEIFSDENNYSLSRELLIKEGTSKFATLEMNPKRAQKRPKETGIIQGTVPYLGTFLTDLVMLDTAMKDYLYGRLINFEKRRKEFEVIAQIKLLQSACNNYSIAPDEQFGEELQPLIMAVFFLVLRVLLADLRTKKNTAIVKRWSDRQAPSTELSTSGSSHSKSCDQLRCGPYLSSGDIADALSVHSAGSSSSDVEEINISFVPESPDGQEKKFWESASQSSPETSGISSASSSTSSSSASTTPVAATRTHKRSVSGLCNSSSALPLYNQQVGDCCIIRVSLDVDNGNMYKSILVTSQDKAPAVIRKAMDKHNLEEEEPEDYELLQILSDDRKLKIPENANVFYAMNSTANYDFVLKKRTFTKGVKVKHGASSTLPRMKQKGLKIAKGIF

SEQ ID NO: 921671 - protein, 203 aa, Homo sapiens
RRFPIWQLAWGAPTGQWDLLIFRLPQFWESASQSSPETSGISSASSSTSSSSASTTPVAATRTHKRSVSGLCNSSSALPLYNQQVGDCCIIRVSLDVDNGNMYKSILVTSQDKAPAVIRKAMDKHNLEEEEPEDYELLQILSDDRKLKIPENANVFYAMNSTANYDFVLKKRTFTKGVKVKHGASSTLPRMKQKGLKIAKGIF

SEQ ID NO: 921672 - protein, 858 aa, Homo sapiens; identical to SEQ ID NO: 921666

SEQ ID NO: 921673 - protein, 858 aa, Homo sapiens; identical to SEQ ID NO: 921666

SEQ ID NO: 921674 - protein, 582 aa, Homo sapiens
ALSSQSSTQEIGEELINGVIYSISLRKVQLHHGGNKGQRWLGYENESALNLYETCKVRTVKAGTLEKLVEHLVPAFQGSDLSYVTIFLCTYRAFTTTQQVLDLLFKRYGRCDALTASSRYGCILPYSDEDGGPQDQLKNAISSILGTWLDQYSEDFCQPPDFPCLKQLVAYVQLNMPGSDLERRAHLLLAQLEHSEPIEAEPEALSPVPALKPTPELELALTPARAPSPVPAPAPEPEPAPTPAPGSELEVAPAPAPELQQAPEPAVGLESAPAPALELEPAPEQDPAPSQTLELEPAPAPVPSLQPSWPSPVVAENGLSEEKPHLLVFPPDLVAEQFTLMDAELFKKVVPYHCLGSIWSQRDKKGKEHLAPTIRATVTQFNSVANCVITTCLGNRSTKAPDRARVVEHWIEVARECRILKNFSSLYAILSALQSNSIHRLKKTWEDVSRDSFRIFQKLSEIFSDENNYSLSRELLIKEGTSKFATLEMNPKRAQKRPKETGIIQGTVPYLGTFLTDLVMLDTAMKDYLYGRLINFEKRRKEFEVIAQIKLLQSACNNYSIAPDEQFGAWFRAVERLSETER

SEQ ID NO: 921675 - protein, 547 aa, Homo sapiens
ALSSQSSTQEIGEELINGVIYSISLRKVQLHHGGNKGQRWLGYENESALNLYETCKVRTVKAGTLEKLVEHLVPAFQGSDLSYVTIFLCTYRAFTTTQQVLDLLFKRYGRCDALTASSRYGCILPYSDEDGGPQDQLKNAISSILGTWLDQYSEDFCQPPDFPCLKQLVAYVQLNMPGSDLERRAHLLLAQLEHSEPIEAEPEALSPVPALKPTPELELALTPARAPSPVPAPAPEPEPAPTPAPGSELEVAPAPAPELQQAPEPAVGLESAPAPALELEPAPEQDPAPSQTLELEPAPAPVPSLQPSWPSPVVAENGLSEEKPHLLVFPPDLVAEQFTLMDAELFKKVVPYHCLGSIWSQRDKKGKEHLAPTIRATVTQFNSVANCVITTCLGNRSTKAPDRARVVEHWIEVARECRILKNFSSLYAILSALQSNSIHRLKKTWEDVSRDSFRIFQKLSEIFSDENNYSLSRELLIKEGTSKFATLEMNPKRAQKRPKETGIIQGTVPYLGTFLTDLVMLDTAMKDYLYVSVPGGAGVGPGRRDLP

SEQ ID NO: 921676 - protein, 123 aa, Homo sapiens
AGTTGRRVAWYTFCGFGERGFSGSRGCSVSLERHRKGWHVVELFSSCSSVTSASSKTNSRARASSNTSSSTQPSAGSSPGARASSNTSSRFRARSSSSTSSGAPAGSRASCGTRIGSSASSGT

SEQ ID NO: 921677 - protein, 582 aa, Homo sapiens
ALSSQSSTQEIGEELINGVIYSISLRKVQLHHGGNKGQRWLGYENESALNLYETCKVRTVKAGTLEKLVEHLVPAFQGSDLSYVTIFLCTYRAFTTTQQVLDLLFKRYGRCDALTASSRYGCILPYSDEDGGPQDQLKNAISSILGTWLDQYSEDFCQPPDFPCLKQLVAYVQLNMPGSDLERRAHLLLAQLEHSEPIEAEPEALSPVPALKPTPELELALTPARAPSPVPAPAPEPEPAPTPAPGSELEVAPAPAPELQQAPEPAVGLESAPAPALELEPAPEQDPAPSQTLELEPAPAPVPSLQPSWPSPVVAENGLSEEKPHLLVFPPDLVAEQFTLMDAELFKKVVPYHCLGSIWSQRDKKGKEHLAPTIRATVTQFNSVANCVITTCLGNRSTKAPDRARVVEHWIEVARECRILKNFSSLYAILSALQSNSIHRLKKTWEDVSRDSFRIFQKLSEIFSDENNYSLSRELLIKAVSHRTMQQAEFSSALSRGGGRLRKARPPAQDPTLEGTSKFATLEMNPKRAQKRPKETGIIQGTVPYLGTFLTDLVMLDTAMKDYLYVSVPGGAGVGPGRRDLP

SEQ ID NO: 921678 - protein, 836 aa, Homo sapiens
ALSSQSSTQEIGEELINGVIYSISLRKVQLHHGGNKGQRWLGYENESALNLYETCKVRTVKAGTLEKLVEHLVPAFQGSDLSYVTIFLCTYRAFTTTQQVLDLLFKRYGRCDALTASSRYGCILPYSDEDGGPQDQLKNAISSILGTWLDQYSEDFCQPPDFPCLKQLVAYVQLNMPGSDLERRAHLLLAQLEHSEPIEAEPEALSPVPALKPTPELELALTPARAPSPVPAPAPEPEPAPTPAPGSELEVAPAPAPELQQAPEPAVGLESAPAPALELEPAPEQDPAPSQTLELEPAPAPVPSLQPSWPSPVVAENGLSEEKPHLLVFPPDLVAEQFTLMDAELFKKVVPYHCLGSIWSQRDKKGKEHLAPTIRATVTQFNSVANCVITTCLGNRSTKAPDRARVVEHWIEVARECRILKNFSSLYAILSALQSNSIHRLKKTWEDVSRDSFRIFQKLSEIFSDENNYSLSRELLIKEGTSKFATLEMNPKRAQKRPKETGIIQGTVPYLGTFLTDLVMLDTAMKDYLYGRLINFEKRRKEFEVIAQIKLLQSACNNYSIAPDEQFGAWFRAVERLSETESYNLSCELEPPSESASNTLRTKKNTAIVKRWSDRQAPSTELSTSGSSHSKSCDQLRCGPYLSSGDIADALSVHSAGSSSSDVEEINISFVPESPDGQEKKFWESASQSSPETSGISSASSSTSSSSASTTPVAATRTHKRSVSGLCNSSSALPLYNQQVGDCCIIRVSLDVDNGNMYKSILVTSQDKAPAVIRKAMDKHNLEEEEPEDYELLQILSDDRSKSEDQRAMAEGAGPHHSPAPGWKPLAPENSPAECG

SEQ ID NO: 921679 - protein, 115 aa, Homo sapiens
MAWCPACPRAPPLYTSLTPSQVWVTATCAHGHPRAPTVTTAVLSCPQALACDLRRGPGPSHHSSLSQAAPKIPSSGPTESEGVSPTAYPSPPLGAERETLFMDQTLHPVSEDSPS

SEQ ID NO: 921680 - protein, 858 aa, Homo sapiens; identical to SEQ ID NO: 921666

SEQ ID NO: 921681 - protein, 336 aa, Homo sapiens
GHWVSTFQGRLINFEKRRKEFEVIAQIKLLQSACNNYSIAPDEQFGAWFRAVERLSETESYNLSCELEPPSESASNTLRTKKNTAIVKRWSDRQAPSTELSTSGSSHSKSCDQLRCGPYLSSGDIADALSVHSAGSSSSDVEEINISFVPESPDGQEKKFWESASQSSPETSGISSASSSTSSSSASTTPVAATRTHKRSVSGLCNSSSALPLYNQQVGDCCIIRVSLDVDNGNMYKSILVTSQDKAPAVIRKAMDKHNLEEEEPEDYELLQILSDDRKLKIPENANVFYAMNSTANYDFVLKKRTFTKGVKVKHGASSTLPRMKQKGLKIAKGIF

SEQ ID NO: 921682 - protein, 858 aa, Homo sapiens; identical to SEQ ID NO: 921666

SEQ ID NO: 921683 - protein, 895 aa, Homo sapiens
ALSSQSSTQEIGEELINGVIYSISLRKVQLHHGGNKGQRWLGSSTQEIGEELINGVIYSISPRKLQLHHGGNKGQRWLGYENESALNLYETCKVRTVKAGTLEKLVEHLVPAFQGSDLSYVTIFLCTYRAFTTTQQVLDLLFKRYGRCDALTASSRYGCILPYSDEDGGPQDQLKNAISSILGTWLDQYSEDFCQPPDFPCLKQLVAYVQLNMPGSDLERRAHLLLAQLEHSEPIEAEPEALSPVPALKPTPELELALTPARAPSPVPAPAPEPEPAPTPAPGSELEVAPAPAPELQQAPEPAVGLESAPAPALELEPAPEQDPAPSQTLELEPAPAPVPSLQPSWPSPVVAENGLSEEKPHLLVFPPDLVAEQFTLMDAELFKKVVPYHCLGSIWSQRDKKGKEHLAPTIRATVTQFNSVANCVITTCLGNRSTKAPDRARVVEHWIEVARECRILKNFSSLYAILSALQSNSIHRLKKTWEDVSRDSFRIFQKLSEIFSDENNYSLSRELLIKEGTSKFATLEMNPKRAQKRPKETGIIQGTVPYLGTFLTDLVMLDTAMKDYLYGRLINFEKRRKEFEVIAQIKLLQSACNNYSIAPDEQFGAWFRAVERLSETESYNLSCELEPPSESASNTLRTKKNTAIVKRWSDRQAPSTELSTSGSSHSKSCDQLRCGPYLSSGDIADALSVHSAGSSSSDVEEINISFVPESPDGQEKKFWESASQSSPETSGISSASSSTSSSSASTTPVAATRTHKRSVSGLCNSSSALPLYNQQVGDCCIIRVSLDVDNGNMYKSILVTSQDKAPAVIRKAMDKHNLEEEEPEDYELLQILSDDRKLKIPENANVFYAMNSTANYDFVLKKRTFTKGVKVKHGASSTLPRMKQKGLKIAKGIF

SEQ ID NO: 921684 - protein, 189 aa, Homo sapiens
MASKRALVILAKGAEEMETVIPVDVMRRAGIKVTVAGLAGKDPVQCSRDVVICPDASLEDAKKEGPYDVVVLPGGNLGAQNLSESAAVKEILKEQENRKGLIAAICAGPTALLAHEIGFGSKVTTHPLAKDKMMNGGHYTYSENRVEKDGLILTSRGPGTSFEFALAIVEALNGKEVAAQVKAPLVLKD

SEQ ID NO: 921685 - protein, 85 aa, Homo sapiens
ELGTPHAEGPYDVVVLPGGNLGAQNLSESAAVKEILKEQENRKGLIAAICAGPTALLAHEIGFGSKVTTHPLAKDKMMNGALLLL

SEQ ID NO: 921686 - protein, 189 aa, Homo sapiens; identical to SEQ ID NO: 921684

SEQ ID NO: 921687 - protein, 189 aa, Homo sapiens; identical to SEQ ID NO: 921684

SEQ ID NO: 921688 - protein, 189 aa, Homo sapiens; identical to SEQ ID NO: 921684

SEQ ID NO: 921689 - protein, 189 aa, Homo sapiens; identical to SEQ ID NO: 921684

SEQ ID NO: 921690 - protein, 189 aa, Homo sapiens; identical to SEQ ID NO: 921684

SEQ ID NO: 921691 - protein, 179 aa, Homo sapiens
EDPRYILPTGIPVDVMMRAGIKVTVAGLAGKDPVQCSRDVVICPDASLEDAKKEGPYDVVVLPGGNLGAQNLSESAAVKEILKEQENRKGLIAAICAGPTALLAHEIGFGSKVTTHPLAKDKMMNGGHYTYSENRVEKDGLILTSRGPGTSFEFALAIVEALNGKEVAAQVKAPLVLKD

SEQ ID NO: 921692 - protein, 189 aa, Homo sapiens; identical to SEQ ID NO: 921684

SEQ ID NO: 921693 - protein, 220 aa, Homo sapiens
MASKRALVILAKGAEEMETVIPVDVMRRAGIKVTVAGLAGKDPVQCSRDVVICPDASLEDAKKEGPYDVVVLPGGNLGAQNLSESAAVKEILKEQENRKGLIAAICAGPTALLAHEIGFGSKVTTHPLAKDKMMNGDSGSHYVAQAVLKLLGSNDPPTLVSQSAGITGHYTYSENRVEKDGLILTSRGPGTSFEFALAIVEALNGKEVAAQVKAPLVLKD

SEQ ID NO: 921694 - protein, 100 aa, Homo sapiens
LIRLRQEGPEGLIAAICAGPTALLAHEIGFGSKVTTHPLAKDKMMNGGHYTYSENRVEKDGLILTSRGPGTSFEFALAIVEALNGKEVAAQVKAPLVLKD

SEQ ID NO: 921695 - protein, 171 aa, Homo sapiens
MASKRALVILAKGAEEMETVIPVDVMRRAGIKVTVAGLAGKDPVQCSRDVVICPDASLEDAKKEGPYDVVVLPGGNLGAQNLSESAAVKEILKEQENRKGLIAAICAGPTALLAHEIGFGSKVTTHPLAKDKMMNGGHYTYSENRVELAIVEALNGKEVAAQVKAPLVLKD

SEQ ID NO: 921696 - protein, 171 aa, Homo sapiens; identical to SEQ ID NO: 921695

SEQ ID NO: 921697 - protein, 169 aa, Homo sapiens
MASKRALVILAKGAEEMETVIPVDVMRRAGIKVTVAGLAGKDPVQCSRDVVICPDASLEDAKKESAAVKEILKEQENRKGLIAAICAGPTALLAHEIGFGSKVTTHPLAKDKMMNGGHYTYSENRVEKDGLILTSRGPGTSFEFALAIVEALNGKEVAAQVKAPLVLKD

SEQ ID NO: 921698 - protein, 168 aa, Homo sapiens
MASKRALVILAKGAEEMETVIPVDVMRRAGIKVTVAGLAGKDPVQCSRDVVICPDASLEDAKKEGPYDVVVLPGGNLGAQNLSESAAVKEILKEQENRKGLIAAICAGPTALLAHEIGFGSKVTTHPLFFIFKAGIRTNDHITATLYWVFSSQACNGDLNPSSPHDGQ

SEQ ID NO: 921699 - protein, 118 aa, Homo sapiens
MASKRALVILAKGAEEMETVIPVDVMRRAGIKVTVAGLAGKDPVQCSRDVVICPDASLEDAKKEGPYDVVVLPGGNLGAQNLSESAAVKEILKEQENRKGLIAAICAAYCSVAHRNRF

SEQ ID NO: 921700 - protein, 110 aa, Homo sapiens
MASKRALVILAKGAEEMETVIPVDVMRRAGIKVTVAGLAGKDPVQCSRDVVICPDASLEDAKKEGPYDVVVLPGGNLGAQNLSESAAVKEILKEQENRKGLIAAICAGLH

SEQ ID NO: 921701 - protein, 158 aa, Homo sapiens
MASKRALVILAKGAEEMETVIPVDVMRRAGIKVTVAGLAGKDPVQCSRDVVICPDASLEDAKKERKEIILPLLLCSVDILACHYIQGPYDVVVLPGGNLGAQNLSESAAVKEILKEQENRKGLIAAICAEVTCRGSLCCSVIGGWGSLSFDGLIPNSS

SEQ ID NO: 921702 - protein, 100 aa, Homo sapiens
MASKRALVILAKGAEEMETVIPVDVMRRAGIKVTVAGLAGKDPVQCSRDVVICPDASLEDAKKEDQLIPLLMKKLLTTHPSIIYDNMSPYPLQFPAFPLK

SEQ ID NO: 921703 - protein, 72 aa, Homo sapiens
RPPTTTKFAAASTDKMMNGGHYTYSENRVEKDGLILTSRGPGTSFEFALAIVEALNGKEVAAQVKAPLVLKD

SEQ ID NO: 921704 - protein, 109 aa, Homo sapiens
MASKRALVILAKGAEEMETVIPVDVMRRAGIKVTVAGLAGKDPVQCSRDVVICPDASLEDAKKEGPYDVVVLPGGNLGAQNLSESAAVKEILKEQENRKGLIAAICAGK

SEQ ID NO: 921705 - protein, 169 aa, Homo sapiens; identical to SEQ ID NO: 921697

SEQ ID NO: 921706 - protein, 105 aa, Homo sapiens
  misc_feature (1)..(1): Xaa can be any naturally occurring amino acid
  misc_feature (13)..(13): Xaa can be any naturally occurring amino acid
XILELDARKTPEXALTRPATLVHGPTALLAHEIGFGSKVTTHPLAKDKMMNGGHYTYSENRVEKDGLILTSRGPGTSFEFALAIVEALNGKEVAAQVKAPLVLKD

SEQ ID NO: 921707 - protein, 171 aa, Homo sapiens; identical to SEQ ID NO: 921695

SEQ ID NO: 921708 - protein, 155 aa, Homo sapiens
MASKRALVILAKGAEEMETVIPVDVMRRAGGPYDVVVLPGGNLGAQNLSESAAVKEILKEQENRKGLIAAICAGPTALLAHEIGFGSKVTTHPLAKDKMMNGGHYTYSENRVEKDGLILTSRGPGTSFEFALAIVEALNGKEVAAQVKAPLVLKD

SEQ ID NO: 921709 - protein, 189 aa, Homo sapiens
GRLLLLNSRPRRQTKEKETVIPVDVMRRAGIKVTVAGLAGKDPVQCSRDVVICPDASLEDAKKEGPYDVVVLPGGNLGAQNLSESAAVKEILKEQENRKGLIAAICAGPTALLAHEIGFGSKVTTHPLAKDKMMNGGHYTYSENRVEKDGLILTSRGPGTSFEFALAIVEALNGKEVAAQVKAPLVLKD

SEQ ID NO: 921710 - protein, 189 aa, Homo sapiens; identical to SEQ ID NO: 921684

SEQ ID NO: 921711 - protein, 189 aa, Homo sapiens; identical to SEQ ID NO: 921684

SEQ ID NO: 921712 - protein, 189 aa, Homo sapiens; identical to SEQ ID NO: 921684

SEQ ID NO: 921713 - protein, 189 aa, Homo sapiens; identical to SEQ ID NO: 921684

SEQ ID NO: 921714 - protein, 189 aa, Homo sapiens; identical to SEQ ID NO: 921684

SEQ ID NO: 921715 - protein, 3719 aa, Homo sapiens
ASNLGSAVDELMRHQPTLKTDATTAIIKLLEEICNLGRDPKYICQKPSIQKADGTATAPPPRSNHAAEEASSEDEEEEEVQAMQSFNSTQQNETEPNQQVVGTEERIPIPLMDYILNVMKFVESILSNNTTDDHCQEFVNQKGLLPLVTILGLPNLPIDFPTSAACQAVAGVCKSILTLSHEPKVLQEGLLQLDSILSSLEPLHRPIESPGGSVLLRELACAGNVADATLSAQATPLLHALTAAHAYIMMFVHTCRVGQSEIRSISVNQWGSQLGLSVLSKLSQLYCSLVWESTVLLSLCTPNSLPSGCEFGQADMQKLVPKDEKAGTTQGGKRSDGEQDGAAGSMDASTQGLLEGIGLDGDTLAPMETDEPTASDSKGKSKITPAMAARIKQIKPLLSASSRLGRALAELFGLLVKLCVGSPVRQRRSHHAASTTTAPTPAARSTASALTKLLTKGLSWQPPPYTPTPRFRLTFFICSVGFTSPMLFDERKYPYHLMLQKFLCSGGHNALFETFNWALSMGGKVPVSEGLEHSDLPDGTGEFLDAWLMLVEKMVNPTTVLESPHSLPAKLPGGVQNFPQFSALRFLVVTQKAAFTCIKNLWNRKPLKVYGGRMAESMLAILCHILRGEPVIRERLSKEKEGSRGEEDTGQEEGGSRREPQVNQQQLQQLMDMGFTREHAMEALLNTSTMEQATEYLLTHPPPIMGGVVRDLSMSEEDQMMRAIAMSLGQDIPMDQRAESPEEVACRKEEEERKAREKQEEEEAKCLEKFQDADPLEQDELHTFTDTMLPGCFHLLDELPDTVYRVCDLIMTAIKRNGADYRDMILKQVVNQVWEAADVLIKAALPLTTSDTKTVSEWISQMATLPQASNLATRILLLTLLFEELKLPCAWVVESSGILNVLIKLLEVVQPCLQAAKEQKEVQTPKWITPVLLLIDFYEKTAISSKRRAQMTKYLQSNSNNWRWFDDRSGRWCSYSASNNSTIDSAWKSGETSVRFTAGRRRYTVQFTTMVQVNEETGNRRPVMLTLLRVPRLNKNSKNSNGQELEKTLEESKEMDIKRKENKGNDTPLALESTNTEKETSLEETKIGEILIQGLTEDMVTVLIRACVSMLGVPVDPDTLHATLRLCLRLTRDHKYAMMFAELKSTRMILNLTQSSGFNGFTPLVTLLLRHIIEDPCTLRHTMEKVVRSAATSGAGSTTSGVVSGSLGSREINYILRVLGPAACRNPDIFTEVANCCIRIALPAPRGSGTASDDEFENLRIKGPNAVQLVKTTPLKPSPLPVIPDTIKEVIYDMLNALAAYHAPEEADKSDPKPGVMTQEVGQLLQDMGDDVYQQYRSLTRQSSDFDTQSGFSINSQVFAADGASTETSASGTSQGEASTPEESRDGKKDKEGDRASEEGKQKGKGSKPLMPTSTILRLLAELVRSYVGIATLIANYSYTVGQSELIKEDCSVLAFVLDHLLPHTQNAEDKDTPALARLFLASLAAAGSGTDAQVALVNEVKAALGRALAMAESTEKHARLQAVMCIISTIMESCPSTSSFYSSATAKTQHNGMNNIIRLFLKKGLVNDLARVPHSLDLSSPNMANTVNAALKPLETLSRIVNQPSSLFGSKSASSKNKSEQDAQGASQDSSSNQQDPGEPGEAEVQEEDHDVTQTEVADGDIMDGEAETDSVVIAGQPEVLSSQEMQVENELEDLIDELLERDGGSGNSTIIVSRSGEDESQEDVLMDEAPSNLSQASTLQANREDSMNILDPEDEEEHTQEEDSSGSNEDEDDSQDEEEEEEEDEEDDQEDDEGEEGDEDDDDDGSEMELDEDYPDMNASPLVRFERFDREDDLIIEFDNMFSSATDIPPSPGNIPTTHPLMVRHADHSSLTLGSGSSTTRLTQGIGRSQRTLRQLTANTGHTIHVHYPGNRQPNPPLILQRLLGPSAAADILQLSSSLPLQSRGRARLLVGNDDVHIIARSDDELLDDFFHDQSTATSQAGTLSSIPTALTRWTEECKVLDAESMHDCVSVVKVSIVNHLEFLRDEELEERREKRRKQLAEEETKITDKGKEDKENRDQSAQCTASKSNDSTEQNLSDGTPMPDSYPTTPSSTDAATSESKETLGTLQSSQQQPTLPTPPALGEVPQELQSPAGEGGSSTQLLMPVEPEELGPTRPSGEAETTQMELSPAPTITSLSPERAEDSDALTAVSSQLEGSPMDTSSLASCTLEEAVGDTSAAGSSEQPRAGSSTPGDAPPAVAEVQGRSDGSGESAQPPEDSSPPASSESSSTRDSAVAISGADSRGILEEPLPSTSSEEEDPLAGISLPEGVDPSFLAALPDDIRREVLQNQLGIRPPTRTAPSTNSSAPAVVGNPGVTEVSPEFLAALPPAIQEEVLAQQRAEQQRRELAQNASSDTPMDPVTFIQTLPSDLRRSVLEDMEDSVLAVMPPDIAAEAQALRREQEARQRQLMHERLFGHSSTSALSAILRSPAFTSRLSGNRGVQYTRLAVQRGGTFQMGGSSSHNRPSGSNVDTLLRLRGRLLLDHEALSCLLVLLFVDEPKLNTSRLHRVLRNLCYHAQTRHWVIRSLLSILQRSSESELCIETPKLTTSEEKGKKSSKSCGSSSHENRPLDLLHKMESKSSNQLSWLSVSMDAALGCRTNIFQIQRSGGRKHTEKHASGGSTVHIHPQAAPVVCRHVLDTLIQLAKVFPSHFTQQRTKETNCESDRERGNKACSPCSSQSSSSGICTDFWDLLVKLDNMNVSRKGKNSVKSVPVSAGGEGETSPYSLEASPLGQLMNMLSHPVIRRSSLLTEKLLRLLSLISIALPENKVSEAQANSGSGASSTTTATSTTSTTTTTAASTTPTPPTAPTPVTSAPALVAATAISTIVVAASTTVTTPTTATTTVSISPTTKGSKSPAKVSDGGSSSTDFKMVSSGLTENQLQLSVEVLTSHSCSEEGLEDAANVLLQLSRGDSGTRDTVLKLLLNGARHLGYTLCKQIGTLLAELREYNLEQQRRAQCETLSPDGLPEEQPQTTKLKGKMQSRFDMAENVVIVASQKRPLGGRELQLPSMSMLTSKTSTQKFFLRVLQVIIQLRDDTRRANKKAKQTGRLGSSGLGSASSIQAAVRQLEAEADAIIQMVREGQRARRQQQAATSESSQSEASVRREESPMDVDQPSPSAQDTQSIASDGTPQGEKEKEERPPELPLLSEQLSLDELWDMLGECLKELEESHDQHAVLVLQPAVEAFFLVHATERESKPPVRDTRESQLAHIKDEPPPLSPAPLTPATPSSLDPFFSREPSSMHISSSLPPDTQKFLRFAETHRTVLNQILRQSTTHLADGPFAVLVDYIRVLDFDVKRKYFRQELERLDEGLRKEDMAVHVRRDHVFEDSYRELHRKSPEEMKNRLYIVFEGEEGQDAGGLLREWYMIISREMFNPMYALFRTSPGDRVTYTINPSSHCNPNHLSYFKFVGRIVAKAVYDNRLLECYFTRSFYKHILGKSVRYTDMESEDYHFYQGLVYLLENDVSTLGYDLTFSTEVQEFGVCEVRDLKPNGANILVTEENKKEYVHLVCQMRMTGAIRKQLAAFLEGFYEIIPKRLISIFTEQELELLISGLPTIDIDDLKSNTEYHKYQSNSIQIQWFWRALRSFDQADRAKFLQFVTGTSKVPLQGFAALEGMNGIQKFQIHRDDRSTDRLPSAHTCFNQLDLPAYESFEKLRHMLLLAIQECSEGFGLA

SEQ ID NO: 921716 - protein, 3471 aa, Homo sapiens
MMFVHTCRVGQSEIRSISVNQWGSQLGLSVLSKLSQLYCSLVWESTVLLSLCTPNSLPSGCEFGQADMQKLVPKDEKAGTTQGGKRSDGEQDGAAGSMDASTQGLLEGIGLDGDTLAPMETDEPTASDSKGKSKITPAMAARIKQIKPLLSASSRLGRALAELFGLLVKLCVGSPVRQRRSHHAASTTTAPTPAARSTASALTKLLTKGLSWQPPPYTPTPRFRLTFFICSVGFTSPMLFDERKYPYHLMLQKFLCSGGHNALFETFNWALSMGGKVPVSEGLEHSDLPDGTGEFLDAWLMLVEKMVNPTTVLESPHSLPAKLPGGVQNFPQFSALRFLVVTQKAAFTCIKNLWNRKPLKVYGGRMAESMLAILCHILRGEPVIRERLSKEKEGSRGEEDTGQEEGGSRREPQVNQQQLQQLMDMGFTREHAMEALLNTSTMEQATEYLLTHPPPIMGGVVRDLSMSEEDQMMRAIAMSLGQDIPMDQRAESPEEVACRKEEEERKAREKQEEEEAKCLEKFQDADPLEQDELHTFTDTMLPGCFHLLDELPDTVYRVCDLIMTAIKRNGADYRDMILKQVVNQVWEAADVLIKAALPLTTSDTKTVSEWISQMATLPQASNLATRILLLTLLFEELKLPCAWVVESSGILNVLIKLLEVVQPCLQAAKEQKEVQTPKWITPVLLLIDFYEKTAISSKRRAQMTKYLQSNSNNWRWFDDRSGRWCSYSASNNSTIDSAWKSGETSVRFTAGRRRYTVQFTTMVQVNEETGNRRPVMLTLLRVPRLNKNSKNSNGQELEKTLEESKEMDIKRKENKGNDTPLALESTNTEKETSLEETKIGEILIQGLTEDMVTVLIRACVSMLGVPVDPDTLHATLRLCLRLTRDHKYAMMFAELKSTRMILNLTQSSGFNGFTPLVTLLLRHIIEDPCTLRHTMEKVVRSAATSGAGSTTSGVVSGSLGSREINYILRVLGPAACRNPDIFTEVANCCIRIALPAPRGSGTASDDEFENLRIKGPNAVQLVKTTPLKPSPLPVIPDTIKEVIYDMLNALAAYHAPEEADKSDPKPGVMTQEVGQLLQDMGDDVYQQYRSLTRQSSDFDTQSGFSINSQVFAADGASTETSASGTSQGEASTPEESRDGKKDKEGDRASEEGKQKGKGSKPLMPTSTILRLLAELVRSYVGIATLIANYSYTVGQSELIKEDCSVLAFVLDHLLPHTQNAEDKDTPALARLFLASLAAAGSGTDAQVALVNEVKAALGRALAMAESTEKHARLQAVMCIISTIMESCPSTSSFYSSATAKTQHNGMNNIIRLFLKKGLVNDLARVPHSLDLSSPNMANTVNAALKPLETLSRIVNQPSSLFGSKSASSKNKSEQDAQGASQDSSSNQQDPGEPGEAEVQEEDHDVTQTEVADGDIMDGEAETDSVVIAGQPEVLSSQEMQVENELEDLIDELLERDGGSGNSTIIVSRSGEDESQEDVLMDEAPSNLSQASTLQANREDSMNILDPEDEEEHTQEEDSSGSNEDEDDSQDEEEEEEEDEEDDQEDDEGEEGDEDDDDDGSEMELDEDYPDMNASPLVRFERFDREDDLIIEFDNMFSSATDIPPSPGNIPTTHPLMVRHADHSSLTLGSGSSTTRLTQGIGRSQRTLRQLTANTGHTIHVHYPGNRQPNPPLILQRLLGPSAAADILQLSSSLPLQSRGRARLLVGNDDVHIIARSDDELLDDFFHDQSTATSQAGTLSSIPTALTRWTEECKVLDAESMHDCVSVVKVSIVNHLEFLRDEELEERREKRRKQLAEEETKITDKGKEDKENRDQSAQCTASKSNDSTEQNLSDGTPMPDSYPTTPSSTDAATSESKETLGTLQSSQQQPTLPTPPALGEVPQELQSPAGEGGSSTQLLMPVEPEELGPTRPSGEAETTQMELSPAPTITSLSPERAEDSDALTAVSSQLEGSPMDTSSLASCTLEEAVGDTSAAGSSEQPRAGSSTPGDAPPAVAEVQGRSDGSGESAQPPEDSSPPASSESSSTRDSAVAISGADSRGILEEPLPSTSSEEEDPLAGISLPEGVDPSFLAALPDDIRREVLQNQLGIRPPTRTAPSTNSSAPAVVGNPGVTEVSPEFLAALPPAIQEEVLAQQRAEQQRRELAQNASSDTPMDPVTFIQTLPSDLRRSVLEDMEDSVLAVMPPDIAAEAQALRREQEARQRQLMHERLFGHSSTSALSAILRSPAFTSRLSGNRGVQYTRLAVQRGGTFQMGGSSSHNRPSGSNVDTLLRLRGRLLLDHEALSCLLVLLFVDEPKLNTSRLHRVLRNLCYHAQTRHWVIRSLLSILQRSSESELCIETPKLTTSEEKGKKSSKSCGSSSHENRPLDLLHKMESKSSNQLSWLSVSMDAALGCRTNIFQIQRSGGRKHTEKHASGGSTVHIHPQAAPVVCRHVLDTLIQLAKVFPSHFTQQRTKETNCESDRERGNKACSPCSSQSSSSGICTDFWDLLVKLDNMNVSRKGKNSVKSVPVSAGGEGETSPYSLEASPLGQLMNMLSHPVIRRSSLLTEKLLRLLSLISIALPENKVSEAQANSGSGASSTTTATSTTSTTTTTAASTTPTPPTAPTPVTSAPALVAATAISTIVVAASTTVTTPTTATTTVSISPTTKGSKSPAKVSDGGSSSTDFKMVSSGLTENQLQLSVEVLTSHSCSEEGLEDAANVLLQLSRGDSGTRDTVLKLLLNGARHLGYTLCKQIGTLLAELREYNLEQQRRAQCETLSPDGLPEEQPQTTKLKGKMQSRFDMAENVVIVASQKRPLGGRELQLPSMSMLTSKTSTQKFFLRVLQVIIQLRDDTRRANKKAKQTGRLGSSGLGSASSIQAAVRQLEAEADAIIQMVREGQRARRQQQAATSESSQSEASVRREESPMDVDQPSPSAQDTQSIASDGTPQGEKEKEERPPELPLLSEQLSLDELWDMLGECLKELEESHDQHAVLVLQPAVEAFFLVHATERESKPPVRDTRESQLAHIKDEPPPLSPAPLTPATPSSLDPFFSREPSSMHISSSLPPDTQKFLRFAETHRTVLNQILRQSTTHLADGPFAVLVDYIRVLDFDVKRKYFRQELERLDEGLRKEDMAVHVRRDHVFEDSYRELHRKSPEEMKNRLYIVFEGEEGQDAGGLLREWYMIISREMFNPMYALFRTSPGDRVTYTINPSSHCNPNHLSYFKFVGRIVAKAVYDNRLLECYFTRSFYKHILGKSVRYTDMESEDYHFYQGLVYLLENDVSTLGYDLTFSTEVQEFGVCEVRDLKPNGANILVTEENKKEYVHLVCQMRMTGAIRKQLAAFLEGFYEIIPKRLISIFTEQELELLISGLPTIDIDDLKSNTEYHKYQSNSIQIQWFWRALRSFDQADRAKFLQFVTGTSKVPLQGFAALEGMNGIQKFQIHRDDRSTDRLPSAHTCFNQLDLPAYESFEKLRHMLLLAIQECSEGFGLA

SEQ ID NO: 921717 - protein, 2015 aa, Homo sapiens
RGHGVCTIIVSRSGEDESQEDVLMDEAPSNLSQASTLQANREDSMNILDPEDEEEHTQEEDSSGSNEDEDDSQDEEEEEEEDEEDDQEDDEGEEGDEDDDDDGSEMELDEDYPDMNASPLVRFERFDREDDLIIEFDNMFSSATDIPPSPGNIPTTHPLMVRHADHSSLTLGSGSSTTRLTQGIGRSQRTLRQLTANTGHTIHVHYPGNRQPNPPLILQRLLGPSAAADILQLSSSLPLQSRGRARLLVGNDDVHIIARSDDELLDDFFHDQSTATSQAGTLSSIPTALTRWTEECKVLDAESMHDCVSVVKVSIVNHLEFLRDEELEERREKRRKQLAEEETKITDKGKEDKENRDQSAQCTASKSNDSTEQNLSDGTPMPDSYPTTPSSTDAATSESKETLGTLQSSQQQPTLPTPPALGEVPQELQSPAGEGGSSTQLLMPVEPEELGPTRPSGEAETTQMELSPAPTITSLSPERAEDSDALTAVSSQLEGSPMDTSSLASCTLEEAVGDTSAAGSSEQPRAGSSTPGDAPPAVAEVQGRSDGSGESAQPPEDSSPPASSESSSTRDSAVAISGADSRGILEEPLPSTSSEEEDPLAGISLPEGVDPSFLAALPDDIRREVLQNQLGIRPPTRTAPSTNSSAPAVVGNPGVTEVSPEFLAALPPAIQEEVLAQQRAEQQRRELAQNASSDTPMDPVTFIQTLPSDLRRSVLEDMEDSVLAVMPPDIAAEAQALRREQEARQRQLMHERLFGHSSTSALSAILRSPAFTSRLSGNRGVQYTRLAVQRGGTFQMGGSSSHNRPSGSNVDTLLRLRGRLLLDHEALSCLLVLLFVDEPKLNTSRLHRVLRNLCYHAQTRHWVIRSLLSILQRSSESELCIETPKLTTSEEKGKKSSKSCGSSSHENRPLDLLHKMESKSSNQLSWLSVSMDAALGCRTNIFQIQRSGGRKHTEKHASGGSTVHIHPQAAPVVCRHVLDTLIQLAKVFPSHFTQQRTKETNCESDRERGNKACSPCSSQSSSSGICTDFWDLLVKLDNMNVSRKGKNSVKSVPVSAGGEGETSPYSLEASPLGQLMNMLSHPVIRRSSLLTEKLLRLLSLISIALPENKVSEAQANSGSGASSTTTATSTTSTTTTTAASTTPTPPTAPTPVTSAPALVAATAISTIVVAASTTVTTPTTATTTVSISPTTKGSKSPAKVSDGGSSSTDFKMVSSGLTENQLQLSVEVLTSHSCSEEGLEDAANVLLQLSRGDSGTRDTVLKLLLNGARHLGYTLCKQIGTLLAELREYNLEQQRRAQCETLSPDGLPEEQPQTTKLKGKMQSRFDMAENVVIVASQKRPLGGRELQLPSMSMLTSKTSTQKFFLRVLQVIIQLRDDTRRANKKAKQTGRLGSSGLGSASSIQAAVRQLEAEADAIIQMVREGQRARRQQQAATSESSQSEASVRREESPMDVDQPSPSAQDTQSIASDGTPQGEKEKEERPPELPLLSEQLSLDELWDMLGECLKELEESHDQHAVLVLQPAVEAFFLVHATERESKPPVRDTRESQLAHIKDEPPPLSPAPLTPATPSSLDPFFSREPSSMHISSSLPPDTQKFLRFAETHRTVLNQILRQSTTHLADGPFAVLVDYIRVLDFDVKRKYFRQELERLDEGLRKEDMAVHVRRDHVFEDSYRELHRKSPEEMKNRLYIVFEGEEGQDAGGLLREWYMIISREMFNPMYALFRTSPGDRVTYTINPSSHCNPNHLSYFKFVGRIVAKAVYDNRLLECYFTRSFYKHILGKSVRYTDMESEDYHFYQGLVYLLENDVSTLGYDLTFSTEVQEFGVCEVRDLKPNGANILVTEENKKEYVHLVCQMRMTGAIRKQLAAFLEGFYEIIPKRLISIFTEQELELLISGLPTIDIDDLKSNTEYHKYQSNSIQIQWFWRALRSFDQADRAKFLQFVTGTSKVPLQGFAALEGMNGIQKFQIHRDDRSTDRLPSAHTCFNQLDLPAYESFEKLRHMLLLAIQECSEGFGLA

SEQ ID NO: 921718 - protein, 3719 aa, Homo sapiens; identical to SEQ ID NO: 921715

SEQ ID NO: 921719 - protein, 3719 aa, Homo sapiens; identical to SEQ ID NO: 921715

SEQ ID NO: 921720 - protein, 3719 aa, Homo sapiens; identical to SEQ ID NO: 921715

SEQ ID NO: 921721 - protein, 3704 aa, Homo sapiens
ASNLGSAVDELMRHQPTLKTDATTAIIKLLEEICNLGRDPKYICQKPSIQKADGTATAPPPRSNHAAEEASSEDEEEEEVQAMQSFNSTQQNETEPNQQVVGTEERIPIPLMDYILNVMKFVESILSNNTTDDHCQEFVNQKGLLPLVTILGLPNLPIDFPTSAACQAVAGVCKSILTLSHEPKVLQEGLLQLDSILSSLEPLHRPIESPGGSVLLRELACAGNVADATLSAQATPLLHALTAAHAYIMMFVHTCRVGQSEIRSISVNQWGSQLGLSVLSKLSQLYCSLVWESTVLLSLCTPNSLPSGCEFGQADMQKLVPKDEKAGTTQGGKRSDGEQDGAAGSMDASTQGLLEGIGLDGDTLAPMETDEPTASDSKGKSKITPAMAARIKQIKPLLSASSRLGRALAELFGLLVKLCVGSPVRQRRSHHAASTTTAPTPAARSTASALTKLLTKGLSWQPPPYTPTPRFRLTFFICSVGFTSPMLFDERKYPYHLMLQKFLCSGGHNALFETFNWALSMGGKVPVSEGLEHSDLPDGTGEFLDAWLMLVEKMVNPTTVLESPHSLPAKLPGGVQNFPQFSALRFLVVTQKAAFTCIKNLWNRKPLKVYGGRMAESMLAILCHILRGEPVIRERLSKEKEGSRGEEDTGQEEGGSRREPQVNQQQLQQLMDMGFTREHAMEALLNTSTMEQATEYLLTHPPPIMGGVVRDLSMSEEDQMMRAIAMSLGQDIPMDQRAESPEEVACRKEEEERKAREKQEEEEAKCLEKFQDADPLEQDELHTFTDTMLPGCFHLLDELPDTVYRVCDLIMTAIKRNGADYRDMILKQVVNQVWEAADVLIKAALPLTTSDTKTVSEWISQMATLPQASNLATRILLLTLLFEELKLPCAWVVESSGILNVLIKLLEVVQPCLQAAKEQKEVQTPKWITPVLLLIDFYEKTAISSKRRAQMTKYLQSNSNNWRWFDDRSGRWCSYSASNNSTIDSAWKSGETSVRFTAGRRRYTVQFTTMVQVNEETGNRRPVMLTLLRVPRLNKNSKNSNGQELEKTLEESKEMDIKRKENKGNDTPLALESTNTEKETSLEETKIGEILIQGLTEDMVTVLIRACVSMLGVPVDPDTLHATLRLCLRLTRDHKYAMMFAELKSTRMILNLTQSSGFNGFTPLVTLLLRHIIEDPCTLRHTMEKVVRSAATSGAGSTTSGVVSGSLGSREINYILRVLGPAACRNPDIFTEVANCCIRIALPAPRGSGTASDDEFENLRIKGPNAVQLVKTTPLKPSPLPVIPDTIKEVIYDMLNALAAYHAPEEADKSDPKPGVMTQEVGQLLQDMGDDVYQQYRSLTRQSSDFDTQSGFSINSQVFAADGASTETSASGTSQGEASTPEESRDGKKDKEGDRASEEGKQKGKGSKPLMPTSTILRLLAELVRSYVGIATLIANYSYTVGQSELIKEDCSVLAFVLDHLLPHTQNAEDKDTPALARLFLASLAAAGSGTDAQVALVNEVKAALGRALAMAESTEKHARLQAVMCIISTIMESCPSTSSFYSSATAKTQHNGMNNIIRLFLKKGLVNDLARVPHSLDLSSPNMANTVNAALKPLETLSRIVNQPSSLFGSKSASSKNKSEQDAQGASQDSSSNQQDPGEPGEAEVQEEDHDVTQTEVADGDIMDGEAETDSVVIAGQPEVLSSQEMQVENELEDLIDELLERDGGSGNSTIIVSRSGEDESQEDVLMDEAPSNLSQASTLQANREDSMNILDPEDEEEHTQEEDSSGSNEDEDDSQDEEEEEEEDEEDDQEDDEGEEGDEDDDDDGSEMELDEDYPDMNASPLVRFERFDREDDLIIEFDNMFSSATDIPPSPGNIPTTHPLMVRHADHSSLTLGSGSSTTRLTQGIGRSQRTLRQLTANTGHTIHVHYPGNRQPNPPLILQRLLGPSAAADILQLSSSLPLQSRGRARLLVGNDDVHIIARSDDELLDDFFHDQSTATSQAGTLSSIPTALTRWTEECKVLDAESMHDCVSVVKVSIVNHLEFLRDEELEERREKRRKQLAEEETKITDKGKEDKENRDQSAQCTASKSNDSTEQNLSDGTPMPDSYPTTPSSTDAATSESKETLGTLQSSQQQPTLPTPPALGEVPQELQSPAGEGGSSTQLLMPVEPEELGPTRPSGEAETTQMELSPAPTITSLSPERAEDSDALTAVSSQLEGSPMDTSSLASCTLEEAVGDTSAAGSSEQPRAGSSTPGDAPPAVAEVQGRSDGSGESAQPPEDSSPPASSESSSTRDSAVAISGADSRGILEEPLPSTSSEEEDPLAGISLPEGVDPSFLAALPDDIRREVLQNQLGIRPPTRTAPSTNSSAPAVVGNPGVTEVSPEFLAALPPAIQEEVLAQQRAEQQRRELAQNASSDTPMDPVTFIQTLPSDLRRSVLEDMEDSVLAVMPPDIAAEAQALRREQEARQRQLMHERLFGHSSTSALSAILRSPAFTSRLSGNRGVQYTRLAVQRGGTFQMGGSSSHNRPSGSNVDTLLRLRGRLLLDHEALSCLLVLLFVDEPKLNTSRLHRVLRNLCYHAQTRHWVIRSLLSILQRSSESELCIETPKLTTSEEKGKKSSKSCGSSSHENRPLDLLHKMESKSSNQLSWLSVSMDAALGCRTNIFQIQRSGGRKHTEKHASGGSTVHIHPQAAPVVCRHVLDTLIQLAKVFPSHFTQQRTKETNCESDRERGNKACSPCSSQSSSSGICTDFWDLLVKLDNMNVSRKGKNSVKSVPVSAGGEGETSPYSLEASPLGQLMNMLSHPVIRRSSLLTEKLLRLLSLISIALPENKVSEAQANSGSGASSTTTATSTTSTTTTTAASTTPTPPTAPTPVTSAPALVAATAISTIVVAASTTVTTPTTATTTVSISPTTKGSKSPAKVSDGGSSSTDFKMVSSGLTENQLQLSVEVLTSHSCSEEGLEDAANVLLQLSRGDSGTRDTVLKLLLNGARHLGYTLCKQIGTLLAELREYNLEQQRRAQCETLSPDGLPEEQPQTTKLKGKMQSRFDMAENVVIVASQKRPLGGRELQLPSMSMLTSKTSTQKFFLRVLQVIIQLRDDTRRANKKAKQTGRLGSSGLGSASSIQAAVRQLEAEADAIIQMSESSQSEASVRREESPMDVDQPSPSAQDTQSIASDGTPQGEKEKEERPPELPLLSEQLSLDELWDMLGECLKELEESHDQHAVLVLQPAVEAFFLVHATERESKPPVRDTRESQLAHIKDEPPPLSPAPLTPATPSSLDPFFSREPSSMHISSSLPPDTQKFLRFAETHRTVLNQILRQSTTHLADGPFAVLVDYIRVLDFDVKRKYFRQELERLDEGLRKEDMAVHVRRDHVFEDSYRELHRKSPEEMKNRLYIVFEGEEGQDAGGLLREWYMIISREMFNPMYALFRTSPGDRVTYTINPSSHCNPNHLSYFKFVGRIVAKAVYDNRLLECYFTRSFYKHILGKSVRYTDMESEDYHFYQGLVYLLENDVSTLGYDLTFSTEVQEFGVCEVRDLKPNGANILVTEENKKEYVHLVCQMRMTGAIRKQLAAFLEGFYEIIPKRLISIFTEQELELLISGLPTIDIDDLKSNTEYHKYQSNSIQIQWFWRALRSFDQADRAKFLQFVTGTSKVPLQGFAALEGMNGIQKFQIHRDDRSTDRLPSAHTCFNQLDLPAYESFEKLRHMLLLAIQECSEGFGLA

SEQ ID NO: 921722 - protein, 3391 aa, Homo sapiens
ASNLGSAVDELMRHQPTLKTDATTAIIKLLEEICNLGRDPKYICQKPSIQKADGTATAPPPRSNHAAEEASSEDEEEEEVQAMQSFNSTQQNETEPNQQVVGTEERIPIPLMDYILNVMKFVESILSNNTTDDHCQEFVNQKGLLPLVTILGLPNLPIDFPTSAACQAVAGVCKSILTLSHEPKVLQEGLLQLDSILSSLEPLHRPIESPGGSVLLRELACAGNVADATLSAQATPLLHALTAAHAYIMMFVHTCRVGQSEIRSISVNQWGSQLGLSVLSKLSQLYCSLVWESTVLLSLCTPNSLPSGCEFGQADMQKLVPKDEKAGTTQGGKRSDGEQDGAAGSMDASTQGLLEGIGLDGDTLAPMETDEPTASDSKGKSKITPAMAARIKQIKPLLSASSRLGRALAELFGLLVKLCVGSPVRQRRSHHAASTTTAPTPAARSTASALTKLLTKGLSWQPPPYTPTPRFRLTFFICSVGFTSPMLFDERKYPYHLMLQKFLCSGGHNALFETFNWALSMGGKVPVSEGLEHSDLPDGTGEFLDAWLMLVEKMVNPTTVLESPHSLPAKLPGGVQNFPQFSALRFLVVTQKAAFTCIKNLWNRKPLKVYGGRMAESMLAILCHILRGEPVIRERLSKEKEGSRGEEDTGQEEGGSRREPQVNQQQLQQLMDMGFTREHAMEALLNTSTMEQATEYLLTHPPPIMGGVVRDLSMSEEDQMMRAIAMSLGQDIPMDQRAESPEEVACRKEEEERKAREKQEEEEAKCLEKFQDADPLEQDELHTFTDTMLPGCFHLLDELPDTVYRVCDLIMTAIKRNGADYRDMILKQVVNQVWEAADVLIKAALPLTTSDTKTVSEWISQMATLPQASNLATRILLLTLLFEELKLPCAWVVESSGILNVLIKLLEVVQPCLQAAKEQKEVQTPKWITPVLLLIDFYEKTAISSKRRAQMTKYLQSNSNNWRWFDDRSGRWCSYSASNNSTIDSAWKSGETSVRFTAGRRRYTVQFTTMVQVNEETGNRRPVMLTLLRVPRLNKNSKNSNGQELEKTLEESKEMDIKRKENKGNDTPLALESTNTEKETSLEETKIGEILIQGLTEDMVTVLIRACVSMLGVPVDPDTLHATLRLCLRLTRDHKYAMMFAELKSTRMILNLTQSSGFNGFTPLVTLLLRHIIEDPCTLRHTMEKVVRSAATSGAGSTTSGVVSGSLGSREINYILRVLGPAACRNPDIFTEVANCCIRIALPAPRGSGTASDDEFENLRIKGPNAVQLVKTTPLKPSPLPVIPDTIKEVIYDMLNALAAYHAPEEADKSDPKPGVMTQEVGQLLQDMGDDVYQQYRSLTRQSSDFDTQSGFSINSQVFAADGASTETSASGTSQGEASTPEESRDGKKDKEGDRASEEGKQKGKGSKPLMPTSTILRLLAELVRSYVGIATLIANYSYTVGQSELIKEDCSVLAFVLDHLLPHTQNAEDKDTPALARLFLASLAAAGSGTDAQVALVNEVKAALGRALAMAESTEKHARLQAVMCIISTIMESCPSTSSFYSSATAKTQHNGMNNIIRLFLKKGLVNDLARVPHSLDLSSPNMANTVNAALKPLETLSRIVNQPSSLFGSKSASSKNKSEQDAQGASQDSSSNQQDPGEPGEAEVQEEDHDVTQTEVADGDIMDGEAETDSVVIAGQPEVLSSQEMQVENELEDLIDELLERDGGSGNSTIIVSRSGEDESQEDVLMDEAPSNLSQASTLQANREDSMNILDPEDEEEHTQEEDSSGSNEDEDDSQDEEEEEEEDEEDDQEDDEGEEGDEDDDDDGSEMELDEDYPDMNASPLVRFERFDREDDLIIEFDNMFSSATDIPPSPGNIPTTHPLMVRHADHSSLTLGSGSSTTRLTQGIGRSQRTLRQLTANTGHTIHVHYPGNRQPNPPLILQRLLGPSAAADILQLSSSLPLQSRGRARLLVGNDDVHIIARSDDELLDDFFHDQSTATSQAGTLSSIPTALTRWTEECKVLDAESMHDCVSVVKVSIVNHLEFLRDEELEERREKRRKQLAEEETKITDKGKEDKENRDQSAQCTASKSNDSTEQNLSDGTPMPDSYPTTPSSTDAATSESKETLGTLQSSQQQPTLPTPPALGEVPQELQSPAGEGGSSTQLLMPVEPEELGPTRPSGEAETTQMELSPAPTITSLSPERAEDSDALTAVSSQLEGSPMDTSSLASCTLEEAVGDTSAAGSSEQPRAGSSTPGDAPPAVAEVQGRSDGSGESAQPPEDSSPPASSESSSTRDSAVAISGADSRGILEEPLPSTSSEEEDPLAGISLPEGVDPSFLAALPDDIRREVLQNQLGIRPPTRTAPSTNSSAPAVVGNPGVTEVSPEFLAALPPAIQEEVLAQQRAEQQRRELAQNASSDTPMDPVTFIQTLPSDLRRSVLEDMEDSVLAVMPPDIAAEAQALRREQEARQRQLMHERLFGHSSTSALSAILRSPAFTSRLSGNRGVQYTRLAVQRGGTFQMGGSSSHNRPSGSNVDTLLRLRGRLLLDHEALSCLLVLLFVDEPKLNTSRLHRVLRNLCYHAQTRHWVIRSLLSILQRSSESELCIETPKLTTSEEKGKKSSKSCGSSSHENRPLDLLHKMESKSSNQLSWLSVSMDAALGCRTNIFQIQRSGGRKHTEKHASGGSTVHIHPQAAPVVCRHVLDTLIQLAKVFPSHFTQQRTKETNCESDRERGNKACSPCSSQSSSSGICTDFWDLLVKLDNMNVSRKGKNSVKSVPVSAGGEGETSPYSLEASPLGQLMNMLSHPVIRRSSLLTEKLLRLLSLISIALPENKVSEAQANSGSGASSTTTATSTTSTTTTTAASTTPTPPTAPTPVTSAPALVAATAISTIVVAASTTVTTPTTATTTVSISPTTKGSKSPAKVSDGGSSSTDFKMVSSGLTENQLQLSVEVLTSHSCSEEGLEDAANVLLQLSRGDSGTRDTVLKLLLNGARHLGYTLCKQIGTLLAELREYNLEQQRRAQCETLSPDGLPEEQPQTTKLKGKMQSRFDMAENVVIVASQKRPLGGRELQLPSMSMLTSKTSTQKFFLRVLQVIIQLRDDTRRANKKAKQTGRLGSSGLGSASSIQAAVRQLEAEADAIIQMVREGQRARRQQQAATSESSQSEASVRREESPMDVDQPSPSAQDTQSIASDGTPQGEKEKEERPPELPLLSEQLSLDELWDMLGECLKELEESHDQHAVLVLQPAVEAFFLVHATERESKPPVRDTRESQLAHIKDEPPPLSPAPLTPATPSSLDPFFSREPSSMHISSSLPPDTQKFLRFAETHRTVLNQILRQSTTHLADGPFAVLVDYIRVLDFDVKRKYFRQELERLDEGLRKEDMAVHVRRDHVFEDSYRELHRKSPEEMKNRL

SEQ ID NO: 921723 - protein, 3810 aa, Homo sapiens
ASNLGSAVDELMRHQPTLKTDATTAIIKLLEEICNLGRDPKYICQKPSIQKADGTATAPPPRSNHAAEEASSEDEEEEEVQAMQSFNSTQQNETEPNQQVVGTEERIPIPLMDYILNVMKFVESILSNNTTDDHCQEFVNQKGLLPLVTILGLPNLPIDFPTSAACQAVAGVCKSILTLSHEPKVLQEGLLQLDSILSSLEPLHRPIESPGGSVLLRELACAGNVADATLSAQATPLLHALTAAHAYIMMFVHTCRVGQSEIRSISVNQWGSQLGLSVLSKLSQLYCSLVWESTVLLSLCTPNSLPSGCEFGQADMQKLVPKDEKAGTTQGGKRSDGEQDGAAGSMDASTQGLLEGIGLDGDTLAPMETDEPTASDSKGKSKITPAMAARIKQIKPLLSASSRLGRALAELFGLLVKLCVGSPVRQRRSHHAASTTTAPTPAARSTASALTKLLTKGLSWQPPPYTPTPRFRLTFFICSVGFTSPMLFDERKYPYHLMLQKFLCSGGHNALFETFNWALSMGGKVPVSEGLEHSDLPDGTGEFLDAWLMLVEKMVNPTTVLESPHSLPAKLPGGVQNFPQFSALRFLVVTQKAAFTCIKNLWNRKPLKVYGGRMAESMLAILCHILRGEPVIRERLSKEKEGSRGEEDTGQEEGGSRREPQVNQQQLQQLMDMGFTREHAMEALLNTSTMEQATEYLLTHPPPIMGGVVRDLSMSEEDQMMRAIAMSLGQDIPMDQRAESPEEVACRKEEEERKAREKQEEEEAKCLEKFQDADPLEQDELHTFTDTMLPGCFHLLDELPDTVYRVCDLIMTAIKRNGADYRDMILKQVVNQVWEAADVLIKAALPLTTSDTKTVSEWISQMATLPQASNLATRILLLTLLFEELKLPCAWVVESSGILNVLIKLLEVVQPCLQAAKEQKEVQTPKWITPVLLLIDFYEKTAISSKRRAQMTKYLQSNSNNWRWFDDRSGRWCSYSASNNSTIDSAWKSGETSVRFTAGRRRYTVQFTTMVQVNEETGNRRPVMLTLLRVPRLNKNSKNSNGQELEKTLEESKEMDIKRKENKGNDTPLALESTNTEKETSLEETKIGEILIQGLTEDMVTVLIRACVSMLGVPVDPDTLHATLRLCLRLTRDHKYAMMFAELKSTRMILNLTQSSGFNGFTPLVTLLLRHIIEDPCTLRHTMEKVVRSAATSGAGSTTSGVVSGSLGSREINYILRVLGPAACRNPDIFTEVANCCIRIALPAPRGSGTASDDEFENLRIKGPNAVQLVKTTPLKPSPLPVIPDTIKEVIYDMLNALAAYHAPEEADKSDPKPGVMTQEVGQLLQDMGDDVYQQYRSLTRQSSDFDTQSGFSINSQVFAADGASTETSASGTSQGEASTPEESRDGKKDKEGDRASEEGKQKGKGSKPLMPTSTILRLLAELVRSYVGIATLIANYSYTVGQSELIKEDCSVLAFVLDHLLPHTQNAEDKDTPALARLFLASLAAAGSGTDAQVALVNEVKAALGRALAMAESTEKHARLQAVMCIISTIMESCPSTSSFYSSATAKTQHNGMNNIIRLFLKKGLVNDLARVPHSLDLSSPNMANTVNAALKPLETLSRIVNQPSSLFGSKSASSKNKSEQDAQGASQDSSSNQQDPGEPGEAEVQEEDHDVTQTEVADGDIMDGEAETDSVVIAGQPEVLSSQEMQVENELEDLIDELLERDGGSGNSTIIVSRSGEDESQEDVLMDEAPSNLSQASTLQANREDSMNILDPEDEEEHTQEEDSSGSNEDEDDSQDEEEEEEEDEEDDQEDDEGEEGDEDDDDDGSEMELDEDYPDMNASPLVRFERFDREDDLIIEFDNMFSSATDIPPSPGNIPTTHPLMVRHADHSSLTLGSGSSTTRLTQGIGRSQRTLRQLTANTGHTIHVHYPGNRQPNPPLILQRLLGPSAAADILQLSSSLPLQSRGRARLLVGNDDVHIIARSDDELLDDFFHDQSTATSQAGTLSSIPTALTRWTEECKVLDAESMHDCVSVVKVSIVNHLEFLRDEELEERREKRRKQLAEEETKITDKGKEDKENRDQSAQCTASKSNDSTEQNLSDGTPMPDSYPTTPSSTDAATSESKETLGTLQSSQQQPTLPTPPALGEVPQELQSPAGEGGSSTQLLMPVEPEELGPTRPSGEAETTQMELSPAPTITSLSPERAEDSDALTAVSSQLEGSPMDTSSLASCTLEEAVGDTSAAGSSEQPRAGSSTPGDAPPAVAEVQGRSDGSGESAQPPEDSSPPASSESSSTRDSAVAISGADSRGILEEPLPSTSSEEEDPLAGISLPEGVDPSFLAALPDDIRREVLQNQLGIRPPTRTAPSTNSSAPAVVGNPGVTEVSPEFLAALPPAIQEEVLAQQRAEQQRRELAQNASSDTPMDPVTFIQTLPSDLRRSVLEDMEDSVLAVMPPDIAAEAQALRREQEARQRQLMHERLFGHSSTSALSAILRSPAFTSRLSGNRGVQYTRLAVQRGGTFQMGGSSSHNRPSGSNVDTLLRLRGRLLLDHEALSCLLVLLFVDEPKLNTSRLHRVLRNLCYHAQTRHWVIRSLLSILQRSSESELCIETPKLTTSEEKGKKSSKSCGSSSHENRPLDLLHKMESKSSNQLSWLSVSMDAALGCRTNIFQIQRSGGRKHTEKHASGGSTVHIHPQAAPVVCRHVLDTLIQLAKVFPSHFTQQRTKETNCESDRERGNKACSPCSSQSSSSGICTDFWDLLVKLDNMNVSRKGKNSVKSVPVSAGGEGETSPYSLEASPLGQLMNMLSHPVIRRSSLLTEKLLRLLSLISIALPENKVSEAQANSGSGASSTTTATSTTSTTTTTAASTTPTPPTAPTPVTSAPALVAATAISTIVVAASTTVTTPTTATTTVSISPTTKGSKSPAKVSDGGSSSTDFKMVSSGLTENQLQLSVEVLTSHSCSEEGLEDAANVLLQLSRGDSGTRDTVLKLLLNGARHLGYTLCKQIGTLLAELREYNLEQQRRAQCETLSPDGLPEEQPQTTKLKGKMQSRFDMAENVVIVASQKRPLGGRELQLPSMSMLTSKTSTQKFFLRVLQVIIQLRDDTRRANKKAKQTGRLGSSGLGSASSIQAAVRQLEAEADAIIQMVREGQRARRQQQAATSESSQSEASVRREESPMDVDQPSPSAQDTQSIASDGTPQGEKEKEERPPELPLLSEQLSLDELWDMLGECLKELEESHDQHAVLVLQPAVEAFFLVHATERESKPPVRDTRESQLAHIKDEPPPLSPAPLTPATPSSLDPFFSREPSSMHISSSLPPDTQKFLRFAETHRTVLNQILRQSTTHLADGPFAVLVDYIRVLDFDVKRKYFRQELERLDEGLRKEDMAVHVRRDHVFEDSYRELHRKSPEEMKNRLPHLFLCIPFLLVFSGISVNLDYFEDISSVSGAFVCSQISTPFLGCPGTLCLPLHLTLHSPDTASQSLTHTNDWMYPGFSAQLFSASAFLCRYIVFEGEEGQDAGGLLREWYMIISREMFNPMYALFRTSPGDRVTYTINPSSHCNPNHLSYFKFVGRIVAKAVYDNRLLECYFTRSFYKHILGKSVRYTDMESEDYHFYQGLVYLLENDVSTLGYDLTFSTEVQEFGVCEVRDLKPNGANILVTEENKKEYVHLVCQMRMTGAIRKQLAAFLEGFYEIIPKRLISIFTEQELELLISGLPTIDIDDLKSNTEYHKYQSNSIQIQWFWRALRSFDQADRAKFLQFVTGTSKVPLQGFAALEGMNGIQKFQIHRDDRSTDRLPSAHTCFNQLDLPAYESFEKLRHMLLLAIQECSEGFGLA

SEQ ID NO: 921724 - protein, 3759 aa, Homo sapiens
ASNLGSAVDELMRHQPTLKTDATTAIIKLLEEICNLGRDPKYICQKPSIQKADGTATAPPPRSNHAAEEASSEDEEEEEVQAMQSFNSTQQNETEPNQQVVGTEERIPIPLMDYILNVMKFVESILSNNTTDDHCQEFVNQKGLLPLVTILGLPNLPIDFPTSAACQAVAGVCKSILTLSHEPKVLQEGLLQLDSILSSLEPLHRPIESPGGSVLLRELACAGNVADATLSAQATPLLHALTAAHAYIMMFVHTCRVGQSEIRSISVNQWGSQLGLSVLSKLSQLYCSLVWESTVLLSLCTPNSLPSGCEFGQADMQKLVPKDEKAGTTQGGKRSDGEQDGAAGSMDASTQGLLEGIGLDGDTLAPMETDEPTASDSKGKSKITPAMAARIKQIKPLLSASSRLGRALAELFGLLVKLCVGSPVRQRRSHHAASTTTAPTPAARSTASALTKLLTKGLSWQPPPYTPTPRFRLTFFICSVGFTSPMLFDERKYPYHLMLQKFLCSGGHNALFETFNWALSMGGKVPVSEGLEHSDLPDGTGEFLDAWLMLVEKMVNPTTVLESPHSLPAKLPGGVQNFPQFSALRFLVVTQKAAFTCIKNLWNRKPLKVYGGRMAESMLAILCHILRGEPVIRERLSKEKEGSRGEEDTGQEEGGSRREPQVNQQQLQQLMDMGFTREHAMEALLNTSTMEQATEYLLTHPPPIMGGVVRDLSMSEEDQMMRAIAMSLGQDIPMDQRAESPEEVACRKEEEERKAREKQEEEEAKCLEKFQDADPLEQDELHTFTDTMLPGCFHLLDELPDTVYRVCDLIMTAIKRNGADYRDMILKQVVNQVWEAADVLIKAALPLTTSDTKTVSEWISQMATLPQASNLATRILLLTLLFEELKLPCAWVVESSGILNVLIKLLEVVQPCLQAAKEQKEVQTPKWITPVLLLIDFYEKTAISSKRRAQMTKYLQSNSNNWRWFDDRSGRWCSYSASNNSTIDSAWKSGETSVRFTAGRRRYTVQFTTMVQVNEETGNRRPVMLTLLRVPRLNKNSKNSNGQELEKTLEESKEMDIKRKENKGNDTPLALESTNTEKETSLEETKIGEILIQGLTEDMVTVLIRACVSMLGVPVDPDTLHATLRLCLRLTRDHKYAMMFAELKSTRMILNLTQSSGFNGFTPLVTLLLRHIIEDPCTLRHTMEKVVRSAATSGAGSTTSGVVSGSLGSREINYILRVLGPAACRNPDIFTEVANCCIRIALPAPRGSGTASDDEFENLRIKGPNAVQLVKTTPLKPSPLPVIPDTIKEVIYDMLNALAAYHAPEEADKSDPKPGVMTQEVGQLLQDMGDDVYQQYRSLTRQSSDFDTQSGFSINSQVFAADGASTETSASGTSQGEASTPEESRDGKKDKEGDRASEEGKQKGKGSKPLMPTSTILRLLAELVRSYVGIATLIANYSYTVGQSELIKEDCSVLAFVLDHLLPHTQNAEDKDTPALARLFLASLAAAGSGTDAQVALVNEVKAALGRALAMAESTEKHARLQAVMCIISTIMESCPSTSSFYSSATAKTQHNGMNNIIRLFLKKGLVNDLARVPHSLDLSSPNMANTVNAALKPLETLSRIVNQPSSLFGSKSASSKNKSEQDAQGASQDSSSNQQDPGEPGEAEVQEEDHDVTQTEVADGDIMDGEAETDSVVIAGQPEVLSSQEMQVENELEDLIDELLERDGGSGNSTIIVSRSGEDESQEDVLMDEAPSNLSQASTLQANREDSMNILDPEDEEEHTQEEDSSGSNEDEDDSQDEEEEEEEDEEDDQEDDEGEEGDEDDDDDGSEMELDEDYPDMNASPLVRFERFDREDDLIIEFDNMFSSATDIPPSPGNIPTTHPLMVRHADHSSLTLGSGSSTTRLTQGIGRSQRTLRQLTANTGHTIHVHYPGNRQPNPPLILQRLLGPSAAADILQLSSSLPLQSRGRARLLVGNDDVHIIARSDDELLDDFFHDQSTATSQAGTLSSIPTALTRWTEECKVLDAESMHDCVSVVKVSIVNHLEFLRDEELEERREKRRKQLAEEETKITDKGKEDKENRDQSAQCTASKSNDSTEQNLSDGTPMPDSYPTTPSSTDAATSESKETLGTLQSSQQQPTLPTPPALGEVPQELQSPAGEGGSSTQLLMPVEPEELGPTRPSGEAETTQMELSPAPTITSLSPERAEDSDALTAVSSQLEGSPMDTSSLASCTLEEAVGDTSAAGSSEQPRAGSSTPGDAPPAVAEVQGRSDGSGESAQPPEDSSPPASSESSSTRDSAVAISGADSRGILEEPLPSTSSEEEDPLAGISLPEGVDPSFLAALPDDIRREVLQNQLGIRPPTRTAPSTNSSAPAVVGNPGVTEVSPEFLAALPPAIQEEVLAQQRAEQQRRELAQNASSDTPMDPVTFIQTLPSDLRRSVLEDMEDSVLAVMPPDIAAEAQALRREQEARQRQLMHERLFGHSSTSALSAILRSPAFTSRLSGNRGVQYTRLAVQRGGTFQMGGSSSHNRPSGSNVDTLLRLRGRLLLDHEALSCLLVLLFVDEPKLNTSRLHRVLRNLCYHAQTRHWVIRSLLSILQRSSESELCIETPKLTTSEEKGKKSSKSCGSSSHENRPLDLLHKMESKSSNQLSWLSVSMDAALGCRTNIFQIQRSGGRKHTEKHASGGSTVHIHPQAAPVVCRHVLDTLIQLAKVFPSHFTQQRTKETNCESDRERGNKACSPCSSQSSSSGICTDFWDLLVKLDNMNVSRKGKNSVKSVPVSAGGEGETSPYSLEASPLGQLMNMLSHPVIRRSSLLTEKLLRLLSLISIALPENKVSEAQANSGSGASSTTTATSTTSTTTTTAASTTPTPPTAPTPVTSAPALVAATAISTIVVAASTTVTTPTTATTTVSISPTTKGSKSPAKVSDGGSSSTDFKMVSSGLTENQLQLSVEVLTSHSCSEEGLEDAANVLLQLSRGDSGTRDTVLKLLLNGARHLGYTLCKQIGTLLAELREYNLEQQRRAQCETLSPDGLPEEQPQTTKLKGKMQSRFDMAENVVIVASQKRPLGGRELQLPSMSMLTSKTSTQKFFLRVLQVIIQLRDDTRRANKKAKQTGRLGSSGLGSASSIQAAVRQLEAEADAIIQMVREGQRARRQQQAATSESSQSEASVRREESPMDVDQPSPSAQDTQSIASDGTPQGEKEKEERPPELPLLSEQLSLDELWDMLGECLKELEESHDQHAVLVLQPAVEAFFLVHATERESKPPVRDTRESQLAHIKDEPPPLSPAPLTPATPSSLDPFFSREPSSMHISSSLPPDTQKFLRFAETHRTVLNQILRQSTTHLADGPFAVLVDYIRVLDFDVKRKYFRQELERLDEGLRKEDMAVHVRRDHVFEDSYRELHRKSPEEMKNRLYIVFEGEEGQDAGGLLREWYMIISREMFNPMYALFRTSPGDRVTYTINPSSHCNPNHLSYFKFVGRIVAKAVYDNRLLECYFTRSFYKHILGKSVRYTDMESEDYHFYQGLVYLLENDVSTLGYDLTFSTEVQEFGVCEVRDLKPNGANILVTEENKKEYVHLVCQMRMTGAIRKQLAAFLEGFYEIIPKRLISIFTEQELELLISGLPTIDIDDLKSNTEYHKYQSNSIQIQWFWRALRSFDQADRAKFLQFVTGTSKVPLQGFAALEGMNGIQKFQIHRDDRSTDRLPSAHTWASVTGARRSCREQKSKELSRGPITSDSENHLQVCTLAYGRVRPGCLRRSDRVRFLVLVPDGQFGSQIKGDILG

SEQ ID NO: 921725 - protein, 597 aa, Homo sapiens
MVREGQRARRQQQAATSESSQSEASVRREESPMDVDQPSPSAQDTQSIASDGTPQGEKEKEERPPELPLLSEQLSLDELWDMLGECLKELEESHDQHAVLVLQPAVEAFFLVHATERESKPPVRDTRESQLAHIKDEPPPLSPAPLTPATPSSLDPFFSREPSSMHISSSLPPDTQKFLRFAETHRTVLNQILRQSTTHLADGPFAVLVDYIRVLDFDVKRKYFRQELERLDEGLRKEDMAVHVRRDHVFEDSYRELHRKSPEEMKNRLYIVFEGEEGQDAGGLLREWYMIISREMFNPMYALFRTSPGDRVTYTINPSSHCNPNHLSYFKFVGRIVAKAVYDNRLLECYFTRSFYKHILGKSVRYTDMESEDYHFYQGLVYLLENDVSTLGYDLTFSTEVQEFGVCEVRDLKPNGANILVTEENKKEYVHLVCQMRMTGAIRKQLAAFLEGFYEIIPKRLISIFTEQELELLISGLPTIDIDDLKSNTEYHKYQSNSIQIQWFWRALRSFDQADRAKFLQFVTGTSKVPLQGFAALEGMNGIQKFQIHRDDRSTDRLPSAHTCFNQLDLPAYESFEKLRHMLLLAIQECSEGFGLA

SEQ ID NO: 921726 - protein, 582 aa, Homo sapiens
MSESSQSEASVRREESPMDVDQPSPSAQDTQSIASDGTPQGEKEKEERPPELPLLSEQLSLDELWDMLGECLKELEESHDQHAVLVLQPAVEAFFLVHATERESKPPVRDTRESQLAHIKDEPPPLSPAPLTPATPSSLDPFFSREPSSMHISSSLPPDTQKFLRFAETHRTVLNQILRQSTTHLADGPFAVLVDYIRVLDFDVKRKYFRQELERLDEGLRKEDMAVHVRRDHVFEDSYRELHRKSPEEMKNRLYIVFEGEEGQDAGGLLREWYMIISREMFNPMYALFRTSPGDRVTYTINPSSHCNPNHLSYFKFVGRIVAKAVYDNRLLECYFTRSFYKHILGKSVRYTDMESEDYHFYQGLVYLLENDVSTLGYDLTFSTEVQEFGVCEVRDLKPNGANILVTEENKKEYVHLVCQMRMTGAIRKQLAAFLEGFYEIIPKRLISIFTEQELELLISGLPTIDIDDLKSNTEYHKYQSNSIQIQWFWRALRSFDQADRAKFLQFVTGTSKVPLQGFAALEGMNGIQKFQIHRDDRSTDRLPSAHTCFNQLDLPAYESFEKLRHMLLLAIQECSEGFGLA

SEQ ID NO: 921727 - protein, 565 aa, Homo sapiens
MDVDQPSPSAQDTQSIASDGTPQGEKEKEERPPELPLLSEQLSLDELWDMLGECLKELEESHDQHAVLVLQPAVEAFFLVHATERESKPPVRDTRESQLAHIKDEPPPLSPAPLTPATPSSLDPFFSREPSSMHISSSLPPDTQKFLRFAETHRTVLNQILRQSTTHLADGPFAVLVDYIRVLDFDVKRKYFRQELERLDEGLRKEDMAVHVRRDHVFEDSYRELHRKSPEEMKNRLYIVFEGEEGQDAGGLLREWYMIISREMFNPMYALFRTSPGDRVTYTINPSSHCNPNHLSYFKFVGRIVAKAVYDNRLLECYFTRSFYKHILGKSVRYTDMESEDYHFYQGLVYLLENDVSTLGYDLTFSTEVQEFGVCEVRDLKPNGANILVTEENKKEYVHLVCQMRMTGAIRKQLAAFLEGFYEIIPKRLISIFTEQELELLISGLPTIDIDDLKSNTEYHKYQSNSIQIQWFWRALRSFDQADRAKFLQFVTGTSKVPLQGFAALEGMNGIQKFQIHRDDRSTDRLPSAHTCFNQLDLPAYESFEKLRHMLLLAIQECSEGFGLA

SEQ ID NO: 921728 - protein, 565 aa, Homo sapiens; identical to SEQ ID NO: 921727

SEQ ID NO: 921729 - protein, 3544 aa, Homo sapiens
ASNLGSAVDELMRHQPTLKTDATTAIIKLLEEICNLGRDPKYICQKPSIQKADGTATAPPPRSNHAAEEASSEDEEEEEVQAMQSFNSTQQNETEPNQQVVGTEERIPIPLMDYILNVMKFVESILSNNTTDDHCQEFVNQKGLLPLVTILGLPNLPIDFPTSAACQAVAGVCKSILTLSHEPKVLQEGLLQLDSILSSLEPLHRPIESPGGSVLLRELACAGNVADATLSAQATPLLHALTAAHAYIMMFVHTCRVGQSEIRSISVNQWGSQLGLSVLSKLSQLYCSLVWESTVLLSLCTPNSLPSGCEFGQADMQKLVPKDEKAGTTQGGKRSDGEQDGAAGSMDASTQGLLEGIGLDGDTLAPMETDEPTASDSKGKSKITPAMAARIKQIKPLLSASSRLGRALAELFGLLVKLCVGSPVRQRRSHHAASTTTAPTPAARSTASALTKLLTKGLSWQPPPYTPTPRFRLTFFICSVGFTSPMLFDERKYPYHLMLQKFLCSGGHNALFETFNWALSMGGKVPVSEGLEHSDLPDGTGEFLDAWLMLVEKMVNPTTVLESPHSLPAKLPGGVQNFPQFSALRFLVVTQKAAFTCIKNLWNRKPLKVYGGRMAESMLAILCHILRGEPVIRERLSKEKEGSRGEEDTGQEEGGSRREPQVNQQQLQQLMDMGFTREHAMEALLNTSTMEQATEYLLTHPPPIMGGVVRDLSMSEEDQMMRAIAMSLGQDIPMDQRAESPEEVACRKEEEERKAREKQEEEEAKCLEKFQDADPLEQDELHTFTDTMLPGCFHLLDELPDTVYRVCDLIMTAIKRNGADYRDMILKQVVNQVWEAADVLIKAALPLTTSDTKTVSEWISQMATLPQASNLATRILLLTLLFEELKLPCAWVVESSGILNVLIKLLEVVQPCLQAAKEQKEVQTPKWITPVLLLIDFYEKTAISSKRRAQMTKYLQSNSNNWRWFDDRSGRWCSYSASNNSTIDSAWKSGETSVRFTAGRRRYTVQFTTMVQVNEETGNRRPVMLTLLRVPRLNKNSKNSNGQELEKTLEESKEMDIKRKENKGNDTPLALESTNTEKETSLEETKIGEILIQGLTEDMVTVLIRACVSMLGVPVDPDTLHATLRLCLRLTRDHKYAMMFAELKSTRMILNLTQSSGFNGFTPLVTLLLRHIIEDPCTLRHTMEKVVRSAATSGAGSTTSGVVSGSLGSREINYILRVLGPAACRNPDIFTEVANCCIRIALPAPRGSGTASDDEFENLRIKGPNAVQLVKTTPLKPSPLPVIPDTIKEVIYDMLNALAAYHAPEEADKSDPKPGVMTQEVGQLLQDMGDDVYQQYRSLTRQSSDFDTQSGFSINSQVFAADGASTETSASGTSQGEASTPEESRDGKKDKEGDRASEEGKQKGKGSKPLMPTSTILRLLAELVRSYVGIATLIANYSYTVGQSELIKEDCSVLAFVLDHLLPHTQNAEDKDTPALARLFLASLAAAGSGTDAQVALVNEVKAALGRALAMAESTEKHARLQAVMCIISTIMESCPSTSSFYSSATAKTQHNGMNNIIRLFLKKGLVNDLARVPHSLDLSSPNMANTVNAALKPLETLSRIVNQPSSLFGSKSASSKNKSEQDAQGASQDSSSNQQDPGEPGEAEVQEEDHDVTQTEVADGDIMDGEAETDSVVIAGQPEVLSSQEMQVENELEDLIDELLERDGGSGNSTIIVSRSGEDESQEDVLMDEAPSNLSQASTLQANREDSMNILDPEDEEEHTQEEDSSGSNEDEDDSQDEEEEEEEDEEDDQEDDEGEEGDEDDDDDGSEMELDEDYPDMNASPLVRFERFDREDDLIIEFDNMFSSATDIPPSPGNIPTTHPLMVRHADHSSLTLGSGSSTTRLTQGIGRSQRTLRQLTANTGHTIHVHYPGNRQPNPPLILQRLLGPSAAADILQLSSSLPLQSRGRARLLVGNDDVHIIARSDDELLDDFFHDQSTATSQAGTLSSIPTALTRWTEECKVLDAESMHDCVSVVKVSIVNHLEFLRDEELEERREKRRKQLAEEETKITDKGKEDKENRDQSAQCTASKSNDSTEQNLSDGTPMPDSYPTTPSSTDAATSESKETLGTLQSSQQQPTLPTPPALGEVPQELQSPAGEGGSSTQLLMPVEPEELGPTRPSGEAETTQMELSPAPTITSLSPERAEDSDALTAVSSQLEGSPMDTSSLASCTLEEAVGDTSAAGSSEQPRAGSSTPGDAPPAVAEVQGRSDGSGESAQPPEDSSPPASSESSSTRDSAVAISGADSRGILEEPLPSTSSEEEDPLAGISLPEGVDPSFLAALPDDIRREVLQNQLGIRPPTRTAPSTNSSAPAVVGNPGVTEVSPEFLAALPPAIQEEVLAQQRAEQQRRELAQNASSDTPMDPVTFIQTLPSDLRRSVLEDMEDSVLAVMPPDIAAEAQALRREQEARQRQLMHERLFGHSSTSALSAILRSPAFTSRLSGNRGVQYTRLAVQRGGTFQMGGSSSHNRPSGSNVDTLLRLRGRLLLDHEALSCLLVLLFVDEPKLNTSRLHRVLRNLCYHAQTRHWVIRSLLSILQRSSESELCIETPKLTTSEEKGKKSSKSCGSSSHENRPLDLLHKMESKSSNQLSWLSVSMDAALGCRTNIFQIQRSGGRKHTEKHASGGSTVHIHPQAAPVVCRHVLDTLIQLAKVFPSHFTQQRTKETNCESDRERGNKACSPCSSQSSSSGICTDFWDLLVKLDNMNVSRKGKNSVKSVPVSAGGEGETSPYSLEASPLGQLMNMLSHPVIRRSSLLTEKLLRLLSLISIALPENKVSEAQANSGSGASSTTTATSTTSTTTTTAASTTPTPPTAPTPVTSAPALVAATAISTIVVAASTTVTTPTTATTTVSISPTTKGSKSPAKVSDGGSSSTDFKMVSSGLTENQLQLSVEVLTSHSCSEEGLEDAANVLLQLSRGDSGTRDTVLKLLLNGARHLGYTLCKQIGTLLAELREYNLEQQRRAQCETLSPDGLPEEQPQTTKLKGKMQSRFDMAENVVIVASQKRPLGGRELQLPSMSMLTSKTSTQKFFLRVLQVIIQLRDDTRRANKKAKQTGRLGSSGLGSASSIQAAVRQLEAEADAIIQMVREGQRARRQQQAATSESSQSEASVRREESPMDVDQPSPSAQDTQSIASDGTPQGEKEKEERPPELPLLSEQLSLDELWDMLGECLKELEESHDQHAVLVLQPAVEAFFLVHATERESKPPVRDTRESQLAHIKDEPPPLSPAPLTPATPSSLDPFFSREPSSMHISSSLPPDTQKFLRFAETHRTVLNQILRQSTTHLADGPFAVLVDYIRVLDFDVKRKYFRQELERLDEGLRKEDMAVHVRRDHVFEDSYRELHRKSPEEMKNRLYIVFEGEEGQDAGGLLREWYMIISREMFNPMYALFRTSPGDRVTYTINPSSHCNPNHLSYFKFVGRIVAKAVYDNRLLECYFTRSFYKHILGKSVRYTDMESEDYHFYQGLVYLLENDVSTLGYDLTFSTEVGQEILITAHPSQSGRSIPGSP

SEQ ID NO: 921730 - protein, 390 aa, Homo sapiens
RIPTTLGLDFDVKRKYFRQELERLDEGLRKEDMAVHVRRDHVFEDSYRELHRKSPEEMKNRLYIVFEGEEGQDAGGLLREWYMIISREMFNPMYALFRTSPGDRVTYTINPSSHCNPNHLSYFKFVGRIVAKAVYDNRLLECYFTRSFYKHILGKSVRYTDMESEDYHFYQGLVYLLENDVSTLGYDLTFSTEVQEFGVCEVRDLKPNGANILVTEENKKEYVHLVCQMRMTGAIRKQLAAFLEGFYEIIPKRLISIFTEQELELLISGLPTIDIDDLKSNTEYHKYQSNSIQIQWFWRALRSFDQADRAKFLQFVTGTSKVPLQGFAALEGMNGIQKFQIHRDDRSTDRLPSAHTCFNQLDLPAYESFEKLRHMLLLAIQECSEGFGLA

SEQ ID NO: 921731 - protein, 398 aa, Homo sapiens
RRIHPNIRLGTRPGVTRLCCQRKYFRQELERLDEGLRKEDMAVHVRRDHVFEDSYRELHRKSPEEMKNRLYIVFEGEEGQDAGGLLREWYMIISREMFNPMYALFRTSPGDRVTYTINPSSHCNPNHLSYFKFVGRIVAKAVYDNRLLECYFTRSFYKHILGKSVRYTDMESEDYHFYQGLVYLLENDVSTLGYDLTFSTEVQEFGVCEVRDLKPNGANILVTEENKKEYVHLVCQMRMTGAIRKQLAAFLEGFYEIIPKRLISIFTEQELELLISGLPTIDIDDLKSNTEYHKYQSNSIQIQWFWRALRSFDQADRAKFLQFVTGTSKVPLQGFAALEGMNGIQKFQIHRDDRSTDRLPSAHTCFNQLDLPAYESFEKLRHMLLLAIQECSEGFGLA

SEQ ID NO: 921732 - protein, 3220 aa, Homo sapiens
ASNLGSAVDELMRHQPTLKTDATTAIIKLLEEICNLGRDPKYICQKPSIQKADGTATAPPPRSNHAAEEASSEDEEEEEVQAMQSFNSTQQNETEPNQQVVGTEERIPIPLMDYILNVMKFVESILSNNTTDDHCQEFVNQKGLLPLVTILGLPNLPIDFPTSAACQAVAGVCKSILTLSHEPKVLQEGLLQLDSILSSLEPLHRPIESPGGSVLLRELACAGNVADATLSAQATPLLHALTAAHAYIMMFVHTCRVGQSEIRSISVNQWGSQLGLSVLSKLSQLYCSLVWESTVLLSLCTPNSLPSGCEFGQADMQKLVPKDEKAGTTQGGKRSDGEQDGAAGSMDASTQGLLEGIGLDGDTLAPMETDEPTASDSKGKSKITPAMAARIKQIKPLLSASSRLGRALAELFGLLVKLCVGSPVRQRRSHHAASTTTAPTPAARSTASALTKLLTKGLSWQPPPYTPTPRFRLTFFICSVGFTSPMLFDERKYPYHLMLQKFLCSGGHNALFETFNWALSMGGKVPVSEGLEHSDLPDGTGEFLDAWLMLVEKMVNPTTVLESPHSLPAKLPGGVQNFPQFSALRFLVVTQKAAFTCIKNLWNRKPLKVYGGRMAESMLAILCHILRGEPVIRERLSKEKEGSRGEEDTGQEEGGSRREPQVNQQQLQQLMDMGFTREHAMEALLNTSTMEQATEYLLTHPPPIMGGVVRDLSMSEEDQMMRAIAMSLGQDIPMDQRAESPEEVACRKEEEERKAREKQEEEEAKCLEKFQDADPLEQDELHTFTDTMLPGCFHLLDELPDTVYRVCDLIMTAIKRNGADYRDMILKQVVNQVWEAADVLIKAALPLTTSDTKTVSEWISQMATLPQASNLATRILLLTLLFEELKLPCAWVVESSGILNVLIKLLEVVQPCLQAAKEQKEVQTPKWITPVLLLIDFYEKTAISSKRRAQMTKYLQSNSNNWRWFDDRSGRWCSYSASNNSTIDSAWKSGETSVRFTAGRRRYTVQFTTMVQVNEETGNRRPVMLTLLRVPRLNKNSKNSNGQELEKTLEESKEMDIKRKENKGNDTPLALESTNTEKETSLEETKIGEILIQGLTEDMVTVLIRACVSMLGVPVDPDTLHATLRLCLRLTRDHKYAMMFAELKSTRMILNLTQSSGFNGFTPLVTLLLRHIIEDPCTLRHTMEKVVRSAATSGAGSTTSGVVSGSLGSREINYILRVLGPAACRNPDIFTEVANCCIRIALPAPRGSGTASDDEFENLRIKGPNAVQLVKTTPLKPSPLPVIPDTIKEVIYDMLNALAAYHAPEEADKSDPKPGVMTQEVGQLLQDMGDDVYQQYRSLTRQSSDFDTQSGFSINSQVFAADGASTETSASGTSQGEASTPEESRDGKKDKEGDRASEEGKQKGKGSKPLMPTSTILRLLAELVRSYVGIATLIANYSYTVGQSELIKEDCSVLAFVLDHLLPHTQNAEDKDTPALARLFLASLAAAGSGTDAQVALVNEVKAALGRALAMAESTEKHARLQAVMCIISTIMESCPSTSSFYSSATAKTQHNGMNNIIRLFLKKGLVNDLARVPHSLDLSSPNMANTVNAALKPLETLSRIVNQPSSLFGSKSASSKNKSEQDAQGASQDSSSNQQDPGEPGEAEVQEEDHDVTQTEVADGDIMDGEAETDSVVIAGQPEVLSSQEMQVENELEDLIDELLERDGGSGNSTIIVSRSGEDESQEDVLMDEAPSNLSQASTLQANREDSMNILDPEDEEEHTQEEDSSGSNEDEDDSQDEEEEEEEDEEDDQEDDEGEEGDEDDDDDGSEMELDEDYPDMNASPLVRFERFDREDDLIIEFDNMFSSATDIPPSPGNIPTTHPLMVRHADHSSLTLGSGSSTTRLTQGIGRSQRTLRQLTANTGHTIHVHYPGNRQPNPPLILQRLLGPSAAADILQLSSSLPLQSRGRARLLVGNDDVHIIARSDDELLDDFFHDQSTATSQAGTLSSIPTALTRWTEECKVLDAESMHDCVSVVKVSIVNHLEFLRDEELEERREKRRKQLAEEETKITDKGKEDKENRDQSAQCTASKSNDSTEQNLSDGTPMPDSYPTTPSSTDAATSESKETLGTLQSSQQQPTLPTPPALGEVPQELQSPAGEGGSSTQLLMPVEPEELGPTRPSGEAETTQMELSPAPTITSLSPERAEDSDALTAVSSQLEGSPMDTSSLASCTLEEAVGDTSAAGSSEQPRAGSSTPGDAPPAVAEVQGRSDGSGESAQPPEDSSPPASSESSSTRDSAVAISGADSRGILEEPLPSTSSEEEDPLAGISLPEGVDPSFLAALPDDIRREVLQNQLGIRPPTRTAPSTNSSAPAVVGNPGVTEVSPEFLAALPPAIQEEVLAQQRAEQQRRELAQNASSDTPMDPVTFIQTLPSDLRRSVLEDMEDSVLAVMPPDIAAEAQALRREQEARQRQLMHERLFGHSSTSALSAILRSPAFTSRLSGNRGVQYTRLAVQRGGTFQMGGSSSHNRPSGSNVDTLLRLRGRLLLDHEALSCLLVLLFVDEPKLNTSRLHRVLRNLCYHAQTRHWVIRSLLSILQRSSESELCIETPKLTTSEEKGKKSSKSCGSSSHENRPLDLLHKMESKSSNQLSWLSVSMDAALGCRTNIFQIQRSGGRKHTEKHASGGSTVHIHPQAAPVVCRHVLDTLIQLAKVFPSHFTQQRTKETNCESDRERGNKACSPCSSQSSSSGICTDFWDLLVKLDNMNVSRKGKNSVKSVPVSAGGEGETSPYSLEASPLGQLMNMLSHPVIRRSSLLTEKLLRLLSLISIALPENKVSEAQANSGSGASSTTTATSTTSTTTTTAASTTPTPPTAPTPVTSAPALVAATAISTIVVAASTTVTTPTTATTTVSISPTTKGSKSPAKVSDGGSSSTDFKMVSSGLTENQLQLSVEVLTSHSCSEEGLEDAANVLLQLSRGDSGTRDTVLKLLLNGARHLGYTLCKQIGTLLAELREYNLEQQRRAQCETLSPDGLPEEQPQTTKLKGKMQSRFDMAENVVIVASQKRPLGGRELQLPSMSMLTSKTSTQKFFLRVLQVIIQLRDDTRRANKKAKQTGRLGSSGLGSASSIQAAVRQLEAEADAIIQMVREGQRARRQQQAATSESSQSEASVRREESPMDVDQPSPSAQDTQSIASDGTPQGEKEKEERPPELPLLSEQLSLDELWDMLGECLKELEVCSMPGC

SEQ ID NO: 921733 - protein, 3222 aa, Homo sapiens
ASNLGSAVDELMRHQPTLKTDATTAIIKLLEEICNLGRDPKYICQKPSIQKADGTATAPPPRSNHAAEEASSEDEEEEEVQAMQSFNSTQQNETEPNQQVVGTEERIPIPLMDYILNVMKFVESILSNNTTDDHCQEFVNQKGLLPLVTILGLPNLPIDFPTSAACQAVAGVCKSILTLSHEPKVLQEGLLQLDSILSSLEPLHRPIESPGGSVLLRELACAGNVADATLSAQATPLLHALTAAHAYIMMFVHTCRVGQSEIRSISVNQWGSQLGLSVLSKLSQLYCSLVWESTVLLSLCTPNSLPSGCEFGQADMQKLVPKDEKAGTTQGGKRSDGEQDGAAGSMDASTQGLLEGIGLDGDTLAPMETDEPTASDSKGKSKITPAMAARIKQIKPLLSASSRLGRALAELFGLLVKLCVGSPVRQRRSHHAASTTTAPTPAARSTASALTKLLTKGLSWQPPPYTPTPRFRLTFFICSVGFTSPMLFDERKYPYHLMLQKFLCSGGHNALFETFNWALSMGGKVPVSEGLEHSDLPDGTGEFLDAWLMLVEKMVNPTTVLESPHSLPAKLPGGVQNFPQFSALRFLVVTQKAAFTCIKNLWNRKPLKVYGGRMAESMLAILCHILRGEPVIRERLSKEKEGSRGEEDTGQEEGGSRREPQVNQQQLQQLMDMGFTREHAMEALLNTSTMEQATEYLLTHPPPIMGGVVRDLSMSEEDQMMRAIAMSLGQDIPMDQRAESPEEVACRKEEEERKAREKQEEEEAKCLEKFQDADPLEQDELHTFTDTMLPGCFHLLDELPDTVYRVCDLIMTAIKRNGADYRDMILKQVVNQVWEAADVLIKAALPLTTSDTKTVSEWISQMATLPQASNLATRILLLTLLFEELKLPCAWVVESSGILNVLIKLLEVVQPCLQAAKEQKEVQTPKWITPVLLLIDFYEKTAISSKRRAQMTKYLQSNSNNWRWFDDRSGRWCSYSASNNSTIDSAWKSGETSVRFTAGRRRYTVQFTTMVQVNEETGNRRPVMLTLLRVPRLNKNSKNSNGQELEKTLEESKEMDIKRKENKGNDTPLALESTNTEKETSLEETKIGEILIQGLTEDMVTVLIRACVSMLGVPVDPDTLHATLRLCLRLTRDHKYAMMFAELKSTRMILNLTQSSGFNGFTPLVTLLLRHIIEDPCTLRHTMEKVVRSAATSGAGSTTSGVVSGSLGSREINYILRVLGPAACRNPDIFTEVANCCIRIALPAPRGSGTASDDEFENLRIKGPNAVQLVKTTPLKPSPLPVIPDTIKEVIYDMLNALAAYHAPEEADKSDPKPGVMTQEVGQLLQDMGDDVYQQYRSLTRQSSDFDTQSGFSINSQVFAADGASTETSASGTSQGEASTPEESRDGKKDKEGDRASEEGKQKGKGSKPLMPTSTILRLLAELVRSYVGIATLIANYSYTVGQSELIKEDCSVLAFVLDHLLPHTQNAEDKDTPALARLFLASLAAAGSGTDAQVALVNEVKAALGRALAMAESTEKHARLQAVMCIISTIMESCPSTSSFYSSATAKTQHNGMNNIIRLFLKKGLVNDLARVPHSLDLSSPNMANTVNAALKPLETLSRIVNQPSSLFGSKSASSKNKSEQDAQGASQDSSSNQQDPGEPGEAEVQEEDHDVTQTEVADGDIMDGEAETDSVVIAGQPEVLSSQEMQVENELEDLIDELLERDGGSGNSTIIVSRSGEDESQEDVLMDEAPSNLSQASTLQANREDSMNILDPEDEEEHTQEEDSSGSNEDEDDSQDEEEEEEEDEEDDQEDDEGEEGDEDDDDDGSEMELDEDYPDMNASPLVRFERFDREDDLIIEFDNMFSSATDIPPSPGNIPTTHPLMVRHADHSSLTLGSGSSTTRLTQGIGRSQRTLRQLTANTGHTIHVHYPGNRQPNPPLILQRLLGPSAAADILQLSSSLPLQSRGRARLLVGNDDVHIIARSDDELLDDFFHDQSTATSQAGTLSSIPTALTRWTEECKVLDAESMHDCVSVVKVSIVNHLEFLRDEELEERREKRRKQLAEEETKITDKGKEDKENRDQSAQCTASKSNDSTEQNLSDGTPMPDSYPTTPSSTDAATSESKETLGTLQSSQQQPTLPTPPALGEVPQELQSPAGEGGSSTQLLMPVEPEELGPTRPSGEAETTQMELSPAPTITSLSPERAEDSDALTAVSSQLEGSPMDTSSLASCTLEEAVGDTSAAGSSEQPRAGSSTPGDAPPAVAEVQGRSDGSGESAQPPEDSSPPASSESSSTRDSAVAISGADSRGILEEPLPSTSSEEEDPLAGISLPEGVDPSFLAALPDDIRREVLQNQLGIRPPTRTAPSTNSSAPAVVGNPGVTEVSPEFLAALPPAIQEEVLAQQRAEQQRRELAQNASSDTPMDPVTFIQTLPSDLRRSVLEDMEDSVLAVMPPDIAAEAQALRREQEARQRQLMHERLFGHSSTSALSAILRSPAFTSRLSGNRGVQYTRLAVQRGGTFQMGGSSSHNRPSGSNVDTLLRLRGRLLLDHEALSCLLVLLFVDEPKLNTSRLHRVLRNLCYHAQTRHWVIRSLLSILQRSSESELCIETPKLTTSEEKGKKSSKSCGSSSHENRPLDLLHKMESKSSNQLSWLSVSMDAALGCRTNIFQIQRSGGRKHTEKHASGGSTVHIHPQAAPVVCRHVLDTLIQLAKVFPSHFTQQRTKETNCESDRERGNKACSPCSSQSSSSGICTDFWDLLVKLDNMNVSRKGKNSVKSVPVSAGGEGETSPYSLEASPLGQLMNMLSHPVIRRSSLLTEKLLRLLSLISIALPENKVSEAQANSGSGASSTTTATSTTSTTTTTAASTTPTPPTAPTPVTSAPALVAATAISTIVVAASTTVTTPTTATTTVSISPTTKGSKSPAKVSDGGSSSTDFKMVSSGLTENQLQLSVEVLTSHSCSEEGLEDAANVLLQLSRGDSGTRDTVLKLLLNGARHLGYTLCKQIGTLLAELREYNLEQQRRAQCETLSPDGLPEEQPQTTKLKGKMQSRFDMAENVVIVASQKRPLGGRELQLPSMSMLTSKTSTQKFFLRVLQVIIQLRDDTRRANKKAKQTGRLGSSGLGSASSIQAAVRQLEAEADAIIQMSESSQSEASVRREESPMDVDQPSPSAQDTQSIASDGTPQGEKEKEEREEDLAAVEGSLEPPLWEGISSGSARASALVAEPQGCPSPQTPPSKADPLSSL

SEQ ID NO: 921734 - protein, 2853 aa, Homo sapiens
ASNLGSAVDELMRHQPTLKTDATTAIIKLLEEICNLGRDPKYICQKPSIQKADGTATAPPPRSNHAAEEASSEDEEEEEVQAMQSFNSTQQNETEPNQQVVGTEERIPIPLMDYILNVMKFVESILSNNTTDDHCQEFVNQKGLLPLVTILGLPNLPIDFPTSAACQAVAGVCKSILTLSHEPKVLQEGLLQLDSILSSLEPLHRPIESPGGSVLLRELACAGNVADATLSAQATPLLHALTAAHAYIMMFVHTCRVGQSEIRSISVNQWGSQLGLSVLSKLSQLYCSLVWESTVLLSLCTPNSLPSGCEFGQADMQKLVPKDEKAGTTQGGKRSDGEQDGAAGSMDASTQGLLEGIGLDGDTLAPMETDEPTASDSKGKSKITPAMAARIKQIKPLLSASSRLGRALAELFGLLVKLCVGSPVRQRRSHHAASTTTAPTPAARSTASALTKLLTKGLSWQPPPYTPTPRFRLTFFICSVGFTSPMLFDERKYPYHLMLQKFLCSGGHNALFETFNWALSMGGKVPVSEGLEHSDLPDGTGEFLDAWLMLVEKMVNPTTVLESPHSLPAKLPGGVQNFPQFSALRFLVVTQKAAFTCIKNLWNRKPLKVYGGRMAESMLAILCHILRGEPVIRERLSKEKEGSRGEEDTGQEEGGSRREPQVNQQQLQQLMDMGFTREHAMEALLNTSTMEQATEYLLTHPPPIMGGVVRDLSMSEEDQMMRAIAMSLGQDIPMDQRAESPEEVACRKEEEERKAREKQEEEEAKCLEKFQDADPLEQDELHTFTDTMLPGCFHLLDELPDTVYRVCDLIMTAIKRNGADYRDMILKQVVNQVWEAADVLIKAALPLTTSDTKTVSEWISQMATLPQASNLATRILLLTLLFEELKLPCAWVVESSGILNVLIKLLEVVQPCLQAAKEQKEVQTPKWITPVLLLIDFYEKTAISSKRRAQMTKYLQSNSNNWRWFDDRSGRWCSYSASNNSTIDSAWKSGETSVRFTAGRRRYTVQFTTMVQVNEETGNRRPVMLTLLRVPRLNKNSKNSNGQELEKTLEESKEMDIKRKENKGNDTPLALESTNTEKETSLEETKIGEILIQGLTEDMVTVLIRACVSMLGVPVDPDTLHATLRLCLRLTRDHKYAMMFAELKSTRMILNLTQSSGFNGFTPLVTLLLRHIIEDPCTLRHTMEKVVRSAATSGAGSTTSGVVSGSLGSREINYILRVLGPAACRNPDIFTEVANCCIRIALPAPRGSGTASDDEFENLRIKGPNAVQLVKTTPLKPSPLPVIPDTIKEVIYDMLNALAAYHAPEEADKSDPKPGVMTQEVGQLLQDMGDDVYQQYRSLTRQSSDFDTQSGFSINSQVFAADGASTETSASGTSQGEASTPEESRDGKKDKEGDRASEEGKQKGKGSKPLMPTSTILRLLAELVRSYVGIATLIANYSYTVGQSELIKEDCSVLAFVLDHLLPHTQNAEDKDTPALARLFLASLAAAGSGTDAQVALVNEVKAALGRALAMAESTEKHARLQAVMCIISTIMESCPSTSSFYSSATAKTQHNGMNNIIRLFLKKGLVNDLARVPHSLDLSSPNMANTVNAALKPLETLSRIVNQPSSLFGSKSASSKNKSEQDAQGASQDSSSNQQDPGEPGEAEVQEEDHDVTQTEVADGDIMDGEAETDSVVIAGQPEVLSSQEMQVENELEDLIDELLERDGGSGNSTIIVSRSGEDESQEDVLMDEAPSNLSQASTLQANREDSMNILDPEDEEEHTQEEDSSGSNEDEDDSQDEEEEEEEDEEDDQEDDEGEEGDEDDDDDGSEMELDEDYPDMNASPLVRFERFDREDDLIIEFDNMFSSATDIPPSPGNIPTTHPLMVRHADHSSLTLGSGSSTTRLTQGIGRSQRTLRQLTANTGHTIHVHYPGNRQPNPPLILQRLLGPSAAADILQLSSSLPLQSRGRARLLVGNDDVHIIARSDDELLDDFFHDQSTATSQAGTLSSIPTALTRWTEECKVLDAESMHDCVSVVKVSIVNHLEFLRDEELEERREKRRKQLAEEETKITDKGKEDKENRDQSAQCTASKSNDSTEQNLSDGTPMPDSYPTTPSSTDAATSESKETLGTLQSSQQQPTLPTPPALGEVPQELQSPAGEGGSSTQLLMPVEPEELGPTRPSGEAETTQMELSPAPTITSLSPERAEDSDALTAVSSQLEGSPMDTSSLASCTLEEAVGDTSAAGSSEQPRAGSSTPGDAPPAVAEVQGRSDGSGESAQPPEDSSPPASSESSSTRDSAVAISGADSRGILEEPLPSTSSEEEDPLAGISLPEGVDPSFLAALPDDIRREVLQNQLGIRPPTRTAPSTNSSAPAVVGNPGVTEVSPEFLAALPPAIQEEVLAQQRAEQQRRELAQNASSDTPMDPVTFIQTLPSDLRRSVLEDMEDSVLAVMPPDIAAEAQALRREQEARQRQLMHERLFGHSSTSALSAILRSPAFTSRLSGNRGVQYTRLAVQRGGTFQMGGSSSHNRPSGSNVDTLLRLRGRLLLDHEALSCLLVLLFVDEPKLNTSRLHRVLRNLCYHAQTRHWVIRSLLSILQRSSESELCIETPKLTTSEEKGKKSSKSCGSSSHENRPLDLLHKMESKSSNQLSWLSVSMDAALGCRTNIFQIQRSGGRKHTEKHASGGSTVHIHPQAAPVVCRHVLDTLIQLAKVFPSHFTQQRTKETNCESDRERGNKACSPCSSQSSSSGICTDFWDLLVKLDNMNVSRKGKNSVKSVPVSAGGEGETSPYSLEASPLGQLMNMLSHPVIRRSSLLTEKLLRLLSLISIALPENKVSEAQANSGSGASSTTTATSTTSTTTTTAARPHAPDPVEY

SEQ ID NO: 921735 - protein, 2906 aa, Homo sapiens
ASNLGSAVDELMRHQPTLKTDATTAIIKLLEEICNLGRDPKYICQKPSIQKADGTATAPPPRSNHAAEEASSEDEEEEEVQAMQSFNSTQQNETEPNQQVVGTEERIPIPLMDYILNVMKFVESILSNNTTDDHCQEFVNQKGLLPLVTILGLPNLPIDFPTSAACQAVAGVCKSILTLSHEPKVLQEGLLQLDSILSSLEPLHRPIESPGGSVLLRELACAGNVADATLSAQATPLLHALTAAHAYIMMFVHTCRVGQSEIRSISVNQWGSQLGLSVLSKLSQLYCSLVWESTVLLSLCTPNSLPSGCEFGQADMQKLVPKDEKAGTTQGGKRSDGEQDGAAGSMDASTQGLLEGIGLDGDTLAPMETDEPTASDSKGKSKITPAMAARIKQIKPLLSASSRLGRALAELFGLLVKLCVGSPVRQRRSHHAASTTTAPTPAARSTASALTKLLTKGLSWQPPPYTPTPRFRLTFFICSVGFTSPMLFDERKYPYHLMLQKFLCSGGHNALFETFNWALSMGGKVPVSEGLEHSDLPDGTGEFLDAWLMLVEKMVNPTTVLESPHSLPAKLPGGVQNFPQFSALRFLVVTQKAAFTCIKNLWNRKPLKVYGGRMAESMLAILCHILRGEPVIRERLSKEKEGSRGEEDTGQEEGGSRREPQVNQQQLQQLMDMGFTREHAMEALLNTSTMEQATEYLLTHPPPIMGGVVRDLSMSEEDQMMRAIAMSLGQDIPMDQRAESPEEVACRKEEEERKAREKQEEEEAKCLEKFQDADPLEQDELHTFTDTMLPGCFHLLDELPDTVYRVCDLIMTAIKRNGADYRDMILKQVVNQVWEAADVLIKAALPLTTSDTKTVSEWISQMATLPQASNLATRILLLTLLFEELKLPCAWVVESSGILNVLIKLLEVVQPCLQAAKEQKEVQTPKWITPVLLLIDFYEKTAISSKRRAQMTKYLQSNSNNWRWFDDRSGRWCSYSASNNSTIDSAWKSGETSVRFTAGRRRYTVQFTTMVQVNEETGNRRPVMLTLLRVPRLNKNSKNSNGQELEKTLEESKEMDIKRKENKGNDTPLALESTNTEKETSLEETKIGEILIQGLTEDMVTVLIRACVSMLGVPVDPDTLHATLRLCLRLTRDHKYAMMFAELKSTRMILNLTQSSGFNGFTPLVTLLLRHIIEDPCTLRHTMEKVVRSAATSGAGSTTSGVVSGSLGSREINYILRVLGPAACRNPDIFTEVANCCIRIALPAPRGSGTASDDEFENLRIKGPNAVQLVKTTPLKPSPLPVIPDTIKEVIYDMLNALAAYHAPEEADKSDPKPGVMTQEVGQLLQDMGDDVYQQYRSLTRQSSDFDTQSGFSINSQVFAADGASTETSASGTSQGEASTPEESRDGKKDKEGDRASEEGKQKGKGSKPLMPTSTILRLLAELVRSYVGIATLIANYSYTVGQSELIKEDCSVLAFVLDHLLPHTQNAEDKDTPALARLFLASLAAAGSGTDAQVALVNEVKAALGRALAMAESTEKHARLQAVMCIISTIMESCPSTSSFYSSATAKTQHNGMNNIIRLFLKKGLVNDLARVPHSLDLSSPNMANTVNAALKPLETLSRIVNQPSSLFGSKSASSKNKSEQDAQGASQDSSSNQQDPGEPGEAEVQEEDHDVTQTEVADGDIMDGEAETDSVVIAGQPEVLSSQEMQVENELEDLIDELLERDGGSGNSTIIVSRSGEDESQEDVLMDEAPSNLSQASTLQANREDSMNILDPEDEEEHTQEEDSSGSNEDEDDSQDEEEEEEEDEEDDQEDDEGEEGDEDDDDDGSEMELDEDYPDMNASPLVRFERFDREDDLIIEFDNMFSSATDIPPSPGNIPTTHPLMVRHADHSSLTLGSGSSTTRLTQGIGRSQRTLRQLTANTGHTIHVHYPGNRQPNPPLILQRLLGPSAAADILQLSSSLPLQSRGRARLLVGNDDVHIIARSDDELLDDFFHDQSTATSQAGTLSSIPTALTRWTEECKVLDAESMHDCVSVVKVSIVNHLEFLRDEELEERREKRRKQLAEEETKITDKGKEDKENRDQSAQCTASKSNDSTEQNLSDGTPMPDSYPTTPSSTDAATSESKETLGTLQSSQQQPTLPTPPALGEVPQELQSPAGEGGSSTQLLMPVEPEELGPTRPSGEAETTQMELSPAPTITSLSPERAEDSDALTAVSSQLEGSPMDTSSLASCTLEEAVGDTSAAGSSEQPRAGSSTPGDAPPAVAEVQGRSDGSGESAQPPEDSSPPASSESSSTRDSAVAISGADSRGILEEPLPSTSSEEEDPLAGISLPEGVDPSFLAALPDDIRREVLQNQLGIRPPTRTAPSTNSSAPAVVGNPGVTEVSPEFLAALPPAIQEEVLAQQRAEQQRRELAQNASSDTPMDPVTFIQTLPSDLRRSVLEDMEDSVLAVMPPDIAAEAQALRREQEARQRQLMHERLFGHSSTSALSAILRSPAFTSRLSGNRGVQYTRLAVQRGGTFQMGGSSSHNRPSGSNVDTLLRLRGRLLLDHEALSCLLVLLFVDEPKLNTSRLHRVLRNLCYHAQTRHWVIRSLLSILQRSSESELCIETPKLTTSEEKGKKSSKSCGSSSHENRPLDLLHKMESKSSNQLSWLSVSMDAALGCRTNIFQIQRSGGRKHTEKHASGGSTVHIHPQAAPVVCRHVLDTLIQLAKVFPSHFTQQRTKETNCESDRERGNKACSPCSSQSSSSGICTDFWDLLVKLDNMNVSRKGKNSVKSVPVSAGGEGETSPYSLEASPLGQLMNMLSHPVIRRSSLLTEKLLRLLSLISIALPENKVSEAQANSGSGASSTTTATSTTSTTTTTAACDSEPRHNSGTGASSITTATSTTSTTTTTAASTTPTPPTDPQPVHTLNCDACCPRPLQCLLSQ

SEQ ID NO: 921736 - protein, 2815 aa, Homo sapiens
ASNLGSAVDELMRHQPTLKTDATTAIIKLLEEICNLGRDPKYICQKPSIQKADGTATAPPPRSNHAAEEASSEDEEEEEVQAMQSFNSTQQNETEPNQQVVGTEERIPIPLMDYILNVMKFVESILSNNTTDDHCQEFVNQKGLLPLVTILGLPNLPIDFPTSAACQAVAGVCKSILTLSHEPKVLQEGLLQLDSILSSLEPLHRPIESPGGSVLLRELACAGNVADATLSAQATPLLHALTAAHAYIMMFVHTCRVGQSEIRSISVNQWGSQLGLSVLSKLSQLYCSLVWESTVLLSLCTPNSLPSGCEFGQADMQKLVPKDEKAGTTQGGKRSDGEQDGAAGSMDASTQGLLEGIGLDGDTLAPMETDEPTASDSKGKSKITPAMAARIKQIKPLLSASSRLGRALAELFGLLVKLCVGSPVRQRRSHHAASTTTAPTPAARSTASALTKLLTKGLSWQPPPYTPTPRFRLTFFICSVGFTSPMLFDERKYPYHLMLQKFLCSGGHNALFETFNWALSMGGKVPVSEGLEHSDLPDGTGEFLDAWLMLVEKMVNPTTVLESPHSLPAKLPGGVQNFPQFSALRFLVVTQKAAFTCIKNLWNRKPLKVYGGRMAESMLAILCHILRGEPVIRERLSKEKEGSRGEEDTGQEEGGSRREPQVNQQQLQQLMDMGFTREHAMEALLNTSTMEQATEYLLTHPPPIMGGVVRDLSMSEEDQMMRAIAMSLGQDIPMDQRAESPEEVACRKEEEERKAREKQEEEEAKCLEKFQDADPLEQDELHTFTDTMLPGCFHLLDELPDTVYRVCDLIMTAIKRNGADYRDMILKQVVNQVWEAADVLIKAALPLTTSDTKTVSEWISQMATLPQASNLATRILLLTLLFEELKLPCAWVVESSGILNVLIKLLEVVQPCLQAAKEQKEVQTPKWITPVLLLIDFYEKTAISSKRRAQMTKYLQSNSNNWRWFDDRSGRWCSYSASNNSTIDSAWKSGETSVRFTAGRRRYTVQFTTMVQVNEETGNRRPVMLTLLRVPRLNKNSKNSNGQELEKTLEESKEMDIKRKENKGNDTPLALESTNTEKETSLEETKIGEILIQGLTEDMVTVLIRACVSMLGVPVDPDTLHATLRLCLRLTRDHKYAMMFAELKSTRMILNLTQSSGFNGFTPLVTLLLRHIIEDPCTLRHTMEKVVRSAATSGAGSTTSGVVSGSLGSREINYILRVLGPAACRNPDIFTEVANCCIRIALPAPRGSGTASDDEFENLRIKGPNAVQLVKTTPLKPSPLPVIPDTIKEVIYDMLNALAAYHAPEEADKSDPKPGVMTQEVGQLLQDMGDDVYQQYRSLTRQSSDFDTQSGFSINSQVFAADGASTETSASGTSQGEASTPEESRDGKKDKEGDRASEEGKQKGKGSKPLMPTSTILRLLAELVRSYVGIATLIANYSYTVGQSELIKEDCSVLAFVLDHLLPHTQNAEDKDTPALARLFLASLAAAGSGTDAQVALVNEVKAALGRALAMAESTEKHARLQAVMCIISTIMESCPSTSSFYSSATAKTQHNGMNNIIRLFLKKGLVNDLARVPHSLDLSSPNMANTVNAALKPLETLSRIVNQPSSLFGSKSASSKNKSEQDAQGASQDSSSNQQDPGEPGEAEVQEEDHDVTQTEVADGDIMDGEAETDSVVIAGQPEVLSSQEMQVENELEDLIDELLERDGGSGNSTIIVSRSGEDESQEDVLMDEAPSNLSQASTLQANREDSMNILDPEDEEEHTQEEDSSGSNEDEDDSQDEEEEEEEDEEDDQEDDEGEEGDEDDDDDGSEMELDEDYPDMNASPLVRFERFDREDDLIIEFDNMFSSATDIPPSPGNIPTTHPLMVRHADHSSLTLGSGSSTTRLTQGIGRSQRTLRQLTANTGHTIHVHYPGNRQPNPPLILQRLLGPSAAADILQLSSSLPLQSRGRARLLVGNDDVHIIARSDDELLDDFFHDQSTATSQAGTLSSIPTALTRWTEECKVLDAESMHDCVSVVKVSIVNHLEFLRDEELEERREKRRKQLAEEETKITDKGKEDKENRDQSAQCTASKSNDSTEQNLSDGTPMPDSYPTTPSSTDAATSESKETLGTLQSSQQQPTLPTPPALGEVPQELQSPAGEGGSSTQLLMPVEPEELGPTRPSGEAETTQMELSPAPTITSLSPERAEDSDALTAVSSQLEGSPMDTSSLASCTLEEAVGDTSAAGSSEQPRAGSSTPGDAPPAVAEVQGRSDGSGESAQPPEDSSPPASSESSSTRDSAVAISGADSRGILEEPLPSTSSEEEDPLAGISLPEGVDPSFLAALPDDIRREVLQNQLGIRPPTRTAPSTNSSAPAVVGNPGVTEVSPEFLAALPPAIQEEVLAQQRAEQQRRELAQNASSDTPMDPVTFIQTLPSDLRRSVLEDMEDSVLAVMPPDIAAEAQALRREQEARQRQLMHERLFGHSSTSALSAILRSPAFTSRLSGNRGVQYTRLAVQRGGTFQMGGSSSHNRPSGSNVDTLLRLRGRLLLDHEALSCLLVLLFVDEPKLNTSRLHRVLRNLCYHAQTRHWVIRSLLSILQRSSESELCIETPKLTTSEEKGKKSSKSCGSSSHENRPLDLLHKMESKSSNQLSWLSVSMDAALGCRTNIFQIQRSGGRKHTEKHASGGSTVHIHPQAAPVVCRHVLDTLIQLAKVFPSHFTQQRTKETNCESDRERGNKACSPCSSQSSSSGICTDFWDLLVKLDNMNVSRKGKNSVKSVPVSAGGEGETSPYSLEASPLGQLMNMLSHPVIRRSSLLTEKLLRLLSLISIALPFPCRP

SEQ ID NO: 921737 - protein, 1774 aa, Homo sapiens
ASNLGSAVDELMRHQPTLKTDATTAIIKLLEEICNLGRDPKYICQKPSIQKADGTATAPPPRSNHAAEEASSEDEEEEEVQAMQSFNSTQQNETEPNQQVVGTEERIPIPLMDYILNVMKFVESILSNNTTDDHCQEFVNQKGLLPLVTILGLPNLPIDFPTSAACQAVAGVCKSILTLSHEPKVLQEGLLQLDSILSSLEPLHRPIESPGGSVLLRELACAGNVADATLSAQATPLLHALTAAHAYIMMFVHTCRVGQSEIRSISVNQWGSQLGLSVLSKLSQLYCSLVWESTVLLSLCTPNSLPSGCEFGQADMQKLVPKDEKAGTTQGGKRSDGEQDGAAGSMDASTQGLLEGIGLDGDTLAPMETDEPTASDSKGKSKITPAMAARIKQIKPLLSASSRLGRALAELFGLLVKLCVGSPVRQRRSHHAASTTTAPTPAARSTASALTKLLTKGLSWQPPPYTPTPRFRLTFFICSVGFTSPMLFDERKYPYHLMLQKFLCSGGHNALFETFNWALSMGGKVPVSEGLEHSDLPDGTGEFLDAWLMLVEKMVNPTTVLESPHSLPAKLPGGVQNFPQFSALRFLVVTQKAAFTCIKNLWNRKPLKVYGGRMAESMLAILCHILRGEPVIRERLSKEKEGSRGEEDTGQEEGGSRREPQVNQQQLQQLMDMGFTREHAMEALLNTSTMEQATEYLLTHPPPIMGGVVRDLSMSEEDQMMRAIAMSLGQDIPMDQRAESPEEVACRKEEEERKAREKQEEEEAKCLEKFQDADPLEQDELHTFTDTMLPGCFHLLDELPDTVYRVCDLIMTAIKRNGADYRDMILKQVVNQVWEAADVLIKAALPLTTSDTKTVSEWISQMATLPQASNLATRILLLTLLFEELKLPCAWVVESSGILNVLIKLLEVVQPCLQAAKEQKEVQTPKWITPVLLLIDFYEKTAISSKRRAQMTKYLQSNSNNWRWFDDRSGRWCSYSASNNSTIDSAWKSGETSVRFTAGRRRYTVQFTTMVQVNEETGNRRPVMLTLLRVPRLNKNSKNSNGQELEKTLEESKEMDIKRKENKGNDTPLALESTNTEKETSLEETKIGEILIQGLTEDMVTVLIRACVSMLGVPVDPDTLHATLRLCLRLTRDHKYAMMFAELKSTRMILNLTQSSGFNGFTPLVTLLLRHIIEDPCTLRHTMEKVVRSAATSGAGSTTSGVVSGSLGSREINYILRVLGPAACRNPDIFTEVANCCIRIALPAPRGSGTASDDEFENLRIKGPNAVQLVKTTPLKPSPLPVIPDTIKEVIYDMLNALAAYHAPEEADKSDPKPGVMTQEVGQLLQDMGDDVYQQYRSLTRQSSDFDTQSGFSINSQVFAADGASTETSASGTSQGEASTPEESRDGKKDKEGDRASEEGKQKGKGSKPLMPTSTILRLLAELVRSYVGIATLIANYSYTVGQSELIKEDCSVLAFVLDHLLPHTQNAEDKDTPALARLFLASLAAAGSGTDAQVALVNEVKAALGRALAMAESTEKHARLQAVMCIISTIMESCPSTSSFYSSATAKTQHNGMNNIIRLFLKKGLVNDLARVPHSLDLSSPNMANTVNAALKPLETLSRIVNQPSSLFGSKSASSKNKSEQDAQGASQDSSSNQQDPGEPGEAEVQEEDHDVTQTEVADGDIMDGEAETDSVVIAGQPEVLSSQEMQVENELEDLIDELLERDGGSGNSTIIVSRSGEDESQEDVLMDEAPSNLSQASTLQANREDSMNILDPEDEEEHTQEEDSSRREEEAG

SEQ ID NO: 921738 - protein, 1860 aa, Homo sapiens
ASNLGSAVDELMRHQPTLKTDATTAIIKLLEEICNLGRDPKYICQKPSIQKADGTATAPPPRSNHAAEEASSEDEEEEEVQAMQSFNSTQQNETEPNQQVVGTEERIPIPLMDYILNVMKFVESILSNNTTDDHCQEFVNQKGLLPLVTILGLPNLPIDFPTSAACQAVAGVCKSILTLSHEPKVLQEGLLQLDSILSSLEPLHRPIESPGGSVLLRELACAGNVADATLSAQATPLLHALTAAHAYIMMFVHTCRVGQSEIRSISVNQWGSQLGLSVLSKLSQLYCSLVWESTVLLSLCTPNSLPSGCEFGQADMQKLVPKDEKAGTTQGGKRSDGEQDGAAGSMDASTQGLLEGIGLDGDTLAPMETDEPTASDSKGKSKITPAMAARIKQIKPLLSASSRLGRALAELFGLLVKLCVGSPVRQRRSHHAASTTTAPTPAARSTASALTKLLTKGLSWQPPPYTPTPRFRLTFFICSVGFTSPMLFDERKYPYHLMLQKFLCSGGHNALFETFNWALSMGGKVPVSEGLEHSDLPDGTGEFLDAWLMLVEKMVNPTTVLESPHSLPAKLPGGVQNFPQFSALRFLVVTQKAAFTCIKNLWNRKPLKVYGGRMAESMLAILCHILRGEPVIRERLSKEKEGSRGEEDTGQEEGGSRREPQVNQQQLQQLMDMGFTREHAMEALLNTSTMEQATEYLLTHPPPIMGGVVRDLSMSEEDQMMRAIAMSLGQDIPMDQRAESPEEVACRKEEEERKAREKQEEEEAKCLEKFQDADPLEQDELHTFTDTMLPGCFHLLDELPDTVYRVCDLIMTAIKRNGADYRDMILKQVVNQVWEAADVLIKAALPLTTSDTKTVSEWISQMATLPQASNLATRILLLTLLFEELKLPCAWVVESSGILNVLIKLLEVVQPCLQAAKEQKEVQTPKWITPVLLLIDFYEKTAISSKRRAQMTKYLQSNSNNWRWFDDRSGRWCSYSASNNSTIDSAWKSGETSVRFTAGRRRYTVQFTTMVQVNEETGNRRPVMLTLLRVPRLNKNSKNSNGQELEKTLEESKEMDIKRKENKGNDTPLALESTNTEKETSLEETKIGEILIQGLTEDMVTVLIRACVSMLGVPVDPDTLHATLRLCLRLTRDHKYAMMFAELKSTRMILNLTQSSGFNGFTPLVTLLLRHIIEDPCTLRHTMEKVVRSAATSGAGSTTSGVVSGSLGSREINYILRVLGPAACRNPDIFTEVANCCIRIALPAPRGSGTASDDEFENLRIKGPNAVQLVKTTPLKPSPLPVIPDTIKEVIYDMLNALAAYHAPEEADKSDPKPGVMTQEVGQLLQDMGDDVYQQYRSLTRQSSDFDTQSGFSINSQVFAADGASTETSASGTSQGEASTPEESRDGKKDKEGDRASEEGKQKGKGSKPLMPTSTILRLLAELVRSYVGIATLIANYSYTVGQSELIKEDCSVLAFVLDHLLPHTQNAEDKDTPALARLFLASLAAAGSGTDAQVALVNEVKAALGRALAMAESTEKHARLQAVMCIISTIMESCPSTSSFYSSATAKTQHNGMNNIIRLFLKKGLVNDLARVPHSLDLSSPNMANTVNAALKPLETLSRIVNQPSSLFGSKSASSKNKSEQDAQGASQDSSSNQQDPGEPGEAEVQEEDHDVTQTEVADGDIMDGEAETDSVVIAGQPEVLSSQEMQVENELEDLIDELLERDGGSGNSTIIVSRSGEDESQEDVLMDEAPSNLSQASTLQANREDSMNILDPEDEEEHTQEEDSSGSNEDEDDNPPTHRVCPSCPIFPSAYLFLFSFSPRRLFPHLLSPFHAVHDPHPMCFKKAVAFAGTCLSQLFEQCAPQILCSEGFAALRLETFG

SEQ ID NO: 921739 - protein, 1987 aa, Homo sapiens
ASNLGSAVDELMRHQPTLKTDATTAIIKLLEEICNLGRDPKYICQKPSIQKADGTATAPPPRSNHAAEEASSEDEEEEEVQAMQSFNSTQQNETEPNQQVVGTEERIPIPLMDYILNVMKFVESILSNNTTDDHCQEFVNQKGLLPLVTILGLPNLPIDFPTSAACQAVAGVCKSILTLSHEPKVLQEGLLQLDSILSSLEPLHRPIESPGGSVLLRELACAGNVADATLSAQATPLLHALTAAHAYIMMFVHTCRVGQSEIRSISVNQWGSQLGLSVLSKLSQLYCSLVWESTVLLSLCTPNSLPSGCEFGQADMQKLVPKDEKAGTTQGGKRSDGEQDGAAGSMDASTQGLLEGIGLDGDTLAPMETDEPTASDSKGKSKITPAMAARIKQIKPLLSASSRLGRALAELFGLLVKLCVGSPVRQRRSHHAASTTTAPTPAARSTASALTKLLTKGLSWQPPPYTPTPRFRLTFFICSVGFTSPMLFDERKYPYHLMLQKFLCSGGHNALFETFNWALSMGGKVPVSEGLEHSDLPDGTGEFLDAWLMLVEKMVNPTTVLESPHSLPAKLPGGVQNFPQFSALRFLVVTQKAAFTCIKNLWNRKPLKVYGGRMAESMLAILCHILRGEPVIRERLSKEKEGSRGEEDTGQEEGGSRREPQVNQQQLQQLMDMGFTREHAMEALLNTSTMEQATEYLLTHPPPIMGGVVRDLSMSEEDQMMRAIAMSLGQDIPMDQRAESPEEVACRKEEEERKAREKQEEEEAKCLEKFQDADPLEQDELHTFTDTMLPGCFHLLDELPDTVYRVCDLIMTAIKRNGADYRDMILKQVVNQVWEAADVLIKAALPLTTSDTKTVSEWISQMATLPQASNLATRILLLTLLFEELKLPCAWVVESSGILNVLIKLLEVVQPCLQAAKEQKEVQTPKWITPVLLLIDFYEKTAISSKRRAQMTKYLQSNSNNWRWFDDRSGRWCSYSASNNSTIDSAWKSGETSVRFTAGRRRYTVQFTTMVQVNEETGNRRPVMLTLLRVPRLNKNSKNSNGQELEKTLEESKEMDIKRKENKGNDTPLALESTNTEKETSLEETKIGEILIQGLTEDMVTVLIRACVSMLGVPVDPDTLHATLRLCLRLTRDHKYAMMFAELKSTRMILNLTQSSGFNGFTPLVTLLLRHIIEDPCTLRHTMEKVVRSAATSGAGSTTSGVVSGSLGSREINYILRVLGPAACRNPDIFTEVANCCIRIALPAPRGSGTASDDEFENLRIKGPNAVQLVKTTPLKPSPLPVIPDTIKEVIYDMLNALAAYHAPEEADKSDPKPGVMTQEVGQLLQDMGDDVYQQYRSLTRQSSDFDTQSGFSINSQVFAADGASTETSASGTSQGEASTPEESRDGKKDKEGDRASEEGKQKGKGSKPLMPTSTILRLLAELVRSYVGIATLIANYSYTVGQSELIKEDCSVLAFVLDHLLPHTQNAEDKDTPALARLFLASLAAAGSGTDAQVALVNEVKAALGRALAMAESTEKHARLQAVMCIISTIMESCPSTSSFYSSATAKTQHNGMNNIIRLFLKKGLVNDLARVPHSLDLSSPNMANTVNAALKPLETLSRIVNQPSSLFGSKSASSKNKSEQDAQGASQDSSSNQQDPGEPGEAEVQEEDHDVTQTEVADGDIMDGEAETDSVVIAGQPEVLSSQEMQVENELEDLIDELLERDGGSGNSTIIVSRSGEDESQEDVLMDEAPSNLSQASTLQANREDSMNILDPEDEEEHTQEEDSSGSNEDEDDSQDEEEEEEEDEEDDQEDDEGEEGDEDDDDDGSEMELDEDYPDMNASPLVRFERFDREDDLIIEFDNMFSSATDIPPSPGNIPTTHPLMVRHADHSSLTLGSGSSTTRLTQGIGRSQRTLRQLTANTGHTIHVHYPGNRQPNPPLILQRLLGPSAAADILQLSSSLPLQSRGRARLLVGNDDVHIIARSDDELLDDFFHDQSTATSQAAKYK

SEQ ID NO: 921740 - protein, 538 aa, Homo sapiens
ASNLGSAVDELMRHQPTLKTDATTAIIKLLEEICNLGRDPKYICQKPSIQKADGTATAPPPRSNHAAEEASSEDEEEEEVQAMQSFNSTQQNETEPNQQVVGTEERIPIPLMDYILNVMKFVESILSNNTTDDHCQEFVNQKGLLPLVTILGLPNLPIDFPTSAACQAVAGVCKSILTLSHEPKVLQEGLLQLDSILSSLEPLHRPIESPGGSVLLRELACAGNVADATLSAQATPLLHALTAAHAYIMMFVHTCRVGQSEIRSISVNQWGSQLGLSVLSKLSQLYCSLVWESTVLLSLCTPNSLPSGCEFGQADMQKLVPKDEKAGTTQGGKRSDGEQDGAAGSMDASTQGLLEGIGLDGDTLAPMETDEPTASDSKGKSKITPAMAARIKQIKPLLSASSRLGRALAELFGLLVKLCVGSPVRQRRSHHAASTTTAPTPAARSTASALTKLLTKGLSWQPPPYTPTPRFRLTFFICSVGFTSPMLFDERKYPYHLMLQKFLCSGGHNALFDFVRVSFSQVREFEMGGVQEFPWHVY

SEQ ID NO: 921741 - protein, 295 aa, Homo sapiens
  misc_feature (264)..(265): Xaa can be any naturally occurring amino acid
  misc_feature (274)..(274): Xaa can be any naturally occurring amino acid
  misc_feature (288)..(288): Xaa can be any naturally occurring amino acid
ASNLGSAVDELMRHQPTLKTDATTAIIKLLEEICNLGRDPKYICQKPSIQKADGTATAPPPRSNHAAEEASSEDEEEEEVQAMQSFNSTQQNETEPNQQVVGTEERIPIPLMDYILNVMKFVESILSNNTTDDHCQEFVNQKGLLPLVTILGLPNLPIDFPTSAACQAVAGVCKSILTLSHEPKVLQEGLLQLDSILSSLEPLHRPIESPGGSVLLRELACAGNVADATLSAQATPLLHALTAAHAYIMMFVHTCRVGQSEIRXXPLKISNPGXSMLNEMNVDTKQQXLYEDVKC

SEQ ID NO: 921742 - protein, 127 aa, Homo sapiens
ASNLGSAVDELMRHQPTLKTDATTAIIKLLEEICNLGRDPKYICQKPSIQKADGTATAPPPRSNHAAEEASSEDEEEEEVQAMQSFNSTQQNETEPNQQVVGTEERIPIPLMDYILNVVRFNTGQTE

SEQ ID NO: 921743 - protein, 304 aa, Homo sapiens
ASNLGSAVDELMRHQPTLKTDATTAIIKLLEEICNLGRDPKYICQKPSIQKADGTATAPPPRSNHAAEEASSEDEEEEEVQAMQSFNSTQQNETEPNQQVVGTEERIPIPLMDYILNVMKFVESILSNNTTDDHCQEFVNQKGLLPLVTILGLPNLPIDFPTSAACQAVAGVCKSILTLSHEPKVLQEGLLQLDSILSSLEPLHRPIESPGGSVLLRELACAGNVADATLSAQATPLLHALTAAHAYIMMFVHTCRVGQSEIRSISVNQWGSQLGLSVLSKLSQLYCSLVWESTVLLSLCTPNR

SEQ ID NO: 921744 - protein, 341 aa, Homo sapiens
ASNLGSAVDELMRHQPTLKTDATTAIIKLLEEICNLGRDPKYICQKPSIQKADGTATAPPPRSNHAAEEASSEDEEEEEVQAMQSFNSTQQNETEPNQQVVGTEERIPIPLMDYILNVMKFVESILSNNTTDDHCQEFVNQKGLLPLVTILGLPNLPIDFPTSAACQAVAGVCKSILTLSHEPKVLQEGLLQLDSILSSLEPLHRPIESPGGSVLLRELACAGNVADATLSAQATPLLHALTAAHAYIMMFVHTCRVGQSEIRSISVNQWGSQLGLSVLSKLSQLYCSLVWESTVLLSLCTPNSLPSGCEFGQADMQKLVPKDEKAGTTQGGKRSDKEQAL

SEQ ID NO: 921745 - protein, 1261 aa, Homo sapiens
ASNLGSAVDELMRHQPTLKTDATTAIIKLLEEICNLGRDPKYICQKPSIQKADGTATAPPPRSNHAAEEASSEDEEEEEVQAMQSFNSTQQNETEPNQQVVGTEERIPIPLMDYILNVMKFVESILSNNTTDDHCQEFVNQKGLLPLVTILGLPNLPIDFPTSAACQAVAGVCKSILTLSHEPKVLQEGLLQLDSILSSLEPLHRPIESPGGSVLLRELACAGNVADATLSAQATPLLHALTAAHAYIMMFVHTCRVGQSEIRSISVNQWGSQLGLSVLSKLSQLYCSLVWESTVLLSLCTPNSLPSGCEFGQADMQKLVPKDEKAGTTQGGKRSDGEQDGAAGSMDASTQGLLEGIGLDGDTLAPMETDEPTASDSKGKSKITPAMAARIKQIKPLLSASSRLGRALAELFGLLVKLCVGSPVRQRRSHHAASTTTAPTPAARSTASALTKLLTKGLSWQPPPYTPTPRFRLTFFICSVGFTSPMLFDERKYPYHLMLQKFLCSGGHNALFETFNWALSMGGKVPVSEGLEHSDLPDGTGEFLDAWLMLVEKMVNPTTVLESPHSLPAKLPGGVQNFPQFSALRFLVVTQKAAFTCIKNLWNRKPLKVYGGRMAESMLAILCHILRGEPVIRERLSKEKEGSRGEEDTGQEEGGSRREPQVNQQQLQQLMDMGFTREHAMEALLNTSTMEQATEYLLTHPPPIMGGVVRDLSMSEEDQMMRAIAMSLGQDIPMDQRAESPEEVACRKEEEERKAREKQEEEEAKCLEKFQDADPLEQDELHTFTDTMLPGCFHLLDELPDTVYRVCDLIMTAIKRNGADYRDMILKQVVNQVWEAADVLIKAALPLTTSDTKTVSEWISQMATLPQASNLATRILLLTLLFEELKLPCAWVVESSGILNVLIKLLEVVQPCLQAAKEQKEVQTPKWITPVLLLIDFYEKTAISSKRRAQMTKYLQSNSNNWRWFDDRSGRWCSYSASNNSTIDSAWKSGETSVRFTAGRRRYTVQFTTMVQVNEETGNRRPVMLTLLRVPRLNKNSKNSNGQELEKTLEESKEMDIKRKENKGNDTPLALESTNTEKETSLEETKIGEILIQGLTEDMVTVLIRACVSMLGVPVDPDTLHATLRLCLRLTRDHKYAMMFAELKSTRMILNLTQSSGFNGFTPLVTLLLRHIIEDPCTLRHTMEKVVRSAATSGAGSTTSGVVSGSLGSREINYILRVLGPAACRNPDIFTEVANCCIRIALPAPRGSGTGKFRLLLALGY

SEQ ID NO: 921746 - protein, 1854 aa, Homo sapiens
ASNLGSAVDELMRHQPTLKTDATTAIIKLLEEICNLGRDPKYICQKPSIQKADGTATAPPPRSNHAAEEASSEDEEEEEVQAMQSFNSTQQNETEPNQQVVGTEERIPIPLMDYILNVMKFVESILSNNTTDDHCQEFVNQKGLLPLVTILGLPNLPIDFPTSAACQAVAGVCKSILTLSHEPKVLQEGLLQLDSILSSLEPLHRPIESPGGSVLLRELACAGNVADATLSAQATPLLHALTAAHAYIMMFVHTCRVGQSEIRSISVNQWGSQLGLSVLSKLSQLYCSLVWESTVLLSLCTPNSLPSGCEFGQADMQKLVPKDEKAGTTQGGKRSDGEQDGAAGSMDASTQGLLEGIGLDGDTLAPMETDEPTASDSKGKSKITPAMAARIKQIKPLLSASSRLGRALAELFGLLVKLCVGSPVRQRRSHHAASTTTAPTPAARSTASALTKLLTKGLSWQPPPYTPTPRFRLTFFICSVGFTSPMLFDERKYPYHLMLQKFLCSGGHNALFETFNWALSMGGKVPVSEGLEHSDLPDGTGEFLDAWLMLVEKMVNPTTVLESPHSLPAKLPGGVQNFPQFSALRFLVVTQKAAFTCIKNLWNRKPLKVYGGRMAESMLAILCHILRGEPVIRERLSKEKEGSRGEEDTGQEEGGSRREPQVNQQQLQQLMDMGFTREHAMEALLNTSTMEQATEYLLTHPPPIMGGVVRDLSMSEEDQMMRAIAMSLGQDIPMDQRAESPEEVACRKEEEERKAREKQEEEEAKCLEKFQDADPLEQDELHTFTDTMLPGCFHLLDELPDTVYRVCDLIMTAIKRNGADYRDMILKQVVNQVWEAADVLIKAALPLTTSDTKTVSEWISQMATLPQASNLATRILLLTLLFEELKLPCAWVVESSGILNVLIKLLEVVQPCLQAAKEQKEVQTPKWITPVLLLIDFYEKTAISSKRRAQMTKYLQSNSNNWRWFDDRSGRWCSYSASNNSTIDSAWKSGETSVRFTAGRRRYTVQFTTMVQVNEETGNRRPVMLTLLRVPRLNKNSKNSNGQELEKTLEESKEMDIKRKENKGNDTPLALESTNTEKETSLEETKIGEILIQGLTEDMVTVLIRACVSMLGVPVDPDTLHATLRLCLRLTRDHKYAMMFAELKSTRMILNLTQSSGFNGFTPLVTLLLRHIIEDPCTLRHTMEKVVRSAATSGAGSTTSGVVSGSLGSREINYILRVLGPAACRNPDIFTEVANCCIRIALPAPRGSGTASDDEFENLRIKGPNAVQLVKTTPLKPSPLPVIPDTIKEVIYDMLNALAAYHAPEEADKSDPKPGVMTQEVGQLLQDMGDDVYQQYRSLTRQSSDFDTQSGFSINSQVFAADGASTETSASGTSQGEASTPEESRDGKKDKEGDRASEEGKQKGKGSKPLMPTSTILRLLAELVRSYVGIATLIANYSYTVGQSELIKEDCSVLAFVLDHLLPHTQNAEDKDTPALARLFLASLAAAGSGTDAQVALVNEVKAALGRALAMAESTEKHARLQAVMCIISTIMESCPSTSSFYSSATAKTQHNGMNNIIRLFLKKGLVNDLARVPHSLDLSSPNMANTVNAALKPLETLSRIVNQPSSLFGSKSASSKNKSEQDAQGASQDSSSNQQDPGEPGEAEVQEEDHDVTQTEVADGDIMDGEAETDSVVIAGQPEVLSSQEMQVENELEDLIDELLERDGGSGNSTIIVSRSGEDESQEDVLMDEAPSNLSQASTLQANREDSMNILDPEDEEEHTQEEDSSGSNEDEDDSQDEEEEEEEDEEDDQEDDEGEEGDEDDDDDGSEMELDEDYPDMNASPLVRFERFDREDDLILSPPPVSSPSLPFPCRP

SEQ ID NO: 921747 - protein, 194 aa, Homo sapiens
KYTPKTVVIYSFGHNASDKLEVAEVVGVAVGRWIDGVVTRSPGEVRNKAYIGLNISREMINTTEQELELLISGLPTIDIDDLKSNTEYHKYQSNSIQIQWFWRALRSFDQADRAKFLQFVTGTSKVPLQGFAALEGMNGIQKFQIHRDDRSTDRLPSAHTCFNQLDLPAYESFEKLRHMLLLAIQECSEGFGLA

SEQ ID NO: 921748 - protein, 2852 aa, Homo sapiens
ASNLGSAVDELMRHQPTLKTDATTAIIKLLEEICNLGRDPKYICQKPSIQKADGTATAPPPRSNHAAEEASSEDEEEEEVQAMQSFNSTQQNETEPNQQVVGTEERIPIPLMDYILNVMKFVESILSNNTTDDHCQEFVNQKGLLPLVTILGLPNLPIDFPTSAACQAVAGVCKSILTLSHEPKVLQEGLLQLDSILSSLEPLHRPIESPGGSVLLRELACAGNVADATLSAQATPLLHALTAAHAYIMMFVHTCRVGQSEIRSISVNQWGSQLGLSVLSKLSQLYCSLVWESTVLLSLCTPNSLPSGCEFGQADMQKLVPKDEKAGTTQGGKRSDGEQDGAAGSMDASTQGLLEGIGLDGDTLAPMETDEPTASDSKGKSKITPAMAARIKQIKPLLSASSRLGRALAELFGLLVKLCVGSPVRQRRSHHAASTTTAPTPAARSTASALTKLLTKGLSWQPPPYTPTPRFRLTFFICSVGFTSPMLFDERKYPYHLMLQKFLCSGGHNALFETFNWALSMGGKVPVSEGLEHSDLPDGTGEFLDAWLMLVEKMVNPTTVLESPHSLPAKLPGGVQNFPQFSALRFLVVTQKAAFTCIKNLWNRKPLKVYGGRMAESMLAILCHILRGEPVIRERLSKEKEGSRGEEDTGQEEGGSRREPQVNQQQLQQLMDMGFTREHAMEALLNTSTMEQATEYLLTHPPPIMGGVVRDLSMSEEDQMMRAIAMSLGQDIPMDQRAESPEEVACRKEEEERKAREKQEEEEAKCLEKFQDADPLEQDELHTFTDTMLPGCFHLLDELPDTVYRVCDLIMTAIKRNGADYRDMILKQVVNQVWEAADVLIKAALPLTTSDTKTVSEWISQMATLPQASNLATRILLLTLLFEELKLPCAWVVESSGILNVLIKLLEVVQPCLQAAKEQKEVQTPKWITPVLLLIDFYEKTAISSKRRAQMTKYLQSNSNNWRWFDDRSGRWCSYSASNNSTIDSAWKSGETSVRFTAGRRRYTVQFTTMVQVNEETGNRRPVMLTLLRVPRLNKNSKNSNGQELEKTLEESKEMDIKRKENKGNDTPLALESTNTEKETSLEETKIGEILIQGLTEDMVTVLIRACVSMLGVPVDPDTLHATLRLCLRLTRDHKYAMMFAELKSTRMILNLTQSSGFNGFTPLVTLLLRHIIEDPCTLRHTMEKVVRSAATSGAGSTTSGVVSGSLGSREINYILRVLGPAACRNPDIFTEVANCCIRIALPAPRGSGTASDDEFENLRIKGPNAVQLVKTTPLKPSPLPVIPDTIKEVIYDMLNALAAYHAPEEADKSDPKPGVMTQEVGQLLQDMGDDVYQQYRSLTRQSSDFDTQSGFSINSQVFAADGASTETSASGTSQGEASTPEESRDGKKDKEGDRASEEGKQKGKGSKPLMPTSTILRLLAELVRSYVGIATLIANYSYTVGQSELIKEDCSVLAFVLDHLLPHTQNAEDKDTPALARLFLASLAAAGSGTDAQVALVNEVKAALGRALAMAESTEKHARLQAVMCIISTIMESCPSTSSFYSSATAKTQHNGMNNIIRLFLKKGLVNDLARVPHSLDLSSPNMANTVNAALKPLETLSRIVNQPSSLFGSKSASSKNKSEQDAQGASQDSSSNQQDPGEPGEAEVQEEDHDVTQTEVADGDIMDGEAETDSVVIAGQPEVLSSQEMQVENELEDLIDELLERDGGSGNSTIIVSRSGEDESQEDVLMDEAPSNLSQASTLQANREDSMNILDPEDEEEHTQEEDSSGSNEDEDDSQDEEEEEEEDEEDDQEDDEGEEGDEDDDDDGSEMELDEDYPDMNASPLVRFERFDREDDLIIEFDNMFSSATDIPPSPGNIPTTHPLMVRHADHSSLTLGSGSSTTRLTQGIGRSQRTLRQLTANTGHTIHVHYPGNRQPNPPLILQRLLGPSAAADILQLSSSLPLQSRGRARLLVGNDDVHIIARSDDELLDDFFHDQSTATSQAGTLSSIPTALTRWTEECKVLDAESMHDCVSVVKVSIVNHLEFLRDEELEERREKRRKQLAEEETKITDKGKEDKENRDQSAQCTASKSNDSTEQNLSDGTPMPDSYPTTPSSTDAATSESKETLGTLQSSQQQPTLPTPPALGEVPQELQSPAGEGGSSTQLLMPVEPEELGPTRPSGEAETTQMELSPAPTITSLSPERAEDSDALTAVSSQLEGSPMDTSSLASCTLEEAVGDTSAAGSSEQPRAGSSTPGDAPPAVAEVQGRSDGSGESAQPPEDSSPPASSESSSTRDSAVAISGADSRGILEEPLPSTSSEEEDPLAGISLPEGVDPSFLAALPDDIRREVLQNQLGIRPPTRTAPSTNSSAPAVVGNPGVTEVSPEFLAALPPAIQEEVLAQQRAEQQRRELAQNASSDTPMDPVTFIQTLPSDLRRSVLEDMEDSVLAVMPPDIAAEAQALRREQEARQRQLMHERLFGHSSTSALSAILRSPAFTSRLSGNRGVQYTRLAVQRGGTFQMGGSSSHNRPSGSNVDTLLRLRGRLLLDHEALSCLLVLLFVDEPKLNTSRLHRVLRNLCYHAQTRHWVIRSLLSILQRSSESELCIETPKLTTSEEKGKKSSKSCGSSSHENRPLDLLHKMESKSSNQLSWLSVSMDAALGCRTNIFQIQRSGGRKHTEKHASGGSTVHIHPQAAPVVCRHVLDTLIQLAKVFPSHFTQQRTKETNCESDRERGNKACSPCSSQSSSSGICTDFWDLLVKLDNMNVSRKGKNSVKSVPVSAGGEGETSPYSLEASPLGQLMNMLSHPVIRRSSLLTEKLLRLLSLISIALPENKVSEAQANSGSGASSTTTATSTTSTTTTTAASSLLSAART

SEQ ID NO: 921749 - protein, 213 aa, Homo sapiens
AGWYAPEVRDLTFSTEVQEFGVCEVRDLKPNGANILVTEENKKEYVHLVCQMRMTGAIRKQLAAFLEGFYEIIPKRLISIFTEQELELLISGLPTIDIDDLKSNTEYHKYQSNSIQIQWFWRALRSFDQADRAKFLQFVTGTSKVPLQGFAALEGMNGIQKFQIHRDDRSTDRLPSAHTCFNQLDLPAYESFEKLRHMLLLAIQECSEGFGLA

SEQ ID NO: 921750 - protein, 3183 aa, Homo sapiens
ASNLGSAVDELMRHQPTLKTDATTAIIKLLEEICNLGRDPKYICQKPSIQKADGTATAPPPRSNHAAEEASSEDEEEEEVQAMQSFNSTQQNETEPNQQVVGTEERIPIPLMDYILNVMKFVESILSNNTTDDHCQEFVNQKGLLPLVTILGLPNLPIDFPTSAACQAVAGVCKSILTLSHEPKVLQEGLLQLDSILSSLEPLHRPIESPGGSVLLRELACAGNVADATLSAQATPLLHALTAAHAYIMMFVHTCRVGQSEIRSISVNQWGSQLGLSVLSKLSQLYCSLVWESTVLLSLCTPNSLPSGCEFGQADMQKLVPKDEKAGTTQGGKRSDGEQDGAAGSMDASTQGLLEGIGLDGDTLAPMETDEPTASDSKGKSKITPAMAARIKQIKPLLSASSRLGRALAELFGLLVKLCVGSPVRQRRSHHAASTTTAPTPAARSTASALTKLLTKGLSWQPPPYTPTPRFRLTFFICSVGFTSPMLFDERKYPYHLMLQKFLCSGGHNALFETFNWALSMGGKVPVSEGLEHSDLPDGTGEFLDAWLMLVEKMVNPTTVLESPHSLPAKLPGGVQNFPQFSALRFLVVTQKAAFTCIKNLWNRKPLKVYGGRMAESMLAILCHILRGEPVIRERLSKEKEGSRGEEDTGQEEGGSRREPQVNQQQLQQLMDMGFTREHAMEALLNTSTMEQATEYLLTHPPPIMGGVVRDLSMSEEDQMMRAIAMSLGQDIPMDQRAESPEEVACRKEEEERKAREKQEEEEAKCLEKFQDADPLEQDELHTFTDTMLPGCFHLLDELPDTVYRVCDLIMTAIKRNGADYRDMILKQVVNQVWEAADVLIKAALPLTTSDTKTVSEWISQMATLPQASNLATRILLLTLLFEELKLPCAWVVESSGILNVLIKLLEVVQPCLQAAKEQKEVQTPKWITPVLLLIDFYEKTAISSKRRAQMTKYLQSNSNNWRWFDDRSGRWCSYSASNNSTIDSAWKSGETSVRFTAGRRRYTVQFTTMVQVNEETGNRRPVMLTLLRVPRLNKNSKNSNGQELEKTLEESKEMDIKRKENKGNDTPLALESTNTEKETSLEETKIGEILIQGLTEDMVTVLIRACVSMLGVPVDPDTLHATLRLCLRLTRDHKYAMMFAELKSTRMILNLTQSSGFNGFTPLVTLLLRHIIEDPCTLRHTMEKVVRSAATSGAGSTTSGVVSGSLGSREINYILRVLGPAACRNPDIFTEVANCCIRIALPAPRGSGTASDDEFENLRIKGPNAVQLVKTTPLKPSPLPVIPDTIKEVIYDMLNALAAYHAPEEADKSDPKPGVMTQEVGQLLQDMGDDVYQQYRSLTRQSSDFDTQSGFSINSQVFAADGASTETSASGTSQGEASTPEESRDGKKDKEGDRASEEGKQKGKGSKPLMPTSTILRLLAELVRSYVGIATLIANYSYTVGQSELIKEDCSVLAFVLDHLLPHTQNAEDKDTPALARLFLASLAAAGSGTDAQVALVNEVKAALGRALAMAESTEKHARLQAVMCIISTIMESCPSTSSFYSSATAKTQHNGMNNIIRLFLKKGLVNDLARVPHSLDLSSPNMANTVNAALKPLETLSRIVNQPSSLFGSKSASSKNKSEQDAQGASQDSSSNQQDPGEPGEAEVQEEDHDVTQTEVADGDIMDGEAETDSVVIAGQPEVLSSQEMQVENELEDLIDELLERDGGSGNSTIIVSRSGEDESQEDVLMDEAPSNLSQASTLQANREDSMNILDPEDEEEHTQEEDSSGSNEDEDDSQDEEEEEEEDEEDDQEDDEGEEGDEDDDDDGSEMELDEDYPDMNASPLVRFERFDREDDLIIEFDNMFSSATDIPPSPGNIPTTHPLMVRHADHSSLTLGSGSSTTRLTQGIGRSQRTLRQLTANTGHTIHVHYPGNRQPNPPLILQRLLGPSAAADILQLSSSLPLQSRGRARLLVGNDDVHIIARSDDELLDDFFHDQSTATSQAGTLSSIPTALTRWTEECKVLDAESMHDCVSVVKVSIVNHLEFLRDEELEERREKRRKQLAEEETKITDKGKEDKENRDQSAQCTASKSNDSTEQNLSDGTPMPDSYPTTPSSTDAATSESKETLGTLQSSQQQPTLPTPPALGEVPQELQSPAGEGGSSTQLLMPVEPEELGPTRPSGEAETTQMELSPAPTITSLSPERAEDSDALTAVSSQLEGSPMDTSSLASCTLEEAVGDTSAAGSSEQPRAGSSTPGDAPPAVAEVQGRSDGSGESAQPPEDSSPPASSESSSTRDSAVAISGADSRGILEEPLPSTSSEEEDPLAGISLPEGVDPSFLAALPDDIRREVLQNQLGIRPPTRTAPSTNSSAPAVVGNPGVTEVSPEFLAALPPAIQEEVLAQQRAEQQRRELAQNASSDTPMDPVTFIQTLPSDLRRSVLEDMEDSVLAVMPPDIAAEAQALRREQEARQRQLMHERLFGHSSTSALSAILRSPAFTSRLSGNRGVQYTRLAVQRGGTFQMGGSSSHNRPSGSNVDTLLRLRGRLLLDHEALSCLLVLLFVDEPKLNTSRLHRVLRNLCYHAQTRHWVIRSLLSILQRSSESELCIETPKLTTSEEKGKKSSKSCGSSSHENRPLDLLHKMESKSSNQLSWLSVSMDAALGCRTNIFQIQRSGGRKHTEKHASGGSTVHIHPQAAPVVCRHVLDTLIQLAKVFPSHFTQQRTKETNCESDRERGNKACSPCSSQSSSSGICTDFWDLLVKLDNMNVSRKGKNSVKSVPVSAGGEGETSPYSLEASPLGQLMNMLSHPVIRRSSLLTEKLLRLLSLISIALPENKVSEAQANSGSGASSTTTATSTTSTTTTTAASTTPTPPTAPTPVTSAPALVAATAISTIVVAASTTVTTPTTATTTVSISPTTKGSKSPAKVSDGGSSSTDFKMVSSGLTENQLQLSVEVLTSHSCSEEGLEDAANVLLQLSRGDSGTRDTVLKLLLNGARHLGYTLCKQIGTLLAELREYNLEQQRRAQCETLSPDGLPEEQPQTTKLKGKMQSRFDMAENVVIVASQKRPLGGRELQLPSMSMLTSKTSTQKFFLRVLQVIIQLRDDTRRANKKAKQTGRLGSSGLGSASSIQAAVRQLEAEADAIIQMVREGQRARRQQQAATSESSQSEASVRREESPMDVDQPSPSAQDTQSIGQYYFLFPAEQKG

SEQ ID NO: 921751 - protein, 3354 aa, Homo sapiens
ASNLGSAVDELMRHQPTLKTDATTAIIKLLEEICNLGRDPKYICQKPSIQKADGTATAPPPRSNHAAEEASSEDEEEEEVQAMQSFNSTQQNETEPNQQVVGTEERIPIPLMDYILNVMKFVESILSNNTTDDHCQEFVNQKGLLPLVTILGLPNLPIDFPTSAACQAVAGVCKSILTLSHEPKVLQEGLLQLDSILSSLEPLHRPIESPGGSVLLRELACAGNVADATLSAQATPLLHALTAAHAYIMMFVHTCRVGQSEIRSISVNQWGSQLGLSVLSKLSQLYCSLVWESTVLLSLCTPNSLPSGCEFGQADMQKLVPKDEKAGTTQGGKRSDGEQDGAAGSMDASTQGLLEGIGLDGDTLAPMETDEPTASDSKGKSKITPAMAARIKQIKPLLSASSRLGRALAELFGLLVKLCVGSPVRQRRSHHAASTTTAPTPAARSTASALTKLLTKGLSWQPPPYTPTPRFRLTFFICSVGFTSPMLFDERKYPYHLMLQKFLCSGGHNALFETFNWALSMGGKVPVSEGLEHSDLPDGTGEFLDAWLMLVEKMVNPTTVLESPHSLPAKLPGGVQNFPQFSALRFLVVTQKAAFTCIKNLWNRKPLKVYGGRMAESMLAILCHILRGEPVIRERLSKEKEGSRGEEDTGQEEGGSRREPQVNQQQLQQLMDMGFTREHAMEALLNTSTMEQATEYLLTHPPPIMGGVVRDLSMSEEDQMMRAIAMSLGQDIPMDQRAESPEEVACRKEEEERKAREKQEEEEAKCLEKFQDADPLEQDELHTFTDTMLPGCFHLLDELPDTVYRVCDLIMTAIKRNGADYRDMILKQVVNQVWEAADVLIKAALPLTTSDTKTVSEWISQMATLPQASNLATRILLLTLLFEELKLPCAWVVESSGILNVLIKLLEVVQPCLQAAKEQKEVQTPKWITPVLLLIDFYEKTAISSKRRAQMTKYLQSNSNNWRWFDDRSGRWCSYSASNNSTIDSAWKSGETSVRFTAGRRRYTVQFTTMVQVNEETGNRRPVMLTLLRVPRLNKNSKNSNGQELEKTLEESKEMDIKRKENKGNDTPLALESTNTEKETSLEETKIGEILIQGLTEDMVTVLIRACVSMLGVPVDPDTLHATLRLCLRLTRDHKYAMMFAELKSTRMILNLTQSSGFNGFTPLVTLLLRHIIEDPCTLRHTMEKVVRSAATSGAGSTTSGVVSGSLGSREINYILRVLGPAACRNPDIFTEVANCCIRIALPAPRGSGTASDDEFENLRIKGPNAVQLVKTTPLKPSPLPVIPDTIKEVIYDMLNALAAYHAPEEADKSDPKPGVMTQEVGQLLQDMGDDVYQQYRSLTRQSSDFDTQSGFSINSQVFAADGASTETSASGTSQGEASTPEESRDGKKDKEGDRASEEGKQKGKGSKPLMPTSTILRLLAELVRSYVGIATLIANYSYTVGQSELIKEDCSVLAFVLDHLLPHTQNAEDKDTPALARLFLASLAAAGSGTDAQVALVNEVKAALGRALAMAESTEKHARLQAVMCIISTIMESCPSTSSFYSSATAKTQHNGMNNIIRLFLKKGLVNDLARVPHSLDLSSPNMANTVNAALKPLETLSRIVNQPSSLFGSKSASSKNKSEQDAQGASQDSSSNQQDPGEPGEAEVQEEDHDVTQTEVADGDIMDGEAETDSVVIAGQPEVLSSQEMQVENELEDLIDELLERDGGSGNSTIIVSRSGEDESQEDVLMDEAPSNLSQASTLQANREDSMNILDPEDEEEHTQEEDSSGSNEDEDDSQDEEEEEEEDEEDDQEDDEGEEGDEDDDDDGSEMELDEDYPDMNASPLVRFERFDREDDLIIEFDNMFSSATDIPPSPGNIPTTHPLMVRHADHSSLTLGSGSSTTRLTQGIGRSQRTLRQLTANTGHTIHVHYPGNRQPNPPLILQRLLGPSAAADILQLSSSLPLQSRGRARLLVGNDDVHIIARSDDELLDDFFHDQSTATSQAGTLSSIPTALTRWTEECKVLDAESMHDCVSVVKVSIVNHLEFLRDEELEERREKRRKQLAEEETKITDKGKEDKENRDQSAQCTASKSNDSTEQNLSDGTPMPDSYPTTPSSTDAATSESKETLGTLQSSQQQPTLPTPPALGEVPQELQSPAGEGGSSTQLLMPVEPEELGPTRPSGEAETTQMELSPAPTITSLSPERAEDSDALTAVSSQLEGSPMDTSSLASCTLEEAVGDTSAAGSSEQPRAGSSTPGDAPPAVAEVQGRSDGSGESAQPPEDSSPPASSESSSTRDSAVAISGADSRGILEEPLPSTSSEEEDPLAGISLPEGVDPSFLAALPDDIRREVLQNQLGIRPPTRTAPSTNSSAPAVVGNPGVTEVSPEFLAALPPAIQEEVLAQQRAEQQRRELAQNASSDTPMDPVTFIQTLPSDLRRSVLEDMEDSVLAVMPPDIAAEAQALRREQEARQRQLMHERLFGHSSTSALSAILRSPAFTSRLSGNRGVQYTRLAVQRGGTFQMGGSSSHNRPSGSNVDTLLRLRGRLLLDHEALSCLLVLLFVDEPKLNTSRLHRVLRNLCYHAQTRHWVIRSLLSILQRSSESELCIETPKLTTSEEKGKKSSKSCGSSSHENRPLDLLHKMESKSSNQLSWLSVSMDAALGCRTNIFQIQRSGGRKHTEKHASGGSTVHIHPQAAPVVCRHVLDTLIQLAKVFPSHFTQQRTKETNCESDRERGNKACSPCSSQSSSSGICTDFWDLLVKLDNMNVSRKGKNSVKSVPVSAGGEGETSPYSLEASPLGQLMNMLSHPVIRRSSLLTEKLLRLLSLISIALPENKVSEAQANSGSGASSTTTATSTTSTTTTTAASTTPTPPTAPTPVTSAPALVAATAISTIVVAASTTVTTPTTATTTVSISPTTKGSKSPAKVSDGGSSSTDFKMVSSGLTENQLQLSVEVLTSHSCSEEGLEDAANVLLQLSRGDSGTRDTVLKLLLNGARHLGYTLCKQIGTLLAELREYNLEQQRRAQCETLSPDGLPEEQPQTTKLKGKMQSRFDMAENVVIVASQKRPLGGRELQLPSMSMLTSKTSTQKFFLRVLQVIIQLRDDTRRANKKAKQTGRLGSSGLGSASSIQAAVRQLEAEADAIIQMSESSQSEASVRREESPMDVDQPSPSAQDTQSIASDGTPQGEKEKEERPPELPLLSEQLSLDELWDMLGECLKELEESHDQHAVLVLQPAVEAFFLVHATERESKPPVRDTRESQLAHIKDEPPPLSPAPLTQQASPDILSGAINAISQAAPNEKSSVERFTTGVKRNLGAQSHWWVGMQAGDTPPADNEYRQYPSRGVKGHRKNARTQASVKHRGTSARTGMHEEDSDEKI

SEQ ID NO: 921752 - protein, 3406 aa, Homo sapiens
ASNLGSAVDELMRHQPTLKTDATTAIIKLLEEICNLGRDPKYICQKPSIQKADGTATAPPPRSNHAAEEASSEDEEEEEVQAMQSFNSTQQNETEPNQQVVGTEERIPIPLMDYILNVMKFVESILSNNTTDDHCQEFVNQKGLLPLVTILGLPNLPIDFPTSAACQAVAGVCKSILTLSHEPKVLQEGLLQLDSILSSLEPLHRPIESPGGSVLLRELACAGNVADATLSAQATPLLHALTAAHAYIMMFVHTCRVGQSEIRSISVNQWGSQLGLSVLSKLSQLYCSLVWESTVLLSLCTPNSLPSGCEFGQADMQKLVPKDEKAGTTQGGKRSDGEQDGAAGSMDASTQGLLEGIGLDGDTLAPMETDEPTASDSKGKSKITPAMAARIKQIKPLLSASSRLGRALAELFGLLVKLCVGSPVRQRRSHHAASTTTAPTPAARSTASALTKLLTKGLSWQPPPYTPTPRFRLTFFICSVGFTSPMLFDERKYPYHLMLQKFLCSGGHNALFETFNWALSMGGKVPVSEGLEHSDLPDGTGEFLDAWLMLVEKMVNPTTVLESPHSLPAKLPGGVQNFPQFSALRFLVVTQKAAFTCIKNLWNRKPLKVYGGRMAESMLAILCHILRGEPVIRERLSKEKEGSRGEEDTGQEEGGSRREPQVNQQQLQQLMDMGFTREHAMEALLNTSTMEQATEYLLTHPPPIMGGVVRDLSMSEEDQMMRAIAMSLGQDIPMDQRAESPEEVACRKEEEERKAREKQEEEEAKCLEKFQDADPLEQDELHTFTDTMLPGCFHLLDELPDTVYRVCDLIMTAIKRNGADYRDMILKQVVNQVWEAADVLIKAALPLTTSDTKTVSEWISQMATLPQASNLATRILLLTLLFEELKLPCAWVVESSGILNVLIKLLEVVQPCLQAAKEQKEVQTPKWITPVLLLIDFYEKTAISSKRRAQMTKYLQSNSNNWRWFDDRSGRWCSYSASNNSTIDSAWKSGETSVRFTAGRRRYTVQFTTMVQVNEETGNRRPVMLTLLRVPRLNKNSKNSNGQELEKTLEESKEMDIKRKENKGNDTPLALESTNTEKETSLEETKIGEILIQGLTEDMVTVLIRACVSMLGVPVDPDTLHATLRLCLRLTRDHKYAMMFAELKSTRMILNLTQSSGFNGFTPLVTLLLRHIIEDPCTLRHTMEKVVRSAATSGAGSTTSGVVSGSLGSREINYILRVLGPAACRNPDIFTEVANCCIRIALPAPRGSGTASDDEFENLRIKGPNAVQLVKTTPLKPSPLPVIPDTIKEVIYDMLNALAAYHAPEEADKSDPKPGVMTQEVGQLLQDMGDDVYQQYRSLTRQSSDFDTQSGFSINSQVFAADGASTETSASGTSQGEASTPEESRDGKKDKEGDRASEEGKQKGKGSKPLMPTSTILRLLAELVRSYVGIATLIANYSYTVGQSELIKEDCSVLAFVLDHLLPHTQNAEDKDTPALARLFLASLAAAGSGTDAQVALVNEVKAALGRALAMAESTEKHARLQAVMCIISTIMESCPSTSSFYSSATAKTQHNGMNNIIRLFLKKGLVNDLARVPHSLDLSSPNMANTVNAALKPLETLSRIVNQPSSLFGSKSASSKNKSEQDAQGASQDSSSNQQDPGEPGEAEVQEEDHDVTQTEVADGDIMDGEAETDSVVIAGQPEVLSSQEMQVENELEDLIDELLERDGGSGNSTIIVSRSGEDESQEDVLMDEAPSNLSQASTLQANREDSMNILDPEDEEEHTQEEDSSGSNEDEDDSQDEEEEEEEDEEDDQEDDEGEEGDEDDDDDGSEMELDEDYPDMNASPLVRFERFDREDDLIIEFDNMFSSATDIPPSPGNIPTTHPLMVRHADHSSLTLGSGSSTTRLTQGIGRSQRTLRQLTANTGHTIHVHYPGNRQPNPPLILQRLLGPSAAADILQLSSSLPLQSRGRARLLVGNDDVHIIARSDDELLDDFFHDQSTATSQAGTLSSIPTALTRWTEECKVLDAESMHDCVSVVKVSIVNHLEFLRDEELEERREKRRKQLAEEETKITDKGKEDKENRDQSAQCTASKSNDSTEQNLSDGTPMPDSYPTTPSSTDAATSESKETLGTLQSSQQQPTLPTPPALGEVPQELQSPAGEGGSSTQLLMPVEPEELGPTRPSGEAETTQMELSPAPTITSLSPERAEDSDALTAVSSQLEGSPMDTSSLASCTLEEAVGDTSAAGSSEQPRAGSSTPGDAPPAVAEVQGRSDGSGESAQPPEDSSPPASSESSSTRDSAVAISGADSRGILEEPLPSTSSEEEDPLAGISLPEGVDPSFLAALPDDIRREVLQNQLGIRPPTRTAPSTNSSAPAVVGNPGVTEVSPEFLAALPPAIQEEVLAQQRAEQQRRELAQNASSDTPMDPVTFIQTLPSDLRRSVLEDMEDSVLAVMPPDIAAEAQALRREQEARQRQLMHERLFGHSSTSALSAILRSPAFTSRLSGNRGVQYTRLAVQRGGTFQMGGSSSHNRPSGSNVDTLLRLRGRLLLDHEALSCLLVLLFVDEPKLNTSRLHRVLRNLCYHAQTRHWVIRSLLSILQRSSESELCIETPKLTTSEEKGKKSSKSCGSSSHENRPLDLLHKMESKSSNQLSWLSVSMDAALGCRTNIFQIQRSGGRKHTEKHASGGSTVHIHPQAAPVVCRHVLDTLIQLAKVFPSHFTQQRTKETNCESDRERGNKACSPCSSQSSSSGICTDFWDLLVKLDNMNVSRKGKNSVKSVPVSAGGEGETSPYSLEASPLGQLMNMLSHPVIRRSSLLTEKLLRLLSLISIALPENKVSEAQANSGSGASSTTTATSTTSTTTTTAASTTPTPPTAPTPVTSAPALVAATAISTIVVAASTTVTTPTTATTTVSISPTTKGSKSPAKVSDGGSSSTDFKMVSSGLTENQLQLSVEVLTSHSCSEEGLEDAANVLLQLSRGDSGTRDTVLKLLLNGARHLGYTLCKQIGTLLAELREYNLEQQRRAQCETLSPDGLPEEQPQTTKLKGKMQSRFDMAENVVIVASQKRPLGGRELQLPSMSMLTSKTSTQKFFLRVLQVIIQLRDDTRRANKKAKQTGRLGSSGLGSASSIQAAVRQLEAEADAIIQMVREGQRARRQQQAATSESSQSEASVRREESPMDVDQPSPSAQDTQSIASDGTPQGEKEKEERPPELPLLSEQLSLDELWDMLGECLKELEESHDQHAVLVLQPAVEAFFLVHATERESKPPVRDTRESQLAHIKDEPPPLSPAPLTPATPSSLDPFFSREPSSMHISSSLPPDTQKFLRFAETHRTVLNQILRQSTTHLADGPFAVLVDYIRVLDFDVKRKYFRQELERLDEGLRKEDMAVHVRRDHVFEDSYRELHRKSPGSPGTSSIVSCIALLLKNRGQE

SEQ ID NO: 921753 - protein, 3609 aa, Homo sapiens
ASNLGSAVDELMRHQPTLKTDATTAIIKLLEEICNLGRDPKYICQKPSIQKADGTATAPPPRSNHAAEEASSEDEEEEEVQAMQSFNSTQQNETEPNQQVVGTEERIPIPLMDYILNVMKFVESILSNNTTDDHCQEFVNQKGLLPLVTILGLPNLPIDFPTSAACQAVAGVCKSILTLSHEPKVLQEGLLQLDSILSSLEPLHRPIESPGGSVLLRELACAGNVADATLSAQATPLLHALTAAHAYIMMFVHTCRVGQSEIRSISVNQWGSQLGLSVLSKLSQLYCSLVWESTVLLSLCTPNSLPSGCEFGQADMQKLVPKDEKAGTTQGGKRSDGEQDGAAGSMDASTQGLLEGIGLDGDTLAPMETDEPTASDSKGKSKITPAMAARIKQIKPLLSASSRLGRALAELFGLLVKLCVGSPVRQRRSHHAASTTTAPTPAARSTASALTKLLTKGLSWQPPPYTPTPRFRLTFFICSVGFTSPMLFDERKYPYHLMLQKFLCSGGHNALFETFNWALSMGGKVPVSEGLEHSDLPDGTGEFLDAWLMLVEKMVNPTTVLESPHSLPAKLPGGVQNFPQFSALRFLVVTQKAAFTCIKNLWNRKPLKVYGGRMAESMLAILCHILRGEPVIRERLSKEKEGSRGEEDTGQEEGGSRREPQVNQQQLQQLMDMGFTREHAMEALLNTSTMEQATEYLLTHPPPIMGGVVRDLSMSEEDQMMRAIAMSLGQDIPMDQRAESPEEVACRKEEEERKAREKQEEEEAKCLEKFQDADPLEQDELHTFTDTMLPGCFHLLDELPDTVYRVCDLIMTAIKRNGADYRDMILKQVVNQVWEAADVLIKAALPLTTSDTKTVSEWISQMATLPQASNLATRILLLTLLFEELKLPCAWVVESSGILNVLIKLLEVVQPCLQAAKEQKEVQTPKWITPVLLLIDFYEKTAISSKRRAQMTKYLQSNSNNWRWFDDRSGRWCSYSASNNSTIDSAWKSGETSVRFTAGRRRYTVQFTTMVQVNEETGNRRPVMLTLLRVPRLNKNSKNSNGQELEKTLEESKEMDIKRKENKGNDTPLALESTNTEKETSLEETKIGEILIQGLTEDMVTVLIRACVSMLGVPVDPDTLHATLRLCLRLTRDHKYAMMFAELKSTRMILNLTQSSGFNGFTPLVTLLLRHIIEDPCTLRHTMEKVVRSAATSGAGSTTSGVVSGSLGSREINYILRVLGPAACRNPDIFTEVANCCIRIALPAPRGSGTASDDEFENLRIKGPNAVQLVKTTPLKPSPLPVIPDTIKEVIYDMLNALAAYHAPEEADKSDPKPGVMTQEVGQLLQDMGDDVYQQYRSLTRQSSDFDTQSGFSINSQVFAADGASTETSASGTSQGEASTPEESRDGKKDKEGDRASEEGKQKGKGSKPLMPTSTILRLLAELVRSYVGIATLIANYSYTVGQSELIKEDCSVLAFVLDHLLPHTQNAEDKDTPALARLFLASLAAAGSGTDAQVALVNEVKAALGRALAMAESTEKHARLQAVMCIISTIMESCPSTSSFYSSATAKTQHNGMNNIIRLFLKKGLVNDLARVPHSLDLSSPNMANTVNAALKPLETLSRIVNQPSSLFGSKSASSKNKSEQDAQGASQDSSSNQQDPGEPGEAEVQEEDHDVTQTEVADGDIMDGEAETDSVVIAGQPEVLSSQEMQVENELEDLIDELLERDGGSGNSTIIVSRSGEDESQEDVLMDEAPSNLSQASTLQANREDSMNILDPEDEEEHTQEEDSSGSNEDEDDSQDEEEEEEEDEEDDQEDDEGEEGDEDDDDDGSEMELDEDYPDMNASPLVRFERFDREDDLIIEFDNMFSSATDIPPSPGNIPTTHPLMVRHADHSSLTLGSGSSTTRLTQGIGRSQRTLRQLTANTGHTIHVHYPGNRQPNPPLILQRLLGPSAAADILQLSSSLPLQSRGRARLLVGNDDVHIIARSDDELLDDFFHDQSTATSQAGTLSSIPTALTRWTEECKVLDAESMHDCVSVVKVSIVNHLEFLRDEELEERREKRRKQLAEEETKITDKGKEDKENRDQSAQCTASKSNDSTEQNLSDGTPMPDSYPTTPSSTDAATSESKETLGTLQSSQQQPTLPTPPALGEVPQELQSPAGEGGSSTQLLMPVEPEELGPTRPSGEAETTQMELSPAPTITSLSPERAEDSDALTAVSSQLEGSPMDTSSLASCTLEEAVGDTSAAGSSEQPRAGSSTPGDAPPAVAEVQGRSDGSGESAQPPEDSSPPASSESSSTRDSAVAISGADSRGILEEPLPSTSSEEEDPLAGISLPEGVDPSFLAALPDDIRREVLQNQLGIRPPTRTAPSTNSSAPAVVGNPGVTEVSPEFLAALPPAIQEEVLAQQRAEQQRRELAQNASSDTPMDPVTFIQTLPSDLRRSVLEDMEDSVLAVMPPDIAAEAQALRREQEARQRQLMHERLFGHSSTSALSAILRSPAFTSRLSGNRGVQYTRLAVQRGGTFQMGGSSSHNRPSGSNVDTLLRLRGRLLLDHEALSCLLVLLFVDEPKLNTSRLHRVLRNLCYHAQTRHWVIRSLLSILQRSSESELCIETPKLTTSEEKGKKSSKSCGSSSHENRPLDLLHKMESKSSNQLSWLSVSMDAALGCRTNIFQIQRSGGRKHTEKHASGGSTVHIHPQAAPVVCRHVLDTLIQLAKVFPSHFTQQRTKETNCESDRERGNKACSPCSSQSSSSGICTDFWDLLVKLDNMNVSRKGKNSVKSVPVSAGGEGETSPYSLEASPLGQLMNMLSHPVIRRSSLLTEKLLRLLSLISIALPENKVSEAQANSGSGASSTTTATSTTSTTTTTAASTTPTPPTAPTPVTSAPALVAATAISTIVVAASTTVTTPTTATTTVSISPTTKGSKSPAKVSDGGSSSTDFKMVSSGLTENQLQLSVEVLTSHSCSEEGLEDAANVLLQLSRGDSGTRDTVLKLLLNGARHLGYTLCKQIGTLLAELREYNLEQQRRAQCETLSPDGLPEEQPQTTKLKGKMQSRFDMAENVVIVASQKRPLGGRELQLPSMSMLTSKTSTQKFFLRVLQVIIQLRDDTRRANKKAKQTGRLGSSGLGSASSIQAAVRQLEAEADAIIQMVREGQRARRQQQAATSESSQSEASVRREESPMDVDQPSPSAQDTQSIASDGTPQGEKEKEERPPELPLLSEQLSLDELWDMLGECLKELEESHDQHAVLVLQPAVEAFFLVHATERESKPPVRDTRESQLAHIKDEPPPLSPAPLTPATPSSLDPFFSREPSSMHISSSLPPDTQKFLRFAETHRTVLNQILRQSTTHLADGPFAVLVDYIRVLDFDVKRKYFRQELERLDEGLRKEDMAVHVRRDHVFEDSYRELHRKSPEEMKNRLYIVFEGEEGQDAGGLLREWYMIISREMFNPMYALFRTSPGDRVTYTINPSSHCNPNHLSYFKFVGRIVAKAVYDNRLLECYFTRSFYKHILGKSVRYTDMESEDYHFYQGLVYLLENDVSTLGYDLTFSTEVQEFGVCEVRDLKPNGANILVTEENKKEYVHLVCQMRMTGAIRKQLAAFLEGFYEIIPKRLISIFTEQELELLISDHRCQWWAVLMS

SEQ ID NO: 921754 - protein, 2972 aa, Homo sapiens
ASNLGSAVDELMRHQPTLKTDATTAIIKLLEEICNLGRDPKYICQKPSIQKADGTATAPPPRSNHAAEEASSEDEEEEEVQAMQSFNSTQQNETEPNQQVVGTEERIPIPLMDYILNVMKFVESILSNNTTDDHCQEFVNQKGLLPLVTILGLPNLPIDFPTSAACQAVAGVCKSILTLSHEPKVLQEGLLQLDSILSSLEPLHRPIESPGGSVLLRELACAGNVADATLSAQATPLLHALTAAHAYIMMFVHTCRVGQSEIRSISVNQWGSQLGLSVLSKLSQLYCSLVWESTVLLSLCTPNSLPSGCEFGQADMQKLVPKDEKAGTTQGGKRSDGEQDGAAGSMDASTQGLLEGIGLDGDTLAPMETDEPTASDSKGKSKITPAMAARIKQIKPLLSASSRLGRALAELFGLLVKLCVGSPVRQRRSHHAASTTTAPTPAARSTASALTKLLTKGLSWQPPPYTPTPRFRLTFFICSVGFTSPMLFDERKYPYHLMLQKFLCSGGHNALFETFNWALSMGGKVPVSEGLEHSDLPDGTGEFLDAWLMLVEKMVNPTTVLESPHSLPAKLPGGVQNFPQFSALRFLVVTQKAAFTCIKNLWNRKPLKVYGGRMAESMLAILCHILRGEPVIRERLSKEKEGSRGEEDTGQEEGGSRREPQVNQQQLQQLMDMGFTREHAMEALLNTSTMEQATEYLLTHPPPIMGGVVRDLSMSEEDQMMRAIAMSLGQDIPMDQRAESPEEVACRKEEEERKAREKQEEEEAKCLEKFQDADPLEQDELHTFTDTMLPGCFHLLDELPDTVYRVCDLIMTAIKRNGADYRDMILKQVVNQVWEAADVLIKAALPLTTSDTKTVSEWISQMATLPQASNLATRILLLTLLFEELKLPCAWVVESSGILNVLIKLLEVVQPCLQAAKEQKEVQTPKWITPVLLLIDFYEKTAISSKRRAQMTKYLQSNSNNWRWFDDRSGRWCSYSASNNSTIDSAWKSGETSVRFTAGRRRYTVQFTTMVQVNEETGNRRPVMLTLLRVPRLNKNSKNSNGQELEKTLEESKEMDIKRKENKGNDTPLALESTNTEKETSLEETKIGEILIQGLTEDMVTVLIRACVSMLGVPVDPDTLHATLRLCLRLTRDHKYAMMFAELKSTRMILNLTQSSGFNGFTPLVTLLLRHIIEDPCTLRHTMEKVVRSAATSGAGSTTSGVVSGSLGSREINYILRVLGPAACRNPDIFTEVANCCIRIALPAPRGSGTASDDEFENLRIKGPNAVQLVKTTPLKPSPLPVIPDTIKEVIYDMLNALAAYHAPEEADKSDPKPGVMTQEVGQLLQDMGDDVYQQYRSLTRQSSDFDTQSGFSINSQVFAADGASTETSASGTSQGEASTPEESRDGKKDKEGDRASEEGKQKGKGSKPLMPTSTILRLLAELVRSYVGIATLIANYSYTVGQSELIKEDCSVLAFVLDHLLPHTQNAEDKDTPALARLFLASLAAAGSGTDAQVALVNEVKAALGRALAMAESTEKHARLQAVMCIISTIMESCPSTSSFYSSATAKTQHNGMNNIIRLFLKKGLVNDLARVPHSLDLSSPNMANTVNAALKPLETLSRIVNQPSSLFGSKSASSKNKSEQDAQGASQDSSSNQQDPGEPGEAEVQEEDHDVTQTEVADGDIMDGEAETDSVVIAGQPEVLSSQEMQVENELEDLIDELLERDGGSGNSTIIVSRSGEDESQEDVLMDEAPSNLSQASTLQANREDSMNILDPEDEEEHTQEEDSSGSNEDEDDSQDEEEEEEEDEEDDQEDDEGEEGDEDDDDDGSEMELDEDYPDMNASPLVRFERFDREDDLIIEFDNMFSSATDIPPSPGNIPTTHPLMVRHADHSSLTLGSGSSTTRLTQGIGRSQRTLRQLTANTGHTIHVHYPGNRQPNPPLILQRLLGPSAAADILQLSSSLPLQSRGRARLLVGNDDVHIIARSDDELLDDFFHDQSTATSQAGTLSSIPTALTRWTEECKVLDAESMHDCVSVVKVSIVNHLEFLRDEELEERREKRRKQLAEEETKITDKGKEDKENRDQSAQCTASKSNDSTEQNLSDGTPMPDSYPTTPSSTDAATSESKETLGTLQSSQQQPTLPTPPALGEVPQELQSPAGEGGSSTQLLMPVEPEELGPTRPSGEAETTQMELSPAPTITSLSPERAEDSDALTAVSSQLEGSPMDTSSLASCTLEEAVGDTSAAGSSEQPRAGSSTPGDAPPAVAEVQGRSDGSGESAQPPEDSSPPASSESSSTRDSAVAISGADSRGILEEPLPSTSSEEEDPLAGISLPEGVDPSFLAALPDDIRREVLQNQLGIRPPTRTAPSTNSSAPAVVGNPGVTEVSPEFLAALPPAIQEEVLAQQRAEQQRRELAQNASSDTPMDPVTFIQTLPSDLRRSVLEDMEDSVLAVMPPDIAAEAQALRREQEARQRQLMHERLFGHSSTSALSAILRSPAFTSRLSGNRGVQYTRLAVQRGGTFQMGGSSSHNRPSGSNVDTLLRLRGRLLLDHEALSCLLVLLFVDEPKLNTSRLHRVLRNLCYHAQTRHWVIRSLLSILQRSSESELCIETPKLTTSEEKGKKSSKSCGSSSHENRPLDLLHKMESKSSNQLSWLSVSMDAALGCRTNIFQIQRSGGRKHTEKHASGGSTVHIHPQAAPVVCRHVLDTLIQLAKVFPSHFTQQRTKETNCESDRERGNKACSPCSSQSSSSGICTDFWDLLVKLDNMNVSRKGKNSVKSVPVSAGGEGETSPYSLEASPLGQLMNMLSHPVIRRSSLLTEKLLRLLSLISIALPENKVSEAQANSGSGASSTTTATSTTSTTTTTAASTTPTPPTAPTPVTSAPALVAATAISTIVVAASTTVTTPTTATTTVSISPTTKGSKSPAKVSDGGSSSTDFKMVSSGLTENQLQLSVEVLTSHSCSEEGLEDAANVLLQLSRGDSGTRDTVLKSCGSGI

SEQ ID NO: 921755 - protein, 3309 aa, Homo sapiens
ASNLGSAVDELMRHQPTLKTDATTAIIKLLEEICNLGRDPKYICQKPSIQKADGTATAPPPRSNHAAEEASSEDEEEEEVQAMQSFNSTQQNETEPNQQVVGTEERIPIPLMDYILNVMKFVESILSNNTTDDHCQEFVNQKGLLPLVTILGLPNLPIDFPTSAACQAVAGVCKSILTLSHEPKVLQEGLLQLDSILSSLEPLHRPIESPGGSVLLRELACAGNVADATLSAQATPLLHALTAAHAYIMMFVHTCRVGQSEIRSISVNQWGSQLGLSVLSKLSQLYCSLVWESTVLLSLCTPNSLPSGCEFGQADMQKLVPKDEKAGTTQGGKRSDGEQDGAAGSMDASTQGLLEGIGLDGDTLAPMETDEPTASDSKGKSKITPAMAARIKQIKPLLSASSRLGRALAELFGLLVKLCVGSPVRQRRSHHAASTTTAPTPAARSTASALTKLLTKGLSWQPPPYTPTPRFRLTFFICSVGFTSPMLFDERKYPYHLMLQKFLCSGGHNALFETFNWALSMGGKVPVSEGLEHSDLPDGTGEFLDAWLMLVEKMVNPTTVLESPHSLPAKLPGGVQNFPQFSALRFLVVTQKAAFTCIKNLWNRKPLKVYGGRMAESMLAILCHILRGEPVIRERLSKEKEGSRGEEDTGQEEGGSRREPQVNQQQLQQLMDMGFTREHAMEALLNTSTMEQATEYLLTHPPPIMGGVVRDLSMSEEDQMMRAIAMSLGQDIPMDQRAESPEEVACRKEEEERKAREKQEEEEAKCLEKFQDADPLEQDELHTFTDTMLPGCFHLLDELPDTVYRVCDLIMTAIKRNGADYRDMILKQVVNQVWEAADVLIKAALPLTTSDTKTVSEWISQMATLPQASNLATRILLLTLLFEELKLPCAWVVESSGILNVLIKLLEVVQPCLQAAKEQKEVQTPKWITPVLLLIDFYEKTAISSKRRAQMTKYLQSNSNNWRWFDDRSGRWCSYSASNNSTIDSAWKSGETSVRFTAGRRRYTVQFTTMVQVNEETGNRRPVMLTLLRVPRLNKNSKNSNGQELEKTLEESKEMDIKRKENKGNDTPLALESTNTEKETSLEETKIGEILIQGLTEDMVTVLIRACVSMLGVPVDPDTLHATLRLCLRLTRDHKYAMMFAELKSTRMILNLTQSSGFNGFTPLVTLLLRHIIEDPCTLRHTMEKVVRSAATSGAGSTTSGVVSGSLGSREINYILRVLGPAACRNPDIFTEVANCCIRIALPAPRGSGTASDDEFENLRIKGPNAVQLVKTTPLKPSPLPVIPDTIKEVIYDMLNALAAYHAPEEADKSDPKPGVMTQEVGQLLQDMGDDVYQQYRSLTRQSSDFDTQSGFSINSQVFAADGASTETSASGTSQGEASTPEESRDGKKDKEGDRASEEGKQKGKGSKPLMPTSTILRLLAELVRSYVGIATLIANYSYTVGQSELIKEDCSVLAFVLDHLLPHTQNAEDKDTPALARLFLASLAAAGSGTDAQVALVNEVKAALGRALAMAESTEKHARLQAVMCIISTIMESCPSTSSFYSSATAKTQHNGMNNIIRLFLKKGLVNDLARVPHSLDLSSPNMANTVNAALKPLETLSRIVNQPSSLFGSKSASSKNKSEQDAQGASQDSSSNQQDPGEPGEAEVQEEDHDVTQTEVADGDIMDGEAETDSVVIAGQPEVLSSQEMQVENELEDLIDELLERDGGSGNSTIIVSRSGEDESQEDVLMDEAPSNLSQASTLQANREDSMNILDPEDEEEHTQEEDSSGSNEDEDDSQDEEEEEEEDEEDDQEDDEGEEGDEDDDDDGSEMELDEDYPDMNASPLVRFERFDREDDLIIEFDNMFSSATDIPPSPGNIPTTHPLMVRHADHSSLTLGSGSSTTRLTQGIGRSQRTLRQLTANTGHTIHVHYPGNRQPNPPLILQRLLGPSAAADILQLSSSLPLQSRGRARLLVGNDDVHIIARSDDELLDDFFHDQSTATSQAGTLSSIPTALTRWTEECKVLDAESMHDCVSVVKVSIVNHLEFLRDEELEERREKRRKQLAEEETKITDKGKEDKENRDQSAQCTASKSNDSTEQNLSDGTPMPDSYPTTPSSTDAATSESKETLGTLQSSQQQPTLPTPPALGEVPQELQSPAGEGGSSTQLLMPVEPEELGPTRPSGEAETTQMELSPAPTITSLSPERAEDSDALTAVSSQLEGSPMDTSSLASCTLEEAVGDTSAAGSSEQPRAGSSTPGDAPPAVAEVQGRSDGSGESAQPPEDSSPPASSESSSTRDSAVAISGADSRGILEEPLPSTSSEEEDPLAGISLPEGVDPSFLAALPDDIRREVLQNQLGIRPPTRTAPSTNSSAPAVVGNPGVTEVSPEFLAALPPAIQEEVLAQQRAEQQRRELAQNASSDTPMDPVTFIQTLPSDLRRSVLEDMEDSVLAVMPPDIAAEAQALRREQEARQRQLMHERLFGHSSTSALSAILRSPAFTSRLSGNRGVQYTRLAVQRGGTFQMGGSSSHNRPSGSNVDTLLRLRGRLLLDHEALSCLLVLLFVDEPKLNTSRLHRVLRNLCYHAQTRHWVIRSLLSILQRSSESELCIETPKLTTSEEKGKKSSKSCGSSSHENRPLDLLHKMESKSSNQLSWLSVSMDAALGCRTNIFQIQRSGGRKHTEKHASGGSTVHIHPQAAPVVCRHVLDTLIQLAKVFPSHFTQQRTKETNCESDRERGNKACSPCSSQSSSSGICTDFWDLLVKLDNMNVSRKGKNSVKSVPVSAGGEGETSPYSLEASPLGQLMNMLSHPVIRRSSLLTEKLLRLLSLISIALPENKVSEAQANSGSGASSTTTATSTTSTTTTTAASTTPTPPTAPTPVTSAPALVAATAISTIVVAASTTVTTPTTATTTVSISPTTKGSKSPAKVSDGGSSSTDFKMVSSGLTENQLQLSVEVLTSHSCSEEGLEDAANVLLQLSRGDSGTRDTVLKLLLNGARHLGYTLCKQIGTLLAELREYNLEQQRRAQCETLSPDGLPEEQPQTTKLKGKMQSRFDMAENVVIVASQKRPLGGRELQLPSMSMLTSKTSTQKFFLRVLQVIIQLRDDTRRANKKAKQTGRLGSSGLGSASSIQAAVRQLEAEADAIIQMVREGQRARRQQQAATSESSQSEASVRREESPMDVDQPSPSAQDTQSIASDGTPQGEKEKEERPPELPLLSEQLSLDELWDMLGECLKELEESHDQHAVLETHRTVLNQILRQSTTHLADGPFAVLVDYIRVLDFDVKRKYFRQELERLDEGLRKEDMAVHVRRDHVFEDSYRELHRKSPEEMKNRL

SEQ ID NO: 921756 - protein, 3827 aa, Homo sapiens
ASNLGSAVDELMRHQPTLKTDATTAIIKLLEEICNLGRDPKYICQKPSIQKADGTATAPPPRSNHAAEEASSEDEEEEEVQAMQSFNSTQQNETEPNQQVVGTEERIPIPLMDYILNVMKFVESILSNNTTDDHCQEFVNQKGLLPLVTILGLPNLPIDFPTSAACQAVAGVCKSILTLSHEPKVLQEGLLQLDSILSSLEPLHRPIESPGGSVLLRELACAGNVADATLSAQATPLLHALTAAHAYIMMFVHTCRVGQSEIRSISVNQWGSQLGLSVLSKLSQLYCSLVWESTVLLSLCTPNSLPSGCEFGQADMQKLVPKDEKAGTTQGGKRSDGEQDGAAGSMDASTQGLLEGIGLDGDTLAPMETDEPTASDSKGKSKITPAMAARIKQIKPLLSASSRLGRALAELFGLLVKLCVGSPVRQRRSHHAASTTTAPTPAARSTASALTKLLTKGLSWQPPPYTPTPRFRLTFFICSVGFTSPMLFDERKYPYHLMLQKFLCSGGHNALFETFNWALSMGGKVPVSEGLEHSDLPDGTGEFLDAWLMLVEKMVNPTTVLESPHSLPAKLPGGVQNFPQFSALRFLVVTQKAAFTCIKNLWNRKPLKVYGGRMAESMLAILCHILRGEPVIRERLSKEKEGSRGEEDTGQEEGGSRREPQVNQQQLQQLMDMGFTREHAMEALLNTSTMEQATEYLLTHPPPIMGGVVRDLSMSEEDQMMRAIAMSLGQDIPMDQRAESPEEVACRKEEEERKAREKQEEEEAKCLEKFQDADPLEQDELHTFTDTMLPGCFHLLDELPDTVYRVCDLIMTAIKRNGADYRDMILKQVVNQVWEAADVLIKAALPLTTSDTKTVSEWISQMATLPQASNLATRILLLTLLFEELKLPCAWVVESSGILNVLIKLLEVVQPCLQAAKEQKEVQTPKWITPVLLLIDFYEKTAISSKRRAQMTKYLQSNSNNWRWFDDRSGRWCSYSASNNSTIDSAWKSGETSVRFTAGRRRYTVQFTTMVQVNEETGNRRPVMLTLLRVPRLNKNSKNSNGQELEKTLEESKEMDIKRKENKGNDTPLALESTNTEKETSLEETKIGEILIQGLTEDMVTVLIRACVSMLGVPVDPDTLHATLRLCLRLTRDHKYAMMFAELKSTRMILNLTQSSGFNGFTPLVTLLLRHIIEDPCTLRHTMEKVVRSAATSGAGSTTSGVVSGSLGSREINYILRVLGPAACRNPDIFTEVANCCIRIALPAPRGSGTASDDEFENLRIKGPNAVQLVKTTPLKPSPLPVIPDTIKEVIYDMLNALAAYHAPEEADKSDPKPGVMTQEVGQLLQDMGDDVYQQYRSLTRQSSDFDTQSGFSINSQVFAADGASTETSASGTSQGEASTPEESRDGKKDKEGDRASEEGKQKGKGSKPLMPTSTILRLLAELVRSYVGIATLIANYSYTVGQSELIKEDCSVLAFVLDHLLPHTQNAEDKDTPALARLFLASLAAAGSGTDAQVALVNEVKAALGRALAMAESTEKHARLQAVMCIISTIMESCPSTSSFYSSATAKTQHNGMNNIIRLFLKKGLVNDLARVPHSLDLSSPNMANTVNAALKPLETLSRIVNQPSSLFGSKSASSKNKSEQDAQGASQDSSSNQQDPGEPGEAEVQEEDHDVTQTEVADGDIMDGEAETDSVVIAGQPEVLSSQEMQVENELEDLIDELLERDGGSGNSTIIVSRSGEDESQEDVLMDEAPSNLSQASTLQANREDSMNILDPEDEEEHTQEEDSSGSNEDEDDSQDEEEEEEEDEEDDQEDDEGEEGDEDDDDDGSEMELDEDYPDMNASPLVRFERFDREDDLIIEFDNMFSSATDIPPSPGNIPTTHPLMVRHADHSSLTLGSGSSTTRLTQGIGRSQRTLRQLTANTGHTIHVHYPGNRQPNPPLILQRLLGPSAAADILQLSSSLPLQSRGRARLLVGNDDVHIIARSDDELLDDFFHDQSTATSQAGTLSSIPTALTRWTEECKVLDAESMHDCVSVVKVSIVNHLEFLRDEELEERREKRRKQLAEEETKITDKGKEDKENRDQSAQCTASKSNDSTEQNLSDGTPMPDSYPTTPSSTDAATSESKETLGTLQSSQQQPTLPTPPALGEVPQELQSPAGEGGSSTQLLMPVEPEELGPTRPSGEAETTQMELSPAPTITSLSPERAEDSDALTAVSSQLEGSPMDTSSLASCTLEEAVGDTSAAGSSEQPRAGSSTPGDAPPAVAEVQGRSDGSGESAQPPEDSSPPASSESSSTRDSAVAISGADSRGILEEPLPSTSSEEEDPLAGISLPEGVDPSFLAALPDDIRREVLQNQLGIRPPTRTAPSTNSSAPAVVGNPGVTEVSPEFLAALPPAIQEEVLAQQRAEQQRRELAQNASSDTPMDPVTFIQTLPSDLRRSVLEDMEDSVLAVMPPDIAAEAQALRREQEARQRQLMHERLFGHSSTSALSAILRSPAFTSRLSGNRGVQYTRLAVQRGGTFQMGGSSSHNRPSGSNVDTLLRLRGRLLLDHEALSCLLVLLFVDEPKLNTSRLHRVLRNLCYHAQTRHWVIRSLLSILQRSSESELCIETPKLTTSEEKGKKSSKSCGSSSHENRPLDLLHKMESKSSNQLSWLSVSMDAALGCRTNIFQIQRSGGRKHTEKHASGGSTVHIHPQAAPVVCRHVLDTLIQLAKVFPSHFTQQRTKETNCESDRERGNKACSPCSSQSSSSGICTDFWDLLVKLDNMNVSRKGKNSVKSVPVSAGGEGETSPYSLEASPLGQLMNMLSHPVIRRSSLLTEKLLRLLSLISIALPENKVSEAQANSGSGASSTTTATSTTSTTTTTAASTTPTPPTAPTPVTSAPALVAATAISTIVVAASTTVTTPTTATTTVSISPTTKGSKSPAKVSDGGSSSTDFKMVSSGLTENQLQLSVEVLTSHSCSEEGLEDAANVLLQLSRGDSGTRDTVLKLLLNGARHLGYTLCKQIGTLLAELREYNLEQQRRAQCETLSPDGLPEEQPQTTKLKGKMQSRFDMAENVVIVASQKRPLGGRELQLPSMSMLTSKTSTQKFFLRVLQVIIQLRDDTRRANKKAKQTGRLGSSGLGSASSIQAAVRQLEAEADAIIQMVREGQRARRQQQAATSESSQSEASVRREESPMDVDQPSPSAQDTQSIASDGTPQGEKEKEERPPELPLLSEQLSLDELWDMLGECLKELEESHDQHAVLVLQPAVEAFFLVHATERESKPPVRDTRESQLAHIKDEPPPLSPAPLTPATPSSLDPFFSREPSSMHISSSLPPDTQKFLRFAETHRTVLNQILRQSTTHLADGPFAVLVDYIRVLDFDVKRKYFRQELERLDEGLRKEDMAVHVRRDHVFEDSYRELHRKSPEEMKNRLYIVFEGEEGQDAGGLLREWYMIISREMFNPMYALFRTSPGDRVTYTINPSSHCNPNHLSYFKFVGRIVAKAVYDNRLLECYFTRSFYKHILGKSVRYTDMESEDYHFYQGLVYLLENDVSTLGYDLTFSTEVQEFGVCEVRDLKPNGANILVTEENKKEYVHLVCQMRMTGAIRKQLAAFLEGFYEIIPKRLISIFTEQELELLISGLPTIDIDDLKSNTEYHKYQSNSIQIQWFWRALRSFDQADRAKFLQFVTGTSKVPLQGFAALEGMNGIQKFQIHRDDRSTDRLPSAHTWASVTGARRSCREQKSKELSRVLISWICLPMRALRSSATCYCWLSRSALKALGWPNKALPNSVGFFLPLLDLGRGELKKEPERNCQKPINEIHQLTVCVPAAPSSPAHTCSSSHSLPAACFLTFSPLSMPSMIPTPCVLKRQ

SEQ ID NO: 921757 - protein, 3637 aa, Homo sapiens
ASNLGSAVDELMRHQPTLKTDATTAIIKLLEEICNLGRDPKYICQKPSIQKADGTATAPPPRSNHAAEEASSEDEEEEEVQAMQSFNSTQQNETEPNQQVVGTEERIPIPLMDYILNVMKFVESILSNNTTDDHCQEFVNQKGLLPLVTILGLPNLPIDFPTSAACQAVAGVCKSILTLSHEPKVLQEGLLQLDSILSSLEPLHRPIESPGGSVLLRELACAGNVADATLSAQATPLLHALTAAHAYIMMFVHTCRVGQSEIRSISVNQWGSQLGLSVLSKLSQLYCSLVWESTVLLSLCTPNSLPSGCEFGQADMQKLVPKDEKAGTTQGGKRSDGEQDGAAGSMDASTQGLLEGIGLDGDTLAPMETDEPTASDSKGKSKITPAMAARIKQIKPLLSASSRLGRALAELFGLLVKLCVGSPVRQRRSHHAASTTTAPTPAARSTASALTKLLTKGLSWQPPPYTPTPRFRLTFFICSVGFTSPMLFDERKYPYHLMLQKFLCSGGHNALFETFNWALSMGGKVPVSEGLEHSDLPDGTGEFLDAWLMLVEKMVNPTTVLESPHSLPAKLPGGVQNFPQFSALRFLVVTQKAAFTCIKNLWNRKPLKVYGGRMAESMLAILCHILRGEPVIRERLSKEKEGSRGEEDTGQEEGGSRREPQVNQQQLQQLMDMGFTREHAMEALLNTSTMEQATEYLLTHPPPIMGGVVRDLSMSEEDQMMRAIAMSLGQDIPMDQRAESPEEVACRKEEEERKAREKQEEEEAKCLEKFQDADPLEQDELHTFTDTMLPGCFHLLDELPDTVYRVCDLIMTAIKRNGADYRDMILKQVVNQVWEAADVLIKAALPLTTSDTKTVSEWISQMATLPQASNLATRILLLTLLFEELKLPCAWVVESSGILNVLIKLLEVVQPCLQAAKEQKEVQTPKWITPVLLLIDFYEKTAISSKRRAQMTKYLQSNSNNWRWFDDRSGRWCSYSASNNSTIDSAWKSGETSVRFTAGRRRYTVQFTTMVQVNEETGNRRPVMLTLLRVPRLNKNSKNSNGQELEKTLEESKEMDIKRKENKGNDTPLALESTNTEKETSLEETKIGEILIQGLTEDMVTVLIRACVSMLGVPVDPDTLHATLRLCLRLTRDHKYAMMFAELKSTRMILNLTQSSGFNGFTPLVTLLLRHIIEDPCTLRHTMEKVVRSAATSGAGSTTSGVVSGSLGSREINYILRVLGPAACRNPDIFTEVANCCIRIALPAPRGSGTASDDEFENLRIKGPNAVQLVKTTPLKPSPLPVIPDTIKEVIYDMLNALAAYHAPEEADKSDPKPGVMTQEVGQLLQDMGDDVYQQYRSLTRQSSDFDTQSGFSINSQVFAADGASTETSASGTSQGEASTPEESRDGKKDKEGDRASEEGKQKGKGSKPLMPTSTILRLLAELVRSYVGIATLIANYSYTVGQSELIKEDCSVLAFVLDHLLPHTQNAEDKDTPALARLFLASLAAAGSGTDAQVALVNEVKAALGRALAMAESTEKHARLQAVMCIISTIMESCPSTSSFYSSATAKTQHNGMNNIIRLFLKKGLVNDLARVPHSLDLSSPNMANTVNAALKPLETLSRIVNQPSSLFGSKSASSKNKSEQDAQGASQDSSSNQQDPGEPGEAEVQEEDHDVTQTEVADGDIMDGEAETDSVVIAGQPEVLSSQEMQVENELEDLIDELLERDGGSGNSTIIVSRSGEDESQEDVLMDEAPSNLSQASTLQANREDSMNILDPEDEEEHTQEEDSSGSNEDEDDSQDEEEEEEEDEEDDQEDDEGEEGDEDDDDDGSEMELDEDYPDMNASPLVRFERFDREDDLIIEFDNMFSSATDIPPSPGNIPTTHPLMVRHADHSSLTLGSGSSTTRLTQGIGRSQRTLRQLTANTGHTIHVHYPGNRQPNPPLILQRLLGPSAAADILQLSSSLPLQSRGRARLLVGNDDVHIIARSDDELLDDFFHDQSTATSQAGTLSSIPTALTRWTEECKVLDAESMHDCVSVVKVSIVNHLEFLRDEELEERREKRRKQLAEEETKITDKGKEDKENRDQSAQCTASKSNDSTEQNLSDGTPMPDSYPTTPSSTDAATSESKETLGTLQSSQQQPTLPTPPALGEVPQELQSPAGEGGSSTQLLMPVEPEELGPTRPSGEAETTQMELSPAPTITSLSPERAEDSDALTAVSSQLEGSPMDTSSLASCTLEEAVGDTSAAGSSEQPRAGSSTPGDAPPAVAEVQGRSDGSGESAQPPEDSSPPASSESSSTRDSAVAISGADSRGILEEPLPSTSSEEEDPLAGISLPEGVDPSFLAALPDDIRREVLQNQLGIRPPTRTAPSTNSSAPAVVGNPGVTEVSPEFLAALPPAIQEEVLAQQRAEQQRRELAQNASSDTPMDPVTFIQTLPSDLRRSVLEDMEDSVLAVMPPDIAAEAQALRREQEARQRQLMHERLFGHSSTSALSAILRSPAFTSRLSGNRGVQYTRLAVQRGGTFQMGGSSSHNRPSGSNVDTLLRLRGRLLLDHEALSCLLVLLFVDEPKLNTSRLHRVLRNLCYHAQTRHWVIRSLLSILQRSSESELCIETPKLTTSEEKGKKSSKSCGSSSHENRPLDLLHKMESKSSNQLSWLSVSMDAALGCRTNIFQIQRSGGRKHTEKHASGGSTVHIHPQAAPVVCRHVLDTLIQLAKVFPSHFTQQRTKETNCESDRERGNKACSPCSSQSSSSGICTDFWDLLVKLDNMNVSRKGKNSVKSVPVSAGGEGETSPYSLEASPLGQLMNMLSHPVIRRSSLLTEKLLRLLSLISIALPENKVSEAQANSGSGASSTTTATSTTSTTTTTAASTTPTPPTAPTPVTSAPALVAATAISTIVVAASTTVTTPTTATTTVSISPTTKGSKSPAKVSDGGSSSTDFKMVSSGLTENQLQLSVEVLTSHSCSEEGLEDAANVLLQLSRGDSGTRDTVLKLLLNGARHLGYTLCKQIGTLLAELREYNLEQQRRAQCETLSPDGLPEEQPQTTKLKGKMQSRFDMAENVVIVASQKRPLGGRELQLPSMSMLTSKTSTQKFFLRVLQVIIQLRDDTRRANKKAKQTGRLGSSGLGSASSIQAAVRQLEAEADAIIQMVREGQRARRQQQAATSESSQSEASVRREESPMDVDQPSPSAQDTQSIASDGTPQGEKEKEERPPELPLLSEQLSLDELWDMLGECLKELEESHDQHAVLETHRTVLNQILRQSTTHLADGPFAVLVDYIRVLDFDVKRKYFRQELERLDEGLRKEDMAVHVRRDHVFEDSYRELHRKSPEEMKNRLYIVFEGEEGQDAGGLLREWYMIISREMFNPMYALFRTSPGDRVTYTINPSSHCNPNHLSYFKFVGRIVAKAVYDNRLLECYFTRSFYKHILGKSVRYTDMESEDYHFYQGLVYLLENDVSTLGYDLTFSTEVQEFGVCEVRDLKPNGANILVTEENKKEYVHLVCQMRMTGAIRKQLAAFLEGFYEIIPKRLISIFTEQELELLISGLPTIDIDDLKSNTEYHKYQSNSIQIQWFWRALRSFDQADRAKFLQFVTGTSKVPLQGFAALEGMNGIQKFQIHRDDRSTDRLPSAHTCFNQLDLPAYESFEKLRHMLLLAIQECSEGFGLA

SEQ ID NO: 921758 - protein, 3035 aa, Homo sapiens
ASNLGSAVDELMRHQPTLKTDATTAIIKLLEEICNLGRDPKYICQKPSIQKADGTATAPPPRSNHAAEEASSEDEEEEEVQAMQSFNSTQQNETEPNQQVVGTEERIPIPLMDYILNVMKFVESILSNNTTDDHCQEFVNQKGLLPLVTILGLPNLPIDFPTSAACQAVAGVCKSILTLSHEPKVLQEGLLQLDSILSSLEPLHRPIESPGGSVLLRELACAGNVADATLSAQATPLLHALTAAHAYIMMFVHTCRVGQSEIRSISVNQWGSQLGLSVLSKLSQLYCSLVWESTVLLSLCTPNSLPSGCEFGQADMQKLVPKDEKAGTTQGGKRSDGEQDGAAGSMDASTQGLLEGIGLDGDTLAPMETDEPTASDSKGKSKITPAMAARIKQIKPLLSASSRLGRALAELFGLLVKLCVGSPVRQRRSHHAASTTTAPTPAARSTASALTKLLTKGLSWQPPPYTPTPRFRLTFFICSVGFTSPMLFDERKYPYHLMLQKFLCSGGHNALFETFNWALSMGGKVPVSEGLEHSDLPDGTGEFLDAWLMLVEKMVNPTTVLESPHSLPAKLPGGVQNFPQFSALRFLVVTQKAAFTCIKNLWNRKPLKVYGGRMAESMLAILCHILRGEPVIRERLSKEKEGSRGEEDTGQEEGGSRREPQVNQQQLQQLMDMGFTREHAMEALLNTSTMEQATEYLLTHPPPIMGGVVRDLSMSEEDQMMRAIAMSLGQDIPMDQRAESPEEVACRKEEEERKAREKQEEEEAKCLEKFQDADPLEQDELHTFTDTMLPGCFHLLDELPDTVYRVCDLIMTAIKRNGADYRDMILKQVVNQVWEAADVLIKAALPLTTSDTKTVSEWISQMATLPQASNLATRILLLTLLFEELKLPCAWVVESSGILNVLIKLLEVVQPCLQAAKEQKEVQTPKWITPVLLLIDFYEKTAISSKRRAQMTKYLQSNSNNWRWFDDRSGRWCSYSASNNSTIDSAWKSGETSVRFTAGRRRYTVQFTTMVQVNEETGNRRPVMLTLLRVPRLNKNSKNSNGQELEKTLEESKEMDIKRKENKGNDTPLALESTNTEKETSLEETKIGEILIQGLTEDMVTVLIRACVSMLGVPVDPDTLHATLRLCLRLTRDHKYAMMFAELKSTRMILNLTQSSGFNGFTPLVTLLLRHIIEDPCTLRHTMEKVVRSAATSGAGSTTSGVVSGSLGSREINYILRVLGPAACRNPDIFTEVANCCIRIALPAPRGSGTASDDEFENLRIKGPNAVQLVKTTPLKPSPLPVIPDTIKEVIYDMLNALAAYHAPEEADKSDPKPGVMTQEVGQLLQDMGDDVYQQYRSLTRQSSDFDTQSGFSINSQVFAADGASTETSASGTSQGEASTPEESRDGKKDKEGDRASEEGKQKGKGSKPLMPTSTILRLLAELVRSYVGIATLIANYSYTVGQSELIKEDCSVLAFVLDHLLPHTQNAEDKDTPALARLFLASLAAAGSGTDAQVALVNEVKAALGRALAMAESTEKHARLQAVMCIISTIMESCPSTSSFYSSATAKTQHNGMNNIIRLFLKKGLVNDLARVPHSLDLSSPNMANTVNAALKPLETLSRIVNQPSSLFGSKSASSKNKSEQDAQGASQDSSSNQQDPGEPGEAEVQEEDHDVTQTEVADGDIMDGEAETDSVVIAGQPEVLSSQEMQVENELEDLIDELLERDGGSGNSTIIVSRSGEDESQEDVLMDEAPSNLSQASTLQANREDSMNILDPEDEEEHTQEEDSSGSNEDEDDSQDEEEEEEEDEEDDQEDDEGEEGDEDDDDDGSEMELDEDYPDMNASPLVRFERFDREDDLIIEFDNMFSSATDIPPSPGNIPTTHPLMVRHADHSSLTLGSGSSTTRLTQGIGRSQRTLRQLTANTGHTIHVHYPGNRQPNPPLILQRLLGPSAAADILQLSSSLPLQSRGRARLLVGNDDVHIIARSDDELLDDFFHDQSTATSQAGTLSSIPTALTRWTEECKVLDAESMHDCVSVVKVSIVNHLEFLRDEELEERREKRRKQLAEEETKITDKGKEDKENRDQSAQCTASKSNDSTEQNLSDGTPMPDSYPTTPSSTDAATSESKETLGTLQSSQQQPTLPTPPALGEVPQELQSPAGEGGSSTQLLMPVEPEELGPTRPSGEAETTQMELSPAPTITSLSPERAEDSDALTAVSSQLEGSPMDTSSLASCTLEEAVGDTSAAGSSEQPRAGSSTPGDAPPAVAEVQGRSDGSGESAQPPEDSSPPASSESSSTRDSAVAISGADSRGILEEPLPSTSSEEEDPLAGISLPEGVDPSFLAALPDDIRREVLQNQLGIRPPTRTAPSTNSSAPAVVGNPGVTEVSPEFLAALPPAIQEEVLAQQRAEQQRRELAQNASSDTPMDPVTFIQTLPSDLRRSVLEDMEDSVLAVMPPDIAAEAQALRREQEARQRQLMHERLFGHSSTSALSAILRSPAFTSRLSGNRGVQYTRLAVQRGGTFQMGGSSSHNRPSGSNVDTLLRLRGRLLLDHEALSCLLVLLFVDEPKLNTSRLHRVLRNLCYHAQTRHWVIRSLLSILQRSSESELCIETPKLTTSEEKGKKSSKSCGSSSHENRPLDLLHKMESKSSNQLSWLSVSMDAALGCRTNIFQIQRSGGRKHTEKHASGGSTVHIHPQAAPVVCRHVLDTLIQLAKVFPSHFTQQRTKETNCESDRERGNKACSPCSSQSSSSGICTDFWDLLVKLDNMNVSRKGKNSVKSVPVSAGGEGETSPYSLEASPLGQLMNMLSHPVIRRSSLLTEKLLRLLSLISIALPENKVSEAQANSGSGASSTTTATSTTSTTTTTAASTTPTPPTAPTPVTSAPALVAATAISTIVVAASTTVTTPTTATTTVSISPTTKGSKSPAKVSDGGSSSTDFKMVSSGLTENQLQLSVEVLTSHSCSEEGLEDAANVLLQLSRGDSGTRDTVLKLLLNGARHLGYTLCKQIGTLLAELREYNLEQQRRAQCETLSPDGLPEEQPQTTKLKGKMQSRFLRFRLS

SEQ ID NO: 921759 - protein, 3719 aa, Homo sapiens; identical to SEQ ID NO: 921715

SEQ ID NO: 921760 - protein, 3669 aa, Homo sapiens
ASNLGSAVDELMRHQPTLKTDATTAIIKLLEEICNLGRDPKYICQKPSIQKADGTATAPPPRSNHAAEEASSEDEEEEEVQAMQSFNSTQQNETEPNQQVVGTEERIPIPLMDYILNVMKFVESILSNNTTDDHCQEFVNQKGLLPLVTILGLPNLPIDFPTSAACQAVAGVCKSILTLSHEPKVLQEGLLQLDSILSSLEPLHRPIESPGGSVLLRELACAGNVADATLSAQATPLLHALTAAHAYIMMFVHTCRVGQSEIRSISVNQWGSQLGLSVLSKLSQLYCSLVWESTVLLSLCTPNSLPSGCEFGQADMQKLVPKDEKAGTTQGGKRSDGEQDGAAGSMDASTQGLLEGIGLDGDTLAPMETDEPTASDSKGKSKITPAMAARIKQIKPLLSASSRLGRALAELFGLLVKLCVGSPVRQRRSHHAASTTTAPTPAARSTASALTKLLTKGLSWQPPPYTPTPRFRLTFFICSVGFTSPMLFDERKYPYHLMLQKFLCSGGHNALFETFNWALSMGGKVPVSEGLEHSDLPDGTGEFLDAWLMLVEKMVNPTTVLESPHSLPAKLPGGVQNFPQFSALRFLVVTQKAAFTCIKNLWNRKPLKVYGGRMAESMLAILCHILRGEPVIRERLSKEKEGSRGEEDTGQEEGGSRREPQVNQQQLQQLMDMGFTREHAMEALLNTSTMEQATEYLLTHPPPIMGGVVRDLSMSEEDQMMRAIAMSLGQDIPMDQRAESPEEVACRKEEEERKAREKQEEEEAKCLEKFQDADPLEQDELHTFTDTMLPGCFHLLDELPDTVYRVCDLIMTAIKRNGADYRDMILKQVVNQVWEAADVLIKAALPLTTSDTKTVSEWISQMATLPQASNLATRILLLTLLFEELKLPCAWVVESSGILNVLIKLLEVVQPCLQAAKEQKEVQTPKWITPVLLLIDFYEKTAISSKRRAQMTKYLQSNSNNWRWFDDRSGRWCSYSASNNSTIDSAWKSGETSVRFTAGRRRYTVQFTTMVQVNEETGNRRPVMLTLLRVPRLNKNSKNSNGQELEKTLEESKEMDIKRKENKGNDTPLALESTNTEKETSLEETKIGEILIQGLTEDMVTVLIRACVSMLGVPVDPDTLHATLRLCLRLTRDHKYAMMFAELKSTRMILNLTQSSGFNGFTPLVTLLLRHIIEDPCTLRHTMEKVVRSAATSGAGSTTSGVVSGSLGSREINYILRVLGPAACRNPDIFTEVANCCIRIALPAPRGSGTASDDEFENLRIKGPNAVQLVKTTPLKPSPLPVIPDTIKEVIYDMLNALAAYHAPEEADKSDPKPGVMTQEVGQLLQDMGDDVYQQYRSLTRQSSDFDTQSGFSINSQVFAADGASTETSASGTSQGEASTPEESRDGKKDKEGDRASEEGKQKGKGSKPLMPTSTILRLLAELVRSYVGIATLIANYSYTVGQSELIKEDCSVLAFVLDHLLPHTQNAEDKDTPALARLFLASLAAAGSGTDAQVALVNEVKAALGRALAMAESTEKHARLQAVMCIISTIMESCPSTSSFYSSATAKTQHNGMNNIIRLFLKKGLVNDLARVPHSLDLSSPNMANTVNAALKPLETLSRIVNQPSSLFGSKSASSKNKSEQDAQGASQDSSSNQQDPGEPGEAEVQEEDHDVTQTEVADGDIMDGEAETDSVVIAGQPEVLSSQEMQVENELEDLIDELLERDGGSGNSTIIVSRSGEDESQEDVLMDEAPSNLSQASTLQANREDSMNILDPEDEEEHTQEEDSSGSNEDEDDSQDEEEEEEEDEEDDQEDDEGEEGDEDDDDDGSEMELDEDYPDMNASPLVRFERFDREDDLIIEFDNMFSSATDIPPSPGNIPTTHPLMVRHADHSSLTLGSGSSTTRLTQGIGRSQRTLRQLTANTGHTIHVHYPGNRQPNPPLILQRLLGPSAAADILQLSSSLPLQSRGRARLLVGNDDVHIIARSDDELLDDFFHDQSTATSQAGTLSSIPTALTRWTEECKVLDAESMHDCVSVVKVSIVNHLEFLRDEELEERREKRRKQLAEEETKITDKGKEDKENRDQSAQCTASKSNDSTEQNLSDGTPMPDSYPTTPSSTDAATSESKETLGTLQSSQQQPTLPTPPALGEVPQELQSPAGEGGSSTHSQLEGSPMDTSSLASCTLEEAVGDTSAAGSSEQPRAGSSTPGDAPPAVAEVQGRSDGSGESAQPPEDSSPPASSESSSTRDSAVAISGADSRGILEEPLPSTSSEEEDPLAGISLPEGVDPSFLAALPDDIRREVLQNQLGIRPPTRTAPSTNSSAPAVVGNPGVTEVSPEFLAALPPAIQEEVLAQQRAEQQRRELAQNASSDTPMDPVTFIQTLPSDLRRSVLEDMEDSVLAVMPPDIAAEAQALRREQEARQRQLMHERLFGHSSTSALSAILRSPAFTSRLSGNRGVQYTRLAVQRGGTFQMGGSSSHNRPSGSNVDTLLRLRGRLLLDHEALSCLLVLLFVDEPKLNTSRLHRVLRNLCYHAQTRHWVIRSLLSILQRSSESELCIETPKLTTSEEKGKKSSKSCGSSSHENRPLDLLHKMESKSSNQLSWLSVSMDAALGCRTNIFQIQRSGGRKHTEKHASGGSTVHIHPQAAPVVCRHVLDTLIQLAKVFPSHFTQQRTKETNCESDRERGNKACSPCSSQSSSSGICTDFWDLLVKLDNMNVSRKGKNSVKSVPVSAGGEGETSPYSLEASPLGQLMNMLSHPVIRRSSLLTEKLLRLLSLISIALPENKVSEAQANSGSGASSTTTATSTTSTTTTTAASTTPTPPTAPTPVTSAPALVAATAISTIVVAASTTVTTPTTATTTVSISPTTKGSKSPAKVSDGGSSSTDFKMVSSGLTENQLQLSVEVLTSHSCSEEGLEDAANVLLQLSRGDSGTRDTVLKLLLNGARHLGYTLCKQIGTLLAELREYNLEQQRRAQCETLSPDGLPEEQPQTTKLKGKMQSRFDMAENVVIVASQKRPLGGRELQLPSMSMLTSKTSTQKFFLRVLQVIIQLRDDTRRANKKAKQTGRLGSSGLGSASSIQAAVRQLEAEADAIIQMVREGQRARRQQQAATSESSQSEASVRREESPMDVDQPSPSAQDTQSIASDGTPQGEKEKEERPPELPLLSEQLSLDELWDMLGECLKELEESHDQHAVLVLQPAVEAFFLVHATERESKPPVRDTRESQLAHIKDEPPPLSPAPLTPATPSSLDPFFSREPSSMHISSSLPPDTQKFLRFAETHRTVLNQILRQSTTHLADGPFAVLVDYIRVLDFDVKRKYFRQELERLDEGLRKEDMAVHVRRDHVFEDSYRELHRKSPEEMKNRLYIVFEGEEGQDAGGLLREWYMIISREMFNPMYALFRTSPGDRVTYTINPSSHCNPNHLSYFKFVGRIVAKAVYDNRLLECYFTRSFYKHILGKSVRYTDMESEDYHFYQGLVYLLENDVSTLGYDLTFSTEVQEFGVCEVRDLKPNGANILVTEENKKEYVHLVCQMRMTGAIRKQLAAFLEGFYEIIPKRLISIFTEQELELLISGLPTIDIDDLKSNTEYHKYQSNSIQIQWFWRALRSFDQADRAKFLQFVTGTSKVPLQGFAALEGMNGIQKFQIHRDDRSTDRLPSAHTCFNQLDLPAYESFEKLRHMLLLAIQECSEGFGLA

SEQ ID NO: 921761 - protein, 1992 aa, Homo sapiens
MDEAPSNLSQASTLQANREDSMNILDPEDEEEHTQEEDSSGSNEDEDDSQDEEEEEEEDEEDDQEDDEGEEGDEDDDDDGSEMELDEDYPDMNASPLVRFERFDREDDLIIEFDNMFSSATDIPPSPGNIPTTHPLMVRHADHSSLTLGSGSSTTRLTQGIGRSQRTLRQLTANTGHTIHVHYPGNRQPNPPLILQRLLGPSAAADILQLSSSLPLQSRGRARLLVGNDDVHIIARSDDELLDDFFHDQSTATSQAGTLSSIPTALTRWTEECKVLDAESMHDCVSVVKVSIVNHLEFLRDEELEERREKRRKQLAEEETKITDKGKEDKENRDQSAQCTASKSNDSTEQNLSDGTPMPDSYPTTPSSTDAATSESKETLGTLQSSQQQPTLPTPPALGEVPQELQSPAGEGGSSTQLLMPVEPEELGPTRPSGEAETTQMELSPAPTITSLSPERAEDSDALTAVSSQLEGSPMDTSSLASCTLEEAVGDTSAAGSSEQPRAGSSTPGDAPPAVAEVQGRSDGSGESAQPPEDSSPPASSESSSTRDSAVAISGADSRGILEEPLPSTSSEEEDPLAGISLPEGVDPSFLAALPDDIRREVLQNQLGIRPPTRTAPSTNSSAPAVVGNPGVTEVSPEFLAALPPAIQEEVLAQQRAEQQRRELAQNASSDTPMDPVTFIQTLPSDLRRSVLEDMEDSVLAVMPPDIAAEAQALRREQEARQRQLMHERLFGHSSTSALSAILRSPAFTSRLSGNRGVQYTRLAVQRGGTFQMGGSSSHNRPSGSNVDTLLRLRGRLLLDHEALSCLLVLLFVDEPKLNTSRLHRVLRNLCYHAQTRHWVIRSLLSILQRSSESELCIETPKLTTSEEKGKKSSKSCGSSSHENRPLDLLHKMESKSSNQLSWLSVSMDAALGCRTNIFQIQRSGGRKHTEKHASGGSTVHIHPQAAPVVCRHVLDTLIQLAKVFPSHFTQQRTKETNCESDRERGNKACSPCSSQSSSSGICTDFWDLLVKLDNMNVSRKGKNSVKSVPVSAGGEGETSPYSLEASPLGQLMNMLSHPVIRRSSLLTEKLLRLLSLISIALPENKVSEAQANSGSGASSTTTATSTTSTTTTTAASTTPTPPTAPTPVTSAPALVAATAISTIVVAASTTVTTPTTATTTVSISPTTKGSKSPAKVSDGGSSSTDFKMVSSGLTENQLQLSVEVLTSHSCSEEGLEDAANVLLQLSRGDSGTRDTVLKLLLNGARHLGYTLCKQIGTLLAELREYNLEQQRRAQCETLSPDGLPEEQPQTTKLKGKMQSRFDMAENVVIVASQKRPLGGRELQLPSMSMLTSKTSTQKFFLRVLQVIIQLRDDTRRANKKAKQTGRLGSSGLGSASSIQAAVRQLEAEADAIIQMVREGQRARRQQQAATSESSQSEASVRREESPMDVDQPSPSAQDTQSIASDGTPQGEKEKEERPPELPLLSEQLSLDELWDMLGECLKELEESHDQHAVLVLQPAVEAFFLVHATERESKPPVRDTRESQLAHIKDEPPPLSPAPLTPATPSSLDPFFSREPSSMHISSSLPPDTQKFLRFAETHRTVLNQILRQSTTHLADGPFAVLVDYIRVLDFDVKRKYFRQELERLDEGLRKEDMAVHVRRDHVFEDSYRELHRKSPEEMKNRLYIVFEGEEGQDAGGLLREWYMIISREMFNPMYALFRTSPGDRVTYTINPSSHCNPNHLSYFKFVGRIVAKAVYDNRLLECYFTRSFYKHILGKSVRYTDMESEDYHFYQGLVYLLENDVSTLGYDLTFSTEVQEFGVCEVRDLKPNGANILVTEENKKEYVHLVCQMRMTGAIRKQLAAFLEGFYEIIPKRLISIFTEQELELLISGLPTIDIDDLKSNTEYHKYQSNSIQIQWFWRALRSFDQADRAKFLQFVTGTSKVPLQGFAALEGMNGIQKFQIHRDDRSTDRLPSAHTCFNQLDLPAYESFEKLRHMLLLAIQECSEGFGLA

SEQ ID NO: 921762 - protein, 3724 aa, Homo sapiens
ASNLGSAVDELMRHQPTLKTDATTAIIKLLEEICNLGRDPKYICQKPSIQKADGTATAPPPRSNHAAVVTDTILMGAERIVNSGESKLKVLTNEIYTEAILKIVAAERAYSYSADGIYIPFVCMKFVESILSNNTTDDHCQEFVNQKGLLPLVTILGLPNLPIDFPTSAACQAVAGVCKSILTLSHEPKVLQEGLLQLDSILSSLEPLHRPIESPGGSVLLRELACAGNVADATLSAQATPLLHALTAAHAYIMMFVHTCRVGQSEIRSISVNQWGSQLGLSVLSKLSQLYCSLVWESTVLLSLCTPNSLPSGCEFGQADMQKLVPKDEKAGTTQGGKRSDGEQDGAAGSMDASTQGLLEGIGLDGDTLAPMETDEPTASDSKGKSKITPAMAARIKQIKPLLSASSRLGRALAELFGLLVKLCVGSPVRQRRSHHAASTTTAPTPAARSTASALTKLLTKGLSWQPPPYTPTPRFRLTFFICSVGFTSPMLFDERKYPYHLMLQKFLCSGGHNALFETFNWALSMGGKVPVSEGLEHSDLPDGTGEFLDAWLMLVEKMVNPTTVLESPHSLPAKLPGGVQNFPQFSALRFLVVTQKAAFTCIKNLWNRKPLKVYGGRMAESMLAILCHILRGEPVIRERLSKEKEGSRGEEDTGQEEGGSRREPQVNQQQLQQLMDMGFTREHAMEALLNTSTMEQATEYLLTHPPPIMGGVVRDLSMSEEDQMMRAIAMSLGQDIPMDQRAESPEEVACRKEEEERKAREKQEEEEAKCLEKFQDADPLEQDELHTFTDTMLPGCFHLLDELPDTVYRVCDLIMTAIKRNGADYRDMILKQVVNQVWEAADVLIKAALPLTTSDTKTVSEWISQMATLPQASNLATRILLLTLLFEELKLPCAWVVESSGILNVLIKLLEVVQPCLQAAKEQKEVQTPKWITPVLLLIDFYEKTAISSKRRAQMTKYLQSNSNNWRWFDDRSGRWCSYSASNNSTIDSAWKSGETSVRFTAGRRRYTVQFTTMVQVNEETGNRRPVMLTLLRVPRLNKNSKNSNGQELEKTLEESKEMDIKRKENKGNDTPLALESTNTEKETSLEETKIGEILIQGLTEDMVTVLIRACVSMLGVPVDPDTLHATLRLCLRLTRDHKYAMMFAELKSTRMILNLTQSSGFNGFTPLVTLLLRHIIEDPCTLRHTMEKVVRSAATSGAGSTTSGVVSGSLGSREINYILRVLGPAACRNPDIFTEVANCCIRIALPAPRGSGTASDDEFENLRIKGPNAVQLVKTTPLKPSPLPVIPDTIKEVIYDMLNALAAYHAPEEADKSDPKPGVMTQEVGQLLQDMGDDVYQQYRSLTRQSSDFDTQSGFSINSQVFAADGASTETSASGTSQGEASTPEESRDGKKDKEGDRASEEGKQKGKGSKPLMPTSTILRLLAELVRSYVGIATLIANYSYTVGQSELIKEDCSVLAFVLDHLLPHTQNAEDKDTPALARLFLASLAAAGSGTDAQVALVNEVKAALGRALAMAESTEKHARLQAVMCIISTIMESCPSTSSFYSSATAKTQHNGMNNIIRLFLKKGLVNDLARVPHSLDLSSPNMANTVNAALKPLETLSRIVNQPSSLFGSKSASSKNKSEQDAQGASQDSSSNQQDPGEPGEAEVQEEDHDVTQTEVADGDIMDGEAETDSVVIAGQPEVLSSQEMQVENELEDLIDELLERDGGSGNSTIIVSRSGEDESQEDVLMDEAPSNLSQASTLQANREDSMNILDPEDEEEHTQEEDSSGSNEDEDDSQDEEEEEEEDEEDDQEDDEGEEGDEDDDDDGSEMELDEDYPDMNASPLVRFERFDREDDLIIEFDNMFSSATDIPPSPGNIPTTHPLMVRHADHSSLTLGSGSSTTRLTQGIGRSQRTLRQLTANTGHTIHVHYPGNRQPNPPLILQRLLGPSAAADILQLSSSLPLQSRGRARLLVGNDDVHIIARSDDELLDDFFHDQSTATSQAGTLSSIPTALTRWTEECKVLDAESMHDCVSVVKVSIVNHLEFLRDEELEERREKRRKQLAEEETKITDKGKEDKENRDQSAQCTASKSNDSTEQNLSDGTPMPDSYPTTPSSTDAATSESKETLGTLQSSQQQPTLPTPPALGEVPQELQSPAGEGGSSTQLLMPVEPEELGPTRPSGEAETTQMELSPAPTITSLSPERAEDSDALTAVSSQLEGSPMDTSSLASCTLEEAVGDTSAAGSSEQPRAGSSTPGDAPPAVAEVQGRSDGSGESAQPPEDSSPPASSESSSTRDSAVAISGADSRGILEEPLPSTSSEEEDPLAGISLPEGVDPSFLAALPDDIRREVLQNQLGIRPPTRTAPSTNSSAPAVVGNPGVTEVSPEFLAALPPAIQEEVLAQQRAEQQRRELAQNASSDTPMDPVTFIQTLPSDLRRSVLEDMEDSVLAVMPPDIAAEAQALRREQEARQRQLMHERLFGHSSTSALSAILRSPAFTSRLSGNRGVQYTRLAVQRGGTFQMGGSSSHNRPSGSNVDTLLRLRGRLLLDHEALSCLLVLLFVDEPKLNTSRLHRVLRNLCYHAQTRHWVIRSLLSILQRSSESELCIETPKLTTSEEKGKKSSKSCGSSSHENRPLDLLHKMESKSSNQLSWLSVSMDAALGCRTNIFQIQRSGGRKHTEKHASGGSTVHIHPQAAPVVCRHVLDTLIQLAKVFPSHFTQQRTKETNCESDRERGNKACSPCSSQSSSSGICTDFWDLLVKLDNMNVSRKGKNSVKSVPVSAGGEGETSPYSLEASPLGQLMNMLSHPVIRRSSLLTEKLLRLLSLISIALPENKVSEAQANSGSGASSTTTATSTTSTTTTTAASTTPTPPTAPTPVTSAPALVAATAISTIVVAASTTVTTPTTATTTVSISPTTKGSKSPAKVSDGGSSSTDFKMVSSGLTENQLQLSVEVLTSHSCSEEGLEDAANVLLQLSRGDSGTRDTVLKLLLNGARHLGYTLCKQIGTLLAELREYNLEQQRRAQCETLSPDGLPEEQPQTTKLKGKMQSRFDMAENVVIVASQKRPLGGRELQLPSMSMLTSKTSTQKFFLRVLQVIIQLRDDTRRANKKAKQTGRLGSSGLGSASSIQAAVRQLEAEADAIIQMVREGQRARRQQQAATSESSQSEASVRREESPMDVDQPSPSAQDTQSIASDGTPQGEKEKEERPPELPLLSEQLSLDELWDMLGECLKELEESHDQHAVLVLQPAVEAFFLVHATERESKPPVRDTRESQLAHIKDEPPPLSPAPLTPATPSSLDPFFSREPSSMHISSSLPPDTQKFLRFAETHRTVLNQILRQSTTHLADGPFAVLVDYIRVLDFDVKRKYFRQELERLDEGLRKEDMAVHVRRDHVFEDSYRELHRKSPEEMKNRLYIVFEGEEGQDAGGLLREWYMIISREMFNPMYALFRTSPGDRVTYTINPSSHCNPNHLSYFKFVGRIVAKAVYDNRLLECYFTRSFYKHILGKSVRYTDMESEDYHFYQGLVYLLENDVSTLGYDLTFSTEVQEFGVCEVRDLKPNGANILVTEENKKEYVHLVCQMRMTGAIRKQLAAFLEGFYEIIPKRLISIFTEQELELLISGLPTIDIDDLKSNTEYHKYQSNSIQIQWFWRALRSFDQADRAKFLQFVTGTSKVPLQGFAALEGMNGIQKFQIHRDDRSTDRLPSAHTCFNQLDLPAYESFEKLRHMLLLAIQECSEGFGLA

SEQ ID NO: 921763 - protein, 3404 aa, Homo sapiens
MQKLVPKDEKAGTTQGGKRSDGEQDGAAGSMDASTQGLLEGIGLDGDTLAPMETDEPTASDSKGKSKITPAMAARIKQIKPLLSASSRLGRALAELFGLLVKLCVGSPVRQRRSHHAASTTTAPTPAARSTASALTKLLTKGLSWQPPPYTPTPRFRLTFFICSVGFTSPMLFDERKYPYHLMLQKFLCSGGHNALFETFNWALSMGGKVPVSEGLEHSDLPDGTGEFLDAWLMLVEKMVNPTTVLESPHSLPAKLPGGVQNFPQFSALRFLVVTQKAAFTCIKNLWNRKPLKVYGGRMAESMLAILCHILRGEPVIRERLSKEKEGSRGEEDTGQEEGGSRREPQVNQQQLQQLMDMGFTREHAMEALLNTSTMEQATEYLLTHPPPIMGGVVRDLSMSEEDQMMRAIAMSLGQDIPMDQRAESPEEVACRKEEEERKAREKQEEEEAKCLEKFQDADPLEQDELHTFTDTMLPGCFHLLDELPDTVYRVCDLIMTAIKRNGADYRDMILKQVVNQVWEAADVLIKAALPLTTSDTKTVSEWISQMATLPQASNLATRILLLTLLFEELKLPCAWVVESSGILNVLIKLLEVVQPCLQAAKEQKEVQTPKWITPVLLLIDFYEKTAISSKRRAQMTKYLQSNSNNWRWFDDRSGRWCSYSASNNSTIDSAWKSGETSVRFTAGRRRYTVQFTTMVQVNEETGNRRPVMLTLLRVPRLNKNSKNSNGQELEKTLEESKEMDIKRKENKGNDTPLALESTNTEKETSLEETKIGEILIQGLTEDMVTVLIRACVSMLGVPVDPDTLHATLRLCLRLTRDHKYAMMFAELKSTRMILNLTQSSGFNGFTPLVTLLLRHIIEDPCTLRHTMEKVVRSAATSGAGSTTSGVVSGSLGSREINYILRVLGPAACRNPDIFTEVANCCIRIALPAPRGSGTASDDEFENLRIKGPNAVQLVKTTPLKPSPLPVIPDTIKEVIYDMLNALAAYHAPEEADKSDPKPGVMTQEVGQLLQDMGDDVYQQYRSLTRQSSDFDTQSGFSINSQVFAADGASTETSASGTSQGEASTPEESRDGKKDKEGDRASEEGKQKGKGSKPLMPTSTILRLLAELVRSYVGIATLIANYSYTVGQSELIKEDCSVLAFVLDHLLPHTQNAEDKDTPALARLFLASLAAAGSGTDAQVALVNEVKAALGRALAMAESTEKHARLQAVMCIISTIMESCPSTSSFYSSATAKTQHNGMNNIIRLFLKKGLVNDLARVPHSLDLSSPNMANTVNAALKPLETLSRIVNQPSSLFGSKSASSKNKSEQDAQGASQDSSSNQQDPGEPGEAEVQEEDHDVTQTEVADGDIMDGEAETDSVVIAGQPEVLSSQEMQVENELEDLIDELLERDGGSGNSTIIVSRSGEDESQEDVLMDEAPSNLSQASTLQANREDSMNILDPEDEEEHTQEEDSSGSNEDEDDSQDEEEEEEEDEEDDQEDDEGEEGDEDDDDDGSEMELDEDYPDMNASPLVRFERFDREDDLIIEFDNMFSSATDIPPSPGNIPTTHPLMVRHADHSSLTLGSGSSTTRLTQGIGRSQRTLRQLTANTGHTIHVHYPGNRQPNPPLILQRLLGPSAAADILQLSSSLPLQSRGRARLLVGNDDVHIIARSDDELLDDFFHDQSTATSQAGTLSSIPTALTRWTEECKVLDAESMHDCVSVVKVSIVNHLEFLRDEELEERREKRRKQLAEEETKITDKGKEDKENRDQSAQCTASKSNDSTEQNLSDGTPMPDSYPTTPSSTDAATSESKETLGTLQSSQQQPTLPTPPALGEVPQELQSPAGEGGSSTQLLMPVEPEELGPTRPSGEAETTQMELSPAPTITSLSPERAEDSDALTAVSSQLEGSPMDTSSLASCTLEEAVGDTSAAGSSEQPRAGSSTPGDAPPAVAEVQGRSDGSGESAQPPEDSSPPASSESSSTRDSAVAISGADSRGILEEPLPSTSSEEEDPLAGISLPEGVDPSFLAALPDDIRREVLQNQLGIRPPTRTAPSTNSSAPAVVGNPGVTEVSPEFLAALPPAIQEEVLAQQRAEQQRRELAQNASSDTPMDPVTFIQTLPSDLRRSVLEDMEDSVLAVMPPDIAAEAQALRREQEARQRQLMHERLFGHSSTSALSAILRSPAFTSRLSGNRGVQYTRLAVQRGGTFQMGGSSSHNRPSGSNVDTLLRLRGRLLLDHEALSCLLVLLFVDEPKLNTSRLHRVLRNLCYHAQTRHWVIRSLLSILQRSSESELCIETPKLTTSEEKGKKSSKSCGSSSHENRPLDLLHKMESKSSNQLSWLSVSMDAALGCRTNIFQIQRSGGRKHTEKHASGGSTVHIHPQAAPVVCRHVLDTLIQLAKVFPSHFTQQRTKETNCESDRERGNKACSPCSSQSSSSGICTDFWDLLVKLDNMNVSRKGKNSVKSVPVSAGGEGETSPYSLEASPLGQLMNMLSHPVIRRSSLLTEKLLRLLSLISIALPENKVSEAQANSGSGASSTTTATSTTSTTTTTAASTTPTPPTAPTPVTSAPALVAATAISTIVVAASTTVTTPTTATTTVSISPTTKGSKSPAKVSDGGSSSTDFKMVSSGLTENQLQLSVEVLTSHSCSEEGLEDAANVLLQLSRGDSGTRDTVLKLLLNGARHLGYTLCKQIGTLLAELREYNLEQQRRAQCETLSPDGLPEEQPQTTKLKGKMQSRFDMAENVVIVASQKRPLGGRELQLPSMSMLTSKTSTQKFFLRVLQVIIQLRDDTRRANKKAKQTGRLGSSGLGSASSIQAAVRQLEAEADAIIQMVREGQRARRQQQAATSESSQSEASVRREESPMDVDQPSPSAQDTQSIASDGTPQGEKEKEERPPELPLLSEQLSLDELWDMLGECLKELEESHDQHAVLVLQPAVEAFFLVHATERESKPPVRDTRESQLAHIKDEPPPLSPAPLTPATPSSLDPFFSREPSSMHISSSLPPDTQKFLRFAETHRTVLNQILRQSTTHLADGPFAVLVDYIRVLDFDVKRKYFRQELERLDEGLRKEDMAVHVRRDHVFEDSYRELHRKSPEEMKNRLYIVFEGEEGQDAGGLLREWYMIISREMFNPMYALFRTSPGDRVTYTINPSSHCNPNHLSYFKFVGRIVAKAVYDNRLLECYFTRSFYKHILGKSVRYTDMESEDYHFYQGLVYLLENDVSTLGYDLTFSTEVQEFGVCEVRDLKPNGANILVTEENKKEYVHLVCQMRMTGAIRKQLAAFLEGFYEIIPKRLISIFTEQELELLISGLPTIDIDDLKSNTEYHKYQSNSIQIQWFWRALRSFDQADRAKFLQFVTGTSKVPLQGFAALEGMNGIQKFQIHRDDRSTDRLPSAHTCFNQLDLPAYESFEKLRHMLLLAIQECSEGFGLA

SEQ ID NO: 921764 - protein, 138 aa, Homo sapiens
LHFLVPCPSQHRAQQVASSQWRCEHACLWIIIASIIEQDSVKGTVPGSDRGKLRAAENATWGTGAAGGPGLSPRPGRAGSGRLGAAHADFWPGAIPQEPLQGRPAEEPILAPSAPSTGPPGRFPGLQAPPRGRRPPPY

SEQ ID NO: 921765 - protein, 1016 aa, Homo sapiens
MAPRTLWSCYLCCLLTAAAGAASYPPRGFSLYTGSSGALSPGGPQAQIAPRPASRHRNWCAYVVTRTVSCVLEDGVETYVKYQPCAWGQPQCPQSIMYRRFLRPRYRVAYKTVTDMEWRCCQGYGGDDCAESPAPALGPASSTPRPLARPARPNLSGSSAGSPLSGLGGEGPGESEKVQQLEEQVQSLTKELQGLRGVLQGLSGRLAEDVQRAVETAFNGRQQPADAAARPGVHETLNEIQHQLQLLDTRVSTHDQELGHLNNHHGGSSSSGGSRAPAPASAPPGPSEELLRQLEQRLQESCSVCLAGLDGFRRQQQEDRERLRAMEKLLASVEERQRHLAGLAVGRRPPQECCSPELGRRLAELERRLDVVAGSVTVLSGRRGTELGGAAGQGGHPPGYTSLASRLSRLEDRFNSTLGPSEEQEESWPGAPGGLSHWLPAARGRLEQLGGLLANVSGELGGRLDLLEEQVAGAMQACGQLCSGAPGEQDSQVSEILSALERRVLDSEGQLRLVGSGLHTVEAAGEARQATLEGLQEVVGRLQDRVDAQDETAAEFTLRLNLTAARLGQLEGLLQAHGDEGCGACGGVQEELGRLRDGVERCSCPLLPPRGPGAGPGVGGPSRGPLDGFSVFGGSSGSALQALQGELSEVILSFSSLNDSLNELQTTVEGQGADLADLGATKDRIISEINRLQQEATEHATESEERFRGLEEGQAQAGQCPSLEGRLGRLEGVCERLDTVAGGLQGLREGLSRHVAGLWAGLRETNTTSQMQAALLEKLVGGQAGLGRRLGALNSSLQLLEDRLHQLSLKDLTGPAGEAGPPGPPGLQGPPGPAGPPGSPGKDGQEGPIGPPGPQGEQGVEGAPAAPVPQVAFSAALSLPRSEPGTVPFDRVLLNDGGYYDPETGVFTAPLAGRYLLSAVLTGHRHEKVEAVLSRSNQGVARVDSGGYEPEGLENKPVAESQPSPGTLGVFSLILPLQAGDTVCVDLVMGQLAHSEEPLTIFSGALLYGDPELEHA

SEQ ID NO: 921766 - protein, 877 aa, Homo sapiens
MAPRTLWSCYLCCLLTAAAGAASYPPRGFSLYTGSSGALSPGGPQAQIAPRPASRHRNWCAYVVTRTVSCVLEDGVETYVKYQPCAWGQPQCPQSIMYRRFLRPRYRVAYKTVTDMEWRCCQGYGGDDCAESPAPALGPASSTPRPLARPARPNLSGSSAGSPLSGLGGEGPGESEKVQQLEEQVQSLTKELQGLRGVLQGLSGRLAEDVQRAVETAFNGRQQPADAAARPGVHETLNEIQHQLQLLDTRVSTHDQELGHLNNHHGGSSSSGGSRAPAPASAPPGPSEELLRQLEQRLQESCSVCLAGLDGFRRQQQEDRERLRAMEKLLASVEERQRHLAGLAVGRRPPQECCSPELGRRLAELERRLDVVAGSVTVLSGRRGTELGGAAGQGGHPPGYTSLASRLSRLEDRFNSTLGPSEEQEESWPGAPGGLSHWLPAARGRLEQLGGLLANVSGELGGRLDLLEEQVAGAMQACGQLCSGAPGEQDSQVSEILSALERRVLDSEGQLRLVGSGLHTVEAAGEARQATLEGLQEVVGRLQDRVDAQDETAAEFTLRLNLTAARLGQLEGLLQAHGDEGCGACGGVQEELGRLRDGVERCSCPLLPPRGPGAGPGVGGPSRGPLDGFSVFGGSSGSALQALQGELSEVILSFSSLNDSLNELQTTVEGQGADLADLGATKDRIISEINRLQQEATEHATESEERFRGLEEGQAQAGQCPSLEGRLGRLEGVCERLDTVAGGLQGLREGLSRHVAGLWAGLRETNTTSQMQAALLEKLVGGQAGLGRRLGALNSSLQLLEDRLHQLSLKDLTGPAGEAGPPGPPGLQGPPGPAGPPGSPGKDGQEGPIGPPGPQGEQEEWRGHQQPLCPKWHFQLL

SEQ ID NO: 921767 - protein, 871 aa, Homo sapiens
MAPRTLWSCYLCCLLTAAAGAASYPPRGFSLYTGSSGALSPGGPQAQIAPRPASRHRNWCAYVVTRTVSCVLEDGVETYVKYQPCAWGQPQCPQSIMYRRFLRPRYRVAYKTVTDMEWRCCQGYGGDDCAESPAPALGPASSTPRPLARPARPNLSGSSAGSPLSGLGGEGPGESEKVQQLEEQVQSLTKELQGLRGVLQGLSGRLAEDVQRAVETAFNGRQQPADAAARPGVHETLNEIQHQLQLLDTRVSTHDQELGHLNNHHGGSSSSGGSRAPAPASAPPGPSEELLRQLEQRLQESCSVCLAGLDGFRRQQQEDRERLRAMEKLLASVEERQRHLAGLAVGRRPPQECCSPELGRRLAELERRLDVVAGSVTVLSGRRGTELGGAAGQGGHPPGYTSLASRLSRLEDRFNSTLGPSEEQEESWPGAPGGLSHWLPAARGRLEQLGGLLANVSGELGGRLDLLEEQVAGAMQACGQLCSGAPGEQDSQVSEILSALERRVLDSEGQLRLVGSGLHTVEAAGEARQATLEGLQEVVGRLQDRVDAQDETAAEFTLRLNLTAARLGQLEGLLQAHGDEGCGACGGVQEELGRLRDGVERCSCPLLPPRGPGAGPGVGGPSRGPLDGFSVFGGSSGSALQALQGELSEVILSFSSLNDSLNELQTTVEGQGADLADLGATKDRIISEINRLQQEATEHATESEERFRGLEEGQAQAGQCPSLEGRLGRLEGVCERLDTVAGGLQGLREGLSRHVAGLWAGLRETNTTSQMQAALLEKLVGGQAGLGRRLGALNSSLQLLEDRLHQLSLKDLTGPAGEAGPPGPPGLQGPPGPAGPPGSPGKDGQEGPIGPPGPQGEQGECLSFDSGGRSD

SEQ ID NO: 921768 - protein, 877 aa, Homo sapiens; identical to SEQ ID NO: 921766

SEQ ID NO: 921769 - protein, 889 aa, Homo sapiens
MAPRTLWSCYLCCLLTAAAGAASYPPRGFSLYTGSSGALSPGGPQAQIAPRPASRHRNWCAYVVTRTVSCVLEDGVETYVKYQPCAWGQPQCPQSIMYRRFLRPRYRVAYKTVTDMEWRCCQGYGGDDCAESPAPALGPASSTPRPLARPARPNLSGSSAGSPLSGLGGEGPGESEKVQQLEEQVQSLTKELQGLRGVLQGLSGRLAEDVQRAVETAFNGRQQPADAAARPGVHETLNEIQHQLQLLDTRVSTHDQELGHLNNHHGGSSSSGGSRAPAPASAPPGPSEELLRQLEQRLQESCSVCLAGLDGFRRQQQEDRERLRAMEKLLASVEERQRHLAGLAVGRRPPQECCSPELGRRLAELERRLDVVAGSVTVLSGRRGTELGGAAGQGGHPPGYTSLASRLSRLEDRFNSTLGPSEEQEESWPGAPGGLSHWLPAARGRLEQLGGLLANVSGELGGRLDLLEEQVAGAMQACGQLCSGAPGEQDSQVSEILSALERRVLDSEGQLRLVGSGLHTVEAAGEARQATLEGLQEVVGRLQDRVDAQDETAAEFTLRLNLTAARLGQLEGLLQAHGDEGCGACGGVQEELGRLRDGVERCSCPLLPPRGPGAGPGVGGPSRGPLDGFSVFGGSSGSALQALQGELSEVILSFSSLNDSLNELQTTVEGQGADLADLGATKDRIISEINRLQQEATEHATESEERFRGLEEGQAQAGQCPSLEGRLGRLEGVCERLDTVAGGLQGLREGLSRHVAGLWAGLRETNTTSQMQAALLEKLVGGQAGLGRRLGALNSSLQLLEDRLHQLSLKDLTGPAGEAGPPGPPGLQGPPGPAGPPGSPGKDGQEGPIGPPAQGEQEWRGPAALCPSGFQRLNGRLTGGPERSVKRRK

SEQ ID NO: 921770 - protein, 557 aa, Homo sapiens
MAPRTLWSCYLCCLLTAAAGAASYPPRGFSLYTGSSGALSPGGPQAQIAPRPASRHRNWCAYVVTRTVSCVLEDGVETYVKYQPCAWGQPQCPQSIMYRRFLRPRYRVAYKTVTDMEWRCCQGYGGDDCAESPAPALGPASSTPRPLARPARPNLSGSSAGSPLSGLGGEGPGESEKVQQLEEQVQSLTKELQGLRGVLQGLSGRLAEDVQRAVETAFNGRQQPADAAARPGVHETLNEIQHQLQLLDTRVSTHDQELGHLNNHHGGSSSSGGSRAPAPASAPPGPSEELLRQLEQRLQESCSVCLAGLDGFRRQQQEDRERLRAMEKLLASVEERQRHLAGLAVGRRPPQECCSPELGRRLAELERRLDVVAGSVTVLSGRRGTELGGAAGQGGHPPGYTSLASRLSRLEDRFNSTLGPSEEQEESWPGAPGGLSHWLPAARGRLEQLGGLLANVSGELGGRLDLLEEQVAGAMQACGQLCSGAPGEQDSQVSEILSALERRVLDSEGQLRLVGSGLHTVEAAEEPILAPSAPSTGPPGRFPGLQAPPRGRRPPPY

SEQ ID NO: 921771 - protein, 434 aa, Homo sapiens
MAPRTLWSCYLCCLLTAAAGAASYPPRGFSLYTGSSGALSPGGPQAQIAPRPASRHRNWCAYVVTRTVSCVLEDGVETYVKYQPCAWGQPQCPQSIMYRRFLRPRYRVAYKTVTDMEWRCCQGYGGDDCAESPAPALGPASSTPRPLARPARPNLSGSSAGSPLSGLGGEGPGESEKVQQLEEQVQSLTKELQGLRGVLQGLSGRLAEDVQRAVETAFNGRQQPADAAARPGVHETLNEIQHQLQLLDTRVSTHDQELGHLNNHHGGSSSSGGSRAPAPASAPPGPSEELLRQLEQRLQESCSVCLAGLDGFRRQQQEDRERLRAMEKLLASVEERQRHLAGLAVGRRPPQECCSPELGRRLAELERRLDVVAGSVTVLSGRRGTELGGAAGQEATPQATPAWPPACLAWRTASTPPWALRRSRRRAGLGLLGG

SEQ ID NO: 921772 - protein, 118 aa, Homo sapiens
MLSLSPGVFTAPLAGRYLLSAVLTGHRHEKVEAVLSRSNQGVARVDSGGYEPEGLENKPVAESQPSPGTLGVFSLILPLQAGDTVCVDLVMGQLAHSEEPLTIFSGALLYGDPELEHA

SEQ ID NO: 921773 - protein, 1016 aa, Homo sapiens; identical to SEQ ID NO: 921765

SEQ ID NO: 921774 - protein, 919 aa, Homo sapiens
MRGEGSGQAAKEKTCGRGLSEGNWDGRAGLGLSCGAAASPGPASSTPRPLARPARPNLSGSSAGSPLSGLGGEGPGESEKVQQLEEQVQSLTKELQGLRGVLQGLSGRLAEDVQRAVETAFNGRQQPADAAARPGVHETLNEIQHQLQLLDTRVSTHDQELGHLNNHHGGSSSSGGSRAPAPASAPPGPSEELLRQLEQRLQESCSVCLAGLDGFRRQQQEDRERLRAMEKLLASVEERQRHLAGLAVGRRPPQECCSPELGRRLAELERRLDVVAGSVTVLSGRRGTELGGAAGQGGHPPGYTSLASRLSRLEDRFNSTLGPSEEQEESWPGAPGGLSHWLPAARGRLEQLGGLLANVSGELGGRLDLLEEQVAGAMQACGQLCSGAPGEQDSQVSEILSALERRVLDSEGQLRLVGSGLHTVEAAGEARQATLEGLQEVVGRLQDRVDAQDETAAEFTLRLNLTAARLGQLEGLLQAHGDEGCGACGGVQEELGRLRDGVERCSCPLLPPRGPGAGPGVGGPSRGPLDGFSVFGGSSGSALQALQGELSEVILSFSSLNDSLNELQTTVEGQGADLADLGATKDRIISEINRLQQEATEHATESEERFRGLEEGQAQAGQCPSLEGRLGRLEGVCERLDTVAGGLQGLREGLSRHVAGLWAGLRETNTTSQMQAALLEKLVGGQAGLGRRLGALNSSLQLLEDRLHQLSLKDLTGPAGEAGPPGPPGLQGPPGPAGPPGSPGKDGQEGPIGPPGPQGEQGVEGAPAAPVPQVAFSAALSLPRSEPGTVPFDRVLLNDGGYYDPETGVFTAPLAGRYLLSAVLTGHRHEKVEAVLSRSNQGVARVDSGGYEPEGLENKPVAESQPSPGTLGVFSLILPLQAGDTVCVDLVMGQLAHSEEPLTIFSGALLYGDPELEHA

SEQ ID NO: 921775 - protein, 183 aa, Homo sapiens
  misc_feature (152)..(152): Xaa can be any naturally occurring amino acid
  misc_feature (154)..(154): Xaa can be any naturally occurring amino acid
  misc_feature (158)..(158): Xaa can be any naturally occurring amino acid
  misc_feature (163)..(163): Xaa can be any naturally occurring amino acid
MAPRTLWSCYLCCLLTAAAGAASYPPRGFSLYTGSSGALSPGGPQAQIAPRPASRHRNWCAYVVTRTVSCVLEDGVETYVKYQPCAWGQPQCPQSIMYRRFLRPRYRVAYKTVTDMEWRCCQGYGGDDCAESPAPALGPASSTPRPLARPGXAXCVGXIAGGXELTGEEKCLNERSGEWKRME

SEQ ID NO: 921776 - protein, 600 aa, Homo sapiens
MAPRTLWSCYLCCLLTAAAGAASYPPRGFSLYTGSSGALSPGGPQAQIAPRPASRHRNWCAYVVTRTVSCVLEDGVETYVKYQPCAWGQPQCPQSIMYRRFLRPRYRVAYKTVTDMEWRCCQGYGGDDCAESPAPALGPASSTPRPLARPARPNLSGSSAGSPLSGLGGEGPGESEKVQQLEEQVQSLTKELQGLRGVLQGLSGRLAEDVQRAVETAFNGRQQPADAAARPGVHETLNEIQHQLQLLDTRVSTHDQELGHLNNIMADLGATKDRIISEINRLQQEATEHATESEERFRGLEEGQAQAGQCPSLEGRLGRLEGVCERLDTVAGGLQGLREGLSRHVAGLWAGLRETNTTSQMQAALLEKLVGGQAGLGRRLGALNSSLQLLEDRLHQLSLKDLTGPAGEAGPPGPPGLQGPPGPAGPPGSPGKDGQEGPIGPPGVEGAPAAPVPQVAFSAALSLPRSEPGTVPFDRVLLNDGGYYDPETGVFTAPLAGRYLLSAVLTGHRHEKVEAVLSRSNQGVARVDSGGYEPEGLENKPVAESQPSPGTLGVFSLILPLQAGDTVCVDLVMGQLAHSEEPLTIFSGALLYGDPELEHA

SEQ ID NO: 921777 - protein, 419 aa, Homo sapiens
MPLSDFILALKDNPYFGAGFGLVGVGTALALARKGVQLGLVAFRRHYMITLEVPARDRSYAWLLSWLTRHSTRTQHLSVETSYLQHESGRISTKFEFVPSPGNHFIWYRGKWIRVERSREMQMIDLQTGTPWESVTFTALGTDRKVFFNILEEARELALQQEEGKTVMYTAVGSEWRPFGYPRRRRPLNSVVLQQGLADRIVRDVQEFIDNPKWYTDRGIPYRRGYLLYGPPGCGKSSFITALAGELEHSICLLSLTDSSLSDDRLNHLLSVAPQQSLVLLEDVDAAFLSRDLAVENPVKYQGLGRLTFSGLLNALDGVASTEARIVFMTTNHVDRLDPALIRPGRVDLKEYVGYCSHWQLTQMFQRFYPGQAPSLAENFAEHVLRATNQISPAQVQGYFMLYKNDPVGAIHNAESLRR

SEQ ID NO: 921778 - protein, 419 aa, Homo sapiens; identical to SEQ ID NO: 921777

SEQ ID NO: 921779 - protein, 419 aa, Homo sapiens; identical to SEQ ID NO: 921777

SEQ ID NO: 921780 - protein, 419 aa, Homo sapiens; identical to SEQ ID NO: 921777

SEQ ID NO: 921781 - protein, 419 aa, Homo sapiens; identical to SEQ ID NO: 921777

SEQ ID NO: 921782 - protein, 419 aa, Homo sapiens; identical to SEQ ID NO: 921777

SEQ ID NO: 921783 - protein, 490 aa, Homo sapiens
MPLSDFILALKDNPYFGAGFGLVGVGTALALARKGVQLGLVAFRRHYMITLEVPARDRSYAWLLSWLTRHSTRTQHLSVETSYLQHESGRISTKFEFVPSPGNHFIWYRGKWIRVERSREMQMIDLQTGTPWESVTFTALGTDRKVFFNILEEGVGWHRQAFWDIAGMGTFDIQMSSLEKWNKQAGVSPWEQGARRKLFGTAPPNGRISHGEENYWLYLIFSFPARELALQQEEGKTVMYTAVGSEWRPFGYPRRRRPLNSVVLQQGLADRIVRDVQEFIDNPKWYTDRGIPYRRGYLLYGPPGCGKSSFITALAGELEHSICLLSLTDSSLSDDRLNHLLSVAPQQSLVLLEDVDAAFLSRDLAVENPVKYQGLGRLTFSGLLNALDGVASTEARIVFMTTNHVDRLDPALIRPGRVDLKEYVGYCSHWQLTQMFQRFYPGQAPSLAENFAEHVLRATNQISPAQVQGYFMLYKNDPVGAIHNAESLRR

SEQ ID NO: 921784 - protein, 298 aa, Homo sapiens [sequence omitted]

SEQ ID NO: 921785 - protein, 252 aa, Homo sapiens
MYTAVGSEWRPFGYPRRRRPLNSVVLQQGLADRIVRDVQEFIDNPKWYTDRGIPYRRGYLLYGPPGCGKSSFITALAGELEHSICLLSLTDSSLSDDRLNHLLSVAPQQSLVLLEDVDAAFLSRDLAVENPVKYQGLGRLTFSGLLNALDGVASTEARIVFMTTNHVDRLDPALIRPGRVDLKEYVGYCSHWQLTQMFQRFYPGQAPSLAENFAEHVLRATNQISPAQVQGYFMLYKNDPVGAIHNAESLRR

SEQ ID NO: 921786 - protein, 339 aa, Homo sapiens [sequence omitted]

SEQ ID NO: 921787 - protein, 334 aa, Homo sapiens
MPLSDFILALKDNPYFGAGFGLVGVGTALALARKGVQLGLVAFRRHYMITLEVPARDRSYAWLLSWLTRHSTRTQHLSVETSYLQHESGRISTKFEFVPSPGNHFIWYRGKWIRVERSREMQMIDLQTGTPWESVTFTALGTDRKVFFNILEEARELALQQEEGKTVMYTAVGSEWRPFGYPRRRRPLNSVVLQQGLADRIVRDVQEFIDNPKWYTDRGIPYRRGYLLYGPPGCGKSSFITALAGELEHSICLLSLTDSSLSDDRLNHLLSVAPQQSLVLLEDVDAAFLSRDLAVENPVKYQGLGRLTFSGLLLTLAADPDVPEVLSRAGTFLS

SEQ ID NO: 921788 - protein, 127 aa, Homo sapiens
PNAASPRCRRGETIETEGQRVTAVRGLSDGLPQTMWLEARAGVWARFRRGFLGVAEGPGTGELCLWPSMHRCFGILDPSSEAQPRSLLSAHLPACQAQGKVAGVRGWRRGVLETTLLLSLRILLSTM

SEQ ID NO: 921789 - protein, 72 aa, Homo sapiens
SRLPATSCHPMLHSTALAGELEHSICLLSLTDSSLSDDRLNHLLSVAPQQSLVLLEDVDAAFLSRDLAVESK

SEQ ID NO: 921790 - protein, 227 aa, Homo sapiens
MPLSDFILALKDNPYFGAGFGLVGVGTALALARKGVQLGLVAFRRHYMITLEVPARDRSYAWLLSWLTRHSTRTQHLSVETSYLQHESGRISTKFEFVPSPGNHFIWYRGKWIRVERSREMQMIDLQTGTPWESVTFTALGTDRKVFFNILEEARELALQQEEGKTVMYTAVGSEWRPFGYPRRRRPLNSVVLQQGLADRIVRDVQEFIDNPKWYTDRGEKQLGSWL

SEQ ID NO: 921791 - protein, 252 aa, Homo sapiens; identical to SEQ ID NO: 921785

SEQ ID NO: 921792 - protein, 252 aa, Homo sapiens; identical to SEQ ID NO: 921785

SEQ ID NO: 921793 - protein, 252 aa, Homo sapiens; identical to SEQ ID NO: 921785

SEQ ID NO: 921794 - protein, 299 aa, Homo sapiens
MQMIDLQTGTPWESVTFTALGTDRKVFFNILEEARELALQQEEGKTVMYTAVGSEWRPFGYPRRRRPLNSVVLQQGLADRIVRDVQEFIDNPKWYTDRGIPYRRGYLLYGPPGCGKSSFITALAGELEHSICLLSLTDSSLSDDRLNHLLSVAPQQSLVLLEDVDAAFLSRDLAVENPVKYQGLGRLTFSGLLNALDGVASTEARIVFMTTNHVDRLDPALIRPGRVDLKEYVGYCSHWQLTQMFQRFYPGQAPSLAENFAEHVLRATNQISPAQVQGYFMLYKNDPVGAIHNAESLRR

SEQ ID NO: 921795 - protein, 419 aa, Homo sapiens; identical to SEQ ID NO: 921777

SEQ ID NO: 921796 - protein, 419 aa, Homo sapiens; identical to SEQ ID NO: 921777

SEQ ID NO: 921797 - protein, 419 aa, Homo sapiens; identical to SEQ ID NO: 921777

SEQ ID NO: 921798 - protein, 419 aa, Homo sapiens; identical to SEQ ID NO: 921777

SEQ ID NO: 921799 - protein, 153 aa, Homo sapiens
RELATGRDARLGVVVGEEVASTFHRYPSQVTGMTGVCDHAQLIFVFFVEMEFRYVVPGWSQTPELGQSAHLRLQKCWDYRPEPLCPSPWLIDSHLLPESLQGHPFVCVCVLISPYKNTCHTRLGPTLLTSFYLNHLYKDPISKYSTILRSCNI

SEQ ID NO: 921800 - protein, 68 aa, Homo sapiens
  misc_feature (30)..(30): Xaa can be any naturally occurring amino acid
  misc_feature (51)..(51): Xaa can be any naturally occurring amino acid
SEQRGLVRVGGPLTKKCRHALCQIRLGGDXDKIKGRGQGQEAGSAVAQILXRSTGRISSGLQGTDRER

SEQ ID NO: 921801 - protein, 68 aa, Homo sapiens; identical to SEQ ID NO: 921800
  misc_feature (30)..(30): Xaa can be any naturally occurring amino acid
  misc_feature (51)..(51): Xaa can be any naturally occurring amino acid

SEQ ID NO: 921802 - protein, 114 aa, Homo sapiens
MENIRRVPQAEQPRSRPGCPSPYPTPVSNLNLGLLFILATSSLGRLLNPRDQGEHQIKLRPDRAHWRKEPKQSHMNVTLAIMLLSKLLFKWLLLTCSSLIRTRKNTLLITFLPS

SEQ ID NO: 921803 - protein, 310 aa, Homo sapiens
MALSRVCWARSAVWGSAVTPGHFVTRRLQLGRSGLAWGAPRSSKLHLSPKADVKNLMSYVVTKTKAINGKYHRFLGRHFPRFYVLYTIFMKGIISIPPFANYLVFLLMYLFPRQLLIRHFWTPKQQTDFLDIYHAFRKQSHPEIISYLEKVIPLISDAGLRWRLTDLCTKIQRGTHPAIHDILALRECFSNHPLGMNQLQALHVKALSRAMLLTSYLPPPLLRHRLKTHTTVIHQLDKALAKLGIGQLTAQEVKSACYLRGLNSTHIGEDRCRTWLGEWLQISCSLKEAELSLLLHNVVLLSTNYLGTRR

SEQ ID NO: 921804 - protein, 203 aa, Homo sapiens
MYLFPRQLLIRHFWTPKQQTDFLDIYHAFRKQSHPEIISYLEKVIPLISDAGLRWRLTDLCTKIQRGTHPAIHDILALRECFSNHPLGMNQLQALHVKALSRAMLLTSYLPPPLLRHRLKTHTTVIHQLDKALAKLGIGQLTAQEVKSACYLRGLNSTHIGEDRCRTWLGEWLQISCSLKEAELSLLLHNVVLLSTNYLGTRR

SEQ ID NO: 921805 - protein, 145 aa, Homo sapiens
MALSRVCWARSAVWGSAVTPGHFVTRRLQLGRSGLAWGAPRSSKLHLSPKADVKNLMSYVVTKTKAINGKYHRFLGRHFPRFYVLYTIFMKGLQMLWADAKKARRIKTNMWKHNIKFHQLPYREMEHLRQVLFPFHLLPTTWSSC

SEQ ID NO: 921806 - protein, 270 aa, Homo sapiens
MALSRVCWARSAVWGSAVTPGHFVTRRLQLGRSGLAWGAPRSSKLHLSPKADVKNLMSYVVTKTKAINGKYHRFLGRHFPRFYVLYTIFMKGLQMLWADAKKARRIKTNMWKHNIKFHQLPYREMEHLRQIQRGTHPAIHDILALRECFSNHPLGMNQLQALHVKALSRAMLLTSYLPPPLLRHRLKTHTTVIHQLDKALAKLGIGQLTAQEVKSACYLRGLNSTHIGEDRCRTWLGEWLQISCSLKEAELSLLLHNVVLLSTNYLGTRR

SEQ ID NO: 921807 - protein, 115 aa, Homo sapiens
MNQLQALHVKALSRAMLLTSYLPPPLLRHRLKTHTTVIHQLDKALAKLGIGQLTAQEVKSACYLRGLNSTHIGEDRCRTWLGEWLQISCSLKEAELSLLLHNVVLLSTNYLGTRR

SEQ ID NO: 921808 - protein, 236 aa, Homo sapiens
MALSRVCWARSAVWGSAVTPGHFVTRRLQLGRSGLAWGAPRSSKLHLSPKADVKNLMSYVVTKTKAINGKYHRFLGRHFPRFYVLYTIFMKGLQMLWADAKKARRIKTNMWKHNIKFHQLPYREMEHLRQKALSRAMLLTSYLPPPLLRHRLKTHTTVIHQLDKALAKLGIGQLTAQEVKSACYLRGLNSTHIGEDRCRTWLGEWLQISCSLKEAELSLLLHNVVLLSTNYLGTRR

SEQ ID NO: 921809 - protein, 234 aa, Homo sapiens
MALSRVCWARSAVWGSAVTPGHFVTRRLQLGRSGLAWGAPRSSKLHLSPKADVKNLMSYVVTKTKAINGKYHRFLGRHFPRFYVLYTIFMKGLQMLWADAKKARRIKTNMWKHNIKFHQLPYREMEHLRQFRQDVTKCLFLGIISIPPFANYLVFLLMYLFPRQLLIRHFWTPKQQTDFLDIYHAFRKQSHPEIISYLEKVIPLISDAGLRWRLTDLCTKVFLQLTLPTNVESC

SEQ ID NO: 921810 - protein, 321 aa, Homo sapiens
MALSRVCWARSAVWGSAVTPGHFVTRRLQLGRSGLAWGAPRSSKLHLSPKADVKNLMSYVVTKTKAINGKYHRFLGRHFPRFYVLYTIFMKGLQMLWADAKKARRIKTNMWKHNIKFHQLPYREMEHLRQFRQDVTKCLFLGIISIPPFANYLVFLLMYLFPRQLLIRHFWTPKQQTDFLDIYHAFRKQSHPEIISYLEKVIPLISDAGLRWRLTDLCTKIQRGTHPAIHDILALRECFSNHPLGMNQLQALHVKALSRAMLLTSYLPPPLLRHRLKTHTTVIHQLDKALAKLGIGQLTAQEVKSIGVELGWENGCRFPAA

SEQ ID NO: 921811 - protein, 165 aa, Homo sapiens
MALSRVCWARSAVWGSAVTPGHFVTRRLQLGRSGLAWGAPRSSKLHLSPKADVKNLMSYVVTKTKAINGKYHRFLGRHFPRFYVLYTIFMKESLEPGHASHILPASSLVETSFEDSYNCDSPTGQGFGKAGDWPADCSGSKIEAELSLLLHNVVLLSTNYLGTRR

SEQ ID NO: 921812 - protein, 360 aa, Homo sapiens
MALSRVCWARSAVWGSAVTPGHFVTRRLQLGRSGLAWGAPRSSKLHLSPKADVKNLMSYVVTKTKAINGKYHRFLGRHFPRFYVLYTIFMKGLQMLWADAKKARRIKTNMWKHNIKFHQLPYREMEHLRQFRQDVTKCLFLGIISIPPFANYLVFLLMYLFPRQLLIRHFWTPKQQTDFLDIYHAFRKQSHPEIISYLEKVIPLISDAGLRWRLTDLCTKIQRGTHPAIHDILALRECFSNHPLGMNQLQALHVKALSRAMLLTSYLPPPLLRHRLKTHTTVIHQLDKALAKLGIGQLTAQEVKSACYLRGLNSTHIGEDRCRTWLGEWLQISCSLKEAELSLLLHNVVLLSTNYLGTRR

SEQ ID NO: 921813 - protein, 234 aa, Homo sapiens; identical to SEQ ID NO: 921809

SEQ ID NO: 921814 - protein, 360 aa, Homo sapiens; identical to SEQ ID NO: 921812

SEQ ID NO: 921815 - protein, 234 aa, Homo sapiens; identical to SEQ ID NO: 921809

SEQ ID NO: 921816 - protein, 308 aa, Homo sapiens
MALSRVCWARSAVWGSAVTPGHFVTRRLQLGRSGLAWGAPRSSKLHLSPKADVKNLMSYVVTKTKAINGKYHRFLGRHFPRFYVLYTIFMKGLQMLWADAKKARRIKTNMWKHNIKFHQLPYREMEHLRQFRQDVTKCLFLGIISIPPFANYLVFLLMYLFPRQLLIRHFWTPKQQTDFLDIYHAFRKQSHPEIISYLEKVIPLISDAGLRWRLTDLCTKIQRGTHPAIHDILALRECFSNHPLGMNQLQALHVKALSRAMLLTSYLPPPLLRHRLKTHTTVIHQLDKALAKLGIGQLTAQEVKSVRA

SEQ ID NO: 921817 - protein, 289 aa, Homo sapiens
MALSRVCWARSAVWGSAVTPGHFVTRRLQLGRSGLAWGAPRSSKLHLSPKADVKNLMSYVVTKTKAINGKYHRFLGRHFPRFYVLYTIFMKGLQMLWADAKKARRIKTNMWKHNIKFHQLPYREMEHLRQFRQDVTKCLFLGIISIPPFANYLVFLLMYLFPRQLLIRHFWTPKQQTDFLDIYHAFRKQSHPEIISYLEKVIPLISDAGLRWRLTDLCTKIQRGTHPAIHDILALRECFSNHPLGMNQLQALHVKALSRAMLLTSYLPPPLLRHRLKTHTLCPLYSQPG

SEQ ID NO: 921818 - protein, 263 aa, Homo sapiens
MSYVVTKTKAINGKYHRFLGRHFPRFYVLYTIFMKGLQMLWADAKKARRIKTNMWKHNIKFHQLPYREMEHLRQFRQDVTKCLFLGIISIPPFANYLVFLLMYLFPRQLLISPGLKRSINPKCRDYRCELPHPAYLFIFQSHYFNQAGLELLASSNPPISASQVAGITGMHHHAQLISYFFLVETRFLHVGQADLELPTSGDPLASASQSFGITGVSHHVQPILFFIGIYYSSIPSLYPLDASSTPSPTVVSTKNVSRHCQMS

SEQ ID NO: 921819 - protein, 234 aa, Homo sapiens; identical to SEQ ID NO: 921809

SEQ ID NO: 921820 - protein, 418 aa, Homo sapiens
MALSRVCWARSAVWGSAVTPGHFVTRRLQLGRSGLAWGAPRSSKLHLSPKADVKNLMSYVVTKTKAINGKYHRFLGRHFPRFYVLYTIFMKGLQMLWADAKKARRIKTNMWKHNIKFHQLPYREMEHLRQFRQDVTKCLFLGIISIPPFANYLVFLLMYLFPRQLLIRHFWTPKQQTDFLDIYHAFRKQSHPEIISYLEKVIPLISDAGLRWRLTDLCTKIQRGTHPAIHDILALRECFSNHPLGMNQLQALHVKALSRAMLLTSYLPPPLLRHRLKTHTTVIHQLDKALAKLGIGQLTAQEVKSACYLRGLNSTHIGEDRCRTWLGEWLQISCSLKVETRFLHVGQADLELPTSGDPLASASQSFGITGVSHHVQPILFFIGIYYSSIPSLYPLDASSTPSPTVVSTKNVSRHCQMS

SEQ ID NO: 921821 - protein, 360 aa, Homo sapiens; identical to SEQ ID NO: 921812

SEQ ID NO: 921822 - protein, 360 aa, Homo sapiens; identical to SEQ ID NO: 921812

SEQ ID NO: 921823 - protein, 155 aa, Homo sapiens
MALSRVCWARSAVWGSAVTPGHFVTRRLQLGRSGLAWGAPRSSKLHLSPKADVKNLMSYVVTKTKAINGKYHRFLGRHFPRFYVLYTIFMKESLEPGHASHILPASSLVETSFEDSYNCDSPTGQGFGKAGDWPADCSGSKIGLLSPWPEFYAYW

SEQ ID NO: 921824 - protein, 296 aa, Homo sapiens
MALSRVCWARSAVWGSAVTPGHFVTRRLQLGRSGLAWGAPRSSKLHLSPKADVKNLMSYVVTKTKAINGKYHRFLGRHFPRFYVLYTIFMKGLQMLWADAKKARRIKTNMWKHNIKFHQLPYREMEHLRQFRQDVTKCLFLGIISIPPFANYLVFLLMYLFPRQLLIRHFWTPKQQTDFLDIYHAFRKQSHPEIISYLEKVIPLISDAGLRWRLTDLCTKIQRGTHPAIHDILALRECFSNHPLGMNQLQALHVKALSRAMLLTSYLPPPLLRHRLKTHTIGVELGWENGCRFPAA

SEQ ID NO: 921825 - protein, 167 aa, Homo sapiens
DVRLTLTQRQPLLSRFSRCEDGALQGVLGSVGCVGLGSHPWTFCHPEAATWSLWPGLGGPSKALSRAMLLTSYLPPPLLRHRLKTHTTVIHQLDKALAKLGIGQLTAQEVKSACYLRGLNSTHIGEDRCRTWLGEWLQISCSLKEAELSLLLHNVVLLSTNYLGTRR

SEQ ID NO: 921826 - protein, 155 aa, Homo sapiens; identical to SEQ ID NO: 921823

SEQ ID NO: 921827 - protein, 259 aa, Homo sapiens
MALSRVCWARSAVWGSAVTPGHFVTRRLQLGRSGLAWGAPRSSKLHLSPKADVKNLMSYVVTKTKAINGKYHRFLGRHFPRFYVLYTIFMKVPPRRHQVSFPRYYFHSTFCQLPGLLANIQRGTHPAIHDILALRECFSNHPLGMNQLQALHVKALSRAMLLTSYLPPPLLRHRLKTHTTVIHQLDKALAKLGIGQLTAQEVKSACYLRGLNSTHIGEDRCRTWLGEWLQISCSLKEAELSLLLHNVVLLSTNYLGTRR

SEQ ID NO: 921828 - protein, 317 aa, Homo sapiens
MALSRVCWARSAVWGSAVTPGHFVTRRLQLGRSGLAWGAPRLFDLPCRSSKLHLSPKADVKNLMSYVVTKTKAINGKYHRFLGRHFPRFYVLYTIFMKGIISIPPFANYLVFLLMYLFPRQLLIRHFWTPKQQTDFLDIYHAFRKQSHPEIISYLEKVIPLISDAGLRWRLTDLCTKIQRGTHPAIHDILALRECFSNHPLGMNQLQALHVKALSRAMLLTSYLPPPLLRHRLKTHTTVIHQLDKALAKLGIGQLTAQEVKSACYLRGLNSTHIGEDRCRTWLGEWLQISCSLKEAELSLLLHNVVLLSTNYLGTRR

SEQ ID NO: 921829 - protein, 203 aa, Homo sapiens; identical to SEQ ID NO: 921804

SEQ ID NO: 921830 - protein, 360 aa, Homo sapiens; identical to SEQ ID NO: 921812

SEQ ID NO: 921831 - protein, 152 aa, Homo sapiens
MAEVPTPGQDFQGIRCHPPGHRLHFKDLYTVLSGKNAWAWGPEALPVSSPGTSWERNRHFPFSVSLGSAGLKGLVPGRHFCQGRCHQGTQSPCAKGPCSRKRSHPPGGTDWPPLPGGGKASAPDWKYMFGTQAIHVGTSSAAIPAENSRCAG

SEQ ID NO: 921832 - protein, 144 aa, Homo sapiens [sequence omitted]

SEQ ID NO: 921833 - protein, 205 aa, Homo sapiens
MRKMWLPSQELEGRVKTLRSFLRQRPVYESVVLSTFLLLCSQSPELFILQNRSSDRRTIPTSPPRPQERERPPGGSGPISTINCANLEPQFSYLERGMNHAYIMGGRNVMRGAAGGKGGPLCSCCVPDPMGLSFLPTYGCQSNRTASVATLRMKAREHSEAVLQSANLLPSTSSSPGPVAKPAPPDGSQEKTSPTKEQSEAEKSV

SEQ ID NO: 921834 - protein, 169 aa, Homo sapiens
MQSEYFSAVTSLSCSCNPGSAGPSVSPPDQPTPIHIAPSPISLQPPQASLARGKVQTLSGNIYAKLCCVQVMPTPHSLQWLSQEHLPWLSCPRPFNQEIVFGVGGKSLRQEHQSSTSWVGLLSEFTIIKGALDGRIGGGCVSSRGGGRTFETAAGLQGTERLSLNGTLG

SEQ ID NO: 921835 - protein, 142 aa, Homo sapiens
MHFPWAPCKPVSWPQAWPGGGLWGRSHEGSSSGSRAVSEGAGVGVPAASMQALIWGDKVERQALQEPWRGRENARFGEGLKGQSWMPRRQEEESMGKEGTAGMSDEPGLITEGQEWEQGSWILFHRQQEITSNLRKSYESGR

SEQ ID NO: 921836 - protein, 135 aa, Homo sapiens
MGPWGLSPTLTKTKRAEAVETVMALVGAGTPRLALAPAIHMKLSPAEKELLRLQFGATWWQLLALAEISEDDSGLGGSVQLQDSSSCFRKYQGCIQGTYSLLLEVSIWQALLQCLYEALPTPQPPQVPRRLTADA

SEQ ID NO: 921837 - protein, 119 aa, Homo sapiens
MWNCSELRNLVFTSFSPSFGNSRPSLPDVQCVEVRGFIYFDWIFYCSKWEGKYVPCYFISKSGFDYYAPTRTANLQNIATPNAGEEVDQQELSFVAGAGGRLNSKIIASDSRPCVITCF

SEQ ID NO: 921838 - protein, 263 aa, Homo sapiens
MGHGYMAATAAKREPQRRHCGQHSRRPELGAQLAGKEREKNHGFDFDSFIAGTIQLSSQHEPTDVVDKLNDLNSSVSQLELKSLISKSVSQEKQEKGMANLAQLETLYQSSWDSQCVSGGEDCFLINQFCDVRKDEQVEKENTYTRYLDKFFSRKEDTEMLETEPVEEEELGERGNEERFLNNSGEFLFNKFQSRPCEETTKQALSWAPRPDKKQLESIGIPQFHSPVGSPLKSTQATLTPSAMKSSSNIPHQTYSSSLKLLN

SEQ ID NO: 921839 - protein, 144 aa, Homo sapiens
MTFLAPPANEPQTFSMAVKTLADSTTHLVPTSPHWILVGSWSWQDDDGISIEDELSILSLDCTMEFAMGGIILDHVDYVVEVNEGVIDGDNIHFTRIKSSPSDRVPNIVQSVGSGIHLHHGVSGKRLVVHEKMQLSVEPEEQRD

SEQ ID NO: 921840 - protein, 137 aa, Homo sapiens
MRQLFQWLQQDELGFVGRCYKWEKEEGERESSKGNRNREKRCFLAPGDVSNGCRFREGQLGGLEQSWKASWWQTLGLGFDRGLGYGSGSPGVVMLEEGSANPLSKPGHGTVVHISLDHPQYGTMETNHTYLQLSNFG

SEQ ID NO: 921841 - protein, 214 aa, Homo sapiens
MCQRVGASPPAAQSPGPACPEQHHPHQLHAALNTGQGFDECSFRNLSMFHSCGGEVLQLAMHRGSDHWRLSRHPGRMFHIPSPRWQIHATAQNEVSPEPQQTGPLLSYHGWSSLRTCLFQDYCFKVKKEAEVKEEEEKEEEEDDEGGEGGEQKQQQWGRDGKGEELRFLGCQKRVIVTCNENTWTQEEEHHTLGTVVGSEEAGGIALGDIPNAK

SEQ ID NO: 921842 - protein, 158 aa, Homo sapiens
MHRKSNASFLGPPSSPVLSKNPSSSVLLPGTRWTKNNSSPMLPLLDAATRCRYGRCSLQLALVESTKGKCEVGAPTRSPPTGPLPSGAVKRRPPFSRPQNGRSTGSLYPAPAKATSTKLRAATGDVLSEDLGRVDGWMVLEKSLYPHFLSLAFTRTGL

SEQ ID NO: 921843 - protein, 480 aa, Homo sapiens
MATHFQQAADTRGQKTCTICQMLLPNQCSYASHQRIHQHKSLYTCPECGAICRSVHFQTHVTKNCLHYMRRVGFRCVHCNVVYSDVAALQSHIQGSHCEVFYKCPICPMACKSAPSTHSHTYTQHPGIKIGEPEIIYKCSMCDTVFTLQTLLYRHFDQHIENQKLSVFKCPDCYLLYAQKQLMMDHIKSMHGTLKSIEGPPNLGINLPLSIKPATQNSANQNKEDTKSMNGKEKLEKKSPSPVKKSVETKKVASPGWTCWECDRLFIQRDVYISHVRKEQGKQMKKHPCRQCDKLIPQPVPAQPDQAQRHQESVCLLALPRLQTYLYQTIDAREARAITQPLKKLKINVFKVLKSAMCGFTTENLLQFHEHIPQHKSDSSSYQCQECGLWYTSHVSLSRHLFIVHKLKEPQPVSKQNGAGEDNQQENKPSHEDESPNGTVSDRKCKVCVKTFETEAALNTHMRIHGMAFIKSKRMSSAKK

SEQ ID NO: 921844 - protein, 118 aa, Homo sapiens
MRQGAVDEHLLNIRERSELTGPRREENASLVMPDQQRGVSGRTGSALNYLELPLSPSQDGCHSPDGLTEMHSHFIMPAVIPGNSSKCTIKSQQLFQITAKSTIPAAALSGNEAKQLGP

SEQ ID NO: 921845 - protein, 146 aa, Homo sapiens
MDVGPESGCGREPVSLLSFQWNQASKEQNAKGANPSSVLQHYSDFCHFCRLEHEPQAVSGEGRNLFLRLWLGSVLGLLPPASSPAVKSSQEVVNPGEQLMLHKGQQLKRSLRGSLSQRAPNLASPEGQRRGLPELSCQPEFGLQRF

SEQ ID NO: 921846 - protein, 173 aa, Homo sapiens
MHTGVLSLREVKSQGKPLSPELKRQTGSYGKPQLNRAETHKQKSPQESAPGQENLNCSGWIAEGKRGLIDSVSHGWGGLTIMAEGKGGAKARLTWWQSRDNENQVKGETPLKPSDLVRLVHYHENCMGEPAPMIQLSPTGSLPQHMGIMGATMQDEIWMETQPNQITMCYASS

SEQ ID NO: 921847 - protein, 137 aa, Homo sapiens
MQDKQSLGGNKVRVEAGPCLVLGQCGFYPIDNGKSLKVSIGGDTVGSAFEEDGITCCEEKDPEGGSGGETVSCLASKEINCKSCLVADDVTFAKSPSLSALRLYLKSDGDRTSVLPTSGSRRGDEEESFENWKCLKI

SEQ ID NO: 921848 - protein, 147 aa, Homo sapiens
MSGLALGVFGAPLLGREEKEGSCCARNLKKKGRNFAELKIKRLRKKSAQKMLRKARRKLIYQKANHYHKECRQMYRTEIRMARLARKAGNIYVPAEPKLAFVIRIRDINGGQEGSLVKDVVWTPPALPSNSPQPLLPHPNGVLNVTY

SEQ ID NO: 921849 - protein, 154 aa, Homo sapiens
MHVCYMGILHTGEDWASSISITQVVNIAPNRVIVDFQQDILEDNGGEEEMGRKGNRPRSPVRPPVCCPGPVISHLHKSHSRPEFLRKLFHYCAPETSSFAELLLPFLNGLAPGPTACAFLEVKEENVLSDPKVLNGPYGQQPAVWVECEMSLDS

SEQ ID NO: 921850 - protein, 137 aa, Homo sapiens
MKPRTFAVSVTALKGDVDPKSEQQRDLLWRAKEQRFHSMEGDPSWLPLLAAVTSFYSLICPHARPADWSILHSAADRSILQSTDWSILQTQRAMHMESFTSKIGGELNEIEKKEQYKNSKGDITNDTTEIQQIIRDY

SEQ ID NO: 921851 - protein, 138 aa, Homo sapiens
MPIRPKRQDDHHHFLDEETEVQGALRTCLGLHKFGKRFEHSNDGSMSAVKGSGSRRQLRIKRLHEGGEEEEGGEGGEGGGGGRGEEEEEEEEEEEEEEEQEKNISLISASVNDHSKSIAILMPFNPQKTIRRSNTHVP

SEQ ID NO: 921852 - protein, 222 aa, Homo sapiens
MCVLCGQRTEPSPLKLVPLRAAAVLLVLGIAMPIVLSMFCNSTPFPHAYFPCFRFATVCRHRKRSVGSDEDKAPAGAQIQNGVLVQLESDAGVLSGSECGDSLPACIVYHTFIPKYFLRMLKRRSRIQGDFTTADTGQEKGSIWSPGEERKFFHLQHIFILLGRGTGAWELLNVGTSCNTGKLGHASMQAGPTWGITSQKSLACKVTNKKNHTSKAEAAAEC

SEQ ID NO: 921853 - protein, 134 aa, Homo sapiens
MNSLERQMLLASVLLAGCFHPDTAGCDGASAADPRVLSPPSKLQQFHAMAFLGEYGIINAGDLLIIYEVSEKPSLSCSQYKSRCRSEARRSCWRFRLRQISDELMIGSDRVMPSCLSSAHVKIQESNKDSVCHM

SEQ ID NO: 921854 - protein, 137 aa, Homo sapiens
MCEFDSIIMMLAGYFADLFMWLLHNVTGERVSGTHLKKQSDCFLVEQLCCVGEILHWISSAPSQFGLSKAHRLDWLRYPNSQGGGLPCPLGTLPQGEIRTQSAVEHGWGWPEALVGKTHPVRRSGCGPHLKSSLTMP

SEQ ID NO: 921855 - protein, 138 aa, Homo sapiens
MRKLKSSDGSEEIFHLEARKLGNHPPALTVTGGGCHQREGVNLNTVSPFKDWPSMANIPGPTMNSSVITLPTLRAVRKFDIPFCHNPYLCQSSIDLGDPPREEKQFDRVSNDPTFLEPVRGSDFSTTSLEVLTGLSAL

SEQ ID NO: 921856 - protein, 142 aa, Homo sapiens
MGTTCVHQPKPPLPTTLSLTHSQTGVQSGCGAERKPTEPYGSQTHDPALSDIGLQLASHSGYTVYQMKSYSPGHELSLEINKFWRGQKHPNHRKEEKFRGPEKAKKNNTSRKEPNANIIMYPVSSVFWVWNETAAQSTKRIS

SEQ ID NO: 921857 - protein, 157 aa, Homo sapiens
MLSKSQIIESKALDIYLVFYDIEAKLAFKPQEVVLPILPPLPCTPFHRQRSLSPWPSAPQAYREYCEATANISLRPKDSLGPVEKLEQRGHCKIKKHKLCMPVGVDNIFKVCEEKNVIEEYFIQQNCPSNTKEKLRLSKIIKSGENLLSLDMLYKKC

SEQ ID NO: 921858 - protein, 135 aa, Homo sapiens
MISRKGQYTSSVVASLFTRLINTAVSKGTKFISLLFELYALKLVTVVHKLYQICCLSDSTAALAPLVSTPEPPRQVCPSNWLFSLKASAPKAATPGSAMADSTAFFQNVCYRATCRTLKPSCSLFNCVAIFCNAS

SEQ ID NO: 921859 - protein, 200 aa, Homo sapiens
MNRGSWEKTSAVGLSEVYWSGWWSGRWGGSITEVCAALNVTVSPGPVVDYLEGENATLLCHVSQKRRKDSLLAVRWFFAHSFDSQEALMVKMTKLRVVQYYGNFSRSAKRRRLRLLEEQRGALYRLSVLTLQPSDQGHYVCRVQEISRHRNKWTAWSNGSSATEMRGTSKIRTGVSNNQMPKLLHRPVKYLHCGGVRSIQ

SEQ ID NO: 921860 - protein, 159 aa, Homo sapiens
MYFNSLIDMLHGKVEQWQAQLLLHTDEVIPLISSNKMECTSGWQHVEKGEKEGDRGLQKGRAVVQVVQGAARNRRTPMQPMDSGQGLRAGRIPVGSWSLGRSSPVGRLKQTFLEEDQGHTTSSKASILLTPVSLHKHQAWDTGTQTAWMQGWAGKTQTP

SEQ ID NO: 921861 - protein, 489 aa, Homo sapiens
MLDPAEHPLPPAPAPAPAPRLHVHGGDCPAAAARKAAASRALCRLTGKEPGAGALTPEDAGGVCKGVNAFLPGRFYLVSGGVPFIICGVTAATNIRNYGTEDEDTAYCWMAWEPSLGAFYGPAAIITLVTCVYFLGTYVQLRRHPGRRYELRTQPEEQRRLATPEGGRGIRPGTPPAHDAPGASVLQNEHSFQAQLRAAAFTLFLFTATWAFGALAVSQGHFLDMVFSCLYGAFCVTLGLFVLIHHCAKREDVWQCWWACCPPRKDAHPALDANGAALGRAACLHSPGLGQPRGFAHPPGPCKMTNLQAAQGHASCLSPATPCCAKMHCEPLTADEAHVHLQEEGAFGHDPHLHGCLQGRTKPPYFSRHPAEEPEYAYHIPSSLDGSPRSSRTDSPPSSLDGPAGTHTLACCTQGDPFPMVTQPEGSDGSPALYSCPTQPGREAALGPGHLEMLRRTQSLPFGGPSQNGLPKVSFHQTMKPEPDPAFRT

SEQ ID NO: 921862 - protein, 211 aa, Homo sapiens
MDRTSAGPQGTPNNRRGPQTSNNQHSLQTPNNRTNTARRPQITDIAYRPQITDAARRPQITDAARRPQITDVARRPQITDMAHRPQITDAARRPQITDVARRLQITDTARRPQITDAAHRPQITDAACRPQITNTAYRPQITDAARRPQITDVARRPQITDMARRPQITDAARRPQITDTARRPQITDAACRPQITDAARRPQITDTAWCT

SEQ ID NO: 921863 - protein, 139 aa, Homo sapiens
MVTELIGRSHRYHRKENLEYCIMVIGVPNVGKSSLINSLRRQHLRKDEEATVQGHAVVSERPLMFLLDTPGVLAPRIESVETGLKLALCVLTSAAASTGTVLDHLVGEETMADYLLYTLNKHQRFGVQLDKFGSMAIRL

SEQ ID NO: 921864 - protein, 142 aa, Homo sapiens
MVLLFYNSRPYSYERTKGFDSSVMYLGVDSCNSPSEKRGIRVGVTRFSRCRLSPFSLTRKGNSLTPCTSRVRQCLALLWLMHSALHPLSCAHCLALPCEMNPVPQMEMQKSPVFCVTHAGRCRPELFLFGLLGCHPKVFLRS

SEQ ID NO: 921865 - protein, 256 aa, Homo sapiens
MTSKNCSKNSVYLTPHMSVCTCPIRKATSEILALKNIPPSIATMARIGKPQPHSALDTGAQEPLHSGWCSIPGHRSARSVPQPQGRGPGKRLGEGGTPAMQRQKIFLDHGSQELHSEGVTTSWSTDNPLAGAKVYTDSCVISLFPLHPFNVDDIFLSVNLDYFANLLTFMVPSHNLNIIILSDGHGSNVVLLSQLFGKRGRHNCPVNVGRRIEMPFAVTTSVRSHKGIELHFGHSHFSDGHKGPHWLLMSFFNSNI

SEQ ID NO: 921866 - protein, 141 aa, Homo sapiens
MGLGALEQGAELVGEAPAAQEPTERVGGSGMAGCRFRALPLGKAAKAQREIECSAGPAGCSECGARQAHAHPEIQLARKRHAQPRAAKVGAQAEQAPRASEGYVLEIDFCVGNGIIKLVVSIFIIVIIKRGQPEIWDNDAI

SEQ ID NO: 921867 - protein, 173 aa, Homo sapiens
MYRLTPKRKPYLFCFLKLREVATRWNSCAFHSPRRFLCGHKFSAHLAKYQGMRLHKDLVQQERPELELDPLGICCGMEAGEPISKNQGGTLFPNTFQHRWDSYLMAAGAETGPPWNLLFTARTDVSRQVSLSTKILVCTIPPGPLEDGFGCRLKAKQGFSEDELNVILIFTPQ

SEQ ID NO: 921868 - protein, 134 aa, Homo sapiens
MPYRYSLAISLTPGCEPACTQPGRYRGLYRIGTPYGLERPSFLSSKARSTGAEVLEDILDLDLSVSETDDFIQLVSGEKTVFGSIPLAHPYGGQQGCEWETGVESAEEPKPTNCFKHKMKMLCSIHTKNHLILV

SEQ ID NO: 921869 - protein, 146 aa, Homo sapiens
MDGETDAGPVLPVHTVEVFYKSRIAEAQLSNPVPDQDADIFGGPLFDFLQQSKAITRFSETKMACLWEIMWLLKADWVFKEVVLVHLGGHNKVPEIEWHKTTEINGLAVLESRSLIKVWKGKFLRKCLVGACRQPSSPCVITWASL

SEQ ID NO: 921870 - protein, 140 aa, Homo sapiens
MLQGSHATPNPARSSPEKHRPLSLHTIPPNFRHTNTLPLFRFIFLINLRRQECQASEPKLSHHIPCDLHIHIQMADSACLHPGEINSLVAHTKPVWWSLHTVAHEKNPKESTNNLPEFSEFSKITKYIVKIQQSFFYRLA

SEQ ID NO: 921871 - protein, 246 aa, Homo sapiens
MLQISLLERSGRPSGVGWAAIHLKEKQPGCGEAAILGGILSKEPRNQRPINGTTQPNGQMPQAADSVSAVLEEAQAHAETWKVKPASSWHTFHPAVPQENCLSSGVPDQPGQQNKGSSLLEIKKLASPREPPGARSTPGPPRPQVQPAPPPPVQRSCDTSGSPATPPKAKGTGSVVFPAPPDYFLPPQPPMPPLEYPELPLPSPDFMETPLDFVLPPLAVAKRPPMPHPPQQARSINVHKQQMNKS

SEQ ID NO: 921872 - protein, 141 aa, Homo sapiens
MLSPLTSTLGGRGSDSPTSVSLNQGYGLIEVAHRISKEVQTSPHKIQNHPKDSPRKGKFCYLQIGYNSHLFSQTGLRRQELLLPQMVKDGVCAYSTSCNPQITGGLPITGTLICDTREALLKVYFPRTNRATRVHMRKAPL

SEQ ID NO: 921873 - protein, 1769 aa, Homo sapiens
MGQTKSKIKSKYASYLSFIKILLKRGGVKVSTKNLIKLFQIIEQFCPWFPEQGTLDLKDWKRIGKELKQAGRKGNIIPLTVWNDWAIIKAALEPFQTEEDSVSVSDAPGSCLIDCNENTRKKSQKETESLHCEYVAEPVMAQSTQNVDYNQLQEVIYPETLKLEGKGPELVGPSESKPRGTSPLPAGQVPVRLQPQKQVKENKTQPPVAYQYWPPAELQYRPPPESQYGYPGMPPAPQGRAPYPQPPTRRLNPTAPPSRQGSELHEIIDKSRKEGDTEAWQFPITLEPMPPGEGAQEGEPPTVEARYKSFSIKMLKDMKEGVKQYGPNSPYMRTLLDSIAYGHRLIPYDWEILAKSSLSPSQFLQFKTWWIDGVQEQVRRNRAANPPVNIDADQLLGIGQNWSTISQQALMQNEAIEQVRAICLRAWEKIQDPGSTCPSFNTVRQGSKEPYPDFVARLQDVAQKSIADEKAHKVIVELMAYENANPECQSAIKPLKGKVPAGSDVISEYVKACDGIGGAMHKAMLMAQAITGVVLGGQVRTFGGKCYNCGQIGHLKKNCPVLNKQNITIQATTTGREPPDLCPRCKKGKHWASQWNKPVTTIQQLSLTTSGSAAVDLCTIQAVSLLPGEPPQKIPTGVYGPLPKGTVGLILGRSSLNLKGVQIHTSVVDSDYKGEIQLVISSSIPWSASPGDRIAQLLLLPYIKGGNSELKKIGGLGSTDPTGKAAYWASQVSENRPVCKAIIQGKQFEGLVDTGADVSIIALNQWPKNWPKQKAVTGLVGIGTASEVYQSTEILHCLGPDNQESTVQPMITSIPLNLWGRDLLQQWGAEITMPAPLYSPTRAATVEPPKPIPLTWKTEKPVWVNQWPLPKQKLEALHLLANEQLEKGHIEPSFSPWNSPVFVIQKKSGKWRMLTDLRAVNALIQPMGPLQPGLPSPAMIPKDWPLIIIDLKDCFFTIPLAEQDCEKFAFTIPAINNKEPATRFQWKVLPQGMLNSPTICQTFVGRALQPVREKFSDCYIIHYIDDILCAAETKDKLIDCYTFLQAEVANAGLAIASDKIQTSTPFHYLGMQIENRKIKPQKIEIRKDTLKTLNDFQKLLGDINWIRPTLGIPTYAMSNLFSILRGDSDLNSKRILTPEATKEIKLVEEKIQSAQINRIGPLAPLQLLIFATAHSPTGIIIQNTDLVEWSFLPHSTVKTFTLYLDQIATLIGQTRLRITKLCGNDPDKIVVPLTKEQVRQAFINSGAWQIGLANFVGIIDNHYPKTKIFQFLKLTTWILPKITRCEPLENALTVFTDGSSNGKAAYTGPKERVIKTPYQSAQRAELVAVITVLQDFDQPINIISDSAYVVQATRDVETALIKYSMDDQLNQLFNLLQQTVRKRNFPFYITHIRAHTNLPGPLTKANEQADLLVSSALIKAQELHALTHVNAAGLKNKFDVTWKQAKDIVQHCTQCQVLHLPTQEAGVNPRGLCPNALWQMDVTHVPSFGRLSYVHVTVDTYSHFIWATCQTGESTSHVKKHLLSCFAVMGVPEKIKTDNGPGYCSKAFQKFLSQWKISHTTGIPYNSQGQAIVERTNRTLKTQLVKQKEGGDSKECTTPQMQLNLALYTLNFLNIYRNQTTTSAEQHLTGKKNSPHEGKLIWWKDNKNKTWEIGKVITWGRGFACVSPGENQLPVWLPTRHLKFYNEPIGDAKKRASTEMVTPVTWMDNPIEVYVNDSVWVPGPIDDRCPAKPEEEGMMINISIGESTRMFNACSPKLVGRSTYCQSHQ

SEQ ID NO: 921874 - protein, 217 aa, Homo sapiens
MRTRRRHGCAASVPSLKEPQKPEQPTPRKSPYGPPPTGLFDDDDGDDDNDFFSTPHSKPSKTGVESKDGSQSTRENDSLVNLERVQTDAECMQVSVKMTVNEGKVQSTADIFGDEEGDLFKEKAVASPEATREPSGGHVAFCVPALEVNGGPFASFVGQDGHNGPSRFMGRGHRLPFLMDLFSSQSASNLKGASLLPGKLPTSVSLFDDEDEEKPHG

SEQ ID NO: 921875 - protein, 140 aa, Homo sapiens
MCPFFHFLFSTETYFLDVLFCPAILGASSTPNRLPKGASCGMEIRFHIISVMPILLISVQQQTVTPGHCWQVIKNSSGWIWTMGYDLPAPDLHGCLKYSSSTRAERKDKENISEVESVKLIDEWRIKSKRQFINTICWPT

SEQ ID NO: 921876 - protein, 132 aa, Homo sapiens
MSHCAQHGPEVLIVFLYPYTNLSSSTSPSCPSQTVESILLLTVSTDISWTANNHMKRCSKLLGFREMQIETTISYHYSSIRMAKIKNHDTTKCCNVKEWMIDACNNLDGLPGNYAEQKTSIQKGYINVILLL

SEQ ID NO: 921877 - protein, 161 aa, Homo sapiens
MSLYMTSCLTCLACSMQHMRISVYGHMNIAKLAKVCYMCNIHFARFHLEQTSWVTAFYRCNTRDTLTRGIGLYNSSRLAARQMKHTKGTEKANRGLSSSCNGIEKKQSLRSIATRGQSLGIAAGDAKPCCNAPINLMCALIALKSRSSHHHLDFFGITKIG

SEQ ID NO: 921878 - protein, 139 aa, Homo sapiens
MRPVMRVKPTTKQAVTRWKLVLRLMMVENNCGDKTAFTEGKTAEEEIHRCLEVMVSPGDGDYEHVCHDGGQDPPGPTGRLQTRQTSLGDEQSHLETNVPLGSLVAANWALLEIEIYYTSIIATLSLCVQIYLRNDNHNI

SEQ ID NO: 921879 - protein, 183 aa, Homo sapiens
MKLKPDIVIADLIWGSRDGALCEVTCEVRAHDRESLAVRVQLQLRKEVSWQEELQEQGHGQESSWDEGSATSSEVRAAWEGGTGQSSWGLQTVRRSWNFTLGATGICRSILVRAGAASHWSLQTCRQFSGEHYGCSGISSIKKMFQWEQVKNNGGHLEMEPSEICFEGRMEWMWSEERGIRDD

SEQ ID NO: 921880 - protein, 158 aa, Homo sapiens
MAKQPQTPHFPSGPRQRGLETGAAAAQKSVDQLYVCTRAGTGSSAPSWRLHSAQTPQPSALGASQGRAGLREGGCVPHGDPLAFWVQPCSHHRGLSCSWHLKVAAAVPTLEPGRTPPLRLSQALGPGLQEGGNLQQSLIPAAVQGPEVASLSCQHWQS

SEQ ID NO: 921881 - protein, 153 aa, Homo sapiens
MKQNVDICAEDTCGMTAERYAVACGLNRCLHLKTRAPPSQDWGPAQEEGPDTGAQDFCPAADPLFHLLPLSRGHPPHPTLKGRSSHSCHLLLQPQLRQGTAPLLRIFYVQVDGPRLHIIPCKLPGVAPGGSSVHLSDIPIVDDLRVFGGRPAE

SEQ ID NO: 921882 - protein, 292 aa, Homo sapiens
MNPSLLLAAFFLGIASAALTRDHSLDAQWTKWKAKHKRLYDMTNEEFRQVMNGFQHQKHRKGKQFQERLLLEIPTSVDWREKGYMTPMKDQGQCGSCWAFSATGALEGQMFWKTGKLISLNEQNLVDCSGPQGNEGCNGGFMDNPFRYVQENGGLDSEASYPYEGKVKTCRYNPKYSAANDTGFVDIPSREKDLAKAVATVGPISVAVGASHVSFQFYKKGIYFEPRCDPEGLDHAMLVVGYSYEGADSDNNKYWLVKNSWGKNWGMDGYIKMAKDRRNSCGIATAASYPTV

SEQ ID NO: 921883 - protein, 135 aa, Homo sapiens
MNINTCAIQCLKFAKVYVYIFPNVDAVRSPSHGEAPGRCSGQQPKLNAQPTPASATSPVREALQMSSLVKPCRCLVPSSPTDVSSTDRAYRCLPAKPHSQVQAENVKDVSTKPLSFWVVCFTVIEENQNVTGCSG

SEQ ID NO: 921884 - protein, 194 aa, Homo sapiens
MRDTSLFISDWLMQVTVYFLSPYDEMGTGSSCVAGGLVQVLDFAAQKKSYFESESNVKVSKRGYCKVNVHSDSRSEWAAERNLQAQGPESDFSWKALGRASQSRLELGCNSRDKVEEQQGSCGEQPLEPGPGEGRPRKPEFTRAQVLGQKPDTEPGQPDSLRPGLWTHPRICGPCSLPGVAFWPYLPRGESSRQ

SEQ ID NO: 921885 - protein, 212 aa, Homo sapiens
MSDKSELKAELERKKQQLAQIREEKKRKEEERKKKETDQKKEAVAPVQEESDLEKRRREAEALLQSMGLTPESPIVPPPMSPSSKSVSTPSEAGSQDSGDGAVGSRRGPIKLGMAKITQVDFPPREIVTYTKETQTPVMAQPKKDEEEDDDLTEEEKQQILHSEEFLSFFDHSTRIVERALSEQINIFFHYSGRDLEDKEGEIQAGAKLSLN

SEQ ID NO: 921886 - protein, 409 aa, Homo sapiens
MKATDLRHSPLNPTEELLVKVGPHLSEIVVPDMPGYVLDGQEDVVESMVVQLLMELGLLVLTPLHLQPLHQGLDGQAPENDCEEDDDGGADKQVLLLDLVSVRKHDHDEGHGPMQASIGHDHLVYDLQLHHPIAVQESGLDDTMARYMKVKANEQVHGRDAQGYEDGIGATGQHLHGVVHGGGRLLRDVDFHVLMTADATEDDGQDGRQQQYDDEQDLIDMNLLKHNQDGCWVHSGDQAAQQEEVQQPYLQVAHEPTKGNDIEGQYGGGCIAHGADDLVQQDGAQFAKEEPVGHEDADHNHVLVLDIGPFKGGHVGALTHIMYTTVLLLDTPSPIAATQHQCHCYQQPPAATSLCQDKRLLFEKDDFQKGQNLLPGSKGSLGQGPLSFGEGMKALHYVKEANHKRPHSI

SEQ ID NO: 921887 - protein, 447 aa, Homo sapiens
MLLFYRFWALFGLYSLAAFLFWLIPSLLNLKDSRCFLMDLSKISCSCFSSSVGVAVAMHVLLPRLAQVLLQRVVRDRVLPIPNVCHVQGLNVQTDGTDALPQKNPTEELLVKVGPHLSEIVVPDMPGYVLDGQEDVVESMVVQLLMELGLLVLTPLHLQPLHQGLDGQAPENDCEEDDDGGADKQVLLLDLVSVRKHDHDEGHGPMQASIGHDHLVYDLQLHHPIAVQESGLDDTMARYMKGYEDGIGATGQHLHGVVHGGGRLLRDVDFHVLMTADATEDDGQDGRQQQYDDEQDLIDMNLLKHNQDGCWVHSGDQAAQQEEVQQPYLQVAHEPTKGNDIEGQYGGGCIAHGADDLVQQDGAQFAKEEPVGHEADHKDADHNHVLVLDIGPFKGGHVGALTHIMYTTVLLLDTPSPIAATQHQCHCYQQPPAATSVMLPHSTLGNH

SEQ ID NO: 921888 - protein, 399 aa, Homo sapiens
MVKLCTGLYLGSFLLGMLLFYRFWALFGLYSLAAFLFWLILSLLNLKDSRCFLMDLWKISRSRFLSSVGVAVAMHVLLPRLAQVLLQRVVQLMEDIEDPIWRLLGQHSHENPTEELPVKVGPHLSEIVVPDMPGYVLDGQEDVVESMVVQLLMELGLLVLTPLHLQPLHQGLDGQPLENDCEEDDDGGADKQVLLLDLVSVRKHDQDEGHGPMQASIGHDHLEDEGHVPRPDEQVHDRDAQGYEDCIDTTGQHLHGVVHGVGRLLQDVGLHVLMTADATEDNGQDGQQQQLLRHDDEQDLIDMNFLKPNQYGCWVHSGDQAAEQEEVQQPYLQVAHEPAKRDAIEEQDGGGCIAHSADDLVQQDGAQIAKEEPVGHEVVGICMMGDVNMKDHGDALWDR

SEQ ID NO: 921889 - protein, 147 aa, Homo sapiens
MLPLYLPIVMVLGGGAFGREEPVLVNLGCDNKIPLTGWLKQQKSVSHSFGGKFKNSTNMVRFYKRSSKWSSVKKRRERPPIDQSLCALHLCNQCLCSATMVTKPKRRVEGDVKGDKAMVKDKPQRRSERLSAKPAPPKPEPKPKSAL

SEQ ID NO: 921890 - protein, 152 aa, Homo sapiens
MKLPEEGSGSNICCSAIFAVLQPPLVIPRQTGININKKVIYTKTSSVGHQHQRPKVDKTTKMGRNQSRKAEKYKNQSASSPTKDRSSLPATEHSWMENDFDKLTEVGFRRTNSVEKTLNDLMELKTMAQELHDACTSFNSRFNQVEERVSVI

SEQ ID NO: 921891 - protein, 392 aa, Homo sapiens
MPEPYPAAVGSWAAQASLMSTAPCSAAPGAIDRPRAEGYRPMARDWQAALTAAPVQDPLGEASFTPEPAKPRAHQKEETLDVSKHQKEKTLDTLPLRTVTLTARVYGFILEVRTTAIHFFLSLHPAVTSSFPSPSTFEEIQFFNSPNYHKGIDWYMDFFPVPSNASTDFLFEKSATYFDSEVVPRRGAALLPRAKIITVLTNPADRAYSWYQVCLKLGTHRLKHQRAHGDPVALNYTFYQVISASSQTPLALRSLQNRCLVPGYYSTHLQRWLTYYPSGQLLIVDGQELRTNPAASMESIQKFLGITPFLNYTRTLRFDDDKGFWCQGLEGGKTRCLGRSKGRRYPDMDTESRLFLTDFFRNHNLELSKLLSRLGQPVPSWLREELQHSSLG

SEQ ID NO: 921892 - protein, 267 aa, Homo sapiens
MWESGGCVAKRPRPADISDHPMLLSQDKTLQQACACLMKGKEEKEVVILDDPLMQNPRVQRGVLGGAELPSISCEGSDVSVLSPFSPPESSIENPSSSPPYKSSPILYPPLPEELSPVRTTHSGASHQPPKGNLCPLREVANGEECTVRVHVPFSMSDLVLCKEKFGHFSEDPGKFIDEFKKLTLTYSLTWQDLLVVLSLCCTVKDNQHILGTARTHGDEVLAHNPNHNIYQAGGIAVPDQDPEWNYCKVHGCALVNNRLRRTSGPK

SEQ ID NO: 921893 - protein, 251 aa, Homo sapiens
MGVKTLSLPLYAGREEQGGPDSQTVCKAAALPWCSAQGADSWRDDDDKDDDDAGAHRTQGPRRPSQHCTLEVGNLAGPAHSTTGAVKPSDWGNHSGNRLEDAPQADGKADAWPVNPMSSVTVLVRVPVIHTRLSLIGSTPAGTITASIRVHISPTSRGLCWHPAFYAPATSTASLEDGSHRQGQMTRREGTCYPPAYRGAHGAVCGTCHGPSRPGLRCVFSTWESSSFNPGAQSQKAPAPTPSYEPPPGPI

SEQ ID NO: 921894 - protein, 180 aa, Homo sapiens
MCSGWILVTLSTASRLILGSVSATSRIAVGTWGRDRVNCSAIAEPRANRTPWGSPTLCREACTGHWLWKGTVRATPAPEDGKICIVRLGAVVSVEEDSPTAPGMPGFALKSVAGMNLAALEEVPSLTAAVLWALGDGPAGHRCPRECISWVHLAGVGTEAVTGEIYQRGNGFISGGGDYG

SEQ ID NO: 921895 - protein, 144 aa, Homo sapiens
MPRACLLQTTELGVGAVSCRAQHLQRASVPHFTLHRPSRGGGRPCSAGGQSPWKSLEATKARAESTMAVLAGHSWCQQRPALRAGVLCSRYLPKQGGPSEEQALSEQAQLAGAGVSLEAVAFSPVRTVLGMGPSSAHSSQQESC

SEQ ID NO: 921896 - protein, 159 aa, Homo sapiens
MQAPILNLKAFYVARPHGTTEREGAGGVVEEWQVTGQKQLLEEAPCSPGGPDLVKLGGCGACLCVPHGQRGRARFVLDSRCAAPSEMWVDAIGILAVQPCTALLALSGLSFVQTLIFSWVPRVTNLFAENPSAATDPTPPAPMPSLHTFSAPMSSASNP

SEQ ID NO: 921897 - protein, 153 aa, Homo sapiens
MGQVWAVVRSTLELFHTDNEEEGEYNKVTVEVTDQVYLPPKAKAEKEGEVHPYPSAPPHYYFEENDPPDLSFLEDTGGKAHLVDYNKACDDIRDTLLAQAMAGLRVDKGNTLFPGACFNCGKHGHTKKNVKKEISKSGHQIGEKRKLLILKYV

SEQ ID NO: 921898 - protein, 1679 aa, Homo sapiens
MKRNGMIWNQPECNWNGMEWNGMEWNGMEWNGIACNQSWWNGMEWYGMEWNKKAWNGMESTREEWNGMEWNGMEMKQTEWNGMVWNGMEWNGMEWKQCNAMVSTGMECIGMEWNGITLKSTQVEWNAMEWKGIITSGMEWKGMQWNGMEWNGINTSGVEWNGMESTVVEWNGMECNRMEWNGIQWNQPAWNRMVWNAMERSGTERGIEWKGMHWKGMERIQHKWNGMEWNGIQWKGMECNGMEWNGMKWNKPEWNGMEWNGMEWNGMNWNKPEWNGMEWNLMVWNGINTKWNGMEWNGMERNGFNWNGMKWNGMEWNGMECIGINKSEMQWKGMEWNGMEWNGIEWNQPEWSEINWNGMEWNQPEWNGMEWNGMERNGMQWNQLEWNGMEWNGMERNQPESNRMEWNGMEWNGMETTGMEWKQPKWKGMQWNGMEWNGMEWNGINTSGLQRNEMEWNAMEWNGMEWNGMERNGTELNGMESTEVEMEWYRMQRNGTEWNGIKWNGMEWKQPEWNGMEWNAWNGMEWNGMEWNGMEWNQPQLNGMEWNVTEYNGMERNHPKWNGMVRNATEWNGTERNEMEWNRLNASGMEWNGMDWNGMEWIGVEWNGINTNGMERNGMEWNGMEWNGKEWNGKEQNGINTIGMEWNGMESTRVEWNGMECNGIERNIMELNGIIPSGMQCGIEWNGMDWKRMEWIGMDWNGKEWIQPEWNVMDWNGMEWNGINTNGMERNGMEWNGMNGMEWNQPQWNGMEWNAIEWKVMEWNGIQWNQPEWKGMVWNAMEWSGIEWNQRELNGMEWNGTEYNGMERNHPEWNGMVWNAIEWNGTERNEMEWNRLNASGIEWNGMDWNGMEWIGVEWNGINTNGMERNRMEWNGMEWNGMERNGINPGGMEWNWNGVEWNGMQWNQHEWNGTEWNGMEWNGMEWKGMECNGIEWNQPEWVGRKWNGMKWNGMIWNQPDCNVNEWNGMEWNGMECYGINPSGMEWNGMECNGMEWNGIKKSGLQRNEMEWNAMEWNGMEWNGINPNGMEWNGMEWNGIEWKGMEWNGMNWNKPEWNGMEWNLMVNGINWNGMKWNGKEWNGMECIGINKSEMKWKRMEWNGMEWNGIEWNQPEWSEINWNGMEWNQPEWNGMEWNGMERNGMQWNQLEWNGMEWNGMEWNGMERNQPESNRMEWNGMGWNGMETTGMEWKQPEWNGMQWNGMEWNGMEWNGINTSGLQRNEMEWNAMEWNGMEWNGTERNGIEWNGINPSGKEWNGMELEWNGMEWSNRRGMGWNGVEWNGIEWNGMEWNRMKWKGTDWNQPQLNGMEWNGTEYNGMERNHPEWNGMVWNATEWNGTKRNEMEWNRLIASGMEWNGMDWNGMERIGLEFNGINTNGMERNGMEWNGMEWNGMERNGINPIGMEWNGMESTRVEWNGMECNGIERNIMELNGIIPSGMEWYLMQFNEMEQNGMEWNRKNRLNPSGIEWNGMDWKGMEWIGMDWNGKEWIQPEWNEWNGMEWNGINTNGMERNGMEWNGMVLNEMERNGIESTQVEWNGMEWKGINTSGMEWNGMEWNGMEWNGMEWNGINPSGVEWNGMESTPVEWNAMECNRMQWNGMEWNSMESTRVERNGMECNGMEWNGMESTRVEWNGMEWNAIEWNGMEWNGMEFNGINPSGMEWYGMQWNGVEQNGMEWNGID

SEQ ID NO: 921899 - protein, 1060 aa, Homo sapiens
MEWNGINLSGTEWNGMEWNGMECNGINWNGMEWNGTERNQPESNRMEWNGMEWNGNYWNGMETIRVEWNAMEWNGVECNGMEWNGINKSGLQRNEMEWNAMEWNGMEWNGTEWNGIEWNGINLSGKEWNGMEWNGMEWNGMEWNSMQSSLVEWYGMEWNLTEWKNDMESNRVEWYAMEHNGTEWNGIKWNGMEWKQPEWNGMDGMEWNAVEWNGMEWNPPQLNGMEWNGTEYNGMEWNHPECNGMVWNASEWNGTERNEKEWNRLNASGMERNGMDWNGMERIGNGNERNGINPIGMKWNGMESTRVEWNGMECNGSERNIMELNGIIPSGMGCGIEFNGMDWKGMVWIGMDLNGKGWIQPEWNVMDWNGMEWNGMEWNGINTNGMERNGMEWNGMVLNEMERNGIESTQVEWNGMEWNGMEGNQHEWNAMEWNGMEWNGINPKWKGMEWNGIQWNQPEWKGMIWNAMEWSGMEWNQRELNGMEWNGTEYNGMERNHPEWKGMVWNAIEWNGTERNEMQWNRLNASGIEWNGMDWNGMEWIGVEWNRINTNGMERNGMEWNGMEWNGMKWNGKERNGINPSGMELNGMESTRVEWNGMEGNGIERNIMELNGIIPSGMECGIEWNGMDWKGMEWIGMDWNGKEWIQPEWNVMDWNGMEWNGMEWNGTESTRMEWNGMEWNGMEWNGMEWNEMERNGIESTQVEWNGMEWNGINTSGMERKGMQWNAMEWNGMERNGMEWNGINPSGNGMELNQPQWNGMEWNAIEWKGMEWNGIQWNQPEWKGMIWNAMEWSGMEWNQRELNGMEWNGTEYNGMERNHPEWNGMVWNAIEWNGTERNEMQWNRLNASGIEWNGMDWNGMEWIGVEWNGINTNGMERNGMEWNGMEWNGMKWNGKERNGINPSGMELNGMESTRVEWNGMEGNGIERNIMELNGIIPSGMEWNGMDWNGLEWKGMDSTRVECNGLEWNGMEWNGMERNQHEWNGTEWNGMEWNGMEWNEMERNGIESTQVEWNGMEWNGINTSGMERKGMQWNAMEWNGMEWNGMEWNGINPSAVELNGME

SEQ ID NO: 921900 - protein, 138 aa, Homo sapiens
MVGEGKGRRPLRTLWKQPRQEVEWRFNRQKKRERETALSVETKVSKRKGPAGGKCARFYRRSLDVSLQRRVKDSAITFGLSYKNGETICYNDKEDRGVGFGGKWKPPAPVEISTKASLSPSFSEVKLLETLILRSSET

SEQ ID NO: 921901 - protein, 150 aa, Homo sapiens
MERELLSHLVSADGSLLAYLGWVNMGSTHAHLGSTSGCHMSCWLLVALAALRSCLSSQEWEPPHLPSPKSSPPALAPAGSLRPSCHTQGKEWRLQGAGRAQEESWYKIVLPTPEQRLPMPWGTVENSGLQPFWHQGQISWKTMFPRTSGG

SEQ ID NO: 921902 - protein, 152 aa, Homo sapiens
MLEAPDGGSRSWSLSFHSSQCWLNEVTAAALSKHPDPWGRFKGRATPDLSGSCVLPLKLEASSSWYPSGMMEMTPRVLQGVGHNDPYSEKDMTGGIQFCPWTNSYHVSFPASSGSDGLCRASPFGISATLTDSNIYKRKAILHWKNLADYKR

SEQ ID NO: 921903 - protein, 347 aa, Homo sapiens
MVAENILGQPKRYKGFSIDVLDALAKALGFKYEIYQAPDGRYGHQLHNTSWNGMIGELISKRADLAISAITITPERESVVDFSKRYMDYSVGILIKKPEEKISIFSLFAPFDFAVWACIAAAIPVVGVLIFVLNRIQAVRAQSAAQPRPSASATLHSAIWIVYGAFVQQGGESSVNSMAMRIVMGSWWLFTLIVCSSYTANLAAFLTVSRMDNPISVCWCMCCAGEETECTCWVNCLRYPSIGSTLVEHPLCTDTALSMSGEGRPYTVVLAKDPPSGSLLFNMGSERDAEMPAEQPGVMCQKVTVHGAFQVKRQCMWGKPGWGPTVNSGEASGRGKEEKMWRLSDKG

SEQ ID NO: 921904 - protein, 134 aa, Homo sapiens
MEWEGSLPLESGHPAAGLFSDKPQPNSPQCLDIPLLLSLTHRSTVTGLPVCRSVPVLLSMFSCLYLCLLRSWVYMGTGWGVHGRPEWSWKMQHLGVKTGVPVSLMSVGTGLRVEPSPGTPPFSTQHFPAPLPYQ

SEQ ID NO: 921905 - protein, 146 aa, Homo sapiens
MIFLKHNTRRATAFALMGVTDANPDMLLSPVINEAHISFKSKALTLFNSMKANRGKEAAEENLEASRGWFMKFWERSFLYNTREQVEEASADVEAAASYPEDLAKITDGGGYIQQIFEMEGEEGEELGGFSGRGNGNYKVTGAWKS

SEQ ID NO: 921906 - protein, 255 aa, Homo sapiens
MLTHRTNHHGVPGSSQDLADAPPSPPPPPKGRRTASRLHFCLIRCSYTLNKKMSDFPPTSPVYFRPLSAAMTVPQSCTLDNEDPREKQGHPAAMHQNHWVLAKMQVTWPIHTPESEYLHLSKLFRDLRAQSFVVKFPGPFPTSFESITYRHVNHMTLLVLLLSGSSQLTWSSLLPIPSIHYNKSQEDSGSAPATWLSLDQSLWTGKGLLGYLITKEQARQCDHLAGEEGHCPKASVLDRQPATSIELTCSELSPE

SEQ ID NO: 921907 - protein, 135 aa, Homo sapiens
MKPPVERSDSNICCSPIFAVLQPLLLIHRQAGSGVDLQQTPTDLQLRVLTVRRKTNKQKGHPHQNPICTSPSSKTKDVWLTRITNAEKSLKDLMELKTMARELRDECTSFSSQFDQLEERVSVIEDQMNEMKREV

SEQ ID NO: 921908 - protein, 151 aa, Homo sapiens
MRSGVCMFGKNAQWDAMAVLSPCVEGTGERVCGSSVRGHSVTSEMRQLRPDKSSTLPKVTWLPLFVEAFSAPGAMLDPNLLLNRIFTMALEEAYRDPLGLWALDFELEESQGESGITVPCHGLAVSAGVMSISAIPLDSQLWAAPVATFGI

SEQ ID NO: 921909 - protein, 164 aa, Homo sapiens
MESEKGQRRGSGKLLGKFFIIIIIIIIIIIIIIIINKSSLFSPQPPPATQRCTLLRSKGAENNEILVNNQHLPDASSLLDPVGGQLDERRKQATSCNHTDTSAAATLGWEPWHFEGCIPLPGKPLIWGALGPPRCLALAQEQLIVVLEKIPICIYLGNLQHELN

SEQ ID NO: 921910 - protein, 135 aa, Homo sapiens
MLRVSSPPLEGRNEWNLKEVKCLQNAPQLFNNRIEMQNWAFHASVPLFPLSSNHGDMHSTMHCRIMSWKQPGFLSDCVEERCTTESFNPDGMRPYPELIDTSDPFSSAPDLIKPKGQFATCFLSHLNYLDCVAFA

SEQ ID NO: 921911 - protein, 231 aa, Homo sapiens
MSTVNWYQKQGATEKIPENVEVTLELGTGREEGHHPPPQNGRSTDSLHCAPGKAADTQCQPVKAARRKAMPCKVTGAEPPKTIGTHLLHQCDLDGRTLPQTNIAGPDPICLCVQGSQSLPDPAMLHHVAPSLAEADQPREVAHMTQGCVSLHCPSWEETFLLTLKKQAALLGRPMGQVAEGGQQPARTEVLCPAACKEPVPSNKHTSWEGDPSPAKPQKRPVTDDTLTAAL

SEQ ID NO: 921912 - protein, 158 aa, Homo sapiens
MWHLSPLPLLQQLHLLTSGSLQPHEVPVVATPIIRAPGATCMTSVLSKSSEQADVFKGDTQWIKNMRSLPFSLGDNHMPMQEMIEISSIRFKTVFRLFGISIKPYIEGLSSPPTDWAYTGSQWPWTAYNTAVMQQQAPPVVDSAQRSPLAACWPDILW

SEQ ID NO: 921913 - protein, 144 aa, Homo sapiens
MTAPLQPQTTGTNTVANTHGQDFHYCTAVMRNKFPLECQQRPNGKPERLPPLAVMRQCLPLPHQGEVTASTHKWTSTTLIAGKVLCTQSLAGLYKGLVLLSLEIFPSPASTSHHLPTLTTQGSMSLLERHPLLILSGQAVQQVP

SEQ ID NO: 921914 - protein, 137 aa, Homo sapiens
MEAVAGPHALSYTPCHSTPDLPLAESKALTLFNYVKTERSKEAIEEKFEASRDWFTRCKERSHLRNIKVQGKAKGAVEEATVSYPEDLAEIPEEGGYTRQHIFNVDETAFFWKKMPSRFFIAREEKSMVASKLQMTS

SEQ ID NO: 921915 - protein, 248 aa, Homo sapiens
MSLCGSRRRPNTFRGPQNHKLCSTHSLQPNRHTPAKAGYAIVSSTTIIEATTLPTSTTSQQAEFIALTRALTLAKELRVNIYTDSKYDFHILHHHAVIWAERGFLTMKGSSIINASLIKALLKAALLPKEAEVIHCKSHQKASDPITQGNAYADKVAKEAASIPTSVPHSQFFSFSLVTPTYSPTETSTYQSLPTQGKWFLDQEKYLLPASQAHSILLSFHNLFHVGYKPLAGLLEPLISFPIMEIYP

SEQ ID NO: 921916 - protein, 258 aa, Homo sapiens
MALVPSARYVSAPGPAHPQPFSSWNDYLGLATLITKAVDGEPRFGCARGGNGGGGSPPSSSSSSCCSPHTGAGPGALGPALGPPDYDEDDDDDSDEPGSRGRYLGSALELRALELCAGPAEAGLLEERFAELSPFAGRAAAVLLGCAPAAAAAATTTSEATPREERAPAWAAEPRLHAASGAAAARLLKPELQVCVFCRNNKEAMALYTTHILKGPDGRVLCPVLRRYTCPLCGASGDNAHTIKYCPLSKGRRRPSHR

SEQ ID NO: 921917 - protein, 157 aa, Homo sapiens
MGGCTRSWLRNFPALTVQRTPKMLEGTGECANSGAFQPCFAEWNNEAHLPLPEPPSSHRPSLYSGTWKASRMTNAPPAGVAGHDDGKRVSNGPPWLTPDLIDRRPSPQPGSAVQAAAEEFKGQPWSLVSQPAINNVCICDNDKPAVLEESLLRSVYK

SEQ ID NO: 921918 - protein, 124 aa, Homo sapiens
MRHSLIHSFTHSFINSFTHSFTRSYISQFSGPFQASVPGVSTFIIRLGATNGNVEANTHDLGCSDSQIARPKFMIFCCVIGCHNGNDALHNGSSGEETEIGESIKCLEPAGVRAPPGSLACHSA

SEQ ID NO: 921919 - protein, 176 aa, Homo sapiens
MEHLPGTGFGLGARPQPLPDGLVEPRALSLWPVFLLPNDSTPKHIKSNCRAWRIFLTVSSQGKLTSLLPSSFDLTAFLPFSWQVAAHPPVPDPNLASSVKLFIAASAEGTMAWSSRPSVCPMITGLALLPPALNFVSVCLICLQGLQEQLLCSLLGFVTFLTFVTFWAECFLEVTC

SEQ ID NO: 921920 - protein, 140 aa, Homo sapiens
MKSQKSLDRCYLAPCLLCTGKIELEDQGNEDPPHSGLGTNTTTSGKPFLILGKCPQWIGGCPPTLRRVISFTESSSANADLTQKQCLAKYLGTPYSVKLTHKLNRNSKGKKGPIPAEGQVKLEKLSKGLECQVRRFDLTL

SEQ ID NO: 921921 - protein, 196 aa, Homo sapiens
MARDWQAAPPAAPLRDPLGEASCAPESGGDLKVCKHTNQHPVSSSGFVNAPIDTLYLATLVGTWRTFVSTLCIYLIWWGGGEPFFTPEASETTSPPGGTNNSRRAALRAVTLAAKVCSFTPEPARPRTHQKEETPNTSEHQKEQTPDTPPLRTVTLTERVRGFILEQPEPHDTQSSPESATNQVDDTNGLQWHLKI

SEQ ID NO: 921922 - protein, 155 aa, Homo sapiens
MDRFLSVIFCMEVSLLSPGHILLTSEATLYPRHAAPAPYLHNELLFWGLFLEEHLIKWKEFRLVETALGAPYLSRILRAFVGCQSWLSEQPQCSDSTRVVKSISGLYQLDASSTPLAAVLTTKNVPRHYQMSSGEQNTSCLKIIGLDICILFAWG

SEQ ID NO: 921923 - protein, 181 aa, Homo sapiens
MWKEREAYEGRRNREDTGFELMNRVFIVGFLTSQLGIAGLVLPAVIYWIKKMWHMYTTEYYAAIKNEFMSFTGTWMKLETIILSKLTQEQKTKCHMFSLIILDAGKLEDEGPSRLGVSRGPVPHRWKLEDEGPSRLVVGRGPVPHRWNLLPVFTWCKGWTSLLAPLYKGTDPTDEASALIT

SEQ ID NO: 921924 - protein, 146 aa, Homo sapiens
MAGGPRLLHVLLLFGITRARGVKPDDATLTTILTWSKHTDCLRSVIECRNMPRNVDFKGTLSTVDIAVTLYWRVPITDPVLLLTRRFNGPVGIGRPSGLIQSFVSLSLLLEPLTGDMEGSPVEQKEPWTAPWNLASPLCVTDLLWG

SEQ ID NO: 921925 - protein, 141 aa, Homo sapiens
MIPLLTWCSQRTGLKLYRALYVGAIIGIMENHRQMEASALQINICSKGTDLCMIDAGKAKLSQDTLNFTQAHKALGVVPRFYSRFYSGPQSQWGWLPQWPQFLTDFSAHAYCSVTEVSHIEEVEPVSYLRIWTGLRTCFDQ

SEQ ID NO: 921926 - protein, 148 aa, Homo sapiens
MKVVNEMCPNITRIYNIGKSHQGLKLYAVEISDHPGEHEVGEPEFHYIAGAHGNEVLGRELLLLLVQFVCQEYLARNARIVHLVEETRIHVLPSLNPDGYEKAYEGVYEKCKAGIENDGGLERWTCRPTGGREDEHQYCYIHNDNGIQ

SEQ ID NO: 921927 - protein, 513 aa, Homo sapiens
MTVDYHKLNQVVTPIAAAVPDVVSFLEQINTSPGNWYAAIDLANAFFSIPVHKAHQKQFVFSWQGQQYTFTVLHQGYINSPALYHNLIWRDLDRFSLPQDITLIHYIDDMTLIGSSEQDVANTLDLLSKTVKIFVSYVSVHQQVTSAEEDFNNQVDRMTHSVDITQHLSPATPVIAQWAREQSSHGGRDGGYAWAQQHVLPLTKADLAMATAEYPICQQQRPTLSPQYGTIPQGDQPATRQQVDYIGPLSSWKGQRFVLTGVHAYCGYGFAYPARNASAKTTICGLTECLIHCHGILHSIASDQGTHFTAKEVWQWAPAHGIHWSYHVPHHPEAVGLIEWWNGLLKSQLQRQLSDNTLQGWGKVLQKAMYALNQPPIYGTVSPIARIHRSRNQGVEVEVAPLTITPSDPLAKFSLPVPTTLRSAGLEVLAPEGGMLPPGDTTIPLNWKLKLPPRCHLPLSQQAKKGVTVLAGVIDPDYQDEISLPFHKGNKGEYAWTTGDPLGCLLTVYYCAL

SEQ ID NO: 921928 - protein, 212 aa, Homo sapiens
MTGPPGSALLAGDLSRVRRRTQSPLCLLGLKTSALEVLPGIQVTQCSSVLGGPLLNATHARSMLLGLCTCGNNPAVGGSWEEPKCFATLLPVVCLALGQMLPTLACFTICEDPSLWDFWKASLSLIYFLLKVGALATHNTQTNMKAGTLEYLQELYQSKSSPERGTKRDKAGPGHDWKILKDFIKHPAETQKFWMYSNLLIYVSSDLNKNGD

SEQ ID NO: 921929 - protein, 134 aa, Homo sapiens
MAVITCEMDVLKTACQWVLVLYPAYHSVPFNWGHLAHLHSKLILIYVDLILVLAGAGVPDTMCAFATVVEAMQLAGKGGPCWLVTITLVVVLTWGEEHWQMQLRAFPTLLFPSLLLLEAAEKALLASRRALLIP

SEQ ID NO: 921930 - protein, 143 aa, Homo sapiens
MNASPMGRGVDNSKRHSMSCTEIPGITFHINCLHTVPSFRPCFGGCRWLTVIFYCEPMMLHDEMFCHLFWCIAVHDAEASFGSGLRIVFIHLFPYHRCGFYQTFISESRYQLLTDLSAATLNLPIPHTTWRFPIVLKCLDQAH

SEQ ID NO: 921931 - protein, 361 aa, Homo sapiens
MERLAERWMAAQMGIGIRRPLLAAAQRRCLWVRVHKTRDIFSAHQNPPEDSVEPRLWALSPEFQSQWGLRSYVSNKFPGLAEAAGGGPHSENHCPRLSVKDLGSHPIPLPAALGPLAPPLCTSVSPLGHGSRTCCPLPCCPGGSGSCSAAYHQKGFSRVPLVCILARSTGRPQGTGLHLCCKGGWETEEPEFSIAADRHGIASKYKRRAQIWGRKNILVVTPIHCSPPLASIHMQKATIIIIITIIIITIIIITIIIITIIITIIIIFIITIFIIIIIFISTIIPTLITTTTTITIITIIIIFITITIIITTTIIIIIIFITTTIIAITIIIIVIIATTIDAFAYSGPSSWIALHSFLLHV

SEQ ID NO: 921932 - protein, 155 aa, Homo sapiens
MLTIVLEDGLEVVETRSRETSQEITESMRGGGGESVVGEERGEAVGRQNEWQWRLLRCGDEEKIDALTCLGAERERVGKRERGSQRDWQTQSLQINENQQHLLTIGDEVCPRGVWSCTCGRVSMALCEFVCAAAWEFVTCMCVGTRQQLWLLQSF

SEQ ID NO: 921933 - protein, 156 aa, Homo sapiens
MGLPTADDMVDCALLVSKLDCQARLLVRIQLSLIAISGSPGNLASDAWGSRSSRTLPCFCQASNNKNLFFARETDMSQAAHRELGGLYHAAAICTTRLFPRALKTCQEVTKARQFRVHSPVSSKHNSMLSKGTFRGCGLQSQRSFPPSSLGSGEMG

SEQ ID NO: 921934 - protein, 180 aa, Homo sapiens
MRSCSLKANVSWGQRGENSECFWFPVQYYREQDKQPSICGPLSYAFSISETLSFLVLSRLGYCNLESTAAAAHIIIFQPSFKKRIKKNLDGLQYCGKATDLDQRAQTPSPRLVNEKPWVYVPYPQKSYKVYLLFLQQTILGLDLNYAGEGICVPHVGPVKGYSVEISTNKSKDEFPALNR

SEQ ID NO: 921935 - protein, 138 aa, Homo sapiens
MASPLSQHKFEINPQSILNGVVPELSLQEASELPFFSGFSQLSLEESQRSSVLELGEALSILSQPSLDLGDEHKWTASKALLSSGFCLCLTKRRYQKIKEQEDAVAAPSSHLIFSFIYLFIFFVTPSCYCLSPLKTSS

SEQ ID NO: 921936 - protein, 239 aa, Homo sapiens
MFTFIIIGAPTSGQCRDTRRRAMSRRLREPGALRAPAVRVLELGRLRAAAPLSCPGDAGTQRSGSRRRPSRRHDRPLGGLAGRAASPQSSRRADGGGGAMSQRQVLQVFEQYQKARTQFVQMVAELATRPQNIETLQNAGEPGARTPVAPRALSPRRLRPAALPVELLGSRSVGTGVRKSIHSFQRVFGGQAERVKLPDGCGRCALSLFPSSLHTGKCQVESRGPRNCLESFYVNGTLP

SEQ ID NO: 921937 - protein, 485 aa, Homo sapiens
MSLLFLYTQLYLTLLLCFPKYQRKQSGLQSWTLRIPFSASLYILTLNSCLPLKILQTQCLNSPGLFYPKGSGIAPIYLARHPRLLAQDLSQFSYLDTVVLRYMDDLLLAAHSETLCHQATQVLLNFLATCGYKVSKPKAQLCSQQVKYLGLKLSKGTRTLSEECIQAILAYPYPKTLKQLRAFLGITGTAEYGFPVRWTPEAEVAFQALKKALTQAPVLSLPMGQDFSLYVTEKTGIALGVLTQGRDLTVWISYDVNGLLTAKGDLCLSDNCLLKYQALLLEGPVLRLRTCATLNPATFLPDKEEKIEHNCQQVIAQTYAAQGDLLEVPLTDPNLNLYTNGSSFVEKGLRKAGYAVVSDNGVLESNPLTPGTSAQLESFAKETSSPKSNLEKENLEYKVENERLLQIISELEEEIQINLKENSGLAKMSVASIDEKLSALSHTWILNLLLNPYLTGHLNSRKKAANVKGSCEGHSPARPCVHYAC

SEQ ID NO: 921938 - protein, 139 aa, Homo sapiens
MVALGHMDILVLSRKNLEPWIPVPFLELGPLGPVPVSSFLFLPGVLCGLNEIMNESNTSCICVGLPAAATVDSVLMNFILGGRQTRSQRAQYRELSRRLVFYQLTTQPPAPSPATAAPCPAYGGVFGFQLITTSMSLLR

SEQ ID NO: 921939 - protein, 145 aa, Homo sapiens
MSVSSAGAQKAKMPKKALKEDQAVNLKARYSSTVTLLRAEVVLVVKVWKAMVGVTLVAFGCIRQEHQIASDQNWNNLVCPHFADVAQQQEGAYDNRKKLYTAPYFNKVNTCVLTTQVKKEGIRSGFTVPVAHPVPVTSLPNWQIF

SEQ ID NO: 921940 - protein, 137 aa, Homo sapiens
MVEKFQARAKFIKDKTTLSAFGCRHTLPASLANGKQIHRRKMGLALEKGRLTRAVWVEEVVKGNTYLIMAWSKFACRAVTGAYHLLRDRPLGRTVVGLCGVKACRRNVSHSCLRILAFHITMWRKAPEKAHYFIFSI

SEQ ID NO: 921941 - protein, 137 aa, Homo sapiens
MFKSAEVVCCLLFSYALATEKRREKIQISSVRNENGGITTDIADMQKLSLHYYEHLYAHKLDNLEEMNTFLETYNHPSLNQEEIEVLNRPITNNEIESAKKQKNANKKKASAPCIHSQILPDIKESVSILLKLFQRN

SEQ ID NO: 921942 - protein, 148 aa, Homo sapiens
MDPFLVSPWHQNEVKAACCAQKTFPWSASSQCPSTTPAPLHNCSTTHPQCHPTGTLHLPATLPTHLWTRCSPSTLILFLSFFFFFLFLFLKWSLTLLPELECSGELWAHCNLCLPGSSDSPASASRVAGVTGAPHLAWLIFVFLIETG

SEQ ID NO: 921943 - protein, 132 aa, Homo sapiens
MLSYRGFHLLSTCTGGSHCNSFFPNRSFPVCPPSPHPESGFGNPAIQEPTGSMTQSCFPYSSDLTLLFPFWVTVRQETKSRLSGQFLHKEMCVFGNTECGTVTCRLFDEWKTGVRFLCVQTLHHEERNRNKN

SEQ ID NO: 921944 - protein, 140 aa, Homo sapiens
MLPEEEPVNEEVPYDLIPESSGKISQPCGDEGRKFQAQKGRGKAQELSCVWFTPHSTNYREGAWDRERTTGKTLQAWSSGGPSGAAFHFVYTRYTIATRMIPRMLREWTLALGTVIPPWTPAAPRTPSSTLASHTYALCE

SEQ ID NO: 921945 - protein, 164 aa, Homo sapiens
MMVHKAFNRVDTFVPNKSYLSMELCSQEDYDSLCCVRQVIRKVGENQQSQASPSSYGKEVSYETIQKASLTPTVSCLTAPILFPGSGKAGLRTCPRLPASQLRKQAGLLYLPCCGVCKPDLCPFPSSGQETLHLVGIVTKFSWSFPSPCGLFPVPLAALPKGPL

SEQ ID NO: 921946 - protein, 174 aa, Homo sapiens
MGKLHVAEVCCMDNPVIQMRRLRLCEMTMPVRAEPGFLARNVQARIPSQILQTHSVPPKASMKDLGERCESSWAFTSSPEITRCQSAILVKERASNSSLTIPIRRRKLAMFSATDTLYSHSHLFCCQEIFTTAQCVQHHESERKQARGLALITRGRGRAVLRRRGRADLGRCQG

SEQ ID NO: 921947 - protein, 137 aa, Homo sapiens
MDGMTEAVLWPPSLRLYWLLKSVAENWAYDMTVWPKIAFSLFNIFHMRLHRFYLGPQQYGCCPLTLDEGRSSNVSLFQKYPHRYTQKQCFIISGYPLIQSSRHLKINHHRWNVSFINSSEKLIENIFNVVKYKWKYL

SEQ ID NO: 921948 - protein, 178 aa, Homo sapiens
MKKINFIRTYDQTQMNIHKLKTIQENMTSQNKLNEALVTNPGETEICDLSDRELKRAVLRKLNEIKDSAEKKFKLLSDIFNKDIEIFLNQAEILELKNAIDILKNAPDSLYSTVDQAEEIVNELEDRLFENSVREDKRIRKNKAHPRDVENSPKMANLRVIGFKEEVEREKDWDGKFI

SEQ ID NO: 921949 - protein, 204 aa, Homo sapiens
MILGVPISCFAEGAKKLSLNEDYYISVFCGQGWQFEITYKIPVSRILSSVNIMEHNSFTGSFLNVGGRLSAYFEDQSENIWQKTSYDLGPMIGKMSTHSSRGIIDIITTVAYVLCKNKYAQTLHWLKGCLGKFNHEDELEIDLKNELQIIEVNPQKSIIQHRCRHSFDQFGFLFMLAPVLGPSLPLGWFWLQSDNLQGPLWEIK

SEQ ID NO: 921950 - protein, 124 aa, Homo sapiens
MGVNPLYLEIWGREVIPLGCTKGIQIGKEVKLALFTFGVIVCNENFKESTESEKKSEKLNQINLLATLRSRRADPKDSRDLYILCTRERAPYVEMWGLKIQGPCWARRGLRVQTGADDEESDKH

SEQ ID NO: 921951 - protein, 149 aa, Homo sapiens
MISFDSMSHIQVMLMQEVDFHSLGHLCPRGFAGYSLPPGCFHRLMLSATFPWAWCKLLMDLPFLGLKDRGPLLTAPLDSAPLGILCGGSNPTFLFCTALAKVLRERRTFRAHKAGGKEGPWAAPRLRANHGRYGFRYVTKRSPTKAETV

SEQ ID NO: 921952 - protein, 180 aa, Homo sapiens
MFAQDPSILQSSSGKASQACVLPMKAVRAPKPWMGPEVLSGNQGLESKTLEIYKKEADPGKVSFNEEKMEEKAVPERAPKALEGPVLFGKYWHSREERRKWSSHHCPWDDKCEDKSQCNKEGQNGQARDSALEGHKDKRLAFPGAKHRNMSPGAVSYASPVSSMGDSDGLLSNINLFIVS

SEQ ID NO: 921953 - protein, 136 aa, Homo sapiens
MTFSVVEKPVADRNIYFCESCQTLLSNLLLSHVSRQVVPGTVGQVPLSVQSVLTISWSPSRLQFFPVGTEREVFHVISDCAAAEIGVSCSELQARAIYIFPSQAQVREPWPYLHIEPSSTSWAAGIQPLPSEDGPV

SEQ ID NO: 921954 - protein, 142 aa, Homo sapiens
MLQMNSTLNKSLQAAPRPSADRQWRVLGGCVARGRGQGSQGNGKTLIVGRTSSYLLRSVEVHLILVIHNEKALVVVAENKDKEQERHPREFVVADWLSYGSASWVHTTHTCRGTLSNELDLRFSPAANTRAVCQKQRLIRKH

SEQ ID NO: 921955 - protein, 135 aa, Homo sapiens
MTYSEIIIYLPVLYFTRVHVKRPPNRLCVSNKAFNQLGAGGLSPKRESAKGDGVGLFYKIWEGQHSPASKDYLFTLRVKSGSLGIAPGDISCDDLEKQSAKPRRSGKESVREPWARVPGALEVAASFISCWEQIG

SEQ ID NO: 921956 - protein, 140 aa, Homo sapiens
MLCMKNIALQEKQGFEEQNFTGRIGLAEGAGLYDSKVVKEEKAFGGEAFVVEVLPEEQLGFEEGAGSVGMSIILYLIASGKSWHCKVHGKGWGAKWGCTWLPAKYYLHVPQPHEEQSDSQASHAWPECKTPLSLSKPVKR

SEQ ID NO: 921957 - protein, 130 aa, Homo sapiens
MCFIPYKNVLVIVMVNIECHLHWIEGCKWTGKRDLPSISCQQGLNKSREKNMERLDWFNLVAYIFLPCWMLPALEHQTPTSSAVRLRLESLLLSLQMAYLQVGPHLMIVERAEIVENQTQALIMCVADLQ

SEQ ID NO: 921958 - protein, 268 aa, Homo sapiens
MAAATPRQCNSPVVLTLALSSKQAPGGTHKCILWGSECTVVLPPKAVLLPSDNFIITFHHCTFGREQVSLVELQYLPWRHVKLDPLSDLQSILTWSISPALELMTTLLSYELGFKRQESKSGAQGDTGWGGSHRTSADVKDKVPGGAGSLCGLRTRLTWMGAHGAGVLLSQDCAGTPRGALEPCIQEATALLTCGPVGPWKSVVLEEEQEGTGTSLWGNLSSDDVLPAGCKEWRAQPLAYLPQEDWAPMCPTRPAPPDSEGSSNSSDY

SEQ ID NO: 921959 - protein, 353 aa, Homo sapiens
MPWFRAVRGNHEQMMIDGLSEYGNVNHWLENGGVWFFSLDYEKEVLAKALVHKSASLPFVIELVTAERKIVICHADYPHNEYAFDKPVPKDMVIWNRERVSDAQDGIVSPIAGADLFIFGHTPARQPLKYANQMYIDTGAVFCGNLTLCKVCGEYFVPKFHDIRIRWCSPEHGAILAMEERKKDNVKAAAKRIKEQKEAEKDGRKRRKERLAELRPDGYYKAQAQKAFNAFIRARDADLPCISCGETNPPDLHGGQWDCGHFKTVGAYPELRFEERNAHKQCKSCNAGAGKYTAKEATVAQQYEAGLVARYGQGYVNWLNGPHEMTNYRREDFIRIRDEYRDKLKALKQREAA

SEQ ID NO: 921960 - protein, 161 aa, Homo sapiens
MHRLQSLTRRPSQAAGPTSDRIPYRGNRRKPRAPETARRPSPSRDTATVKAISLSEKPSKGRIPYLPGERHLDGHGDHLGQQAAVESRHEGSRIIVGEHQCHLWDRPERVSINVGSWLPKTPRKSLVLGERARFSENQILCKMHFSKLCFNKHHTPGLEFI

SEQ ID NO: 921961 - protein, 162 aa, Homo sapiens
MSSGSWMVTEDSPLLIHRPRAADHRGENMNVHTHKKDGLQRKTTIVKVSCRTGVLAISAWFSAPVSDALFILGAMVEQGPQNRSTSVNLRLSSRMEGVKIETKTNSLTGAFHPIRSLCVCLSACVSVLCIHACVFCKCVNSVCTCEYEFVHVRACLCHVLHG

SEQ ID NO: 921962 - protein, 157 aa, Homo sapiens [sequence omitted]

SEQ ID NO: 921963 - protein, 149 aa, Homo sapiens
MVKQSQKPPREKAGRKHRQVLSPGSLYGERLVGGRRRTWRGRRRLAVFTWTNLLVVVVELDGSEQEALDLVPLVTNVVLEEHYLIVGVVVVVDIGVIPINSRGEKQRMHLRDGFLADQLDPIYRCRHCSPCPLKRADTGQHSPEYSHLW

SEQ ID NO: 921964 - protein, 137 aa, Homo sapiens
MTPCAKQPLHRSSVTASVQVDRPFLVRGAVENAEHNFTVANPILTHLRWNTHTPALECTHARPKGGPTGAVLLVTWFVLDRSRSWAKDAAFGCQMDKDNLGWNSQVLVLPDTQRFPTIQLIESICTQDSRCLSPNYQ

SEQ ID NO: 921965 - protein, 142 aa, Homo sapiens
MKSFKWFYELRSMKEKTVEKTSPGPVPISYVLKFDDFSPLAASYKILNSLQCRIFGYEMKNSRSTDSLHHVSGKATDTQCQPMKAAGREAVLCKATRAELHKAMGTHLLHQHDLDVRHGVKGDHFGALRFDCPAGFWTCVGP

SEQ ID NO: 921966 - protein, 171 aa, Homo sapiens
MLLRQLHYDACLATLFRFPWSMGKHCPSFSSLKLNHLISPLSHPVIACCSSQSLAFSVLEMDGNQAKMPANACGCSLALLRTLVVLYGLEAAPGPVMSGLCKHPARKKGTHTESHGHLSLEQSQLGATLRAQIPGIYRHSCSCSKEEEARLGAPMHPREGACHSAISCCGD

SEQ ID NO: 921967 - protein, 152 aa, Homo sapiens
MRHWAFYWSNNLILLCTKIKEERKNSLECITNIPNALQFTSGLKTERLKENKIFLVQLKKNIFLTKHSKEMYFRNDFQHLLCAKHHARCYVGQEMKATQFSPSHNLTIQLERKIPLAQDRMQNGILQVGQPGLGGYRIQINRKQNKIDENPV

SEQ ID NO: 921968 - protein, 151 aa, Homo sapiens
MGMPPSLGTSRVPGVKFQFKVFYIASQISTAFVITADGRGGTSAILNNSYFFYICIYNLKVQGEAGSADAEAVTSYPEDLAKITDECGYTKQHIFNVDETVLYWKKIPRTFITGEKKNRHSHANLQQHHPDQSAAINVEATPFTNKKIMTR

SEQ ID NO: 921969 - protein, 136 aa, Homo sapiens
MRARTNPNSTFTHRIPKAPTPRMGEKKDVLTSCCTSNCAVQDSLNIPEQMQDPCSLAPLNFSTALPLTRLSDGVAQCPSERLKSLGQWTVDSEGGCLSEGRQWHSQGPHSHLLTYGVWGSRVLHRRACSFCAYFLL

SEQ ID NO: 921970 - protein, 150 aa, Homo sapiens
MSRPPSTQGGLQQVSRKWDCEYNDIFLPFWIQIVCNLAYHVCSNDSNSLSFKNKYIFSADSKATYVCVSKKQAQLANKNHKEITVYNDSKSQKSEKEPNRNLKLKISINEMKNTIKSFNNGLDQTEERISEPEDRFSEITQSDKKRKKKE

SEQ ID NO: 921971 - protein, 173 aa, Homo sapiens
MLGVFYPNIQVGCTGSIVASASGEASGSFQTWHKAKRKQAHHITKIGKEREEKGATRFEMTRFHENSLLQGQHQGDGANYSIEQRKTSYRDAYLTVWDNPEEIPISGIGFGKDGLALDDKVLTYYCSVNEYKDEQPLYMYGRFDGESTSLRGTELPFGALILLLVLNGGLVVT

SEQ ID NO: 921972 - protein, 152 aa, Homo sapiens
MLNDELTVSGESCSLLPRCRCNAASFREEMKTQHYQKTYYSGEKGNKSEVTEFTYNSDIHSSLLKGNMSGKAFIFLPCWILPALEHQTPDSLAFGLLDLTPVVCQGLSGLRPQTESCTSFEALVNCAKCPSSRAEKRKGNTKDSVKFQGQYV

SEQ ID NO: 921973 - protein, 150 aa, Homo sapiens
MQVDRLLQNPLENLALGHNRNKKHVVPGWPQRDRATSRLLESLIPELASWTAFLDLPGARREFTGLKEARVQTSSDSEDCNKYLILQCPDTNKHLKVLRQSRKIGPHQVNEIRHQGPILEKQIYDLPDKEFKIAVLRKLKEIQGSEIKDE

SEQ ID NO: 921974 - protein, 134 aa, Homo sapiens
MTDDSSMRVTAPGGLSVGEDVEVEDSDIVDSDPYHSEAKIQQRNNNNKRKLQANIFDEPRCRNLSKILANQIQQHIKSLIHYDQVGFIPRMEGWFSIHKSIIVIYHINSTKNKNYLNILIHLEKHFDKIQHSFM

SEQ ID NO: 921975 - protein, 143 aa, Homo sapiens
MGAIPPCCSHDSEWVLMRSDGFIRGLFPFACHFSVLPSCNNARDITKVSRNIVHLISLTVTVFSLCFYYPPNGCVQSVDGSQSNDHNQGRFNKEILLLATSKENMGDNFQSNASPNSNKNRAFIGLLGCIIVCRGGVKAAQVQ

SEQ ID NO: 921976 - protein, 151 aa, Homo sapiens
MCGVLSGLRDRLMMENIRELKADSLSTKTELFCGSHENVSVQLQGLRLNKGPAAGSEIHGSRGAIPLGCSQPMTVQQGFWGHLVAEQSKCKQGNCQTLIKPSDLMRTHSLSQEQQAGNHPHDPITSPGPALDTWGLWGLQLKMRFGWGHKA

SEQ ID NO: 921977 - protein, 177 aa, Homo sapiens
MDVISIDKMGENFCLIYDTKSCFDVHLITPEVAKYKLCRVRKIFVGTKGIPHLVTHDAHTIHYLDPLIKVNDTIQIDLETGKITDFIKFDAGKLCMVTGGANLERIGVITNRERHPGSFDVVHVKDANGNSFAARLSNIFVIGKGNKPWISLPRGKGIRLTIAEERDKRLAAKQSSG

SEQ ID NO: 921978 - protein, 216 aa, Homo sapiens
MRRKKQQKKQKRKRKKRKRRKKRRKKKEEEEEKKEKKEKEKKEKEKEKEEKEKKKKKKKKKKKKKKKKKKKKKKKKEEEEAEEEEEEEEEEEEEEEEEEEEEEENRKKKKKKEKEKEKEKEKEKEKEKKKEEEEEEEEEEEEEEEEEEEEEEEEEEEGESIQCGLHLRLWEKSRPTSGVILTMVDNDFPSNSSRTAFSKDTVRLQEAMRWVRGRNC

SEQ ID NO: 921979 - protein, 264 aa, Homo sapiens
MIGRDTDLQRLGSSAMAPSRKFFVVGNWKMNGRKQSLRELVRTLNAAKVPADTEVVCTPPTAYIDFARQKLDPKIAVAAQNCYKVTNGAFTGEISPGMIKDCRATWVVLGHSERRHVFGESDELIGQKVAHALAEALGVIACTGEKLDEREAGITEKVVFEQTKVIADNVKDWSKVVLAYEPVWAIGTGKTATPQQDQEVHDKLRGWLKSNVSDAVAQSTRIIYGGSVTGATCKELASQPGVDGFLVGGASLKPEFVDIINAKQ

SEQ ID NO: 921980 - protein, 150 aa, Homo sapiens
MGKHCPSFSSLKLNHLISPLSHPVIACCSSQSLAFSVLEMDGNQAKMPANACGCSLALLRTLVVLYGLEAAPGPVMSGLCKHPARKKGTHTESHGHLSLEQSQLGATLRAQIPGIYRHSCSCSKEEEARLGAPMHPREGACHSAISCCGD

SEQ ID NO: 921981 - protein, 157 aa, Homo sapiens
MIQGSVLRGTFHVRPLTFGVVYDTTGANRSKHNSGEGWAFSEPITKTVNTVPNRGFPHPVLIKSVQSSSWDIVESALGKHFLQCSERTESCHSTELTEQALQLLLASLLVNIFQLPARTDMALQATEREGKYERTISVPIGSQQLIGYGQQGKPGVD

SEQ ID NO: 921982 - protein, 146 aa, Homo sapiens
MIVAAKPPFAGSITISPLSISNPSIDNEDIVEPCYDTRLDEVLIFKFLPIDGLATSAIMACEVTTLIHKPWNNSVKAGTLITKSFLSSAQSTKIFCCLWELVCKQLKGDAAQGLAVDGNVEEHGLPLPSCEALQAHVPFHKLHPPY

SEQ ID NO: 921983 - protein, 260 aa, Homo sapiens
MPKGKKAKGKKVAPAPAVVKKQEAKKVVNPPFEKKPKNFVIGRDIQPKRDLTRFVKWPRYIRLQRQRAILCKQLKVPSAINQFTQALGHQTSTHKYRPETKQEKKQRLLALAEKKAAGKGDVPTKKPSVFQAGVNTVTTLVENKKAQPMVIAQDMDPIEVVVFLPALCRKMGVPYSIIKGKARLGHLVHRKTCTTVAFTQVNSEGKGALAKLVETIRTNYNDRYDEIRHHWGGNVLGPKSVVRIAKLKKAKAKEFAIKLG

SEQ ID NO: 921984 - protein, 149 aa, Homo sapiens [sequence omitted]

SEQ ID NO: 921985 - protein, 238 aa, Homo sapiens
MSDLMFFAHFNSWHVVMMRDLVILGWDLVQSLTSWPTVTSTPNISFLPKWGCRLRAFLLPMTLEKIAPEGAHYVDGKHQRQDSRHISVSVDVDMWLPSSASWSVHISGQHLVAVEEDAESEDEEEESAKLLSISGKQSVPGGGSKVPQKQVKLAADEDDDDHDEDDGDDEDEDDEEDDDEDEDGGDDEEDDDEDDEETEEKVPVKKSIRDTSAKNAQKSNQNGKDSKPGCLKISEQHL

SEQ ID NO: 921986 - protein, 179 aa, Homo sapiens
MGPLQDMRAPDPWNRQARPLSQTLLVRTDGSSQGKPEKPNSSEEVLLYLLFNNQVYSNGTLQNSKLEDKTAPPPSLFWLYLAIAPWATLVLLVGTLVSELCHLLFFGQEQLPDKPLSHCEYKQWGCPAHPPRAEPDLNPDPLPPSSQQALLSHGQMDDGCIMRNNSAHPGRGPHDARGV

SEQ ID NO: 921987 - protein, 143 aa, Homo sapiens
MGVFNFWLLLTKLSYPLLILKLQQGLPVFLVIAGDAWTAFYPLDSGSTEQGGSCTALLRRIYDPGYHRPHHFSYYVLNTTFIYITHNAKKAFESGTPGLDLPNQDWDGDHLMLAQLYIHHCTQKGCSSWNQESRNRKHKAQFC

SEQ ID NO: 921988 - protein, 145 aa, Homo sapiens
MGHGQPVKAAAGVVPCRATGAKLPKALGAHLLDQHALNLRHGIKEDYFGALKFDDCPLGLTWQLSKLITSNIFIAAPYLLVENDRGRSCRNSIALSFTYIDQLPVSTIPSGFNEMKRSFSHTRRLGYPEFKYVGHLLTWSLVQDS

SEQ ID NO: 921989 - protein, 148 aa, Homo sapiens
MSENMWCLVFGPCDAVGLLEFAGGPLQNLFFWVSPVEDAEQQILQNSKYCCLLLLLEAWSQRGTHLYEVYALPPEVESTEAASLAELQCALPSSSFPGCFFYLLKPQQWRTPLPLPGCCLTGRSQTAALAVSKALWVWVPHPQYNLLV

SEQ ID NO: 921990 - protein, 141 aa, Homo sapiens
MITGAESQQVQVQCGLCGEHAELPSDNCKHQLFLPDGLQIGISVLCVCPIPMAHSADVEHNSLHNCGNICLPDHTITAAITKVFEMEGISPNSNIWSSCTERKKKDSEKFILKFMVKGGLEPMNHNYLWFLLYQALCTYIG

SEQ ID NO: 921991 - protein, 134 aa, Homo sapiens
MPFSGLEITPPHPPQLAAEHSSQRPDDGPTLPAATTTVGTHLHAPPAGLETDTPSPLQPLLTPAWATRESEGCPTTTTATAHAMPTVPLTCSSLAHHLLIHPRTCPLTLLIKDDVQDKCVKYSFLKTLPSNQRV

SEQ ID NO: 921992 - protein, 156 aa, Homo sapiens
MRARNTWTAQGGKSHKGILKPHSILFDKTIAVGGGDYCKRTTHRPQDLQESQERPRMCDHEGRLLHMPMLAQVKGHANSLGFLGPLARELPYSSGMQFNPQQLISGGPGVLNTHQSAAEWSVHAPGTSKDDPLEVCEPPDPPRPYGVFHKRERSFP

SEQ ID NO: 921993 - protein, 150 aa, Homo sapiens
MAVFCAWTSQLPGVTGAGLVVFFRVTLQGLAKLLPSTYRSQSTDATLPLKWSEQVPKTSLTKFQMSGLQVPVPSQCLASVLILHGGLPHTALAMCPTGANAYQGALSGSASLGLVGVCCRDVPQGRLKSPKELPRPSTNHLASQSGNQEM

SEQ ID NO: 921994 - protein, 140 aa, Homo sapiens
MEKGGNFQVLPLQCKLTWYWRKEETISEESLFQVGKAEEYISVWGYLQISGSKRVVFQREEKEEEAASFHRKCQGDHKFHMEIQEIQNIQNDLEKNKFGGLTLPDFKTYCKVTVIEISLYQNLAKVSWEWEMGNKSKPTD

SEQ ID NO: 921995 - protein, 199 aa, Homo sapiens
MAVSEGLVPPLACQRTQRWVTGAGSPWDTIQSPQLGHLYHCPRVELNSDPMVRPSGNRLLTPGTSVLPGRTRQEDASLHPGCPPNLWNAAPGHRGGPTVADTYGNPEAGLPFIQPGPHSDLSQPIICQMGQSAHMGHLPDPLTLLGSSCWRCVCLPGRVIQGFIRQSIGDGSSGDSHGLAWTYGKFQQVDEKNRGKMKI

SEQ ID NO: 921996 - protein, 222 aa, Homo sapiens
MFLNKCRCKMSRKWKGRMMAVSEGLVPPLACQRTQRWVTGAGSPWDTIQSPQLGHLYHCPRVELNSDPMVRPSGNRLLTPGTSVLPGGTRQEDASLHPGCPPNLWNAAPGHRGGPTVADTYGNPEAGLPFIQPGPHSDLSQPIICQMGQSAHMGHLPDPLTLLGSSCWRCVYLPGRVIQGFIRQSIGDGSSGDSHGLACKTVSAGFRPPNPLLDNFPLPSIP

SEQ ID NO: 921997 - protein, 144 aa, Homo sapiens
MQSYSWLQQRQYITEGWDRVCSGQHQWHGTVGCTSSPTLTGVEKQGPPVHVCTGKAVREEYGEHWEMGIPGHAPLQTFPHQTLWALHRLKPCPYYLSSSSPRQLKCQWMLCIPCCQDSRVPWVAPQLLNSSLLQESMRVKNESW

SEQ ID NO: 921998 - protein, 250 aa, Homo sapiens
MCLKGMQTLNTISCGGRTLQNHSGEATQDLRSLPLASVYPGYKSQLQPMWLGVYLILVFSEKPAASGNGLIHEVNNDFSSLLSPKGEWVLQMPRDLSGHTVERAPLHQDLCTGRAGWLRLLNRVLRMPGDLLGCEAERATLQHDLCTGRVEKLRLQNQVSGCSKFLEIGLGMEWIGPALLQSQPMKSGVAQAASPCKWVLQMPEFLPEGRAERVLLHQGSSLGHSAMAHADLLQVSKLPLAISLTIQRIL

SEQ ID NO: 921999 - protein, 142 aa, Homo sapiens
MCQEMTFRPHKKKHQRIYTRSLHLDNEMLDPSSMMIAPLSLPKHEPTGRNEQLQTRRLKSSSKTTNPPEGRNSEHIRTSVGTNSGHAAFKNCNIHREAKIRVLVTEPGIIRHVDTLKECQQSCCKDIESLLYAFQFLIGQTQ

SEQ ID NO: 922000 - protein, 174 aa, Homo sapiens
MLWGLAVFHLAHSVSCSLLLPSKGLWFLSVFPLSSKHTHINMLETINTKHITDSRISVPREQTQVDGHQEEHAGRCQQAIDGGTKRTPREIRPRTGRNPGIQKALCPCNKAEGLIELINTSYLQMGKLKEHTVTHAHWGFRSCKHNPRRCTPKLPVIKSKQFVHKKIALQQVKI

SEQ ID NO: 922001 - protein, 144 aa, Homo sapiens
MPRICVSAHLGYYHKNTINNNKPLLLTVLEAKSKIKILADLVFETSRKPVQLKQCEESGNVQDESDKSGELAGHCKDIKSYFKTHKITKEEAIGRVKTKGKGITNHMEKFDFKRNNKERLTIPTTGAVVGRRWRVMKVEKDTSS

SEQ ID NO: 922002 - protein, 141 aa, Homo sapiens
MWDLDDNGLCMGRDYSISCSGLKIYYSEYLKVLYLVADIHDCYRCFVEVQKDYRSRPVLNLKLQSRILSPCEEEFSEEIGKPAEFSEEIGKPFKNPHIEDYEKAELFQVCSCAGQNQLLDAAARIKLADKAVLVTVGTSLP

SEQ ID NO: 922003 - protein, 165 aa, Homo sapiens
MLSVDLPIFLRQFSYSSISRKLTISTCLVDNTEMKRGPPCLLPGEDDTNLWFWFASTCKELWEEVRGRTEHFSGSKTCLLHSLAAEPKTEKTLPQGDSAEATIEFTNNLPVLKKIIDETAIELKCTCSRIVDERKGIRDRNNMFGTKGYALQQRVGDKYLLFVNM

SEQ ID NO: 922004 - protein, 140 aa, Homo sapiens
MDQSGLCKTDQWDLCKMDQSAGCGFTSKPKRPRTHQKEETPNTSEYQKEETPDTSPLRTVTLTTRVRGFILQVSETKNSPIPDTEVYWAVLLETAILRGGSWEGFVSDILSQCISKTMGLNNILPGVTYHRALGRGKKSL

SEQ ID NO: 922005 - protein, 180 aa, Homo sapiens
MVAKGISSKPSWLICGVGPVYAQKSRIKVWELLPRFDRMYGDVWMSRQKFAAGVNPPSVRTVWKGNVGSEPPNKISTGALSSRAVRRGPPSSRPQNGRSTDSLHCPPGKATDAQCQPVKAARRKAIPCKATGAELPQTVGAHPLHQHDLDVRHEVKGDYFRALGFPIIPMCRGNNSRRCN

SEQ ID NO: 922006 - protein, 135 aa, Homo sapiens
MQGICGRENSEMPSCQGFYPLVRCPILSLLECGWEHEYNAFRFLLRGLIGKEWECATCNGDVWEDPDDVGDTEFVNSDEPFLLEEIASPSPIVATSPPQPMLPSAFTHLFEEINSALPETTVMASTKETKVLVGP

SEQ ID NO: 922007 - protein, 145 aa, Homo sapiens
MDSADYSSLSPWEVAKSTNDGVKPGKAATLSMPQNQLRREDYSMNFGGHIATRRSLESMNPISVLPLSKITLNRNLPKESYECSNSYDSKSAQVILYMVKTLTPQGIVSKEIVSKETVPTSKAYFINLKMEYVNCRLGSICLTLQ

SEQ ID NO: 922008 - protein, 150 aa, Homo sapiens
MLRLSGPWASIPAKVSPPYSPAAFSTPPTCISVTQSGNSNHTSLCLCYKRSSPLAPPPNHIKPPIGEEVPRSLKPLGVWTGCGPPCSSSERSLCQLLPPHIERQLAGPPLYDPLQVLGVESGVFKNRGSGSEAAPHFWHQGWQLLGTLPC

SEQ ID NO: 922009 - protein, 151 aa, Homo sapiens
MVWHIVPGLETCIVCDCAEYCRQLQHNGLREVLRAGVVDEEFRQNRSIDISTVIKPVFGASSTRIPVLQFLVYCSDYGTATTVEEIKLPLKISSLMSQRQNLTSPRDSGPEIPQDGERKLFGVLRFTHQYLNSFLCESTKLTVSRCKDAWL

SEQ ID NO: 922010 - protein, 139 aa, Homo sapiens
MRALLQTKYCSLCLEHSIDLRWYKGFIRECEKDVLNQRGASDMGGRKPDHLVFPNDTPELGVWSAWPGKLICCFLPENCPHVAELVVMSEMENVLYGWSLGQGILVCVAQLGEEVLWLVFGTRHSSFCDLPWRRMNGER

SEQ ID NO: 922011 - protein, 195 aa, Homo sapiens [sequence omitted]

SEQ ID NO: 922012 - protein, 161 aa, Homo sapiens
MVSGSLIRSLLLWAGEYPLAPPSASIWLFQLKVLYSLAPSVPLQIMPPSKPHPPVVGKVTHHSIELYWDLEKKAKRQGPQEQWFRFSIEEEDPKMHTYGIIYTLLCSLTWNGPAWSTLASFSDLMSYHCPLVNSLIPRWLPLSLDRPSWFPSQDLAQKSEM

SEQ ID NO: 922013 - protein, 154 aa, Homo sapiens
MNMLQCCRDCLWPVLGLVYRQILGGLLPTGRAVVSLASMEIESGKEEEEKNQPMKLADANKTSLNKFKKIEIISSTLSDNSGIKSKINSKTNLQNNANTRKLSNLFLNEHWVKNENKMEILKFFKLNDNNDTTYQSLLDTAKVVLRGKFIALNT

SEQ ID NO: 922014 - protein, 174 aa, Homo sapiens
MPQLLLLLLLALSTKMRRNQHKNPDNSKSQSTFFAPNDHITSPARVLNWIEMAEMTEIEFRIWIGIKIIELQKYFETQSKEAKNHDKMMQELTVKIASLEKNLIDLIELKNTLQEFHSAITSINSRIEQVEERIPELENWLSEIRHSDKNREKRMKRNKQNLQEIWDYVKRPNL

SEQ ID NO: 922015 - protein, 165 aa, Homo sapiens
MEINQRKVHQMGREVLNPVLQLKTGSLSIPRPRQFRLIDGLKACFLPSRLNSRFHTGRGGVGLLAAAKGTNFCIFTPVRIPSAQAGQSPTQSKALTLPNFVKADNGEEAAEEKFEASRDWFVPYFREACSPFPQPQACSVYPEIRSYLPKGLDRMVCTPLGWAGH

SEQ ID NO: 922016 - protein, 176 aa, Homo sapiens
MAQVAEQLAQQPGPIADPSPVLDTTQNRQPFRTLNKWESKGILLALPAEGELLLVGLMDRNGEKGICQINGCIPGAKYIYANYAFWHWGNDHRMSPGTHWTHLSTEFISSDKSGKADGSVGQGGDVATTGGGKAVSSGKKRFIRVHNSVSPASSRSSHTSPFQVVRSHFFQSMSSL

SEQ ID NO: 922017 - protein, 218 aa, Homo sapiens
MAPFLGEISQLLIGRLLIFPSLKAQRFVLTGIDTLDMSLPILHTMLLPRLPSVDSQNAFSTGWGKVLRKAMYALNQCPIYGTVSPIARIHKSRNQGVEVEVAPPTITPSDSLAKFLLPVPMTLHSAGLQVLIPEGGAFPPGDTTIPLNWKLRLPRGHFGLFLPLSQQAKKGVTMLAGVTYPAYQDEICLLLHNGSKKEHAWNTGDPFGACLSITMPCD

SEQ ID NO: 922018 - protein, 140 aa, Homo sapiens
MLNAGPLGPLISFSILSLCVFFFSKSLVPPNEKHPQCRTADRAPQEPVVDKVQRQSAGEFPLTRGAILQEHSMGQSNIGGSGLRELQLFETPSLCFVRKKPCGEAHIKENGASADLTAAGHQITPSGDREMGFRGPKSHY

SEQ ID NO: 922019 - protein, 151 aa, Homo sapiens
MQPMKAARTGAIPCKATGAELPKTIRTHLLNQHDLDVRPGVKIDNFAAVKFDCPTGFQTCMGPKSGALCDREKQAADFRVTSRNFSQGQAECSGSGRVLRCMAQWQQLLRRPKGGSPAPGWGWLSEHLAAASMLKWEQGGWAADLSQSQVK

SEQ ID NO: 922020 - protein, 156 aa, Homo sapiens
MPGSVGSPCQLGRVWGPCWNHLFPAFTSSMEHTAAAALPLLQLMSLQNFSRWVAATITRTFKEYTSLPCYLHWSRCWYPQPHPQGKEERTTSREHTVGKKNLNNSPGAPDLPSVIIYPNEKEPEKQFCNGFKLRKKSQGCQKKNSEGQLLNYSKRY

SEQ ID NO: 922021 - protein, 170 aa, Homo sapiens
MASPKKEEDMEEEREGEREEREEEELSMAGHGVVTTLPPAPARLLWAEHLAIWALWAPPYSPILPASKEKFSNNMVGTQVFKSACGRGGPIPPEEWGESDPGPRQWAVGGGQWAGPLDLGVWLLLETPAQPLPWDFCLKMQTTQNPLPKTFHFALKSIIKSFNEFVWSCR

SEQ ID NO: 922022 - protein, 148 aa, Homo sapiens
MRRPHTALIHLAQGLPENVPAQRKIILTPTPTAGARHLLSRLLGQECCRQPGGPGGMIPIQGQGHFEIQQEAHLLQAAAPQLPDSNKQPGPAAASRLPPWRLLQLSSLLLRFLELLQRVEAPAGIPPPFSKGLTIPAAEQGSSGPEVN

SEQ ID NO: 922023 - protein, 156 aa, Homo sapiens
MLGAEGGRTFQERGTTHAKIRWDENKHGDFEVCKKADEKINWFGESSRNTSLDRVRGHSKALPTQKMRQTLLDFTHFTKSYITSGKIDNSGGICIKAEKLTYYLKLNRIKPPSSTVRDWALAGATDTHYKGPDTPTEHQAFKSSMDKCGLTGLCWH

SEQ ID NO: 922024 - protein, 155 aa, Homo sapiens
MDLHLSIPSTAAFGSGKRQWVLSLFRNWKQWRPAPRLSSTRQQSLDYRHIVKLQKNIPIPSRKRGLLQRQECRAQRAPPRTRDATPCSLLAPSWPQLLPYPWAFTLSSALVCSAVSLWHLESQHRASSLQFTPREQPHVTQRRGSHVILNSDPQK

SEQ ID NO: 922025 - protein, 234 aa, Homo sapiens
MKERGLRHPLLPSIPAALTFTHGADLHLGCIKTKSYGPGFAPGRGKCDSGVGPGEAWGGGEAGVTSVQTGERHGHGHTDGHWNTGASQKENPPAGLDPEPKTINMARMSVDSVHSSACPSRPQGWAPSCSSRLTSSCGCSGDSCSSCRDLPVPDTFPPSSLHLTGLMFSLPGLCAQTPMVRVFLPEREHLHPAQGPPPSKCQVTPLVPSCCPRQLLSWGGVPPALQIPQGVLSV

SEQ ID NO: 922026 - protein, 307 aa, Homo sapiens
MHLLPSGDECGSCPGLGGKTEIPEKSRKGSCGHAGGQNTAVARQVGSVPGSRRGGSTALPGTRASEKRAAVPVCAASELGPQTSRRFCEVPSIQYPRPHGGSVRLGAPSSMVLLHGSGSSSPVGLVLPHPWCSSTVQDPPPLWAWCSLIRGAPPRFRILLPCGPGAPSSVVLLHGSGSSSPVGLVLPHPWCSSTVQDPPPLWAWCSLIRGAPPRFRILLPCGPGAPSSVVLLHGSGSSSPVGLVLPHPWCSSTVQDPPPLWAWCSLIRGAALLHPSSGKDTAGWQLPGSPFHLEQQARRDKIRYPSG

SEQ ID NO: 922027 - protein, 145 aa, Homo sapiens
MQMTNLAGRKSLRHSDLAYPTPENEGWKRHRDRQRIVNPLRPPGPGARAGTAQSPCAMPPRLTPWASVTLQENEQAYYHLQMLVRTFSSLRCEDFTKNKGFFLISLRENHIIQGSYNSILEVQCKCSSIQPKPPFGGGFAQGKFM

SEQ ID NO: 922028 - protein, 176 aa, Homo sapiens
MAGYSSGTKLPEEQSGSNICCSPISTVLQLLLLIPRQRGSGVDLQQTPTDLQLRVLTVRRKTNKQKGHPHQNTICTSPSSKTKAMEQRWTENDFDELREDSFRQSNYSELKEEVRTHSKEVKNLEKKFDKWLTRITNAEKSLKDLMMLKTMARELHDKCISLSSRFDQLEERVSVM

SEQ ID NO: 922029 - protein, 163 aa, Homo sapiens
MVTWMQTFRWDQTDPLRTDALWDTRCAGRDPQRRRPRDHGDTEVGGCSSKPRTAQEGKGHQEPGEGTGQTLPQRLEREPTWDSDISTMDKTALSSFRERHVTEKSLTAANFCIADGFMFNIIIVPGFRLAVLFDCDSAGVSPSWTSTIMLKFTLIKNRLNPKG

SEQ ID NO: 922030 - protein, 146 aa, Homo sapiens [sequence omitted]

SEQ ID NO: 922031 - protein, 147 aa, Homo sapiens
MRMMQGTGELGGESGEKGAGPGISEWPQLKVSPRLRISGTQSRSSKEEVWALQPWDELLCMWPSGGGSGSSAPDLQTHAIHPSLTPPTKALQPAQPPRTLGCFHSSSHALCILLALGPGSMDPRSLVLVTFQIPPTPQIPLTCIDRV

SEQ ID NO: 922032 - protein, 139 aa, Homo sapiens
MERGTSQWGDLSQPTTATTVSEESCQQCAIYEENLRQIPTEECPAMHLTRAPQTIKVINGKGHLRPCHSQEESKEIWQRNVMRSLAEMENWVSAFSTWEKELHKIVFDPRYLLLNSEERKQVDNNSDEIGVVQRTLAAQ

SEQ ID NO: 922033 - protein, 220 aa, Homo sapiens
MTNSCRLATSSHLMDRERASIHGIAQGPGTLQSAVAKPAGPMSFPSGEQGPPGPDHKLCSLAKKLKTLKKRLDEWLPRITNAEKSLKDLMELKTMAQKLRDECTSHSSRFNQLVERVSVMEDQMNEMKREEKFREKRIKRNKQNLPEIWDYVKRPNLRLIGVPESDGENGTKLENTAGYYPGELPQSRKAGQHSNSGNTDNTTKIFLKKSNPKTRNYQID

SEQ ID NO: 922034 - protein, 265 aa, Homo sapiens
MHDSCIWIESILETGIFKLSSIESGSCSRKEDIHILSVALVGTCLGGCGEPQSSREDPSTVRAAKDRLLESLTLEALTWRPSPGGPHLETFTWRPSTGDCHLETLTWKPSPGGSHLETLTWRFSPGYPDLEALIQRLSPGGLHFETFTWSLSPKDPLREALPWNPSLMTAESRARVRFIHRYLPSGMLFEVARMTVDTNENSPDDPSDAGEFTRRLTQCQRIHQATYLMPGNSPDDPLMPANSPGPYSPMDLCRFMEENCCLMCR

SEQ ID NO: 922035 - protein, 143 aa, Homo sapiens
MLISYHSQNSRAKKEHKSKKPYPKDSSAPVGTLYGSYNPTFSFCTGLAEVLHEEAAMVWGLHPLKQRPELYVGPFFLWLGCRAPSLETAQSSKALDLAHKTQYTTSTVNQSKNRQMGSYQVLHNKGNNQQSEEMAHRMGENIQ

SEQ ID NO: 922036 - protein, 128 aa, Homo sapiens
MLRMLKNILPQAYIVFGKSASEIQGLFLLESILVDFRRVHDPSILFRIIRGIRNTRELDVAHGKSSGRKAFMARTALSHPLLLLVDPPFSEKMVRNLAGHSVLLMKFLPDKPDSKEKYDTTEKSIMNV

SEQ ID NO: 922037 - protein, 167 aa, Homo sapiens
MAWYSWGSHCSSGVISVIMFFPQLGGSKGTSVVVWPRGLLLFFWRLHLTEMQESLMLDDLRWNSFKPKPSPTVRGKTVFHETGPWCGKCWETAALKGQLLSNESISQLLFTVAFTVVLSALRVELFQSHPLGYTGIKGALCSISCFSFWAKYLSCCSGAPGRESNRP

SEQ ID NO: 922038 - protein, 147 aa, Homo sapiens
MNIGCQQLLPPPFVGESHLAKQDPKVRLWPMIDGKGVQYGLKIRLAQSHGQDHPAEFRSNSSPGVKISYGSKETLGATNESWCAVAPFRLPSFLSHQPSICVFPLSTVNDFPLKICSEQASLPDFLVLRAKCSRVAEIAECCGRQYP

SEQ ID NO: 922039 - protein, 146 aa, Homo sapiens
MATPAVVEKKQCRAWSLASEGASPKPWQLPHGVEPVSAQKSKTGGSAEGNVGLEAPHKVCTGARPSAAVRRGPLSSGPQNGRSNDSLHCVPGKVTDIQHQPVKAARREAVPYRAMERSCPRPWEPTFCINVTYIQDMESKEIMLEV

SEQ ID NO: 922040 - protein, 268 aa, Homo sapiens
MLSGKLGQLVAFIIGSLLLLSLSLSVLSHLELGVWSCKHSCGHNYWDYTGSDLKPVQHWVLFISTADFHLKPKGSSVSLVEFCQAWNSPFRAVGSPLVHGRSRNADPEARPGIGDPRACLLLYPVLDVLEPKVQDKVPFTFLSAFLKQKESFTVATAARNVLGHTDSQHISEPQAHGIPPEHHCWLFRAQGLFSQQKCLGARAWKGGLITLAPYPTVAELISKMQEKVLFILCSPPLTQKIRGYTCLFVTCVYCILVGMRLLAYRISK

SEQ ID NO: 922041 - protein, 144 aa, Homo sapiens
MCGIISEASVLLHWAPPSGAVRRGPPSSRPQNGRSTDSLHCAPGKATDTQCQPVKAARRVAIACKATGVELPKTMRTRLLHQNTNKRLLNYVNQWIWGGLLSFLCLKNGIQERSQSSQALEINMNSTGSMNDSEVQFLLLFVSQ

SEQ ID NO: 922042 - protein, 169 aa, Homo sapiens
MEELRLTSTTFALTGDSAHNQAMVHWSGHNSSGPSGCKFQGRNSPASSNSTKRGCFENWGFPAHVLPYKSAPRPIQDHRQCTSCEPFSPLAKSLCYEESLIMTTPAFKVQMHGNYRLLVNLVRNSGWFTHLLPFTFLPPQLLDLSSCIKTCLFCLVCGCDVIPLYCSLD

SEQ ID NO: 922043 - protein, 156 aa, Homo sapiens
MNAVRTLAAEWLESRGPLLSLSRPLLQVAPEKGLLPLTRSRKGCSSPVLCNSHPCGRSRPQMKADFQLKSYGDRKGKMDCQCDEQPMTEFYYTALLNLGEDGSLSKKGLYQTGSTESKEYDAPGETKVLLPKDVGKIMRRHQQEHYPGLAPPPTPQ

SEQ ID NO: 922044 - protein, 139 aa, Homo sapiens
MYLLLPTHGKFGILQFQLSFKGTIGDVQRTLIQVDFGDGIAVSYVNLSSMEDGIKHVYQNVGIFRVTVQVDNSLGSDSAVLYLHVTYGEIKDWRSTVTLASLYAQSKSEQEHNRVTLSGILKMEGVMSDCGCQSAMIWQ

SEQ ID NO: 922045 - protein, 142 aa, Homo sapiens
MGDPGWREPKGPLWCPGGGPPSSLQLPESPGGSCMVMVIWTIGARERSPGTCWSCWTICETGSGLGDLHLQGQSALQWSPLQIGQGGDKLEEKLLLGGPSEAGLEGACSPPGDASGVCFFSFLGLSLAALPELANRRVGSVL

SEQ ID NO: 922046 - protein, 141 aa, Homo sapiens
MLFRGLLLLFPAVWKNATQCLPLSTSVLVANCSTLYLWPGRELGYRERYTDLIFLLTSHLLWCLAFAEPDRKPEEKEALSQQNTQACLPGTKMRGEKWIVNPWRTKPKTQNMALFLEGFFPFMLSHFCVYTFNLRTLAAMG

SEQ ID NO: 922047 - protein, 169 aa, Homo sapiens
MNFAASMVFFSVLLQSLYSKYNYFLFLSAFSALVWILYSALAWIKWEGIWKHMKTKNRNIILMIDNAVCEIWLRSEGQIGFQKLLLLCLIPNRWGTGHTSSPIYLWGNPPQEKCEFFRALLKSVSFNGPEQYPVVQDRQYNGPVDEDRVCRERGPERTQEVALNNTNCF

SEQ ID NO: 922048 - protein, 225 aa, Homo sapiens
MAAVGHPEWPLPLCLSQQGLGAGVAAGMATGVAVAALSPAAAVGRAWGRSGQSPDPSALGATVMGLGRVNCQQGSCAIRHEGVIREGPQGGAGPGVVLCSMEQVKASSKQQPHPLGHDCSCPSHCCGPGPPCALGGQEQAGALPSWVQLQMWTQSSLCTLGGLGRPLLPPQAQRYLLPLPGLFLLLQPTPILEQEWGKPGAVAAWPGPEVEILSGQLENEDRESP

SEQ ID NO: 922049 - protein, 140 aa, Homo sapiens
MSKKSSEFMFFCCGFSRPLHSGSLTSRNLFCLADAHVQSRWNLPPVSQGDLLSYGMVFAIWLQFQRPKHMEGLKKMKCGRRMSFLVGVPWGEPWRAQVAQSSQERSSSAWVLRVNPVLHRQGPACSQGTWKAPLKGCRRG

SEQ ID NO: 922050 - protein, 140 aa, Homo sapiens
MQTKIISVTYPFLPTRVAVIKKVGLDRFYNLRLTSYDLVLTSVDEAVFGFSVRTRPGGAFQRSLQGDQRGGSFKQSELMSLANQKDDIWAIARISGVVESQNASSAENYEFIPKWKFLERVTVYFGLLCSKLEKLLVASG

SEQ ID NO: 922051 - protein, 155 aa, Homo sapiens
MKSSSKDRSWESQDAGEDGYKGEKTERLWRDGEDFTEGSPSSQLDPLQGIFSAPVQSQPKPTALAEQHQKRTFPKGGKALHGGREEAEQAKCTQVTGPGHRSCLRWRFQCKVLSPGSGDDGKDSRDVEVPEVWNQLGTSQPLDLDSWHQDPANFI

SEQ ID NO: 922052 - protein, 140 aa, Homo sapiens
MELLRCSRREVVFKSSQQAKSQRSALATAGGIECHAEHPTLVLMLFASVLVTCLEAAKLTVGFQTPWNISHPFSMQRLGAGLQIAMDKVNSELVDLGNFTTYTNSACSTKESLAIFNNQVQNEQISALFGPACPEAAEPG

SEQ ID NO: 922053 - protein, 149 aa, Homo sapiens
MLASPSPSSIMGSEEDGKMKEGFKLPRELDTSVENADSDMDNEVQAEDFSDGDEKLIGNWSKGHSSCALAKRLASSCPYPRDLWNFELEQDDLGYLTEEISKCQRKQDVSCLPLTAYSHMHAQRDYLTLEVTFKREAEHKSLNNLSPTM

SEQ ID NO: 922054 - protein, 137 aa, Homo sapiens
MEAMAAGPFSCLSLCWMMDYSQDPGQTQPFSCLLYSEDRHNTINQVVPQLRGCPEVLIPPFQENQQLIIILSRSAPAARCRSGLSAQKASRINCTLCVINLQALKNDQASVSYMYSVSLQGTLRQEGEAGPSRHFKV

SEQ ID NO: 922055 - protein, 241 aa, Homo sapiens
MPQVSMRTTPVNTVPAALLSTSRPLCTRTAHPKGRTKGEEMQTPEPCQHKKPQVKGGWSTETSHIACLALFRSDVLPHAKVYQGIQDVVENKLHDLVQGHIQKKPPGGPMALATKYDDLEIPRECPGRHGLQRRLRTVRWAGVCPGKTWTPEEAPNSQVGRCMSRKTWNPEEAPNSQVGRCMPRKTWTPEEAPNSQVGRCMPRKTWTPEEALNSQVGRCSLDITVPGPGGKKKIHDAHQGI

SEQ ID NO: 922056 - protein, 147 aa, Homo sapiens
MCKTHNKHESKCLLRRSKLVLNFMVLNGRGPASAITIDTSNQLRLLRALSRNGLHLSQTQKKLTSVCRTGSTREQIQGGETVRVQNMTQDEGVMVSSFDRSACPPPTAFFTELQEPPSLGFPSTPLVLIFSQSGSSSSPSSDKHSVL

SEQ ID NO: 922057 - protein, 149 aa, Homo sapiens
MAAHQEVNKEKLLIKITKAIKVKNSGCVAGARSRGTCQDEKKPTCTWPLPSLEVRGRPSKVSHGKIISPNLAWRCPNPASYEKPKLHFSPMVKPVVKPLAHRRVAHVVEQRQCQPRARNLCAPFSKAVTHYKYFKHVDKKYSTGKKIPH

SEQ ID NO: 922058 - protein, 157 aa, Homo sapiens
MLTWIKGCSSLHPCEGKHANLPLWTGWGWMLLHPRPRLCCTLPVHAAQPAEASVLPFSRCLRSGTAIDLDREATPTLAEPLPSPLGPTSARSLGPAGASVQVHGDVSAQGGEAGTWPLSQREMGRARTHELSYAADTGHGKGGGEDAERYQGPSPSP

SEQ ID NO: 922059 - protein, 147 aa, Homo sapiens [sequence omitted]

SEQ ID NO: 922060 - protein, 173 aa, Homo sapiens
MGISPVYQQPLPHGLTFPQPLRGLSFECYHSGVITVIFETGQYMLLTLLAVFGEQVVFGYMKQCFNTVYTRGFLVQTVFTQDKNNIGKNYLSLICAKKESKRESSGAFSSFKPTRRRLIKVWSTVIQMDFAKTWSVCLKFLAREKYKRQSHPKYFWSAECHIDGFIQDVAFSD

SEQ ID NO: 922061 - protein, 168 aa, Homo sapiens
MHLLTKEYFTPAGDCIIVGTGPVLITWNVVESELTSCREKSPHPVSNNVGSSGESCGSVCSHRLPLLLAKSLSHFSQAGAGTVATSLKVTPALWAEHGPGEAASSFLIWISVCNLHHPGPPGCRGPEFRCSWLVFPGVESLSSERALGGQGSPKLSRNLSSASRSCGG

SEQ ID NO: 922062 - protein, 139 aa, Homo sapiens
MSAHGDESATGTNHHHSHMQRTGDADPPLYNTGGAQLPSILKQKQQSVTSAEQVLETQRKRRPGPELQMVLHGMQAAHRSGCWQHQAPVRCPQRTTDNGNPPRAELQQCPWMFFFILLVFSCVCVCVCVRAHMYVCVCA

SEQ ID NO: 922063 - protein, 162 aa, Homo sapiens
MSLISNLLIQTKTCEGCRANSADIIPPGRDEGDIVFIVSSLTDTAPNCRHSFMEHLAIFGECGGNGPPGNESRSWRSWSRLWGAHRRPWAPQRWLQCTAAWPARAQVQRRSQKPLRINSLTRRELVHNAPSSHKPRSGQIPAKGSKLTSVDLQPGLRSTYSQ

SEQ ID NO: 922064 - protein, 187 aa, Homo sapiens
MLSNNHRKKPLCLGPRHKGKMVHFSAPDAMLAVREGRWRRGWELAAGGGELPFRLGRKALAKHFLWGAGLCSTQQLSSSSSQRREVICLTVRYENLVGFQGANTQKCGVLLRLQPHALLIFVSVHDPPQEICHKTSTHSGKFVALWLWLQVSCRGLSLQIQGSPLSFWGFWNGQQCSIGLVFLLGSG

SEQ ID NO: 922065 - protein, 135 aa, Homo sapiens
MKGDGLAPVPGALKLAWNSKLSSEERRPGHVAHTGEHTGEHKEHNLKVRADIGWDGCNHKPGIPGTAECGRGKEAHPLEALEGAWLPNTSILDFESPEHRENQCLGVQALHLAALLDGSPGKCVGSQGQTRGHGL

SEQ ID NO: 922066 - protein, 195 aa, Homo sapiens
MMMMMLLVVVIVKIRIMRLYHHNYGGDDDGIDDDGDMILMGIVMMRVMTMVLVMMMVMRMIVNDGYVMMRMMMVMILCHGDDDVDGDEDDEGDGDSDDGDDDGNDVDGDSDDGGDDGDSDEDDYDNGNDDGGDDDNHYVTKETGLCPHMEITELLKPFLPGGIPNRHPVSKLGFYGAADKRGMYCTLLIGALKNG

SEQ ID NO: 922067 - protein, 137 aa, Homo sapiens
MRSDGTVRESFSAQALCFPSAIHVRCDSLLLAFHHDCEASPATWNCKSIKPLSLVNCPVSSVLELPQDHWIPGAAVICNHTEPVDILHILSFLSLRGSLSGSSELSVTNEDYKMEGTGAIISWYNTAFLWSTQKSLP

SEQ ID NO: 922068 - protein, 149 aa, Homo sapiens
MATTIQSCILNLGFLYQPLWQYPEIDRNCTSFCCIKVGTTSSGSYIPATEQNRPSSSIEQNRPSSSIEQNRPSSSIEQNCPSSSIEQNCPSSSIEQNRPSSSILPPGHKWSFLDAYSSVSFHKFLKTVKGNADGLNYYLLLPEHAVRKD

SEQ ID NO: 922069 - protein, 155 aa, Homo sapiens
MPEDTISPHIQISQSQLEKTVKDALSKPCPQDRLGVTNPTPPGAATHYSSAQAATIRIMIQVASEPWGAPAWPLASVNNPQRQKVTITLAKKAMKEADSQNKNDPSHGPGPGSILAIHFHPQSHLLLQVPQPQQQVHWSLLFARGVSKISISQEE

SEQ ID NO: 922070 - protein, 164 aa, Homo sapiens
MCFRENSRHGPSDVASAGPHQSCGGGFCLTTVLVFFAHKPRNALDLCVFHSCSSGFIKVKLEFKKYPKYKMHLHPMQAETVTNRGDEAGMRLHRLPAGCHEGSGILECSENKAALAELKCKKFSALEKIAPFLHCTNCSKSPRIENREIIQHTFHYLPPQPPSL

SEQ ID NO: 922071 - protein, 159 aa, Homo sapiens
MKLFQNIKMLRYFEKLKQEVNKRQPAPSFCLLVCFIPLSIPQPTVKSLRVRSPHRKQTSTVSLSCRALGIQWVPSQNLFSTVIAAAFAPGLPGPAFSGTVEHEFHGCPTVHSTCMVIYAFNTYDNTIPCPRHYSNWQEHHDEQTHPLSTWRSLDSLPAC

SEQ ID NO: 922072 - protein, 186 aa, Homo sapiens
MAGMEVYLKRAYNRKERKVPWHMKVKERSSVRFNRDLKILIDSPLFHDSSLRVHCPHAQSPPCPGKCACAVCLGTDNTGPAEVSFPCGPSGKGASPALLDYHPQRGNAIIAEPSPDVSRGWGRAVSCPSQPVQPPVTHVRSSVAFRAGAQARQHVEDAEETGLEMCRARTDERIGFEKEHVGSLVI

SEQ ID NO: 922073 - protein, 190 aa, Homo sapiens
MPKHVYCYDSKVTVKPASAFPSFSEPKFLEYEIYNELAEREAWQTSRLEGPVCLGDICRPHCPGFWIQKVWCLSTGTHSTLVLAWSLNASGFKTPRVREAEHRDLYVGMLQTCRYFSLMKLIPMSLQIFLARESDPCTSLTATNPVLIQVLERPTELPDFKPLFPRSQLPLLVSSSYCPLHMELSCSMIA

SEQ ID NO: 922074 - protein, 197 aa, Homo sapiens
MRETLRCLSGVRLSLRAPDARGSQDTQLHGSFAPHLPLDLSLALPVSSVGTQVQPIFKVLHSTSIHTSPTNHEPMGLSNHWKPGIASRTHTRPHSESMSRIAPGPGSLLFLHVTECRFSLQDSASIIALFPTCKFSSHAQPGLLLEQTANCDVPTPSGPRRQQTMLQCDTWHRMTPSPPKPLCSGGSKETEVNHSHS

SEQ ID NO: 922075 - protein, 135 aa, Homo sapiens [sequence omitted]

SEQ ID NO: 922076 - protein, 133 aa, Homo sapiens [sequence omitted]

SEQ ID NO: 922077 - protein, 145 aa, Homo sapiens
MVLTEGRYLIHITGPAMSPGIRGDGQKPTPSAPFIWSPLSVHVRLGEQASKKGLSEQILMLPAMSGVSTFFVSDSGVSGHATIIYEVVIAEHVRLQTSKQEISDVASCVVWDKHVKRKPGALLTWQKLTQNCPPESHSKELQREG

SEQ ID NO: 922078 - protein, 158 aa, Homo sapiens
MGLPASRTIACMHLAKPVGFTSETLSSKKATSAPALPLSSVHYLLVSPNTATGPTAGAEDGTVNTASHVLPPRAHILMEGVRRKAEKCNRTRETLSFSKLRSERNSLSIPHTVQSLSSATVGTVHELRQGCSAKALSEDESVIDAVFWKHSLQLASRP

SEQ ID NO: 922079 - protein, 233 aa, Homo sapiens
MLWASLPPLLLTGETSDKYQLKDILQNPDLQSSRWSFYKPPTSSPPDGHSTNPRPAVLQMVILQTPDQQSSRWSFYKPPTSSPPDGHSTKTSTSSPPDGHSTNPRPSVLQMVILQTPDRQSSRWSFYKPPTNSPPDGHSISPDQQSSRWSFYKPLTSSPPDGHSINPDRQSSKWSFYKPDQQSSRGSFYKLPTSSPPEGHSINPQPAVLQMVKVIPQGLRKCHSHKEPKRPDS

SEQ ID NO: 922080 - protein, 152 aa, Homo sapiens
MWSVSSEAGGLQNRSAAGETCVCRKARVKMQESLTTTKYKSPRPQQINGIVKLGNNPSQLSYHLSLCRLAAGCSVFLYNHAAQAALRLRLTPQGSVSSKGSTAMQADWTEMAKSHIFIKCRACFAIVAVLNVDNIQFTIVTIVTVQLFGIKY

SEQ ID NO: 922081 - protein, 278 aa, Homo sapiens
MRTSAFPIPKHKHQSTVGGIRVFIEELLLLQDRQELKVERKQAPERGQVREHPRLSDSTSFPAGRQDGNVRPHGEKREWTSRGFLDSDEQRRLARADGGRSCSWIADFPFSSLDVWIWISADGNAQIHNQKLKSSQGKACPIYIHNSKDTCAFRCLCKVHTINLCGFTLACLVYTILLDQFQSQKRESMLKQQLSFFHICANLFNSTSMNEAMTRCVQDMAVGSTSHKLTKSYRWYHGSCIMLQNRGALLMKMKGFPAIKNEMRLNLTVEQVEIVLKY

SEQ ID NO: 922082 - protein, 162 aa, Homo sapiens
MTMKAVHIPPFSSRVGRAAAQESFVIHRSPGESATAVLLMHLQDQGRYRDILTSHELLSNREPCRGSPFKWEVNCQMIRRCERKNQSQKKNRRQPSTCTNRADKCTCSLVTGGSTKSLLEETFLLGVELTIPRTMLSNNTSVCVVAKVTPKKELCVSLSQSC

SEQ ID NO: 922083 - protein, 169 aa, Homo sapiens
MGVCCDEKSLHVSKQPFSISGGIPGFSQDSQHRSRGVTHTTAQTLCGFPPNSLKANALPVAEGPACEGPNGHSGLCVVSGDWTMPWNFKHKGVEKGVTSPGNSLGARLRKLGSESRSPKSTVLPRTELPVPLPEHLLHLLYSKWGIYAIPHPLTMCSSSKERFYSSSLK

SEQ ID NO: 922084 - protein, 143 aa, Homo sapiens
MNRLYQWQSWRCKVTTSDTDWLKAEIGLRVLRPTPPHHVPPFSAAVPKGHEISSDGPIFIFDVGNLPLIILPLFSIVLTSTEIGLHSNILASNTGVCRVSPGSVHCQPVFRRQQITMDKVTEELYLLFQIPAPGYRTTVVSPT

SEQ ID NO: 922085 - protein, 182 aa, Homo sapiens
MKKERDDIFYSVFTPDLHCEGSTSERVALFHLFGPTLRGPVDSDFPATLYVYPKCSMVIFEETLASLTEKVPCGGSRSEGRISWRRRKTEPPASARSGLGPPRCPWVQTSTTPQLSMEQNSLRAWGMVKAATARSLWAGWQMWLLSAPRGHRPSSWDPNKCPPWHQPAFPHFPDNHHTKRIL

SEQ ID NO: 922086 - protein, 137 aa, Homo sapiens
MHAGSIRSMENHAQRKTWTIFLSVRSTGMVKRVKMTIPFATKITITKKCMLLGNVIEVTFMPTATFPAPSAGSAATSTGPTLLEAGSTELSMGPTLLEAGSTVTSTEPSLLEGFGPGSFDLQCLHSLPFLFLESLLK

SEQ ID NO: 922087 - protein, 188 aa, Homo sapiens
MTPCDSALRCGDGCTITDTHTHAHAYTITPAHTCLSHEAGRSRVTTHAHAYTVTHAHTYSLTHTHTITYSNTVTHAHTYSLAHTHTITHTHAHAYTVAHAYTVTHAHTYSLAHTHAITHTHIITHTLTITHTHDHAYTITHTHIHTHAHACTVTHTHIHTHTITHAHTYSLAHTHTPTPHCHPHPFPT

SEQ ID NO: 922088 - protein, 778 aa, Homo sapiens
MRRRLAVGRRCEEALSTGETLNCEEVLCCEEMLNCEEALSCEEALSCEEALSCEEALSCEVLSCEEMLNCEEALCCGEALSCEEALCSEALAEALGSEEALCRGEALGSEEALCSEEALCSEEALGREEALGSEEALCHGEALGSEEALCSEEALCSEEALCSEEALGRGEALGSEEALCSEEALCSEEALCSEEALGSEEALCHGEALGSEEALCSEEALCSEEALCSGEALGRGEALGRGEALGSGEALGSGEALCSGEALCRGEALGSEEALCSEEALGSEEVLCRGEALGSEEALCSEEALGSEEVLCRGEALNCEEALCLGEALNCGQALNCDEALCSEEALCSEALCRGEALCSGEALGSGEALGSGEALCRGEALGRGEALGSGEALCRGEALGSGGAELWVGTKLAEALGSEEALCRGEALGSEEALCSEEALCSEEALGREEALGSEEALCHGEALGSEEALCSEEALCSEEALGRGEALGSGEALGSGEALCSGEALCRGEALGREEALCSEEALCSEEVLCRGEALGSEEALCSEEALGSEEVLCRGEALNCEEALCLGEALNCGQALNCDEALCSEEALCSEALCRGEALCSEEALCSGEALGSGEALGSGEALCRGEALGSGEALGRGEALGRGEALCRGEALGSGEALGSGEALGSGEALCRGEALGSGEALGRGEALGRGEALGRGEALGSEEGLCYQRRRAVGRRRAMGRRCEETLSCEEALCCGKEPYGFNILVLPQHSKAEDSDFLFSVCFTLWTRHQNG

SEQ ID NO: 922089 - protein, 572 aa, Homo sapiens
MLMLIIAVAGHVVLWWMLVIAAVGRVVLWWMLVIATVGHVVLWWMLVIAAVGHVVLWWMLVIATVGHVVLWWMPVIAAVGCVVLWWMLVIAAVGHVVLWLMLIIAVAGHVVLWWMLVIATVGHVVLWWMLVIAAVGHVVLWWMLVIATVGHVVLWWMLVIAAVGHMVLWWMLVITALGHVVLCLMMIITTVGHFVLWWMPVIAAVGHVVLWWMLVIADVGHRVLWWMLVITALGHVVLCLMLIITTAGHFVLWWMLVIAAVGRVVLWWMLVIATVGCVVLWWMLVIAAVGRVVLWWMLVIAAVGHVVLWWMLVIAAVGRVVLWWMPVIATVGHVVLWWMPVIAAVGCVVLWWMPVIAAVGHVVLWWMPVIAAVGRVVLWWMPVIAAVGHVVLWWMPVIAAVGCVVLWWMPVIAAVGHVVLWWMPVIAAVGCVVLWWMPVIAAVGHVVLWWMPVIAAVGCVVLWWMPVIAAVGRVVLWWMPVIAAVGRVVLWWMLVIAAVGRVVLWWMLVIAAVGRVVLWWMLVIAAVGRVVLWWVLIQFRTHVALGCLGPQHTGKLIITGVACSLSTAHPQL

SEQ ID NO: 922090 - protein, 121 aa, Homo sapiens
MRLRSSGLEELEEGRKDLAILLSRNCQDLCEAEAFSELLPGPVDTGMSQCPGFEESYLDIIQPMTVNMWLTPQATSVLTGRFQDQTYESISEIARKHSPKESNLLVFYKTQCRPRISLKVA

SEQ ID NO: 922091 - protein, 140 aa, Homo sapiens
MLLTVNVTECAIMVSFDNSSASRYWAERNSSPTLSLVREQGHLGSQLRWGKIQILKKLKHSTDLGPLGGRGARGRAQNPPWPEAGCASNERCPRAVDAQVTGKVVLAGGLGADERQELRQVLVRQERGSGLLPSRCFCIK

SEQ ID NO: 922092 - protein, 146 aa, Homo sapiens
MAGNMGDAMEYYAAIKKVEFMSFAETWMKLETIIFSKLTQEQKTKHCMFSLCVTVTRLCHNASWWAAQSLGLSGVGPGLTICISSTSQVPLLLSLGPHFEDPGKYLPVRAKPRNQPTKSLPSQHQQRLLEAPARKTPKTEFCGISP

SEQ ID NO: 922093 - protein, 161 aa, Homo sapiens
MVLAVLCVLLSLICLLRQTRVNHFSGKADGIKPAASSTRVCICIMDQDTLLFANDTRRFLSRDQGHRRAGGSFISEGHTQGFCVTSAGIAASTKCCERPREETLLNTTGICPHTPPRHRGLTSCAPAAAPNPTHHVESTSFSMAHKPTMTLVTMLRSLRHP

SEQ ID NO: 922094 - protein, 169 aa, Homo sapiens
MEALGTAWECAKTRTLGRESTKTRTLGRESTKTRTLGRESAKTRTLGRESAKTRTLGWESAKIRTLGRESTKIRTFGRESTKIRTLRQECQNKDPQMGECQNGNPQVGENQDGDPWRRRGLQTDGSSPTNPIAGSTLPKGDLISYVEKLKALLELINEFNKVAEYKINT

SEQ ID NO: 922095 - protein, 195 aa, Homo sapiens
MVVIINMIVTILINIIITIIIVIITIIIIIIIVIIIIIGINIITIIITVIITTIIIVINITIIFITIIIIIITFISINIITTIIIIVITITIIIVIITIIAMIIISIVIIIVIIITIISINLITDIIIFIITITIIIVITIIIVITIIIIIVILVIIITNIIILSSSSFSINIIISINIITTIIIIVITITISLS

SEQ ID NO: 922096 - protein, 171 aa, Homo sapiens
MRLRAPWWLRALTVTDLHPSPGQASCRTSMDVSAVPAAGEDTRYGQRLRLDLGLAKLCVSMKLVSFSQTWGEPSKPAWQSRWETPRRPLESLAYIIVFTLASKEVRSRLAQRSLGLSMKAGELSEEFGAFLEEESMNRSYFVASGRSRSIYKNLDNRASFPAFTACHALGD

SEQ ID NO: 922097 - protein, 333 aa, Homo sapiens
MRRQQEFGEVIVALQEEDPEPRRTAVIASHTLQSALLPESAAGRCRLQETGLMVAVIPVDVVGALESTLLADFQYAMSSAVVFILHVRSPDIVTLPECKCVSIQCRSINVLVSSVDSINTLVCSVDTIHMLVSSVDSIKVLVSSVDSIDVLLSSVDSIDILVSSVDSINILVYSVDSIHVLTSSVDSIDLLVSNVDSIHVLVSNVDSIKVLVSSIDSINFLVSSVDSIHVLVSSVDSIKVLVSNVDSIDVLVSSVDSIDVLVSSVDSINILVCNVDSIHVLVSSVDSIKVLVSSVDSIDVLVSMHSSLGDSVKKERERDRESFGIESSIYNGI

SEQ ID NO: 922098 - protein, 149 aa, Homo sapiens
MDRGFIKKLCPCVRVLPAKMLYVFLLVSKYSLPSYSLLVLRKLCSVEDALMSVLTSHCAPSTPAATRAQQTGTRGHIHPACPCQQSCVGASRPPGRPQIFLPLTTALSLEAYAADTCSAADFLHNPSSWGKVWYLNEASFDLYSYHYFW

SEQ ID NO: 922099 - protein, 161 aa, Homo sapiens
MIPHGHPRHGGAGSNHGGDAASKPGQPHTAHRGLDTLSGPFPKSSKASPQLTAWLPEEHLLKPEGPFKNHLTLWEAKAGASPEAKEAGPMVLMELDAQTVDAWTMDAPTVDVLTMDAPLGHPTMDALIVDAPTMDALTVAGSSVLICIDLVICEALHIFFS

SEQ ID NO: 922100 - protein, 162 aa, Homo sapiens
MAALPSQDPRPELQREGLDIRRRSQRRFTLHCLPHLGANAMALPSRPAMLCSQQPSRLKCACPSPEKLGIPSSPCWGGSTALDVAQDSLPSPVTHHPEAQDARYGGCVRVHSCPGGALSTRESVSYTNVDTTWQGRDCCPEYHSPSLRKVGAPTQWGSNTVL

SEQ ID NO: 922101 - protein, 134 aa, Homo sapiens
MGMSALLLPAKPVLELSQEADCIQEADRIQEADRIQEVDRIQEADCMVLPRAGLRACSVVSHVALEEKSPEPSGMSQGLGIREDQETPPALELGELYLGVSPWLAHSTRPFTSSLMITADPYPKKALGSNMTSL

SEQ ID NO: 922102 - protein, 153 aa, Homo sapiens
MQVFRNQKHVSTPSHMYFLLNCIFLVNYEFFYKFKNLLNKYCVLDPVLGTLGKEIIKAGMVPGFYRTRGLVQKSNIEWKVHNSSEEMSFGDLRQQDLRCPKTSKVGKLTVHPSLCGRRPESPWQTIGVRPRAQKLKNLESDVRGQEASSMGER

SEQ ID NO: 922103 - protein, 165 aa, Homo sapiens
MGLSHGLLSVLGPTCCLEGRREAGWVELYWTSLHSGPLMLGARINLDGGLKKVSGPWRNVHLRSGATAGVLRFQHEKGELVLTPQPEDRKMWESSELPKDLLNGFDQNSDGDMNTEVKAEVVSDGVVELLGNWSNGDSSYALAKRWQHFSPVLEISGTLNLRETI

SEQ ID NO: 922104 - protein, 225 aa, Homo sapiens
MNVLTLQQDSSESSITEIGRSIFLVGVKGRIPHVVSATPLREQGVCLLLASEEEVGISSSLYRLDLARKALHWSTNPEILGGLAGGCCWSLWAGWPGSWVSRWVGLVPGSTKIGLEPECKVVGLDLGLLSHSIWPDAKVGMETGFTELSLELGSAQASLGPGARGAILALVCLEPGDLRVNLLLGQPGTGTGLGPKSAGAGLVLVWAWRLSPQMPAWSLGPLGLA

SEQ ID NO: 922105 - protein, 156 aa, Homo sapiens
MLEAPDSSQALHSLPILKAAGARIIAEAIVVGLGITSGSSVTCQSAQAEVGWLHWGPRPVGFACLASLTGGATAADNGVFKDLRPIGLPMGLSVALPRFQATRCVSLQAPGMPQAGQKGFLACWVPVLLESYHHPEDSICFCCIGSSISWIPYCSP

SEQ ID NO: 922106 - protein, 143 aa, Homo sapiens
MGTGSARSGHGSSSPALLSQGRRCREKASKDTVKEQASKPFAFISFQLYMLGLLILTSLYLLAPQPFLQVFDSKESPTPMCVDSPPYSCRPLHQTSASIPYFTSHSISAFPVTSTPAASASANLTHQSALDIAASSGLLQALG

SEQ ID NO: 922107 - protein, 145 aa, Homo sapiens
MNITDINYIKYDYFYIKKKLERGEEAAEEKLEANRRWFMMFEERSHFHNIKVQGESVSASVEAAVNYPEDLAKVMDEGGYTKQQIFNVHKTAFYWKKMPCRTFIAREEKSLTSFKASKDFLTFLLGANAAGDFKLNQCSSTILMI

SEQ ID NO: 922108 - protein, 274 aa, Homo sapiens
MSLSRPECFPSERQNHPQFWFVCFSPCPRTQNSPWTLLIRIVALTNAAAGVLQLLKVVHPELFVSPGGFVVSLTSGVKPQTLTVSVTAHKGSVDPKSEQQQDLLQRAKEQNFHSMEGDPSGAGDGGVARFFGALLLKTPSGSMQTNRQVLGSLGSDPTAASRGVCLQLPSGHVSRAAQHAGSPSTAPVKLHVIPLVDGPPVCQCLSVCSYAGVFLSTTTEFSRNLGTQMRGVAGFPSTCICYSRGAARVLDLVRERGKLKKDLGCESWHSPSAY

SEQ ID NO: 922109 - protein, 136 aa, Homo sapiens
MRAWGRLIYHFADITPSDDECCQHWVLSFKAVGSLLAQGVSRNVWEVGSETGASQLWPVPYLAVAELVSKMQDKILSSLPSPLLKQKDEVCFGAISFAAWGRGGTMPALPWLPQLVSQSKANSVAPDISLSENIAS

SEQ ID NO: 922110 - protein, 187 aa, Homo sapiens
MVYEQMHTYNHLIFEKADESKQWGKDAIFNKWCWDNWLDICRRLKQDPFLIPFTKINSRCIKDLNVRPQTIKILEDKLGNTILDTGTGEDFMMKMPKAITTKAKTDKWHVSKQKRFCTAKETINRVNRQPFNYQQSKQTTYRIETINRVNRQLTELKKIFANNASDRGLISSVYRNLNKLTIKKNFF

SEQ ID NO: 922111 - protein, 180 aa, Homo sapiens
MSHPGLALCGAILCPCPLAPTYKRTVRTFTCLEAFTHGLNKTKQCTKASCNGNAVLYLYKNNSKCKRPYCETISCPKKILNYKREQFKKKTVLRMTASLLVDCCHNMREMPSLGLLPVTEVAVPTTHMSCPKGATHLSDSTAVLTFVTEIQKYDFSQCSQWRSKAEQKVFLTLINLAYNP

SEQ ID NO: 922112 - protein, 154 aa, Homo sapiens
MATGVSIGNCAYSHAGGVVNTGQGADGHRRFNLLTVLYGRGSLGKLTIMAESEGEARHVLHGGRDMDEAGNDHPQQTNTGTESQAPLLQVCWSLLDVHSRPCLPGSHWQRLQTSKDCCLFLLLEASSQRGTHQMPARALLYEVSVSPYWEVSPS

SEQ ID NO: 922113 - protein, 204 aa, Homo sapiens
MWAAEHCLDKPGAMCIIEGPVDSWDSPVMPKGLVRSGQSTYLDGPGRSCSEILTGQRIPEHCYKALSVCPSHRIPEHCCHCLNVCPRHRIPEACCWGLNVCPPSRIPEHCCEGLNSHRIPEHCYKGVNIFPSPSIPEHCCKGLHVGPSYRIPEHCCCGLNVCPSHRIPEHCYKGLNVCPSHTIPEHCYRGLNVCPSHRIPEHCY

SEQ ID NO: 922114 - protein, 1080 aa, Homo sapiens
MEGNAMEWNGIELTRVAWNGKEWNRIEWNGINPIGMEWNGTEWNGMERNQLEWKGMEWKRMECNRKEWNAMECNGMEWSQPEWNGMECNGRENRNGMEWNETNTMEWNGMEWNGKESTRMEWNGMECNGMEWNGINPCGMESEMEWKGMEWNQTERNGMEWNGMEWNRMERNAIEWNGINPSGKEWNGMEWNGITCNQLWWNGLEWKGMEWNGIKGHGMERNQPEWNGTEWSGMVWNGMEWKGINLKVEWNGMEFNGMEWNRIVWNQPEWNGIEWNGMERNGREWNGMDTTREEWNGKEWSNRSGMEWKGWNAMEWNGMEWNGMEWNQPELNGMEWNGTEYNGMERNHPEWNGMVSNAIEWNGTELNEMKWNRLNASGMEWNGMDWNGMEWIGVEWNGINTNGMERNGMEWNGMERKRTEWNPPDWNGMERNGIHPMEMNGMEWIGKEWNGLEWIGMERNGMEWYGMKWKGTEYNQQKWNGMEWNGRESTRVELNGKECNGMEWNGINPSGVEWNGMETTPVEWNGMECNRMEWNGMEWNSMESTRVEWNGLECNGMEFNRTEWNGMELIESENGKDSTRVECNGLEWSGMEWNGMEWNQQKWNGMECNGIEWNGMECNGTEWNAMKWNKPEWNVIGTECYGMEWNGMEWNEMEWNRIETNGINWNGMEWNRMESIWVEWNGMEYNRMEWNGMEWNGIQWNQPQWNRMVWNAIEWSGTERNGIRMEWNGMEWNGMEWNGVEWNKHQWNEMEWNGMEWKGMERNGMEKNEINPSRMEQNGMEWNGMEWNGMEWNGMERNGINWNGMKWTGMEWNGIECSGINKSEMQWNGMEWNQPEWSEIKWNGMEWNGIACNQLWWNGMEWYGMEWNGVRNGMEWNGMEWNGMEMNQTEWNGMEWSGMETMQCNGINGNGMHWNGMEWNHPEWIGMEWKGMERNGMEWNLMERNLNNPKWNAMEWNRMEWNQPELNGMEWNGTEFNGMEQNHPEWNEMVWNAREWNGTERNEMEWNTLNANGIEWNGMDWNGMEWIGVEWNRINTKGMERNGMEWNGMEWNGTEGNQPEGNGMEWNGMESTRLEWNGME

SEQ ID NO: 922115 - protein, 143 aa, Homo sapiens
MRDIFLLPLKPSYSVKSTWYQTKQISSAAALDSPGSANPVVNCTCTGSRVRTPYESLMPDHLMWNSFIPKPSAPTPESVEKSCSTKPVPGAKNTSRYFLVKPNLFHRPPKMPTAQSLSISPPCNPTASPSHLTRSSLSTLLFH

SEQ ID NO: 922116 - protein, 165 aa, Homo sapiens
MWSKKKSDDGGGGGGGGYSGGDGGGDGSSGDNDAGGGVAVMVGGGGGGDSDDDSNDSSGNGGGGGDGSSGDNGGGDGGSGGDGGGDGGDGGGGGDDSDDDGNGGSDDGGGSSDGNSGDNGGGGDGGSGDNGEVVMAVAVRAVVVMAAVLVVVLVMVVNGMYVNVK

SEQ ID NO: 922117 - protein, 196 aa, Homo sapiens
MEHEALLACTGEDATQNALTGLRKPEQRLPRWGQAGSREGQTPQRETRGGQGGGERSREEGAGPEQTQTWGACFRGSKLIRQLSSPSSSAGSSYWVLSQPQQMPSYWKHRAWFLLAKGFTSQRQATPSHSEKTKKERELLQGGPSDSKCPRELFHGSAEPVQPVPHQSRPPLAPLATPCTPECLVSSFKDTSCICG

SEQ ID NO: 922118 - protein, 115 aa, Homo sapiens
MTSEFPHRQNGGLGLFWGQGSTVHVKHTTQRLPRSSCPGDMLNNRVSTRPDGEGKGRRRDPFPKNIDFDLEPKQLAMKDCYCCSAYVEAGPERLSDSSWVTQPFKTSCTFIMSAI

SEQ ID NO: 922119 - protein, 144 aa, Homo sapiens
MLSRQLSWCVDGPGWRPSQRGPLLPNHKINLLVSGVSTSQTFMCRESPGDLVKLQLPGDAVSWGHTWSTRAEPSGRASVPWFSALGPEKNTSPGPYLQNLCLLVESEPAPIHLHWLRLRGNRIENTAFVLCLQEGSAALSTHSS

SEQ ID NO: 922120 - protein, 140 aa, Homo sapiens
MPMPLTQSEGILHYFESYSEGKLLPKQDVKFQEANTRQRLQTLGFLSQVVRRWGKSWGIPRAVGPCPFSTGGPIFQAGLLEPLPRNERIPGVLFLLWKQKAIVGSNVLGWLERQPEPHSGETKGLSGYWRVICLTSGDEA

SEQ ID NO: 922121 - protein, 166 aa, Homo sapiens
MSRCWGWGQLLHLFQLTLLYSAFLAWAKSWIFGLALKPFDPAAAKGVSIFYCQLLLLSHQHVWETLTSAVMVLHGAGEGHEVPEELWFAGRQLEGGRVGFKPSPCSFDNILKESRASDKDGQRLALREVCTSLEVSWDNEVGLDPSDHYTSLRSTVVLLNEMPSDV

SEQ ID NO: 922122 - protein, 138 aa, Homo sapiens
MAGPTEPGEVSAPGRPAGLEAEAQAPALVGKRAEGDPGESAEEQTGCGARRPRLEAAVNATLPCALIFTASPLPSSCRTFSTAVVRGAYTPRFTVTLHPPCLAAQQPLTRLKCSPPLSFRAAKLPFRRLGPCSVLFVF

SEQ ID NO: 922123 - protein, 136 aa, Homo sapiens
MGWAVFLAPTWGWLSFPSLLLLSVQALVSWHSSLKVLLGSSSLPQRHQISMLVHSRLVCGFLVSCAKHLSLPRGLLLTGWMIEEAEAQVGEEIQGHGIAGECQVSGHARTKVPDSQAMFLSQFQAASPVSGKAKRM

SEQ ID NO: 922124 - protein, 166 aa, Homo sapiens
MICGGGGSAKRGTATWLLPLAKFLPLWPELPNQPEKQTENQRNLALAAQDQRLPGSMTEDLLEAGKAHRLSAEERDQLLPNLRAVGWNELEGRDAIFKQFHFKDFNRAFGFMTRVALQAEKLDHHPEWFNVYNKVHITLSTHECAGLSERDINLASFIEQVAVSMT

SEQ ID NO: 922125 - protein, 173 aa, Homo sapiens
MTQEQALCGAHSQISLMDSGMLAAQAAPFSTLARGSWTSLALLQLLFCGAAALHHPGQQRAYTYLLTTNLVVGSQPGSHHREKGKSMENMKKDTSFLWGHWGYGNYYHNERPLSTFFTEIILCCSFWNPVTLENTKGHWSLQLPIMSRSAGITVALSSGSPLLQLLEEQKAIC

SEQ ID NO: 922126 - protein, 141 aa, Homo sapiens
MVTDRYKLLTFKIHTYIYTHLTDFHTCIQPCKRLIDQDIEQLQQPRSLIVPFPVSNLPRGIAFQDPNQTPPPLESQPFCSQPWLIFPGFGGTGAYSPFNAVKERILASAYTLWAGTVSSLSHLPRVSGDAGARSALVDFRR

SEQ ID NO: 922127 - protein, 164 aa, Homo sapiens
MGHRDGDSTCTPPRNEGARGKFSKEDPAVKVLRQRNKDGSWRLGQCALKWEGRGDIGGEPTVFATVAEFFHHQGYVQAHGEHMHASYHMTAGWPSVLTLQCGLRQGRHLKDLGDVSTGSSRTLTSPLPWTPGRDEKGQRHNRACDLWPAQGPPTLPKRHAGAAG

SEQ ID NO: 922128 - protein, 140 aa, Homo sapiens
MCFHDNTGHRHFSHENTGLAEDGWEAEQVTGLSLQSQHLYLATRLSHTPAHSLHHEVKLCPLTLMARHTGRSRSDSGPVALGNRGFHLLLLESFAVEIQPPFWEPAWAACLCLSHLGSEPLRTQHPCLCHGAHTSCHFYP

SEQ ID NO: 922129 - protein, 134 aa, Homo sapiens
MGHAEVDRVDSLSQKCNSFNFLQNSAWEFFSFLVLLCWRYIGVYGFLGFILTDLFMVGILSRTLISRGTQNEIPFTRSPTRSTNSDKFVHGPNFCGASVENRNPLLNKRDIPLRQFRRSYLLPCNFLISISTSR

SEQ ID NO: 922130 - protein, 157 aa, Homo sapiens
MATEAEAKKPQEANMKDPEPFFLLQLVGPSGALYCRQLAGPSFGILDPKMQSQSGSKPHSLDTQELFSVLQLKLASDPLGGLPGNLQCNDSVHRPLSCRRPPAREEGSNADLTFCSRGGGDGCCPGAVGCLGAPPRGSEEPSSPRELFRQLRVEMEA

SEQ ID NO: 922131 - protein, 129 aa, Homo sapiens
MFGGVSRGCHHCSFCPNCSESADRNSDSMLFCQDGKLVWKTFGSIHPRILLPYLGISVILFPTKNYLYHSELPSTEHNCEIPRFLEIFQIGKGDKMNQAAKFHSLLFEKQECFCPLCFFFLSCSPFFYL

SEQ ID NO: 922132 - protein, 137 aa, Homo sapiens
MSLEIKGKNVRTKITKHKILVKILSFPEVKSVVIATVTVAKEKEVCSEERPCLGQSDVSSSSSSSRRENRGSPRNQPRSFYLTDKIMNESWSPHTLTLTRTSTTLPKENWKGRSLNPATLDEIEMEPKRKIKQDHLR

SEQ ID NO: 922133 - protein, 174 aa, Homo sapiens
MCDVVDVFFLKLCEMHGTDTRSPIQQQDINRFGSFLKVHPSLVADLGVNASSVKLGRLLGSLATQTQRYESAGAVMWTSGLQNSETSVSAVDKPPSCGILLQQPKETKTTANGRRGSSVYTERSSSVATKLELGRAGVPRTHDWYPTFIPQHTGLLVVFRPSKKVPPSGSSPAT

SEQ ID NO: 922134 - protein, 167 aa, Homo sapiens
MGVCYMGVLYDAEISDTDPVTQVVSTLPNRTSSAPVSVTDQSKNLSRIWESGALHLMSSSPCERAREATSGLHEGLAGVEPGEERRAFSGKMRGGNGDVCVLIGLFRKMMMSAIQAQHPEFLWEYQGQGYFPHGAVRVESAPISVSFRVPAPPPLSAFFPNILTSVR

SEQ ID NO: 922135 - protein, 134 aa, Homo sapiens
MPAHESSQEGCILHKATEVELPKTMGTHLLLQRDLDVRHGVKGDHFGALRFDFPAGFWTCIGPQSVESVPWFLLTAYSKHVKEQREFEGEIVTQMDPSLKNLKGSQPVHIGKHQKAYLEDKTKGVVNYDLEKSL

SEQ ID NO: 922136 - protein, 170 aa, Homo sapiens
MDSNGTESNGMASNGIECNRMEWNGPKKSTGMESNGKESNGMESNGMDWNGMDSNGIDWNIMDSNRLEFNRMEWNGMDANGMEKECTGWNGLEWNGLEQNGIEGIGIEQNVMELHGMDSNGMELNGMEPKGMETNGIEPNVMELNGMALNGIERNRMEWRVMERYQTEWN

SEQ ID NO: 922137 - protein, 149 aa, Homo sapiens
MTFTGTVWATCPCRSQSPHPAWPDLAFMKPLQEASQKDLGWVPALPFTSCTTSEKLFSSWTRAAKETVDLYLYEGKDENITWPVFMHQGTCCSHEDVSSQPASLYKLHPQPHYAPFPGTFQGALRICIQLSQAETRVTSWKTCLVIAKV

SEQ ID NO: 922138 - protein, 132 aa, Homo sapiens
MGGNQSRQAENSKNQSAASPPKDCSSLPAMEHSWMENDFDELTEVGFRRSVITNFSGLKEDVRTHCKEAKNLEQRLDEWLTRINSIEKTLNDLTELKTMAQELHDACTSFCSRFNQVEERVSVMEDQMNEMK

SEQ ID NO: 922139 - protein, 173 aa, Homo sapiens
MIPFHNPFHSIQFESIPFQSIPFGSNPFNSTRVNSIALHSIRIHSIPFVLSPFNSIRVHSIPFRSIGVHSIAFHSIQVYSILFHSSPFLSIPLESILLNSVVFHSSPFHSIPFHLCPFHSIRVHSTRVHSIPLHSVRLESIQFHSIPFKSIPLHSIRVPSTLFLSTRILSIPF

SEQ ID NO: 922140 - protein, 140 aa, Homo sapiens
MASQVFALPGSSQDPLCLKKERRLFVYIFTWLEQSSEISSRTVLVCLHAADKGIPKTGQFTKDSGRVYLQFHVAGFTIMVEGKEGQVMSYMDGSRQKESLCRGEENLSGGGKENIQLSDYTLKEHTKCMVLLHHHKVEKS

SEQ ID NO: 922141 - protein, 135 aa, Homo sapiens
MAIITDSRPVEGQGKIHRAVEEADLIISEGLPPSSRLQLSIRLLLHTRAEPVPKRGTRHMVRNRVGKACQLLMRPAGCLCFIGPSEHSANKTCSDPGKGPDRYPKNCSWVEISEPLATQGAQYCEMQKREPYDAG

SEQ ID NO: 922142 - protein, 138 aa, Homo sapiens
MPLFAKAKQHIHFKRHQVVEGRALFRWEHPQATALKSELPECTTSGKRPAVKFEMMDNLTPKRPCCNLNSCWLSESLTGLKDAQIAGKTLCMGMFVRAFLEEISIRISRLSKEEQLHQYVWTSSSPLRAQIEQTVEEG

SEQ ID NO: 922143 - protein, 125 aa, Homo sapiens
MVPFSLLLQEAQGDFSSIFTYEPGRTLGDKTQNCAPLPQRLGYPQVFLSETCLHNASNSLLIIVQHWVHVHNMQNHGDFHGVQQFTPLILRQLLPFLECSVAAALVLHLQDRSPERGPVHDLIGN

SEQ ID NO: 922144 - protein, 142 aa, Homo sapiens
MCLLVIYPVQRCTPVLLICHPGLPPAKVSGSTCVLPNPTDVVLTAASGRCYLQNPILSPAFTEYFWDQLSQALGQNLGCTWRRPMAERGTMRRNPRWNPGFGQECEQQLKKFSVLKSISFGEMLPKWSNKNHSGPIVSTEDC

SEQ ID NO: 922145 - protein, 242 aa, Homo sapiens
MNKNHEVKNQAKNTVKMEKCVQMKACAPLYHWRTLKPTPEKDPVGTCYVAIQNFSAYAEFSPCRNSKQLLFLETDISSSAFLSSSKKQTSRHGQEVHRSLTQSQLVHEHMNGDLIVGGPGSFYWQAMVVLTVKEEKFEKYFGGKISSLNDGLDICWECGSAHGGPASCFHSVNVLICLNTGQVITASVADIIANYSFKDILRKLAGEKQTEVAPASYDDSYLGYSVAAGEFTGDSQQGERHC

SEQ ID NO: 922146 - protein, 425 aa, Homo sapiens
MDHFIFFLNACDWALSGFAVITCINRVFIAPRRGPCSSDLETPESDEDNTSQCRSSMDEAFLWLWILTPSSRRTGEFLRLKAIVSQREGSGGTLSCLDYPMKTCSFINGHFRSSRRGRSLDHCSLPVCPSSEFTLSIFVSIVVPPNIAELKNLEVLNFFNNQIEELPTQISSLQKLKHLNLGAFIVYRGSQAFSKGLRAWLLVTPEVSGQAGKMVLGLKAPSDPIVMYRGAKVKVMVPDLTYWGKAGYKQEQTNEVTDMLAVVDQQGEQQDRGALYIGFSEEVTCQVRAHDRESLAVWVQLHLRKEEQQEQGCGQESSWDEGSAASSEVWAAWEGGTGQSSWGLQTVGGSWNFTLGAMGICRSILDRAGASPHWSLQTCRQFSGEHYGCSGIRPIKKMFQWEQVKDDGDHLEMEPSGIYFEGRLE

SEQ ID NO: 922147 - protein, 139 aa, Homo sapiens
MATCLRTDSNKYLHSLGLGPYRQANDPIVTQSREDEQQNQELVRAEVGLQGTQGCSFRESIKEKNPCPRGRNSREMTVTASGESRTHHHCVPRKPWAIDSLWKTTSQEFSAKRTSAEAGIIALWRTEPSTHFDTQETTI

SEQ ID NO: 922148 - protein, 138 aa, Homo sapiens
MSPIPRACSTYTPKPAPHTLMPGFQAQNLQLPEQNAFNSKCQFCCDLHFRLSSNDPLPSTTPTHLSVIPQTELLVLIEGAVFLSCNYSLLAFHFAPLPSFPYSILGIFFILPSVKATRCTIYSRSVSVKIIFPDSHIV

SEQ ID NO: 922149 - protein, 434 aa, Homo sapiens
MFLSAQAQQKPLRHGRLLLTGKETVRKRQCNTRYEHQGHEHQGREHQEHENQGHEHQGHEHQEHEHQGHEHQGHEHQRHEHQRHEDQRHEHQGHEHQEHEHQGHEHQAHEHQGHEHQGHEHQRHEHQGHEHQRHEDQRHEHQGHEHQRHEHQGHEHQRHEHQGHEHQRHEHQRHEHQRHEHQGHEHQRHEHQGHEHQEHEHQGHEHEAHEHQGHEHQGHEHQRHEHQGHEHQRHEDQRHEHQGHEHQRHEHQRHEHQRHEHQGHEHQRHEHQRHEHQRYEHQRHEHQRHEHQRHEHQGHEHQRYEHQRYKRQGPEHHCHEQQGHKHQGHEHQRHEHQRHEHQRHEHQRHEHQGHEHQRHEHQRHEHQRHEHQRHEHQGHEHQRHEHQRHEHQRYEHQRHEHQGHEHQRYERQGPEHHCHEQQGHKHQGHEHQVS

SEQ ID NO: 922150 - protein, 155 aa, Homo sapiens
MTIYKCHGNIRKLPYSCQRSEGTGYTAAPKIGERDRTQRITTYPSRNLPAEASAGTEPGWENLSSPWHHWGGPVDWVHRDGSGAYSLALWQTCSLNPWRQAGLGPESMEAGLVPVSAGVVLGSWFVRAGLLLEFIEVGLDPGSARIHLDPGSSRA

SEQ ID NO: 922151 - protein, 179 aa, Homo sapiens
MRGLSASTLGPALYSNFSLHWKTVIPSGQTHISGCQPSSPRSKLGKQFPDFLGRRTIHFHAANIDIPKTGQFAKGKGLIELTVPHDWDSLTIMAEGKEEQVMSYMDDSRQRDNEEDAKAETPDKTIRSHETHSLPQEQYGGNHHHDSIISHWVPPTTCQNDRSTIQELEVALDESVSEW

SEQ ID NO: 922152 - protein, 149 aa, Homo sapiens
MAVLGVEGKVSDLNCKLGKASLRSCYWSKVLKHQRDDSVSLVDMSGRNFLGRGSKNTSIKALGWECGCGVYDRAGDTGARKKLFRQIVRVKESLARLPFYQKAVLQNHFFSNKEQPEKSSCIDKQAGSLHRGMLAAVPIEKGYLGPRHV

SEQ ID NO: 922153 - protein, 172 aa, Homo sapiens
MAPTSTLLQPISMDTTKLLLLLTHANQDGSRCQLTMKDLADATHGSVVTGNLGAPQLPQCSGFLTLRCQRTKSGLNTSPQETHQVVLRKSGCIKLDTKEILAWWCRLQEREKRPQWKKLKPTAISVSPMKQESSFTPKMAENPLTYGAKILPEACSQRSIQECGESERSGVG

SEQ ID NO: 922154 - protein, 216 aa, Homo sapiens
MCYNALIEDQTSLNLPLSQNLTQSKTLTLFNSVKGERGEKAAGEKFEASRCWFMGFKERSCLCNIKGQDEAASADGDAAASYPEDQAKIFDEGGYSKQQIFNAKEAPSSFPLVKIQLEIAIYEIESRLSPDTKSVGTLNLDVPDFRSVFVMENAWGITTVIILLLFCKIHEINILGSLPLEPGWVSQNKTYESVESSYDLVLPGASPSYQLTVALQ

SEQ ID NO: 922155 - protein, 192 aa, Homo sapiens
MYLPTKWLYTAYLRPNKLHSKDVRSGTVVVPEVIMKNEGLGHSTRKTTKNKKKNKNTRLAEVLAEGKGNRERVVEEDDQASGNVPFSQSPVQSKALTLFHSMKAEREDDCHQKVYYSQFLRGENMPHHGGPPGGAPGWVRRQRERGCCRQEPLLCFQWEESGKGDFEDVIKVEDHEMREVSQDYSGEFNMTT

SEQ ID NO: 922156 - protein, 140 aa, Homo sapiens
MTCRCMRYSFHTLGKVRFQNGCKCEHLIISTKTDILTTMDSRTRVPNKVLTHNEIWSQLTDCGIPMVSSDLAISYQVYAINIPIVPLKNHVALAKATFYWRMKKYADFQKDVKYGVLDDLIFGDLKGYYGSPARMGVKIK

SEQ ID NO: 922157 - protein, 128 aa, Homo sapiens
MKLPEEGTGSNLCCSAASDSDTQANRVWSGPPANSSTLAAEGPVRRNTNNQKGIVSTSTKRMSTQRPQPKVTDFKDQRITSIEKNIYDLMELKNTARELREAYTSINSRINQVEERISEIEDQLNEIK

SEQ ID NO: 922158 - protein, 151 aa, Homo sapiens
MGKKQNSKTGNSKKQSASPPPKQLSSSPATEQSWTENDFDELREKGFRRSNYSELQEEIQTKGKEDIIQENFPNLPRQANIQIREIQRTPQRYSSRRTTSRHIIVRFTKVEMKEKMLRAAREKELPYRAPEGSTKPGKEQPVPATAKTCQI

SEQ ID NO: 922159 - protein, 227 aa, Homo sapiens
MKLTLEGENALVNLNINLQIIDISLLLTQSINTEIFNPAAETKEELNINHQDNGENVSRACQRPLCKPLPSQAQRPRRNKRFYGPGPGSPCCVQPRDLVPCVPAAPAVAERGHCRAQAMASEGATLKPCHLPCGIEPVSVQKSRIEVWEPPPTFQKMYGNVWMPRQKFAIGAGSSWRTSATAVQKGNEGWESPHRVPTGALPSGVVRRGPLSSRRQNGRSTDSLHHD

SEQ ID NO: 922160 - protein, 138 aa, Homo sapiens
MEPSDISHFCYLFFPSFMMFRTLSMGYLSPGTLFNHIGFLSVYIDKGLSCGACSSSPPPAKGLWILSAFLVCSCDSSWSKSLRCGSPHAALSVRVEGALTACESLLRLFLPYIDICGRTVIFAHLFRTRTQNWLAITS

SEQ ID NO: 922161 - protein, 135 aa, Homo sapiens
MSISSTRSQIPTPGHDLDLRIEDMEHLVQVYEESTKSPTAIARKLENTFEHSPETREMLPQRDGHGVMGTPNPHPTGHHPHPSNSCASSEYALMLIGRCQSQRGNNRHFDANQSPHLHSLLLRCVGVLWELGKDG

SEQ ID NO: 922162 - protein, 164 aa, Homo sapiens
MAAAVCWRSTPDPVCLVSPADAAEQQRLLPAHSSGSLSQRGTSLMPVGALLYEVDALPSEEESREAVWLQPLCRAVLSSARHFDEISVGKKGEKSVSNNKPECRELQPRTHRECQWYFSILLTTPPSLQLVIKINGGVLMGHLGYIVCTTHIQSDWQQFKPVPC

SEQ ID NO: 922163 - protein, 166 aa, Homo sapiens
MRSRKFCLLFKLGEITACCCIYRNDPEERGKMMQERDGKIPRGMWTLKLLKPSTKRDEQESWWESCKVLEVTVLEGMKFWGKIVAYHESEYQCREKDKITKEKVSERVACPSTPVGIYSRVGRETEKRNKTQRQSIEKQQWAQGTGAQHTKDLHRRHQPLKTQHNL

SEQ ID NO: 922164 - protein, 129 aa, Homo sapiens
MLRLVRGPTPPNCKPLHGNPLLLIINNPQTKAQEPSIFERSGLGADAAGQDPVGIFSLRLVKPLVNSNKGIQTQSLGDTWNPTLSPSIASPTSSSHLQNDPTGCGSRKLKANNSSRDRISRCKCLAGMD

SEQ ID NO: 922165 - protein, 144 aa, Homo sapiens
MVVGSEPQALITTSRGMRLRRGGCECRGSRQPSPGLAWVLTVSTFYRECTEFSSPPAHRTSPKWEQRKPLGFCSGNYNHCCFSLRLYAGHLGESLAVCIFSDQICLVRSHMACLQHWQLPLHGEFFTCLGLSHSADLLKCPFFR

SEQ ID NO: 922166 - protein, 163 aa, Homo sapiens
MRILLKSRAFLLIPPSHLHISQLPEPQVPGALDCPRVSSQYRAGENFGRNTVHICSTAGRLPAWLRLGFSHLEKCEGELALPLPSQGLREIAAATPALSNYLTNESAAINMEDCVEVEFDPGVDSVENIGIPLNMNSSRREMTSWRICLASSQSTTVGEMPEP

SEQ ID NO: 922167 - protein, 425 aa, Homo sapiens
MAAEEINDSPVEIHDYLSAFANSIDAVDEMLKNMMSVSRNELLQKLDPLEQAKDTGVEGRESAMMAAEEINEDYPVEIHDYLSAFANSIDAVDEMLKNMMSVSRNELLQKLDPLEQAKVDLVSAYTLNSMFWVYLATQGVNPKEHPVKQELERIRVYMNRVKEITDKKKAGKLDRGAASRFVRNALWEPKPKNTSKETGVKGRASAIRAAEEINEDYPVEIHDYLSAFANSIDAVDEMLKNMMSVSRNELLQKLDPLEQAKVDLVSAYILNSMFWAYLATQGVNPKEHSVKQELERIRVYMNRVKEIADKKKAGKLDRGAASRFVRNALWEPKPKNASKMHLGPTLSARRSVFGNQRLWLCFATTAQLSEAFCALLRFKLCLCLFSRRLSLEVKMSMGIVGTPVARITGVHGGNVMSEVPSSPPP

SEQ ID NO: 922168 - protein, 134 aa, Homo sapiens
MWGGGRAVKPFRPGSPCMSPNVLSSGAQHPSLRASPSVQPSSPSPHVQFPHCAQLHLQPPTLSQPHWRRTHHRSPFMRFTGHAAPGARSSTQPLRMLPSACGLLLTTFARTIHTCPWAEWIGNDNDSSPVRVGC

SEQ ID NO: 922169 - protein, 132 aa, Homo sapiens
MRGSKQHLEPMPQQLPDVELGQGTGLSAPNEYPGQKEHILDQKGGKKCVGMGRRGREEVTGMPTAEVCGDAGLSLVATLLGLALGEDGLQSTLCCDSSPQDPPQGTEKELRCVVCIHAHMCNELVCMYLCVY

SEQ ID NO: 922170 - protein, 173 aa, Homo sapiens
MLMGILSIITEQVVKVLIVLTPQFLSRDKDQLTKELQKHVKSVTVSCKSPRKMEFVPELPKTVTGKIKQEGPPGGHQRLRKAGAEKALPGDERSTCCPLLSHPWRSALERPLCDCQLPRCTNPETHREINRYRKHRDTEAQNRPSFTWALRSMAHGQAHKHTHQEDTDTHTEP

SEQ ID NO: 922171 - protein, 141 aa, Homo sapiens
MADDLDFETGDAGASATFPMQCSALRKNGFVVLKGWPCKIVEMSASKTGKHGHAKVHLVGIDIFTGKKYEDICPSTHNMDVPNIKRNDFQLIGIQDGYLSLLQDSGEVPEDLRLPEGDLGKEIEQKYDCGEEILITLLPLP

SEQ ID NO: 922172 - protein, 182 aa, Homo sapiens
MQGQTPLRLKQGTHLLLPQDCSLLQPPQPGLACWTWSPGTGIVALVVTLIREAGSRATAGQPWPLPSLSHPSGGQAVSGTLYCQEVRHLAYASPPALGKCPPMLRFAVLSAPGAGRAGEEPECRAPSLAELETDGHWEGEILTQESSECCGVGAAQAGMGSTHVDATYMGSFVIQPSGGTAV

SEQ ID NO: 922173 - protein, 183 aa, Homo sapiens
MFCQKSMKRPSRTEQFNSLLRYKAEKVQTGFRPCLLSQSACKMPILEACWTEPLINCPPSEDGRSLMLAFLNSLGKPQAATIADLLSVIREHTPSAHSNPLTAPQPYWLTYPTLNYYLFTLSLSSFRVTTLFLKGQTVTTLEFASHTFFVATTQLYPFDTKAAIDITWTVGMSWSLKKMFPID

SEQ ID NO: 922174 - protein, 144 aa, Homo sapiens
MLCPQVFSFAEVKVSEMQDCQVGVAWVPKSPLVEGPCTTTARPSSHNDRSQVQLCWVTPLRFGGFSMALSTLSLGPRPHPCLLFFNSQILKEDTDPGDIGFKGACHLLSGLALTSPGLAQPQWPLMGRVKGASRLAVPLVLPEL

SEQ ID NO: 922175 - protein, 149 aa, Homo sapiens
MRQCRPKQQHPGTLRTGLPELFLSWGPSLEDKPLVAQPCYEVDHGQCLQHLKAPGSGQGVPIIDQKEQGPREEPQLAELLPCIRDLPLILDHVHKGSAGAGSHVCQTLKPASSILPLGPRASLLNRAGVTWSSPSIQVQEGQIPATCSE

SEQ ID NO: 922176 - protein, 126 aa, Homo sapiens
MFFVLSLHLSFTCSSLLLNSGWSAGASHAKPGTDSRRHGGQTTSWGMKTSIHDNIKSLAPERETGLLPVGDIAVYPVKRVQRNHRLSVVRALSNFFILFSTFEGNPRKEEEREAQKLAKVTSLEGF

SEQ ID NO: 922177 - protein, 170 aa, Homo sapiens
MRIGARVLHEGQVSLPSHIQPTEVEPAHILMGLEDAGLLKAGNNKPIAKKSPHLLLWRKKLSLLTGSPPQQCPRLTLREQLKQLTANPVPALRHLPKHRGGQHQVGRARLLHEDSNIFLRPSRGHHWPLYSPEPAASGPRAFSTPFQQAGVQGWQHSPQDGLPGSQAQID

SEQ ID NO: 922178 - protein, 187 aa, Homo sapiens
MISRVNGPSPGPPPWEPLPPSRLTSVIFAHMRTELHPQEGTAGRFKSRSCHPRSGSKSAPQNLSLLVAPPNYLITANSTCSIPPVLRKYPGKRDSSVISRNKQQWMWLSLARSSEGTGNSGCAERLPWSFWDKDSCGKGQDGKDWQKIELMQLSQTGGDDCWFCLCVCALMHNNTSVNDGPHTQLFP

SEQ ID NO: 922179 - protein, 152 aa, Homo sapiens
METTVINLGMQGWEMQCGNSSREDNSEIWVDPGSFVWSGFCSSKECLGERDAGNDRLCVPLWTSQILEQIFLICLPGKWYTQQFRQFQSPWWPGSNGVSPVTQMSLYSSLHQGLAMGQIQPPPVFVNKSVLAQTCIFVYVMSRAPFVLQRHC

SEQ ID NO: 922180 - protein, 143 aa, Homo sapiens
MSVQLSLPSEIRRWLWALGSQMIESPIRVNSLYVIYGRHIIFSRQSAFKCLHLALVIPSVMHKLHLVSDYPMLHWGICAVRGPWLLRAPCPIGSSLQPCQVAGLCVTKHMGNTAYCKGNEGQMGQSSRSLCRWGCGNIHTESN

SEQ ID NO: 922181 - protein, 206 aa, Homo sapiens
MCGLFYVELRVCPAMVRQLAFHQQPGHRDHKRGLCIGKLIFLCILEEERMDPVNWQRLVGDIITDTFSWAHLIATDRDLLKHLENTRLSWGSRCRTCTLVGPHRIEPSEELQCCVEQLLSVQRNQRWIPHVALGRTSVKSTNVQGMALVERGPLLLLTDQVVLWSGPGSSSLQKPFITPKQHLHPVIQAQGETTELAGRRGHVSRE

SEQ ID NO: 922182 - protein, 145 aa, Homo sapiens
MEDLKFKVLGKETRSPIASPGFRASLFDPRAFGEWHNSNRGPLLQQARKKFQGGDVRLGSHLGDFSVNGVEISPWRWSLREKAEESCTGGAHQGKHLKKEVGSWPECCKDIKNLDEDLETCSRCVHRVHGDLGESAFNSIEYVTV

SEQ ID NO: 922183 - protein, 138 aa, Homo sapiens
MGHSCIRFVLIPPPTPGSTGFLLPSPTACLRVPWYWIRGAGSLRHEKPLPSGRVCPGKAGAPGKAQSGDVREKRQFPWEQGGQEPKEASACPELGTEERVVDAGLGTLDLELAMHRPSTGYPAMCMDHCYNHGSCRGR

SEQ ID NO: 922184 - protein, 152 aa, Homo sapiens
MWVGSGLGVSARWRLGQAPKLWAADAASTSSGLDLEASSSLFLLPELTQEMKPGENGPELRPQPPTYNDIQGCPFGQTQQKPEGKETHRCSPAGTPKLAGLPATSPKHSLLESMQQMKVCAGAGQHEKGPNVTNFIENTMASDFRGGKESFP

SEQ ID NO: 922185 - protein, 247 aa, Homo sapiens
MRAGQKQRFQASSELWAVSCRLVCHGPCRAGCCVVDRVLQAAVPWAASCRMLCRGPYRAGWCAVGCVMQAAVLWAVLSSTSFGGSLVRVSGGTVFFMLPMLQWVGGKFHGDRCYFDGVCSLSSCCPITGPAWLFGGRADAICLCSLDFFSMLLLSSSRQAGTEPPCWMAAVRLQEPALQHTDVHKGLRRHVLQGQPQLGPPRGVTRTVFRTMRFVHITLLHSLCPLLDQHLILSGPAPAESNLSPQL

SEQ ID NO: 922186 - protein, 158 aa, Homo sapiens
MPEKGEKIFKEVLSQSALGAGPQTLPQGPARPTGAPDVPPAQRPCPHRESQVGGAQCSPGLEGPQTRAQPRCRVLAGKARCGEHSVPLGTAIINPAWRRRPEALEVKLLVGVSVSQLRSVPRPPILSAEGHSVPRVTQCRGSLCLCDAADMPTWYLGM

SEQ ID NO: 922187 - protein, 142 aa, Homo sapiens [sequence omitted]

SEQ ID NO: 922188 - protein, 141 aa, Homo sapiens
MPLFSGTPLGLFLFLHLLALSETFGGLSLHSVLSLTLSAPSCAFIMELPTLVHGPPSVTIGKSHGLLKASFQIPPKASHLQAPFHFHPESKFQLHLPLLTLDFYPWNLRKDSPSQVDVSSILGCSDVHPLPTDPPGCAWGH

SEQ ID NO: 922189 - protein, 134 aa, Homo sapiens
METLHVASSYDLGFLPAWQLQGSWVFTGGPELQDRQILTLNGKLSTLWGARNCTNQICDCGEYDWEKGVFWESILYHHNGPPHSRKDHTPHRLLLARGQQGYEDRPMPRKSQTPQMAQGLPICLDKLSWNWSPL

SEQ ID NO: 922190 - protein, 119 aa, Homo sapiens
MTEISPFEVPPLPRPFTPGLKINDTCSEVTPGEASLLLPGSCAVSQAPRRLHLGEFGVSEDHTVSAGTGPCLAQEPGHTRRRLVAIIPGGKLLVSQLVPADGSEHSVWVATPRLCSMHM

SEQ ID NO: 922191 - protein, 157 aa, Homo sapiens
MLLQGQNGLKFGLCLFHSQLWLLLGESQPSTRNFCILVKPKSGKRQRKGQSHGESRPGQEEEEASDFLSCCDHVYKDIHSLLPEEAASQVTEQSERAALSPTSRQFGGAHSKIPDTRHKKRAQEGPYSRMSLETWTASAVPAQGRQPSHFKAPGDEM

SEQ ID NO: 922192 - protein, 140 aa, Homo sapiens
MSVTPTAGARDLAGTWCCSGLCLGLACGYLRLILHSLRGFAPGRRPHVSSLWINKAENHLCTLAGKPAPTSGPLLGLLALVFSGAPLPPRPGTPGDCSPLWPSLALPGPAWCSLMLPGPPWHSLVLPGHPWPSLVLPGPP

SEQ ID NO: 922193 - protein, 162 aa, Homo sapiens
MVPLPTMLWFLFTVFSPARVLEVSIFQGFAPFPHKCQTWALPPLPQLCPSFQEPMLLMHEQVQGSGGESEPWAKGLPIIINAVVFAVFVQGKTTLWKNITGKGGRDHNRSQDVLPDCVLRNAHIPGSTLLICSPAQEALAYSRGRLYSMKVMAWVQILTATL

SEQ ID NO: 922194 - protein, 211 aa, Homo sapiens
MNRGNGVLSLCLGYTLPGAIQGKSEISFSPDRSSWAREMGELKNVSGITGDVTFVLDLEHGWDLVGIDGDEARLQGVEESWGWSWGRCMRLSGRKLVRKEDSLGSPPEGPIQDASSDERGNFDPALTQPSTGKEKPRRHLEPVKPEPAMGGTESAECRLLWKWKEIVAWGLLNPPEGSILRTIMPSGSALAPEAQRNPGCAVFISEVLEHY

SEQ ID NO: 922195 - protein, 163 aa, Homo sapiens
MGNMTASGPWRLSAFMDPFLLLATYQLPLSIPGSSLHILLCSPSFFSFTNALYKEGHRLLCRTCLRTAWARADEQYISTPCTDLFPLGRRGRAAESVCMADDRDTQIVAVGDSPAQVCLPFCLLSSKMMTSAQESLEKMSVHLTTVTLLTGFCTSSRLDSLFI

SEQ ID NO: 922196 - protein, 199 aa, Homo sapiens
MILPLIVFTCRRVLDFSVVLLLDFRRGRRMSYLGVESPQVNGLASYRTWASARNSPLCSFLTFKAEKRIKHTDLESPSAVYEHNHVSLRAARLVKYEIRAEALVDGKWQEFRTNQIKQKFGLTTVERARPESAFTSPAPQNPESSPDFLPSPSTREATAVATDCSQEHGRLPLNAALPATQNNMPANRPWQFGLRQNKR

SEQ ID NO: 922197 - protein, 155 aa, Homo sapiens
MLKCDPQCWTWSLMGGAAELPVTALLETKAHPRHPAATVLAAGFEQEDQGRGSQATPKTLRQQPLYCSQTIGKAVAPLPLKPAKLSGKLRFPPSAGCNEAEKYNKQNLKLCEWIQEQNGKDREKNHDLVVPATLEAEVGESTEPEKSRLQLAMIM

SEQ ID NO: 922198 - protein, 136 aa, Homo sapiens
MAITQEPNLHLREGPGSHGKDIGVSKGAQESRRGEERSEVPQKGSVSRELTEHTCLFPSWFHFPFMTYSASLRRVCLRENWMIREEVVIELKLVMNSWKVDRGAKAQDRHQRKERGRTIKWSDDSQLNYLLPRAVV

SEQ ID NO: 922199 - protein, 280 aa, Homo sapiens
MQQSIQEVTWVMLKAFSFKRETEHKRLENLQTDNAIEKKNSFSEEKFKPAAEICISKKELNVKHQENGENISRQHFHREAIFNRSEGFHGYPGSRQNKTSSWLCNCSLRQGLPSSPPDALQDKAMTEGDMGVTLEASTEADLKVGNSCLEPVPSRRSKLRKPKPVPLRKKAIEGEFSDAGTAVEGTPLPKASYHFSPEEVDENTSPSLLGSAGFQKSPPDLKETPSTTKALPRKLGKKPGSKLTHKIQKDGISIEKETCQKVEEDVSTMLPEAMVFSFCL

SEQ ID NO: 922200 - protein, 156 aa, Homo sapiens
MAVYSSGTKLPGERSGSSICSSPISAIPQPPLLIPRQTGSGVDLQQTPTDLQLRVLTVRRKTNTQKGYPHQKPICKSTSSKTKAMEQSWMENDFRISNYSKLKEKVRTNGKEVKNFEKILHEWITRITNAEKSLKDLMELKTMAQELRDECTSLSN

SEQ ID NO: 922201 - protein, 186 aa, Homo sapiens
MGYCQATTNVHFKTKRPSVSLWSMLPGLGLTLQGSGLPSGPGQVQKCHPRAKAFGIRDPRSLLGALPTELSWYTRCKTKPIAYYLDITAGSSGPKGSLLRGDESCQDFVLPFKAVGSLLAQEREKERESKRAQVGQKCYLVTPGKRFLEGDCVTPKTKWVLPAQGFLAAWIFEANTHSSKGCKQCR

SEQ ID NO: 922202 - protein, 166 aa, Homo sapiens
MGKKGTPISLIFCHLTKQAGVAILISDKTNFKAAAVKKDKKRHYIMINRLVQKENITILNIYAPNTGAPKFITQFLLDLRNEIDSNTIIVGDFNTPQTALDRSSKHKVNKEAIDLNYTLEQMDLADIYRRFYPATAEYRFSASACGIFFKIDHMIATKQVSANLRK

SEQ ID NO: 922203 - protein, 166 aa, Homo sapiens
MDTQNNLNESQMHCACESIGLQSIYWMILLAWNCLKHKTAVGENRMQGRSVGDGAGTGGGCQQHTRFSCLGDFFLDHRTAVTEIRLPWLPSVTVFGMETLDLGHCPPSGHGPPAATVWTRDALTEWHSDETDGFYYSDVCLLYVDFAEGFNHKVVLDFVKCFFCVY

SEQ ID NO: 922204 - protein, 187 aa, Homo sapiens
MGDHSFCKQSLKLNEGQLHTQGAFTPVSQGHCSAHAPPPHLLPILLWQSLPSSPLQPRPKSSSRLPVLQLQRHPGEGQLLAHPKAEFGSYVASGICIGLRDPSSSTRGTAPSCSVWLTNSIADTQAWAGRGTPKSNEGLALQPVWQHYLGILLAQHRPESGPSHRHPQELTGPCYCHQASPSKHPSS

SEQ ID NO: 922205 - protein, 156 aa, Homo sapiens
MPWIAHPSRPCPSRIMPPIPPNTCPTAASSAARDSAPNQSLPWAVQPRIGPETAPCCGKRCLAWRLEPAALRLASPRYSWWWRQRLQCRGSGRRATHSGSCSCPARRRERGAICGTLEAGACDIAPRLAAVGGGEGDCCAAGVVGEKKIVLGYMEG

SEQ ID NO: 922206 - protein, 134 aa, Homo sapiens
MLAQTEVGPESGSLRKGEKLKYVSTLSGTPTLSGLVCGLAIIPSAPSGQSVVIIQKFDKSPDEITLGLLGDLLPLGTSLGDQDNSTSRITGKAYRARNTISPHTKAVFSLSFYTNRPPWKLTKTGNNNNNYSEN

SEQ ID NO: 922207 - protein, 154 aa, Homo sapiens
MKDRGALSALGIKWIKGAVRLILQFSPYLSVPGHVLWGSNDVQRVLTSTRSSCSIFGEAGGTSALEKIRKDCSPPHHPKQPHSQEFYKLKNTFFYLSICPEIYDQTLSSKVICKGTTPGCGSCALPDTAERQYQDNVVCPLCSQSGRSSNPTGR

SEQ ID NO: 922208 - protein, 941 aa, Homo sapiens
MEWNQMEWIGIKWTRMGRNGMHTNGMKWNGVEWNGMECNGLEWNGMDSNGMEWNGIIEWNGFERNGVEWNGLNWNGVKWTRMEWNGIEWTQMEWNGMEWNAMESNGKECNGKKRTRMERNGMEWTQMEWNGMECNGLERNAIELNGMDTNGMDRNGIEWNGMERIRMEWKGMEWNGPNLNGMEWNGMEWNGMEGNGIESIPMVCNGMEWIRMEWNGMDSNAMERTRMEGNGIMDMNGMKWNGMNCGMEGMECLEWNGLEWNRMEWNGLDSNEMEWNGNEWNGIESNGMDWIGLEWNRVKWTRLECNGMHSSGMEWNAIDSKGMEWNGFECNGMDWNSLEWNKIKWSRMNELEWNGMEWCGMDSNGMEFNGLDSNEIQWNGLECNGMEFNGMDSNGMERNDLNGIEWNGLEWNGMQWIQMESNGIQCTQIEQNVTEWNGLEWNGKTRKEWNGKEWNGMESNGMEWNGIEWNGMDSNGMERNRLEWNGMERNGLEWNAMEWYVLECDGMEWNGVHSNGMEWNDEMEWIRTQWNAKEWTPMEWNGMEWNGMEWNGPERIGMAWNGPEWNRMKCNGIDWNGMEWIGMEWTGMEWNGMESNGLEWNGLEWNGMVWNAMDVNGKEWNEMECIQMEWNGMQPNGMELKVLNSNGMDWTRMEWNGIDWTRMEWNGKERNGLEWNAVERNGLDRNGMERNGMEWNRMEWNGMKWTRMDGMEWTEHEWNSMEWTPMEWNAVEWTRMDWKGMEKNGMEQNVLEWKGMEWTQMEWNGLKFNGMEFNGMDSNGMEDSNGMEWNGTEWTRMQWNAVEWFRQEWNGMEWNGVDSSERESNGMELEWNGMEWTRINGHECNGKEWNGLEVNGMEWTQMEWNGTVWTRKEWHGMDSNGMEWNGIYRMERSRMDWYVMDSNGKPLNGMAWNGMDSNVIGWNGMHSNGMEYKEIGSNGME

SEQ ID NO: 922209 - protein, 332 aa, Homo sapiens
MERSQTIKWNVLERNGMQLNVILWNGMEWTRMDWNGMERTRMDWNGIEWTRKEWNGIRWNGLKWNGMEWNAVKCNGMDSKAVEWKGMDSNGMERNGMKWNGMECIRMEWNGMEWNGTDSNGMQWNGLEWNGMEFTRMELRIEWIGMDSNGMEWNVLIWNGMDSNGKEWNGLESNRMEWNGLEWNEMECRRMEWSGLEWTQKNRMERNGKERNAIDSTGKEWNGLEWNGMPSNGMNGMESTRLEWNTEWNGMDSSGMDWNGMDSNGMEWNGMEWNGPKRNGMELNGLEWKGKEWNGMEWIQKEWNGIEWTRMERKGVEYNGLKWNGMELMDSN

SEQ ID NO: 922210 - protein, 484 aa, Homo sapiens
MEWTRIQWHGTDWIGREWNVMDLNVMEWNGFEWNGMEWNGMDSNNGMDSNGMEWCGMEWTRMELSRMDSNGMEWSGLEWNTVEFNGMDSNGMEWRGLEWNKTDWTRMEWNGMEMTRMEWNGMNSKRKMELNGLDPNGMEWNVFEVNGMEWTGLEWNGKEWIRMEWNGMDSSNGMESKGITWNGMPWNGMDTNRMEWSRTEWNRMEWTRMEWTRMERNSMEWTRMEWNGVEWTLMEWNGIEEIRMAWNRMYSNEMGWNGMDSNGMEWNGLKWYQKEQNGLEWNEMESTRIMEWNRKERSGMEWTRMKWTRMQWNGLEWSGKEWTQMEWNGMDWTGMEWTGMEWNGMDWNGMEWIGMEWNEMEWNVSEWNRMDGMEWTQMYWNGMDMNGIEWNGIKRNGVEWNGLEWNGMEGTQIEWNGIERNVMKRTQLEWNGMECKVLEGNGMEWNAVDLNGKNGKDRKGLDGNGMEWTRMELNGLEWNGMEFN

SEQ ID NO: 922211 - protein, 148 aa, Homo sapiens
MPVGLFTSHLTNLYVLPWPGPCAHPGLGVSGVFPHLPSPGSREPGVMQLFSRCGSRLTARFSHASCQHKPTLVWRILPTIQGQPLPCGEPVCTQTYPRKEKVAEKWFPALLKALLRVSGSQQRDFSRSSKRLTGGFILFFHNYQGKGK

SEQ ID NO: 922212 - protein, 139 aa, Homo sapiens
MQSEDGFHYIERVLLHLKLETREKKPPLTDDKCLVKWTLVQAACKSTFCYETWEKQFGNKMQGTSSDSLVHLLVSMGPCVETYRSSRMQNFQPGEHHMGLCSPKDTANQDSWKGLQTPAPLQSLLQHSDTPYLPLFSEP

SEQ ID NO: 922213 - protein, 149 aa, Homo sapiens
MFGFPFLKNVSSASSISLLFTTDGEGISTGWRKVNGLNMVFALTCCLSLELPAVGMLLTATSWDNYSLCLLHTSVYCQSPCGDVLAVVYVGLNLRREISARDKFGDEEAKKITRDRADGENYTLKNTGKNIVDPVIGNTQNSLLRYVAV

SEQ ID NO: 922214 - protein, 123 aa, Homo sapiens
MRNGRPLREEQESFWERTWSVQDQGGSMQSRIREVFVNMERFSHYNRIGPRDQVLVGWLCRLGISDGPQPAEAEMLKMPWAYCGGGNLKTQRDGPAAMDLLYKTRTTTSRHWEAPEDTLLTRG

SEQ ID NO: 922215 - protein, 166 aa, Homo sapiens
MTHSVSPSVTLASSKVILAVLGNTCPCGSELTKVSLPSSPPLPAPWGFLHSSEQKSPFLFRIGTSRPNSPFYVTHQVFCPLGDHRIYHSNQILLSVKGGAINNYTNIVGVNHDCPKWDLMAIPLFADSDPESEVQGKFLEEWSCWIEFPKSFNSEFPGPPEPPTIH

SEQ ID NO: 922216 - protein, 123 aa, Homo sapiens
MRKLIAGLIFLKICTCTVSTSTDLPQTEGYSRCIHQVTENSGPQPSDQEPVPVHGLLGTGPYSMRSLAALDSHRSTNPIVNCTCKGSRFPAPYENLMPDDLSLSPNTPTWGRLVAGKQAQGSH

SEQ ID NO: 922217 - protein, 163 aa, Homo sapiens
MGGATPMIQLSFTRPLPQHVGIMEATIQDETWQWFVVLLEEVLHVPLSPAEAAEQQKLLAAPSSGSFIPGGTGLMSARALLYEVSVNPSWEVSPNQEAWGVGRQECLSLLKLRLQPPLPPGALSQGDGCFIYKPLTEAAAFLSEMPCPERRNLERQSRFAALC

SEQ ID NO: 922218 - protein, 140 aa, Homo sapiens
MENKRRAWDGKIKREGKKKANGRDDIGTLQASHSRVLSLTVSNSWESSVHQAAAPPEEIGKVIELGLLEKQFFTWTRAREEEPVAIIKGPHAHSLSLGAHLEWHCPLTWSSGYIEHPQTEKTKGSQKNRKMMNGQKRKSK

SEQ ID NO: 922219 - protein, 141 aa, Homo sapiens
MPYEKLAAHIFTCFLILNSHFFKTPWSLLSENGVRNHNLGAGCVCCYWVVIPSRLTQQTAKKYVCILTHATYLTSMFSLIPNGYASGENSTTELSMPPYGCVTKRMTEVTPVMSNKEGETMMEWIKKPKNPGTRYGNISWK

SEQ ID NO: 922220 - protein, 166 aa, Homo sapiens
MNPLLQSRRAATSMQGVFCSRDPPPALPRKSARDLASLGLLRFSELAPVGPHLSDNEVPDRSGGACCDPWERSSPVLGSAGGGARCHGREGALWKLQCLKGSHKAPHFFILAEALDGGQTPARPWTDCEAQRSHLPPPHRQNNDGRHHQVLRLSWPLGTVPAALQT

SEQ ID NO: 922221 - protein, 219 aa, Homo sapiens
MRQQESRSRKKASRKTPTLAGRHVPPKIEKEAVRKSTLSYKSESGLRKKGMATSNKIGQKADYLSTSKTISAETASFHVGGKMQGTRPRTGHSPHICTESFHRHPSPFHPGGSQSSGHSRAVLAVTHEKFSPGTLSQGYAPMNDGTELELKYGSGSMMGCEHSQQKEFNFYKAGGERGQHQHLEAVGSGGCCLSAANAQTKWATGTQKAGEPMGFRDTK

SEQ ID NO: 922222 - protein, 179 aa, Homo sapiens
MNTPDFFSGSPDGRLLLGMVVLLLLSNNFLLPAQKSCKSSSKEPVAVICVLLQGPAQRNRYSELPTYNTLGGVGQLGEGVKKPPWVQTESILTKGIHVKIIPQGTNHPETVALMLTQCLYFIKNDFKGLRLALHGPTPMHTAFHLTEHVLEQTSIPHLLVSEEGASWGIIPGSFFASII

SEQ ID NO: 922223 - protein, 142 aa, Homo sapiens
MGKLWQVDKTKSSLKNPNPLDPHKSPLDYRCSSSHFTNEETDRDFNELTQDWMIAPGFDSAWWERVKGSLEAGLGKEPAVLHGEGETRSGHSAHHRRLACCLSNRTIQLSALTVTRQRLPSRWSPHLCILSVKKTSQKLLCQ

SEQ ID NO: 922224 - protein, 128 aa, Homo sapiens
MRENKKHLSFCDRGSQKQGARVRREWRKIICLKEEDGEAARMNIKGGGGREYRSRISKLPLAQRSGLPLKQYNYKVGGCVAFSILAITFFFMLFSMSFLLSLGKMEMIPRAILETVFEVGRVSGPLNC

SEQ ID NO: 922225 - protein, 236 aa, Homo sapiens
MAGVDRTRERARAAYLQLFVPPGGLMVSLASGVKLQIFLVSVTAHKSSVDPKNSGAQLASPSGSRTGAAGGAACQSSTMRSHSSALGWSMGLGAVEQGVALVGEARAAQEPTEAGEGSGMAGCSPEACPAGRQLRPGEKSTAAPVGRHCWGTQYTLRNRWPGCQVPHCPGPLGPAGCSECGARQAHAHPELQLARKRGAQPRFLLAPLPPHLSCKLREPALALASPERGSHSAALG

SEQ ID NO: 922226 - protein, 141 aa, Homo sapiens
MSLSSRTVGMGILEYLAGEENGTDEFKPGIPRAGQSALKGRQLSKGTQAKQVIADETRRLFSKEPAGSEVCGCFSGTPQIFPSHPVWCQAVPVVKVQETILMRNDSPVPHEKLRPVPQVKTLRSLPLLNFPGKGPWSHSPL

SEQ ID NO: 922227 - protein, 149 aa, Homo sapiens
MKIGVPPTMLPKKAIASPWTYLLLTCDLKLYYFYLCTWLLSSFFHLSISLILKTFPKEVKPEPAITLRTLAGEAKGQWAQKALECDLQPGSLLWDEHQVANGKAPVGIRSPEDSVTGLLSPYAPVAPSLWSVLSSSINLCFCCFILSLL

SEQ ID NO: 922228 - protein, 145 aa, Homo sapiens
MSSLRTITKPSDVCWIHWMQEDSGKINHPGQRKIKKEMFEVQSRKNGVLIAWSTGAIFVVEIAESSGPRATLKRNLVILEDNAHVSQALSANVSTDRAFTKDEVVALDLLSIDVSSESHVAAQNPQQRSELKDTRLTPAKGADAP

SEQ ID NO: 922229 - protein, 304 aa, Homo sapiens
MVSVWVSLLKLWRRSVHCRQKVQEKAQEQGVGGSGNDTDGDSGGVDGDGGGADGNDRGTIGDGGGADGDGAGTDGGEGGAVGDGGGADGDGGEVDGGGGGTEGDGGGTDGDGGDVDGGGGGADGDGGGSDGDGGGTHGDGEGADGDGGDADGGGGGADGDGRGADGDGGGPDMDSGGTDRDGGGGDGDGGDTNHKSQVVLPVLMTNHYKSGIPQPPPLVPVICEIDSQNSGKYLHLLTFIIKRITKDTDEEMHRVRYEDMTAEQAHQNLSVCVLQELELVFWGLEELKIKSNAQVIDYVTCIEH

SEQ ID NO: 922230 - protein, 182 aa, Homo sapiens
MRGHRFHGNLKKYHYTCDTVPEGGCYLACPSSTPNDIFPCWDLLVPGVKECLLQHLQMWDELSRVSADRPKVMIPHQQQESGGSLQKQECIDPRKGSLAWQTPRGEGTHPPESPEATSTEEKTLVLPLSQNPGSGTCSCLDMNECQGLSKTVGIGPHVNFLICTGHKSPEIPANHSDTWAPS

SEQ ID NO: 922231 - protein, 147 aa, Homo sapiens
MVNCPFPELWFPHAGRSSLMSIPSRCLRLTFTVLFHLRKQHHCPWEDLHSPEHREVCSEADSFQYFLGPCPRRSYWGESNTAWWAWKENSLVSSQSRRHLAHEIRKLRHTSNQRQHYWLRNLVDFRSYLHHFPMSKISRNTFRKLKK

SEQ ID NO: 922232 - protein, 127 aa, Homo sapiens
MWICWRMRLAPGSVSITSGQGGSRCSHESTLDKCHMGRQLGHGLGTEVEHRSVGNFHQVCLHEMGSHGVFTRLLYLLSHVGKKQRSAPRDKSKDCPRSYNKLLFTTLCTDSHHMVNHGYRCGNYTNN

SEQ ID NO: 922233 - protein, 171 aa, Homo sapiens
MQDAPLSCLSPTKWSSVSSADSTEKSASGAGTRNLPFQFCLRQALRMKAAGILTLIGCLVTGAESKIYTRCKLAKIFSRAGLDNYWGFSLGNWICMAYYESGYNTTAQTVLDDGSIDYGIFQINSFAWCRRGKLKENNHCHVACSALITDDLTDAIICARKIVKETQGMNY

SEQ ID NO: 922234 - protein, 137 aa, Homo sapiens
MKAAGILTLIGCLVTGAESKIYTRCKLAKIFSRAGLDNYWGFSLGNWICMAYYESGYNTTAQTVLDDGSIDYGIFQINSFAWCRRGKLKENNHCHVACSEQKINRFNFSLPHPGVLSLLKGDTSQDPQLMPETADNT

SEQ ID NO: 922235 - protein, 121 aa, Homo sapiens
MNLGFILHECFLKASKLITNVYYKPGLCQVINMLLIRLLVLTMAVHGKYCYSHFTGSETERFSVLSVLTPPVTEELGLALAVSQGRPVYSPLCLHSYWLCSITRDRRPGAKGKMTSMKNMC

SEQ ID NO: 922236 - protein, 191 aa, Homo sapiens
MGLLSYERLLPAARHGRVAGGAGPGRQGGRLGPALRHMAPGRDHPLCPAAPGPGPAPAQARCPAAPHSRGDCRGSQDLSQATERTGSSVSCTEEKKQSKSQQLKKIFQEYDTVGVSLYTGISFISLVIFYMVVSSGVDMSAVLLKLGFKESLVQSKMAAGTSTFVVAYAIHKLFAPVRISITLVSVPLIVR

SEQ ID NO: 922237 - protein, 155 aa, Homo sapiens
MIPERQKTNEVSPIIILIFFMETFSKPQNMKDLVQQERPELELDPLGICCGMEAGEPISKNQRGTLFPNTFQHRWDSYLMAAGAETGPPWNLLFTARTDVSRQVSLSTKILVCTIPPGPLEDGFGCRLKAKQGCSQSPCGTGPFLCLNLGAHSMD

SEQ ID NO: 922238 - protein, 127 aa, Homo sapiens
MRLLYYLKTEDPEYDVQSKQWLTHLLDQFTNIKNILALKKIEEGLDLRNLASDDSYITPYFNVEENYFSDYGPRVMVIVTKKVDYWDKDVRQKLENCTKIFEKNVYVDKNLTEFWLDAYVQYLKGWS

SEQ ID NO: 922239 - protein, 176 aa, Homo sapiens
MIMPLCSSLCDRKTLFQKRKRERERERRKRKKERERKGRKEGKREKERKKERKKERKKERKKRKEKKRKRKREGGKEGRRGKRERKREREKEREREKRKRRREGRKERKERKRERDKERKERERKKEREGRKEGRGREGRKGKGREGGEEEEQEEKERRREEGRKEERKEGRKEGP

SEQ ID NO: 922240 - protein, 144 aa, Homo sapiens
MFYQVEMGQGGGRKDNRKDFFTYKSVVCGRVAPRCNQKMLKMQTLQRLQFISSMKNNSKSQSTSLALLNSGRQIGLKRLQFSQVSLPLNFPHGKLHGRELSGKAADASKLQSFQFSWLHANLEHSPLFLSPHTTFHPILAFKRH

SEQ ID NO: 922241 - protein, 151 aa, Homo sapiens
MEEQVRGTWGETVQGGSKGGERNGATSESEEDNELDCDPLRESQGPQHSERMGSHSRAPGCAFTHCIPEATSSKWNYKTSVILFGLCHLAQYLQGSSMRRSLPTQQLTTFDLLSLGKLGRMRWQGVNYMEKDDSGSIFILAYHTLKEKKFS

SEQ ID NO: 922242 - protein, 183 aa, Homo sapiens
MLGSKVSSIRESVRREKPRLLHDCKAGGSGSRARLRRTRRARGSPAAAPLLGVNSSPRGRAGADASSPPARERGYRARRMFAGWDRQSGNMRRPRYSCSRAARAGLARWSPRGEHAAGMGVRLVSRRESQPPCSRPSAPQPQPSPAAELPAAQPRGSAAAPRVPTNRHHEHHRLQQAQRCGAV

SEQ ID NO: 922243 - protein, 136 aa, Homo sapiens
MDDGHSYSHKFDFYICDDDLALLPKLEFSGKVVLFDQACNPSLEQRSGKEFVDIFQNHHNCHQRTVNKECGGLGLPFWLYLEARGSGQQKSAQEVPDYLRHFTGFLHRHPIKYQPCGLDDMDPTMFQSTHDPSKSA

SEQ ID NO: 922244 - protein, 251 aa, Homo sapiens
MNKVAVVPGMEVPGMGSEKEDAWTQQHGLPLTKVELATVAEYPVCLWQRLTLKSPIWQHSQGDQSDGWKVDYNGPFSLWKGQHFVINGIDTCSGCKFAIPVCSASAKLLPMSSQNVYHRDILHRIDSEQGTHFRVKEVQQWALGRGFYWSYYISHHPEAAGLVEQCNGILKTPSQFQMGRNTLQGWGKELRMGAKLTQDKFVMGYFMCQFSSRCNCPIIILKTAITLSPVPWAFCLWGWSSLEHILAGQHV

SEQ ID NO: 922245 - protein, 134 aa, Homo sapiens
MAESKGEARHLLHKVAGRRMNGGGTTEHLIPVNLQAHHLEYLRVNSTLFVWLHIKSSLSLNESLTYNLAGLAACPTMATRSLLPHTTLHKALPFFPLLATVIHQPASSPSHSLIEGLDDWLTVALHLISCCHVM

SEQ ID NO: 922246 - protein, 148 aa, Homo sapiens
MGTTLNSCMCTKASPNHGRHKGSAGPACGSHVYQRTDSKDTRHDIQEQRRPEHAVPQCQPQAGPAQGVVGEAVLQLCDPQGGGGSSTGLHRFGGCPVEFGSQERSGRPSGVGWAAIHLKEKQPGCGEAAVLGGILSKEPRNQRRASSI

SEQ ID NO: 922247 - protein, 139 aa, Homo sapiens
MRSYFSAVKNPDFWVYTHLAESASLGLCSNNLTFNQRKEEFTCHFLGVLLEQALDGQPSLGIALAEENLSQDLPPSRDSLQPVTDQLEDRLAGWKLRQHFQVTVLRQNSFSEKPVFAVKTSTDWMRPTYNTKCNLFQVN

SEQ ID NO: 922248 - protein, 146 aa, Homo sapiens
MSECAKISKDKILAQNSSILRGKETGPNDRFSKRPSAAERWVLTFSASSVALELLGKQKTLETETMKPTEFPEETGPPGTFLKPVITDQITSQENGGKNRRRMTILKAPRTAEKDMARALPLIFCVMHHGSPVAPTLHNQCDWTAT

SEQ ID NO: 922249 - protein, 134 aa, Homo sapiens
MNAWFTGISRSQDMAPCIPAAPSPAVAKSSQGTAQAIASESAGPKPWQLLRGVGPAGAQKARVEVWERPPRFQRIYGNAWMCRQNSIAGAEPSCRSSARAVGEEMGWSPHTESPWATALWSCEKRAALLQIPEW

SEQ ID NO: 922250 - protein, 164 aa, Homo sapiens
MPNDEAEIRTQVTGWPAQCPVPQGDQSPVVLTSNTMETRGGEQGRGRSIRLHSGRWAPNLWLTPSLQQHRECFALFICPEPLGSGCNEVQTHETHPSGASLLPLEEEGGKKEERKGGKTIRKFANFCRAAFKAVLGRLELVDCGLDKHSLGTQLLADVRMVEGP

SEQ ID NO: 922251 - protein, 138 aa, Homo sapiens
MPHPDLFVMQLCLKKSSSVEDAVGLLTAGCLLGFHSPCPSSSQTCDFAMPGSGHSGHLSGQGVYLQFVLEKVPIGTLGMCGKPKNARVCLRAQLSHCSHSGRLVEALSLCPVEDTKGLCEEGGHPAGTNHFIASFLRG

SEQ ID NO: 922252 - protein, 156 aa, Homo sapiens
MSCGPLFLIQREMLKTRPKLDCKDVEAQGPGKEWKLEPVMRPSGTGRGEGGGSLLDRGGHCPIAWRPCSPPQGQMPCEMMCTFPMISLAFPHSFMPVTGIFTQPGLSRKALSLLLEERSYSPECCRACLTDTDRDWVECAWEWIVREVVKTREEEG

SEQ ID NO: 922253 - protein, 155 aa, Homo sapiens
MAANHGIRTMSLVREIQLICTHLLSSTSLGHYCSKGPGQITPKRNTQPKVVFSPLLMKLAAERKASKRRGHKVRRVGAIGNAQSQPDSKQGAQVVSFWDTPLDYCSIKQLTALDCPFPSNSTDCVGKSHRARLHSQMEMEESLKAKYQNGSLVNS

SEQ ID NO: 922254 - protein, 284 aa, Homo sapiens
MSGSSLRPSPDIDASTMLSVQPEELIFSHHIGIEFLYQMVELKIQFPVQGFQAANWRRSTYEEHLLVQMATQVRPCYIHTLGTHPGHSWGSSGAHTCRMSECAKISKDKILAQNSSILRGKETGPNDRFSKRPSAAERWVLTFSASSVALELLGKQKTLETETMKPTEFPEETGPPGTFLKPVITDQITSQENGGKNRRRMTILKAPRTAEKDMARALPLIFCVMHHGSPVAPTLHNQCDWTATVNIVFFAVWRMVVYTQKTLETVSPEWLATPDEIILDPRFH

SEQ ID NO: 922255 - protein, 138 aa, Homo sapiens
MKVYSFPLISLLCHVTNSTDAGSEQLPAGALPHAFASHLCWSFQSLPWSFSKPWTALKHLSCNSSGSPETARNHSPGAVANLITHPWRVLSHDVLATVTAGPRMEFTVQIQQLVGNSGPVLLSANFNLALCYFSKPYF

SEQ ID NO: 922256 - protein, 144 aa, Homo sapiens
MCNIRKQGKKPWGVAGNNLRENLKAPKTETLQLAKGPDVLQDGDSWEQGQNGDIKQPRWPLGLCSCPWEMSHQESSTFFIPKVVSDQQEIGGLTRPRLLAKSIQVQHFFLLFHNAPVTGACHHPGVHGPRLANAGQGVTSIHVD

SEQ ID NO: 922257 - protein, 153 aa, Homo sapiens
MSPLACLLEQAAWWTVRLPASFTSHDLMHHRGSALNKSRNYAKESRSWNDGLNSPKSVGLTTASWDPSVGEGEWWRGGEVKEEQSRGNRRIQEKTLPMLAKKMLAKKIHSGDALKHPPLRYGGLEKGRCYGLSFRPAQFNLKLQDVCVKFLKK

SEQ ID NO: 922258 - protein, 146 aa, Homo sapiens
MHWIKETKRWFTLFSQGLLPMFGTHSPPFMEVHVHACAYIFSNTEQKPLQTSEGLCLFWEKCNTLRMNNTCLEPNVGLYIPPAYQQHHHDHHHHHHHLHHRHHHCPQFLKLFETCIHSFISDYKLSFEKDQSKTKCLWKTKVYSHY

SEQ ID NO: 922259 - protein, 145 aa, Homo sapiens
MTIPLDPHARGLHGEAEVVKEEENGGQPLDFLGFTGPKPNPEQDPTLFNFVKVERDEEAAEEKFEPSRSWFMRFKKTSCLHKIQVQGKAASANVEAAANYPEALAKIIDGDGCTEQQIVHVDETAFYWKKMPGDVFGVPTQECLH

SEQ ID NO: 922260 - protein, 394 aa, Homo sapiens
MGFKMEKDLTTLQKIYAMNLSPILSQGDLPRRFTGVIEQWGKGNDQTFQKLLEIGSELMLIPGDPKHHCGPAVKVGSYGGQIINGVLAQVQLTVGPVGPLTHPMVIAPVPECIIVINILSGWQKPHVGSLTGRKIGEEEIWRRGMWMNHPEWSKTVKIFVSHVSAHQRVTLAEEVFNNQGNGMIHSVDITQPLSPATPVIPQWDHEQSGHGGRDEGYAWAQQHGLPPTKAELATATAECPIFQQQRPTLSPGYSTVPQGDQPATLWQLDYIGPLPSWKEQRFVLTGRDTYSRYGFAYPAHNASAKISIHGLTECLTPHHCIPHSIASDQGTYFVAKEVWQWAHAQGIHWSYHVPCHPEAVGLIERWNGLLKSHLQHQPGDNTLQDWDKVLQKAM

SEQ ID NO: 922261 - protein, 135 aa, Homo sapiens
MPTAVEAQRYLRAALGHAHQSSKVYLTHDSMMALPSSAPSYSSKDRSHTNSTTLNRHPPQVLCTVYFVAFSASSILSTCFISPGNPVCDSPLINQLPLLDLHLPSRPPTAVASLNPIINPLFHSTHYEFPSLIEP

SEQ ID NO: 922262 - protein, 141 aa, Homo sapiens
MVELIYSPTNSVCWSFLEAHSRPCLPEYHQRSLQDSKDCCLFLSLEALSQRGTCQMAAGALLYEVSVDPCWEVSASQEARGALSQGDGRFIYKPLSVAAVFLSEMPFPERRNLERHSGYSGFGELLWAPPSLKFLVALFTL

SEQ ID NO: 922263 - protein, 194 aa, Homo sapiens
MPISVCYTVDQVRASVPGKEDNRKINCFALTYAVLTKGRRPFSPQNFQNIRLLSKIEVNVTLFPQKKETRGVSEPQMFYFRVQSKQKIQPRGDGFEFCLGFQSLACVMVLGCSGKHVLKWLSNLLRVLRRNGLCLVSGSVHTGIALLVSSFQAPCSVALSQLPFTAGTVPPQPWEIQPFITTILLLVHRDALLH

SEQ ID NO: 922264 - protein, 139 aa, Homo sapiens
MQVCMSFQHNVKGVDGVISAGPPLPEMVKFKKSHDIKQKWEGKITFRGALDEDIFSVYEYRRRGVAQGFSGCVDSSHHLHLDELPFTFSFRIFLERTQPLYHSLDPICNSLIAAVLTRVRVMFRKTSRDIVCHSPLRTF

SEQ ID NO: 922265 - protein, 148 aa, Homo sapiens
MEPYFSISHPEEVASYMGYTHKNQGKEKLNSQSELQQVIEVVKSACGPFPNPLEEGISFDIYSTFIEPPTILDTEMKRLDQEQGPEESQPETDTSDMDPLVGFTIEDVKSVLDQVTDDILIGIQTEINEKLQIQEEAFNARIEKLKKA

SEQ ID NO: 922266 - protein, 144 aa, Homo sapiens
MRGNFTRPLDSSLCFYFKLPICKPNGCAGTISEIRRAIVIVCECACVSVSVCVCAVCYRGSRVLLSRVTLEEERQILHVESVTHLEEGLTCDPGFFLSMLSSNGMTKPGKINESEDYTGVCAICALPYFTELGRWYEEIDTKKP

SEQ ID NO: 922267 - protein, 253 aa, Homo sapiens
MESQGYTSQGASEVGSMAQSLRTRETDGCTYYRKYVIDFSKSEIIGIPISKNIEDIPLTNALQNRFVRAAPASLKNRVIALLCILDLTVGTTVTQLQNLNTVGIIGSRGGRGQVAALNCDRQGHLWLFTRVTVHWRMGNDRTFWGLLDTVSELMFIPGNPKHHCGPPVKVGAYGDQCYHQGLERCRGGDSYHICVQLSHLACTEDSNHVVTPIAAAVPEVVSLLEQINASPGTWCAAIYLENAFFSIPVHKAY

SEQ ID NO: 922268 - protein, 146 aa, Homo sapiens
MCNFSALHENWWLRIPQGKQKLFSESAVLCGAEQRCFSGSKTLLCVAGLILTTYGLDSLYERLEEDKVLSSLPQQTSLLTPIPLCFYKFYFFKMPHQGCDILPAGASEVSPVVGGRTAALGQAVLHDDFVATSLALGQMPWASRTC

SEQ ID NO: 922269 - protein, 148 aa, Homo sapiens
MLSASQQCLLVDVTVTWHRPGEEPSVQETNVCTGSPQGRVLARGPEAPDKAQCTRHTADCWCLTRREGDEVRVAPPRFARPRGDSPAWVGVVFGGLSPVKLGLLLPEQQKHGLWEVGSGGGLCCIRRRGSSSQLTIVTAEGGVGFMVH

SEQ ID NO: 922270 - protein, 117 aa, Homo sapiens [sequence omitted]

SEQ ID NO: 922271 - protein, 143 aa, Homo sapiens
MSRVTGTPACFNAAPSTAAKIRNHLSAGQQGMKGMWPEHTQEQYSTTQRREPCHPQQHGAGGHYIKQTSQAQKEMVHVLTHEQELTADVMEAKSRWSAGPTHKQHGERLVRGTNTQPDRSTRSTIDKPAGECQWVTYCVFQNS

SEQ ID NO: 922272 - protein, 470 aa, Homo sapiens
MGHVESWLDLPLDLTLDMLLDLPLDLTLDLPPDLPLDLPLDLPLDLTLDLMLDLSLDLMLDLPLDLTLDLPLDLPLDLMLDLSLDLPLDLPLDLSLDLPLDLPLDLSLDLPLDLPLDLPLDLTLDLPLDLPLDLSLDLSLDLTLDLMLDLSLDLPLDLPLDLSLDLTLDLPLDLSLDLTLDLSLDLPLDLPLDLPLDLMLDLMLDLPLDLPLDLSLDLPLDLMLDLTLDLPLDLPLDLPLDLTLDLPLDLTLDLMLDLSLDLMLDLPLDLTLDLPLDLPLDLMLDLSLDLPLDLPLDLPLDLSLDLPLDLPLDLSLDLPLDLPLDLPLDLTLDLPLDLPLDLSLDLSLDLTLDLTLDLMLDLSLDLPLDLPLDLSLDLTLDLPLDLSLDLTLDLSLDLPLDLPLDLPLDLMLDLMLDLPLDLPLDLSLDLPLDLMLDLTLDLPLDLPLDLPLDLTLDLTLDLPLGLLLDC

SEQ ID NO: 922273 - protein, 253 aa, Homo sapiens
MILLLTSQKDPTASTVTGDHAGTGVNPDSTASTVTGDHAGTGVNSDPTASTVTGDHAGTGVNPDSTASTVTGDHAGTGVNPDSTASTVTGDHAGTGVNSDPTASTVTGDHAGTGVNPDSTASTVTGDHAGTGVNPDSTASTVTGDHAGTGVNPDPTASTVTGDHAGTGVNPDSTASTVTGDHAGTGVNPDSTASTVTGDHAGTGVNPDSTASTVTGDHTGTGVNSDATAPSWAAPATTRTRSAAELEADSGRN

SEQ ID NO: 922274 - protein, 137 aa, Homo sapiens
MIVCQRTRLSVTTEDPVEPLGWKASRSHHLQPERPVPRGNFPPSPGAQDAGSWGSARSWAPPPGLATASCCVIPAASPQLQPTLRGRFCFCWMRRRRPSPRPPWALNAPETRLPGLAPAGPKAVPPPPAQSLRYFQL

SEQ ID NO: 922275 - protein, 287 aa, Homo sapiens [sequence omitted]

SEQ ID NO: 922276 - protein, 160 aa, Homo sapiens
MARRRELPCAGFGCKLAHPGYLIVSALGRFPGLRLGPGAPLPAAPSVFAVSGQGLLCCLHHTDVKCQCPIQTLVQFCCARLLGAITCTAGVLLCRAAGALPAAGPRAPSFFHCLSLSRALCPLTGEGHLAQGHRYLWLWNGVLPSAPPALCISWRFHPAQ

SEQ ID NO: 922277 - protein, 260 aa, Homo sapiens
MLMWMSLPLISHPEQASPHRPRPRPLHPESQGCAGNTSLRTEAAHGPGIPKPFCVHPGKYLPPDRGGPWPWDSQALLCPSRETPPSGQRWPMALGFPSPSVSIQGNTSLRTEVAHGPGIPKPFCVHPGKYLPPDRGGPWPWDSQALLCPSREIPPSGQRWPMALGFPSPSVSIQGNTSLRTEVAHGPGIPKPFCVHPGKYLPPDRGGPWPWDSLALLCPSREIPPSGQRWPMALEFSSPSVSIQGNTSLWTEVAHDPGIL

SEQ ID NO: 922278 - protein, 182 aa, Homo sapiens
MGCLWGKRSSQSTKGTAEHSREEAVRGTVVLGQVAPAQGRGGEVTTVWPPDAATRCEGLTENEIQKMTRAEMFSCPYSTPPEMLVTTVHVAVTPTARQLPALILGLVINITFLFSIATTTDKIGMSTKLGHWKPGECVQVPATNPPCAIGCSKSVQLPGPVTPDEAQGGRLAVLRPTKAMLH

SEQ ID NO: 922279 - protein, 171 aa, Homo sapiens
MLHCNFPELVIKHVSGYDFCSVSGRTRTDAAAGHTCRSSGCSAVHLVLWAVLGRAPIVPVSLRKTLKISKSDTPKPALRLPVRTSDCFAHPPADGKQKTFLMPLCARRPEGGLYSAQGLWKPGPLSKELPPQITLWGLLQARAAARPRQRDHAFWGCSISEGTHASRDPLP

SEQ ID NO: 922280 - protein, 121 aa, Homo sapiens
MAKRLRERKRRLVYSNPLIQARHFREHRRRLVYSNPLIQAKHLRERKRRLVYSNPLIQAKHVREHRRRLVYSSPLIQAKHLRECKRRLVYSNPLIQAKHIREHRRRLHIKNVPFPSGFHGF

SEQ ID NO: 922281 - protein, 175 aa, Homo sapiens
MDNEVQAEVVTDEDEELVGKWSKEGKYGVGAPTQSPYWGTASGAMRRGLPSSRPQNCRFTYSLHCLPGKASDTKHQPIKAARSENIPCKATGAELPKAMGADLLLQRDLDVKHGKSRRTAEHKQRKSQRQPACFYYNPLSRKLTHDSQDVGRAYKYRGVFSPVEKNTMIDFSTQL

SEQ ID NO: 922282 - protein, 157 aa, Homo sapiens
MGWSSVPVALPGFGLSSGPAATTPSIIALVGTTGPPTPQLKQPISTVQKQWVQRLEGVLGFKNIWSTEIPQAGRLKECVSLAEPGVFNVLRMKEVHANLSMGDHKWAWKKHHQICQAVINEVLTLGPQEFRDAGVWTVTGQVQLCCGKSGTPNGGTD

SEQ ID NO: 922283 - protein, 127 aa, Homo sapiens
MLYIKLYQNHISEHLKTGMKSDSDELYYPLGFIILIHSCLSFCKCFLEYILLNRNISFISNKSLCDFSPWECAYSLGDAVTALVRLSLTVSFNDFSGTTDMLCHSEGDVGCGANATEYDIPKYATLA

SEQ ID NO: 922284 - protein, 136 aa, Homo sapiens
MRSQPSNSIWGHFTQAANIVSRKAISVENVDLTNQLFKVIIVCRKDYLLKEVSCLPHRKPITETMSIAREEGYNQVQHPRRTDHTQICLLNQLKLEIYIAKKKCTTCRKTAIREGVTLLSPSGTSQLMAELRGFLD

SEQ ID NO: 922285 - protein, 137 aa, Homo sapiens
MTPWVISSALPTSSVKAAPSTSELLQWRNTTDLDLPVQLPPRCQNYLPKKAKTVMPVSTIKMGHGKCYFYQYTEHSWEYQQRVNISGRFIFHVKNEGIKQSDSKSPQNPENLELYDFVFAMPPTLFNPNLCCTHSKL

SEQ ID NO: 922286 - protein, 150 aa, Homo sapiens
MSLVSKQIVTLHTESVTGGTHKQAMRKRMMQFGARIESESDAVSAGPQPPHGALALTAPARPFPGSLTEHVCMTLKIVQDYRSPGAMGSTAGPLGSNPVPQFSHLQDRTQWHLPRESVVRFNGDDEVLWEIKTCAWRLKWSTFETDISEG

SEQ ID NO: 922287 - protein, 135 aa, Homo sapiens
MIYRYKNKPGTKMKIKKKKEEQERQPTCKTCNSHTVLKSIYAGGSANLNRLSEDPSLCAFGRNAGSDSETWVLTSYGSTSFNTSKAAMLLCMKVVKKKIALGIVHDRVLCLKMASATSIKTKSRKAKFVFEDHAT

SEQ ID NO: 922288 - protein, 139 aa, Homo sapiens
MSWLGLDLPGVSLPEDYVTCSLRQPDATYKERLLQAFANTDKENRRKEKEAQKSMNEEPGTYAAKWPAQGHTDDSAELGLVSRLLLDSLSSAHFSRSGQHPRSGGEAQQTTSENHFLGGEAISLQFRTTSLYPSHLFGV

SEQ ID NO: 922289 - protein, 143 aa, Homo sapiens
MGRHGHSSNQAVFLAYGATPPEAGATGGHPRTGRIKSPPRKADLRGRGLEIPGDIIEYLDPANSELPLKFSVNELISSLLCLSQFKLDFCNIQAVFSPIRREGCMGCRKQRVTCGYFKEKQVMGPEPESHFPPGPNSDTGDYN

SEQ ID NO: 922290 - protein, 172 aa, Homo sapiens
MTMYVLSAVTLRKQVFIQQQSPWLLSGFDKCTWHYFSLDADHCPDGHDFCGPDVVWPEGQQGAFRPLERIPNYFYKTCEGLRGPGSHQLSLPHWRPLHSAPSSGAQNTCLDLADAIPRNSSQRSLPLSQCLHFPEPVSLMFPSDTKDRLGLVDEVRTAVLSEHHQDASQITV

SEQ ID NO: 922291 - protein, 136 aa, Homo sapiens
MIVVGDRGGEVLPCYCQFDAGPNLGLSQQHWAADLGQLGLGPQEVLTSEPGGSARGPLTQMFCPHIMWQHNPIRGDQGSCPHNCMQLTSNPWLSWQSKGIGLLASAASQPFAGGTHISLEHKNRRIFSPGNNCFLE

SEQ ID NO: 922292 - protein, 151 aa, Homo sapiens
MPTIPDKSFAHFMCQYLYSGLCILGCIFGFHTVYLQQLQAFSILCWLKQSQHFEGRNIDPTSQQRVHQGHIVRRPKHSAISKHMAPFWCLTYSTSGLKSPVPRNSLESAAEIVWLGALLAPETQEGALPLTEAPEEREVCVPAGRISRDSP

SEQ ID NO: 922293 - protein, 136 aa, Homo sapiens
MIREERCWSTDYGTTYEKLNDKVGLKTVLSYLYVNPTNKRKKEAEAHRGQLPHPANSTEMCNSPGQTRCTEENDCYIDLGLKFGCMQGPEDNGKEDVGQVETWKPLCKGPFAIRLQMTVVIVTGEHFVDSLAGDLH

SEQ ID NO: 922294 - protein, 138 aa, Homo sapiens
MLLSDPEMESSILISSDEGATYQKYRLTFYIQSLLFHPKQEDWVLAYSLDQKVNKYYFHLLLVIQSHHRQISDPASLPQDTFPECDASGMGEEIGFRPGKCCRWGLHRSPELRPESKEFKDDFPVEEEAQWAVIVAVL

SEQ ID NO: 922295 - protein, 151 aa, Homo sapiens
MRGAQFHIQVKLKGYLLFEVLLDLSSPYTFFLVRTSIALKKWKSRPLLAFSVNQDKKEGAYRLSLKHVGQAVATGSGNEDAHYLTCRIQECAETTRSGPFARSIDISSLVVQDEYIFIQGPSPLGRAQTSTGFSDALNPSIGLPFYSTGAV

SEQ ID NO: 922296 - protein, 147 aa, Homo sapiens
MTHYHRNLCAHPPPAVPPPALGLLSWLWKTDLGLRNTVQGTTSSLDTYMMSDFGQMIKPLWLLEHKHCDPGTANLITKRAAKQLTGSSYSMHMLDKGKNTVIVNTECQLDWIEGCKAWFLGVSVMVLPKEINIWVSGLGKADPPLIW

SEQ ID NO: 922297 - protein, 167 aa, Homo sapiens
MINCTIKNNLQKEEGGGGGRRRRGGGGGGGGEGRGLGGKGGREEEGELLLSEGKLLLVGLTDRNGEKGICQVNGYVPGSTEFISSYKGGNADDSMGQGGDVATTGDAEAVSSGKKGSSEFANSVSPASSAIDTYAMTSNEQFLAQKEGTVESEELERNKVLVDMLNH

SEQ ID NO: 922298 - protein, 134 aa, Homo sapiens
MEVTKEILEEVCNGYLDWVLVLKYRLGSTSRLENECGEIGDEGVKDLQPHPLTVTSLQRLPLLNGAASIKIMPHSWNGPHPVTNLMDLRTSRGQSAMDTKQPKEIFMRVSPQERRKNLKAHQMRLECLRCPSPQ

SEQ ID NO: 922299 - protein, 312 aa, Homo sapiens
MLRFQRLSMTEECTKVSPTKEYRKNGLVMKIKHKSNLLELFTVSNGDLLASLTIPGPKVLPGFHDIHAFLHFAKDYMLAIQPLSRGCADETLETVCVGSNICHGQDARTFMEKNELVQKAKLAEQAEQYDNMAACMKSVTEQGAELSNEERNLLSVAYKNVVGARRSSWRVISSIEQKTEGVEKKQQMAREYREKIEMELRDISNDVLSLLEKFLISNASQAESKVFYLKMKGDYYRYLAEVAAGDGKKGIVDKVCSLAKMAFDEGIAELDTLNEESYKDSTLIMQLPRDNLTLWTLDTQGDKAEAGERGEN

SEQ ID NO: 922300 - protein, 144 aa, Homo sapiens
MNQQGGLQTLLFFLLLELPGGEAKSAGPQRLWSPLPLGAQAQGDLDFVMEPLSGVIGVPAGKPHPLKKDEQLRVPVLAAAPLTRSSKGLDSRQPQPVLVTPHLRSLNRITLGDTEQNERSKGNRVHQIELVLFMTCTLVFLYSL

SEQ ID NO: 922301 - protein, 134 aa, Homo sapiens
MDSLGHCFRGCKPQALVVCMWYWACRYTEVRNSGLRTSTQISEDIWKCPDFQAEVCCRDGALMEDVCYGNVEGKCGVGAPHRVPIVALPSGAMRRGTPSSRPQNGGSDSLQHAPGKDAGTQYQPVKAVRSGAVP

SEQ ID NO: 922302 - protein, 134 aa, Homo sapiens
MPPQTHTPSNCHTASMRRREQLWPFGKPRPRGSPSQGCDSLFGAQQFLVSPSFQEPPHSPPSDMGAHRGSRVWYIWSSHSLAYNQHLCGRLELPTPPQQPAYLAVRGGWTPRLLARTSLTTLRLARPWQLLAIS

SEQ ID NO: 922303 - protein, 125 aa, Homo sapiens
MYCPRSMSTVGQKDNLSLPPAELQLRFRQAAPLLVPLLAGLSTAGSAAIGMSALIQGETGLISLSQQVDADLNNLQSAVNILHTQIDASKNEKITPPVPKYVQPESMANYSNYWGTLASSFATKG

SEQ ID NO: 922304 - protein, 152 aa, Homo sapiens
MDNEVQAEGVSDGDEKLIGKWNKGLSCYALAKRLAASCPCSRDLLNFEFEKGDLGYLAEETSKQQSVHQGVKWSCKKRATNLQTQNVRSTNNLHHVPGKAAGTQCQLVEAPMGSVPWRATKAELSKALEACLLCQHGLYRVSSHEIFLFKSV

SEQ ID NO: 922305 - protein, 173 aa, Homo sapiens
MTFVATCMALETILLSEVRNSLNLIGQNQGYAMWSDLLNGCEQNADSDMDSEVQAELVSDTDEELIGNWSKVQSCCALTKRLAALCPCFRDLWNFELESDYLQYLAEEISKQQSIQGVAWLLPTAYGHMSPPPPPPPPPPFLLIFIISLPLNAGFFCLPTQGTLSNMVDTSYM

SEQ ID NO: 922306 - protein, 139 aa, Homo sapiens
MTQKSNFQLRNSFESERVYPLRDPPSLCFIHNSSSDHRAGALKAHCHQCNLKRKRFIGLTVPHGWRGLTIMVEGERQKVASCILHGWQQAKRACAGTLPFLKPSDLMRLIHYHGNSMEKTHPHNSISSHWVPSTIYGNF

SEQ ID NO: 922307 - protein, 141 aa, Homo sapiens
MEAEMAHLPGLLSWLLSACGFFRQRVQATSGSTILGSGGSGPLLTALLGSAPAETLETEIVIRRDIPGEVMVEYLKFCDQDHFLLLKCDRKGRVWRRLCDVRIFHEHPVHPSMSILYMSILCILRYSISSILNKHLKAIKV

SEQ ID NO: 922308 - protein, 218 aa, Homo sapiens
MTQSAVFCYSSRKWTKTSLQVPCACMQTPVGAEREWLVEYLACRHVKALIILFSKSPPWVVNNSPAEGHLVTAATSVELSFGQHNTHLGSQCKGRHSSFPLKIIINMDSFPLCLFTFAVEIDHGSSHTIQLHSCSGCREKPITTQRHPHTNSPHADTPAPPTHRHPTNRHPTHHHQGLLSVMWFYARVRLECGTLLLSRVCFVSLKISAFTLVLVSCA

SEQ ID NO: 922309 - protein, 184 aa, Homo sapiens
MTPQPGWWPCGLVCIVKENSFCRKDGGASSWLPVTDVASMFLLLSFPFPAQPGLQLTASASTACVLAFLTSHCQGPPPSFRGGHPHLKMRERPGVRHKQRCAASSATVCNSSQVVCSYTHIVSLFLSHPCSRTSILVASWSLHSCHLKDSKGSNPTRHTSLPDCTAEALAGAELDALLGATRPL

SEQ ID NO: 922310 - protein, 242 aa, Homo sapiens
MLLGSLFWRPVFLGSLFSGSVCFWGLCAPGVYGLLIFICFWGVMHSWGHADFADMLGPVFRFLLHFPLLQCSLFIMPALLTHRGRGEYFWQLASPCDDSQGSFEDLSLWPQWLDGSYSAPNSCYSLQQWISNEAELGLNGNCPLNGLNLERLFSINFKKQGDTKLFPIIHFPYMPGCFQTSSKLVGKLRPWLGFRDRCLECRDTFCRFLRAPTAVNSNESEDFHFAYWFARFSCIIASFLKG

SEQ ID NO: 922311 - protein, 150 aa, Homo sapiens
MSCSPDGLTPPLSKRSCLRHESHHVAKDELGKEGVFVSVTGYKEKVWKILLDQLKITQFSRACIPSKLYVYVQVYIRLKTVDKSLLIHVIFTLWPSSFPAFSKGMQCFRITVSLDICSRNYPAHHRSPWYPFAEVCWLFLAIYFSMYDLR

SEQ ID NO: 922312 - protein, 166 aa, Homo sapiens
MSLVSPLSVLEPEPCSSLLTPLLVIPQAISGTGHTATCGSRRAQTCLILAVRTRTQLSSLGEGSTDPQGGNIQDRENHPDRCWMILAEATDLPRFVNENWCSQLLRRRLLSQASCSLCDIKRVKKEKRKQLQNRAAALGRNIPCVSVCIHPYGMARRLLQACPQPS

SEQ ID NO: 922313 - protein, 183 aa, Homo sapiens
MPICLCQTLLVVDDGKFGNKPRTLCTGPAQGSSAALARGNAFDLCLQRGQDQLHWLFQELPHRTSAPLWILSQPRLDPLNRRDLCTQYLYISRCPGWSSRELWSCGFGQKQMDVCRVCIVLARAACLHGGAFHLLAKLQQTLASEQAGQERSCGQTAIAKEGSGARRVPQIPTPGQFVTKKQV

SEQ ID NO: 922314 - protein, 140 aa, Homo sapiens
MSLSGRVTRTVLCTLSPGEICLTGGPGDLADKLQAFQPPAENPVRTGTLVAGPVAALQTYAYGSYIPAPPPPFPIPVSPRELPTGIDNVELWSAFGKREEQEGLAVTRWLLSPPQKPEGKGAIDTVHAEQALNQREELGI

SEQ ID NO: 922315 - protein, 150 aa, Homo sapiens
MGTSLDQEHSRHPAGSGGSKSAAGLLRRQTAVVDGERKLSSSCNKHGPEDHDCHPPTVTFPKRSICSSPSHLSSPQKEVHCMAKKPPWALAHLQLPHPHLCPHPVWPDLQPCSFPNTASGLYVVGPAQPQPRRPLCRAFIHQTVWILYLL

SEQ ID NO: 922316 - protein, 134 aa, Homo sapiens
MRGKGIPCPVNWGEPLFWGRSRTWFQGYSPTAPLPLSSTFACSQAARSVTGETKQDPCPPGLWLALLLDKSSAAEPLWPLLEASWNEQMAVQSGSGRSCLQQGSATLASVPVASPPQPSPPTKAQASGRGILPF

SEQ ID NO: 922317 - protein, 181 aa, Homo sapiens
MVNPTMFFNMAVNGKPWGHQTALRAGGGFTRRNGAGGKSIYREKFDDENCSLKHTGPGMLSKANAGPTLDPYPAPSPVTHRGTALPRGQLAWTKNGEPEQWPVSHPLLRSLQGGSASVQQTSWPQERALGRGSPDSKLTAARPFSLAQATLAMGTCLPHANQGPVWDGELEMGCEDSSLSP

SEQ ID NO: 922318 - protein, 185 aa, Homo sapiens
MYPTQDSGHPWATQSWRVTPGTSSLRVAQQPRGLLESQDFWTRDPEYICQLLWMPVKPRLKWNHLERQGSFVRVSSHSVARRLAQHQLKEKLWVPGRVGEGPLGTMPGWGDSHVGDKPLVVFGILPRGKRCPSWLQAPVAVPEDQGWGCRHEQDEGSTPESRCMHRAQQQGTLIFPICNSVPIKR

SEQ ID NO: 922319 - protein, 133 aa, Homo sapiens
MLVVAWALGGPVAKMDEGERKGFQFSPIQYDTSHGSFVYGFYCVDVCSFNTQFFKGFNHEGVLNFIKCFSASIKIIIRFLPFIPLMYGMKGKNHMIIWIYGDVYLYLYFVGNRLLSLVSENPFSHSISFDWGV

SEQ ID NO: 922320 - protein, 138 aa, Homo sapiens
MLNVSTVDLPCRNGTPGGQDPPALFIWFTQLQSQAQCGGSLPVEMWFQLCRANPGKQKHTSKLAEQPSMGQGPEESAQHNRNPKFPKELRKPKLQNLLTSHGVLSIEDRIHVSTATRNPVVLLKIFLMHSFNLFLYIH

SEQ ID NO: 922321 - protein, 277 aa, Homo sapiens
MALLSHSIHNDLAFPAVVGWKHQAGRNSRGLMEDGMMTTEMTADSLTWGMETKLTGSSFAMFATNWPFSLTTVLGMTSVTFNSKLSMEMHGNKSQTPAKLPFDITFNYDLPDIFQNFVIWKQGDGRVSTFSPAVNSPLVFTILSSLVLEEEKELWSGQKDGHREMTTVTVTLKPECLYQGVSDVTTVSSFFPATVPASQKLIFSTSTSFLCCCGCTPEPARPNPSPKESTLLQFPSPWPEDTVFLIERFIAAKRLSINPSGRAEPVSQRKSVLVIEH

SEQ ID NO: 922322 - protein, 160 aa, Homo sapiens
MALSICGPRSILCPSIPRTPIAEAKEWSGARSRHVLPSNMLGPGEADITLEESSFTPTNEGISASHTTWTINQIQEIHLTLQLSAHISRWTCVYSYLYLHLDSNFTCEMGVGTYSMDVMDFSRQGLSKLGMVLGKGTSYDSGHKKLSGSLRVAHGTGLGT

SEQ ID NO: 922323 - protein, 149 aa, Homo sapiens
MASPAWVPSLACLRSSNFQTFPAGPAAPCYRGLPFSTCQCRNTRPIPPPPPPPQPIQCEDNDDEGLYTYFIVRLQYTIQDKINCLCYWQGFWSIVDRFLESRKLQGILTVWVSAPRASASFKCQLYSILHSKKQQPLGHLELSANTEYI

SEQ ID NO: 922324 - protein, 204 aa, Homo sapiens
MDNVAAYYEAVIKELGEREYCQITLLNQGPNYPPQPRTHSYCFEEALSVLFLIRLPELDIHLLQPCAIPGTRNVQRKTSALAKLTFVCVSDRQQITNKQDTGQAAEAHTLWDFSLKGPIHLFGRIFAGLHGKNIVHLWLGTVLPGPAIYSRTMQNRPRSMRPQNHHPVSHPFHITPDMVWLCPHPNLILNCSSHNPHVSSEGPR

SEQ ID NO: 922325 - protein, 145 aa, Homo sapiens
MLSFRSLWKGLCFQGSFVVIFPPAAFCSGLMAGPSKKADIHSLPSSTLFTTFKEENKASSCVMWAELFGILCFLLHKVKTLKAINSPTRSPTQPLTHQLTHPPINSLTYPPINSPTHLPTYPVTHTLSHPPTHALTHLLTHPSTR

SEQ ID NO: 922326 - protein, 135 aa, Homo sapiens
MTWKGQGQSCREQGLGVVMLLLSNTIRIHQAFSSFLLPAFAGFLKVLASRIPNGRGMHPDVHSVLPRAIQEQGPVVETHPELPASWAPYSMRVAELLVLRSWLSWEGGRCSKQSLSPRGDAARALPQSEQGLPAA

SEQ ID NO: 922327 - protein, 117 aa, Homo sapiens
MNSSDTDLERSRLGAEPTVLLSTELLNTIRCSSLPRHRGIGLGASVQKLRESSGPLLVFQLKKDGKAFFSCPGSNLPEVTNDGLHPWATSRHSEDKLNGEPTKLEFAFGLMTMERQW

SEQ ID NO: 922328 - protein, 137 aa, Homo sapiens
MENPQSPHPPPPCLQGPCHCPAQGQLLSLCALTYPLHLGFGWMCGHQKLSAILLPTLPIEERSLTPRLSEQPQGSSQFGPHIYSFIQSVSQTSKPAIHSNKYRLIIPNMPDTFQARGTWRTLGDNAEGAKANSDSAD

SEQ ID NO: 922329 - protein, 132 aa, Homo sapiens [sequence omitted]

SEQ ID NO: 922330 - protein, 150 aa, Homo sapiens
MFFCVPCRVSSLQQGTVSQASESVESEDRCGAVGSHQVKAPRAARPSPEEPMVRRTGRPARRCDQATLCWEFSGIRLKECALAIRAQSCSHRNHRMEQGSSWECLCGPGLRGFQVQERRGQLNKIMCSLHAFIPTDAKDSDIDSIQFVPY

SEQ ID NO: 922331 - protein, 128 aa, Homo sapiens
MKSINLFVPVGLLGKEIIFHIIFNITLCPPIPKVIEREIVRLFVHSIQPSLLSSALCQVPGRSTFPNSHFMLVDIKMSFESHTQFVTYQSFYEAVHHGRKTSDIEVKEVSVCILALTFVKSYAEDEMP

SEQ ID NO: 922332 - protein, 154 aa, Homo sapiens
MLVCPCDSSSNILLQMAQGFLQFKEENLCPINQTIPQGPFSGKQQDQAGSAHPRNTGLEVYSPWFVLPGERKRHPEWSLQSQDLSGAALMKSPGCYPMPSNVPGVTIYALSQLHTSLTQRPHLTPTSCFSRNRNNPRLLLKDFASSVSEVSSER

SEQ ID NO: 922333 - protein, 138 aa, Homo sapiens
MLCALWGWHPGLSCPLASRGCGPWEELAGALKKEEREIKMWTLLVPFLRGLAKALTGLAPLSVPLPGPGWQQLPAATSSQGFTIPCSLPHSAAGLVNSTSRRPSACICQNLTAGDPSLLSDEPSLQLVTVAIVLSKGH

SEQ ID NO: 922334 - protein, 134 aa, Homo sapiens
MPGGNWGWGEDGRSPAGMLPGSTGSGVPGKDDKVTLSHADSETSQLCVEGTLHTWGLSVTVSLHAAFSLTRREKPVWTQRAPILNDNRYRIHVNTSIKAQAVFSKPKPFLSEIRPIYTARSTGLIFFKLWTQRG

SEQ ID NO: 922335 - protein, 164 aa, Homo sapiens
MQKHALVKRFSRVLPCFSASGNMHHAGGRRPSSAILGPRQPCSGDKQKPGRPENVICSLPRLRDCRRSIFTTSAAGRALPLFGIQKATAKNTHLLNILGPALFPKLHLQPAFCAAGTPPGDLQRPKNMGGVKARGVSSLLTYDLCVVWGLRQQQSRFCPGSLIN

SEQ ID NO: 922336 - protein, 211 aa, Homo sapiens
MDFIFLYSFSRKDKHSKSTWWRLQRAVPMGNLGASRGGVVESWGQEALVKESGGEGKPSSPNCLSPRGSVGYSKWHTNTEGHKGCAQGHPNYSFIDGTPGTILWVGLELPEKVGEAGPCSLGWTCAGLAADICFLKLVLSAKHDPFVQHSQTVHFLGHNVFVIVGPYAEKSEWSWTPVQAIFTEDKNFLNPPLSYKEKPSDVFFTSQSYFL

SEQ ID NO: 922337 - protein, 135 aa, Homo sapiens
MRKSAEAPRCSGHQEGYFQSCFALTETLRGFTCTIVKGKSFVTIHDIVRDTVMLLPFTELVRALHLCLISVLFEPLLVMSTMKEKVMIGGRIEIADNFQRRMVNGCEMVNTCVQVNSVSCAACAVLVIANKSHEI

SEQ ID NO: 922338 - protein, 130 aa, Homo sapiens
MKHPAWQHQRRRLGFHPWVEEQKMSCVVKGDKDWFHSHDASSAWLFCSFIVVMTFQKRTKKNAALKVLTGSELTLRLWHAEETSYLTFFHSFTFILRMCPGQDSSSWGCPPEQGKHHPSLRELLVGILFS

SEQ ID NO: 922339 - protein, 176 aa, Homo sapiens
MPSSVLPCCEDQYCKDKGCLHGHSWALQKPHKHRHKEDERGSTRESALKETRRQPLVCQGKQTSARQAGGNRFTARQDEQRPGRHGSSENTPVTPITHAWRPLNLHVLGHQSQTFSTRMVLVPPATWSCGWDPRRARTRSGSTIMGQRQALCLVWLQRTFQKRLLTLALDFLWRYL

SEQ ID NO: 922340 - protein, 137 aa, Homo sapiens
MQALAWGLYFNPTTYFIFVCLSSDPDNSKASCTSHAIHVTGDLPTGISVIPKLFCARCVMVTLDGHLWGGGKAKGSIADSKHPPYPPAQAPSASPSANDARDDVIARTHGRSPRLSAQTAAEAPLPGTTLEVPMSLH

SEQ ID NO: 922341 - protein, 292 aa, Homo sapiens
MLVHPGTRCPDLVPPPGDWRSETLPQRAFPPVPGARENRTAVPSGQCLGCRLGFLPPLYLQKVGPATASQRHQEAQAGALSCWRCWLVLVVLRWEVRLSRHSSDLHRELPLCRKTHDTRFINEDAACDNHDNDSDSHSLSSSVPLLGISSTSTTVLWCQAFLSLFGDVQAEAQKRMPGEQLRSGVSHIHLTPKPTLVPSVTPLPTSMGGDDPGLPTCQVPHHIPAAKDSSHTRKGEESPLPCREPSKGLAAMAVHGFESSHGPGTLRAQKHCPHLQMRKPGLQGACRFHTLQ

SEQ ID NO: 922342 - protein, 133 aa, Homo sapiens
MFWRTTDHMYCGRSHKIKMELKNSYHLATSWSSEHSTTHWSCVCGNAGVNKPAALPVRFRYTNTYHCVTIAYSVQYSNTLYRVNIPDAFQWTRELMASVIVDGPTNGPWLYTASAACREWNFPGSDDKQTLTA

SEQ ID NO: 922343 - protein, 175 aa, Homo sapiens
MQLALLWCKRNVLIARRWLAARLLLRQESGHRGDSSSSWHPPCGAQPALHLVGPARESNLVPFSILEALLRIKNRSNDGKESERTAALSPPSCQGLNEPPGSFREMRDAFPSRSDAWPRNGKSRRGLVAPWGGPVSAAPTGCQCPCTHDGNLIGQVSDETLRTVTIGTYDNLGCS

SEQ ID NO: 922344 - protein, 138 aa, Homo sapiens
MCGERNCICEAGQELLSKATPSGPGLGCAFTVDCSPGRQQPAEKPKLFTAVRSQILPTTTSMGTGKREAPPIRFYWGLLGHRLGGRLISGSQQPAASAGRNKDSLWLLQPHCPAMLHDGGECLGRNIQANHVSITEPT

SEQ ID NO: 922345 - protein, 136 aa, Homo sapiens
MIIYFVQTRSVLPCSEACRDSTARGGVKVKLHTAAPVTLSSLSILDESLFEKSQQVIRRHPEEGTAVLEDGISMRVIAPEDLPMGQDVEVGDRAMGLLTRCKCVCAYECVHVCVKVCMFLYERMCVHACMSVHVHV

SEQ ID NO: 922346 - protein, 150 aa, Homo sapiens
MPLFHPQNFGDSQRPRCPSELLLSNLGIARGVLTESPVQLDSRALFPEQGRRKQVGHRAALTCQTPPDRSGKGAASCCHGGKGDGSECPVSTAQQDLSSASVKEGGGPTHVSNRGSHNESEQGGYTVLQNAGHTKGYIVILVHGISHMMG

SEQ ID NO: 922347 - protein, 137 aa, Homo sapiens
MLPAARLGAGSAESLMEGMAEGPMQQGPQGVGTARAQQWVTHLGTLWETSLGMYRWGVLHSFVSTKLRYKDPIENPLKSHYAPGTKCSAQCTTTHICVAQNPRDTKERLIGQVGHTALGFQPLSWSPPARRPRLSPV

SEQ ID NO: 922348 - protein, 294 aa, Homo sapiens
MHASHSPIFADCPLLGFAQLALLALSSGRPQQVCSFITAAAQEVAVWGQSRVPPHQGFVEIHASSPSVSGSRGEAAAAASNENERGICSHQYCLEEKRTGPGGVFREFFQTGKVLGNRLSSQPTPKRPGCGSVVYQNCFDHKYLLYIHEWEQHCVHNAHCASARVPNHIQYDFLAAGWRLRIVTAVVVYLSLVYCELEHLPPPLESRNWRKVMYLGNISKCEMSLDPYHNIAEMVALQQWVSTRADFAPICIWWVRPRELPHLTMYRTVPTANITWPKMSAVLRCAYVFYLKYI

SEQ ID NO: 922349 - protein, 255 aa, Homo sapiens
MRAQETSGPQIESKGWQVEWQHGAGSGTASRVSLEHVARSSSAPPGTAMKPQEEEEKEVLMTEPKEEQVLMTEPQEKEKEVLMTEPQEKEEEVLMMEPQEEEEEVLMTEPQEEEEQVLMTEPQEKEEEVLMTEPQEKEEEVLMMEPQEKEEEVLMTEPQGKEEEVPMMEPQEKEEEVLMMEPQEKEEEVLMTEPQEKEKKVLMMEPQEEQVLRTEIWSHPTWNSDEATGRGGAHDGDLVPPHLEQRRSHKRRRCS

SEQ ID NO: 922350 - protein, 205 aa, Homo sapiens
MDSSPGPRPQDLGRGHITKGESAATGSLVLARLRASGRAPQRQGVHLTPFNPQHPALRGGSLQFVIQVLFSGQAQSPTGISCAGSWKSALRHAPEQGGSHERDHLLLLLTMAGAWVPEVTRPAVLLIFDTGSKKPMLLQVSPDCMCKSVIVPVCMSVSLHEVSVCHYAFLFVWQPELRPAPVLEQLVESRPMGPWRKRGRASVLW

SEQ ID NO: 922351 - protein, 139 aa, Homo sapiens
MVSQPETRGRNLRTIVRVDPPATEEGGSLQPWGQLSLGVLMREEESITITQKYLTVTSPHLHPTPSLASLSGVFLKCICLVLSPLRPYRGDPSGDFLDPKETKSTCCFSCKSTKSNPGENEESPGSGVALGEPTYRHLV

SEQ ID NO: 922352 - protein, 159 aa, Homo sapiens
MTYLDKTYSGNSWASVSRNQQGESRVIVCISPFSHCYEELPETGKFKKKRGLIGSWFCRLYRKHGWGGLRKLPLMVEGQKEGGTSYMAGAGGRAQGEVLHTFKQPGLLRITRTARGKSIPMIQSPPIRPFLQHWGLQFDALGHGVRLVKHKNRPEFENQ

SEQ ID NO: 922353 - protein, 152 aa, Homo sapiens
MFCQVTRSQGVCSYLPPAFEEKWLKSPCLRHVLREGQACFQSLGFYFAGLGLEGCSCGLGPSSVTSVTCIAFDMGPPGGPMTSPVKVMTALLSQRCCEDELIASSGPGTWHMLKEQFLLLMIILGSAEMENQAKRTQMWQSSSKQLFWQKPK

SEQ ID NO: 922354 - protein, 138 aa, Homo sapiens
MEEVLKQLQVQSPEKEDAAEVRALQVQAGCLEAWLHSSAKDLEAAVSGDLQVQAGCLEARLQSSEKELEAAVNAGLGLSSQLETPTLIPRRLLVRPRGLLHKEGEDALPAGVPPLENRGPQQVTCSEMWIDLVLARID

SEQ ID NO: 922355 - protein, 157 aa, Homo sapiens
MAPQLVFGCKQTAATARLPGYQYLFFGVMARHLEFIARTVMAQEGNVESAHRTLNRILTMDGLIEDIRHLPYVVSHSTLCPGRLNCVDNTNRSPTGFQLGLDNGEPQWIRKKEEAEMVLRIPGDLAGSKPAASGNTCQGSLVLSYTLKVAAFTSSMK

SEQ ID NO: 922356 - protein, 248 aa, Homo sapiens
MAIFPVLNRWKPRLCGIPGMSAHARLAASPVGSSAAQAETTTGRPARVPTAALTNQARCSVRVPEGLGRNSCCPSRLKASSEVAPIPGGFPTVFSPALYLTPVFPLWATYSPPQYPTHLQIENVLAYIAPFTIAPGSQVEYPIPPPRHMAARVARAKEEHLESLTGLFAARDPDDLRGLHVPAWQQEWLGLQSSDDQTLTQMQAEMSSNMESGQSTVRHREECQSQPESDWKDSAGADADLNGDSKCE

SEQ ID NO: 922357 - protein, 210 aa, Homo sapiens
MGRNQRRKAENPKNQSASSPKDHSSLPAMEQSWMQNDFDELTEVGFRRLVITNFSELKENVLNHHKEAKNLEKRLDEWLTRINSVEKTSNELMELKTMARELHDACTSFNSQFVQVEEKGSVIKDQMNEIKQEDKFREKRVKRNEQSLQEIWHYVKKPNLHLIGVPESDGENGTKLEDTLQDIIQEYFPNLASRPTSKFKKYREHHKDTP

SEQ ID NO: 922358 - protein, 208 aa, Homo sapiens
MFFLSLWIGIFCILHINGITKYVTVCVWLLSFSITFSRFIYIKQEDEVSDVQVLTSNLILLSSSRPDCESTSRTRELFLLHFGSNNRRLHLCRGTVAPSEGCTTFDDQHPSSFSGNDSNTKKTKDLLNGFDQNADSDMDNEIQAKVVSHRVEELVGNWSKGDSCYVLAKRLAAFCTCPRDEQNFELERDYLGYLAEEISKQKSIQEVT

SEQ ID NO: 922359 - protein, 150 aa, Homo sapiens
MEVEVAQLTITPSDPLAKCLLPVPVTFCSAGLEVLVPEGRRLPLGHTTMIPLNWKLRLPPGHFGLLLSLSQQAKKGLTVLAGVIGLDYQDEISLLPHKRSKEDYAWNTGDALGCLLVLPSPVIKVNGKLQQPNSGWTTNGPDPSGMKMLG

SEQ ID NO: 922360 - protein, 156 aa, Homo sapiens
MRKKKREEKGSLFLWSMLRVRSPGDSTALQGPIISLCLPKSDQVVRYIYEESGGAVIQEQRIPRQSSGPPQGNNKYGSQCLSSELQVPLGLVFARVLLLFSCEHQLLPMDTMRGPSFLHSVFHSELKSNPNVKTHCQEQILEAIMQASILRKIYIT

SEQ ID NO: 922361 - protein, 139 aa, Homo sapiens
MGSRNPQLLWESSRPEKFRFSIRRSVSVTGQLKGSFSKHTNLLYSLNGYYQKAKTDDAGKPVSENWYTAGGNVNSYSHYGKQGINLLGTSGNRPVNGFNPTVGYLPKRKEIIILEIYLHSHVYCSTVHNSQDMESTIPL

SEQ ID NO: 922362 - protein, 151 aa, Homo sapiens [sequence omitted]

SEQ ID NO: 922363 - protein, 135 aa, Homo sapiens
MNHHHCQIAAAAPRITVDMHSAGVDIFTPILGSFSSSIDLAGGSTISAPAGTWGQGSLGHAVHSSQPSRVPVVDLEGPIVSKAAPNLAEVVTTEAEPLLQLTAFPLSVAETVQLSLKRSSRPLQWVSHPVPQPLP

SEQ ID NO: 922364 - protein, 263 aa, Homo sapiens
MQWIIPGKRAHIAKLQVPPLQMAGSVPCFCDGPDAVPAASHPLPSLPLFLPGEEEEEEEEEKEEEGEGASTSSPLAASSLWPLSQKQALSRSCLQGSLLLLGSKQSPSADHPKTSGDSTLPFLLTAVTQPLTPVYRRTCKDEPLSVSALEAAAGASAVFLLHTRACDLMTQGILALVTSTGCASANALQSLTDAMHIPHLFVQRNPGGSPRTACHLNPSPDGEAYTLASRPPVRLNDVMLRLVTELRWQKFVMFYDSEYESPM

SEQ ID NO: 922365 - protein, 155 aa, Homo sapiens
MIIKRHDYPDKRSSSHCTQSNVAGLLARFVGMRQRLQSQVPSLPPIFVRCSQSWASFPCQQPILLVIFSGFRPSSRGNIEPHMGSNPCSQISALSAPPTIPSFADLYYPISHSCTNVIPMMNPLFHITPKSSASWIELLTDNQSKQIAEQLPKPS

SEQ ID NO: 922366 - protein, 225 aa, Homo sapiens
MLYLGIPDKGTRYRDNKGNEEKEVSAFQTEYEKRLGRRQGIAKNEKGGGNLTRYSPLLQLDCNLMEDSGPELPSWLCSPQSPQSQKLGDKECRFKLLQFGGTYSWSQKSTQTTSGQLKEYNRVWDTMSLDSFVKPGINTHIWSSHLLHSKFPDLFECPRDTLLEAYSMDAFLNVDGVFLGHHLADGRTAFLLSTLLCSSHCARPKLERSQMSLLNSFSPLADIVL

SEQ ID NO: 922367 - protein, 134 aa, Homo sapiens
MNSILPKGFRHPGPGGGDNPLCSPNAVSRLYDSYCPSKFTSTNFPSAAPLLLASICLDPPPQSLMTFTLGPLSSTVNFGLVTNVTNDFHQYSRSLNMNITVVFAGTWTSKKIISGWTSVIGAGQHEFLSNTLCP

SEQ ID NO: 922368 - protein, 171 aa, Homo sapiens
MPASLGAAEEVFPNNCACRGGLTLKLTTLTSGPLSAEPLPRGIVASLTESHSLEALNDRNPFSHSSGGGKSNIKVLARIVSGLVGVGNSTCLHTGCKGAWKSKSLAQSSRVQTHQVGRSSNAGRSFRYCAVQKNNKCPFRGAICVFLLGYSIFPLQKQVAFRPVAKAIVNI

SEQ ID NO: 922369 - protein, 137 aa, Homo sapiens
MLSKLSLHYIFKIPNLRSFFSPLETLNPGEYRFVCFTFLHERRNSMYFNPPMTSVVIYFETFFFFETEFCFVTQAVVQVNQHHRQFTLLCIAMLRLPNFKRQNLWRSSFPGITALCFNLSCDVDGDDVRAAAKRKNT

SEQ ID NO: 922370 - protein, 174 aa, Homo sapiens
MEGEANTSFFIRQQKKKNMQRKCQTLVKPSDLMKKLRHEELTTCPMDTAGKCKCGNSHACPQLVESSTIADSCQPLLPLLSHEDVFKNTTFCPNRALTKGSPLVAVYLAARRHLAVSPLQELPQLKSHLTHGHAPSPGQTNPMNGQQRSKDTAPWLTGTMLKDYPSIRASHRVD

SEQ ID NO: 922371 - protein, 174 aa, Homo sapiens
MLGAADWSCSCLAIFFFLPKNNYCAPSRFWWAFIRKIPRVQVGYTEELQQCCEAHNLFSFFPTQYPICLKCKKKKIQEAVWQQELSRVFSSHSWMCSRQGYDCNASFVRMEDYRNKDNMTRAIPIRPGSFHASQTSSKKGTLVSFHKCFCLYYKFPNGKGDKIEYRKALLSTHQ

SEQ ID NO: 922372 - protein, 141 aa, Homo sapiens
MSSPERHSFIFLGTMLSVYQAYESESEYLALNLSKLYQSESKCHVSPYSRCSWPWTLHVCCQDRVELHVAVSMSDLDSPLFVKCSSRKKGRDGGLKYQNIQPHPPTFKYQNIQPLPPTLKYQNIQPLPSTSRERVVRGTGD

SEQ ID NO: 922373 - protein, 126 aa, Homo sapiens
MGPGFLSNSQGESDGVTLPFEGSLKSLFPALAVNWGQQGQDSKMKFPDSNFLDFTMALSSGFRRAPTGQFHPGKPFDSHLPEHFLNQTIWFLAHAQSSGGATTDPTLDHRIRNDPFQCRQSSEQTE

SEQ ID NO: 922374 - protein, 185 aa, Homo sapiens
MRMNSGAKYWAPVSQLKATSMAARLKKLKTRVSDFLGKGSLITPNSLELGALVFKNVSVRATKSDFSRSSLWSRRTDQTLAFNLKNVALATAREFGDTWYLSQVNDRMTAGERDKVSPGQQAIPSVDPHWDLDSDHWDWSRKHLLTCVLERLRRIRKEPMNYSMMSTITQEKEESLAFLEWLQEP

SEQ ID NO: 922375 - protein, 327 aa, Homo sapiens
MLLHLAPCAWKSRRCSTTAHESSQDEAVLCKATGSELPKTMGTHLLHQHDLDVRPGVKGDHFGALKFDYPVGFRTCIGPQVLYDESAAVASFQIYIEVAASPQLVQSVHLQNWHHMDGYHQGLFPILFRAAARDTPWLTEPSGYLTDGPINYKYKTKCTWLIEGYPNAVLRLRFNHFATECSWDHMYVYDGDSIYAPLIAVLSGLIVPEIRGNETVPEVVTTSGYALLHFFSDAAYNLTGFNIFYSINSCPNNCSGHGKCTTSVSVPSQVYCECDKYWKGEACDIPYCKANCGSPDHGYCDLTGEKLCVCNDSWQGQMGNDQRMRDM

SEQ ID NO: 922376 - protein, 169 aa, Homo sapiens
MEAILFVTTGEWDVGAVGISWVEARDAGGICAVIERQLQFLLVLSCPLAFCHGMTQQEGPHQMPAVWSSTFQPSELETILDYPGILSVITSILMKGKRRKFDYSSRRCDDGSKWRDVKEGTMSQQMRTGFGSWKRQLLPYIDYSYMKELLLMCLPNDDFLFHHLFYIIN

SEQ ID NO: 922377 - protein, 259 aa, Homo sapiens
MIVAKQMLPVFLYSLQNQVKRSQVPVAKTMGKIPQRHFRDLHGSPSYHKPRGLRGKNASMGEAHAYSLVQPWDTAPHILVTPAPAKAKRTEATIKRDPVHNKEINLGSLFIPWFRHSSPSLRDVEAAGNSNRGIPPHPYLTERHPAASPGKSLPFFPGDDSFMNVIAPEDIPVFVKDQMVVDVQDTKSMCKNHKHSYTPVADREPNLSTLLAFEKIQTCVSIYMHQYLEKIYKEEDEREEEADDEEEEEEIHEKATENQ

SEQ ID NO: 922378 - protein, 138 aa, Homo sapiens
MDKKLLKLNGGRHVKGILQGFDHFTNLVIDECVEMATSDQQNKIGKGREDTGFCPEIQATKGYIPELGRSLLDPSSPVAVVLYSISNNISYGVDHCNGPRTTISFAQRKVIKEILGHILINIKLISVSQSAHFKPKDL

SEQ ID NO: 922379 - protein, 182 aa, Homo sapiens
MAFLSVDPQLSPEVQEKRKLVPGKPTLPTPKSQGLLQSPFPESLTPVFSAAAVLITFNWPTGARYLAPELCSDVSGVSSFWWVRGFADFRSEAAEPHRMKPQTLTVSVTAHKGSVDPKSEQQQDSLRRAKEQSFHSVEEHPSVLLLLDEAVGCCIISLVYHVELLSLVHANRLIQLYKTIDT

SEQ ID NO: 922380 - protein, 128 aa, Homo sapiens
MKEFHYVYAYQNIMLYTLNIKKKENIFDGNVVSEAKRGQFGKISNLTILSVPDEPLFPAKVELQPVHFISIPKLICIMWQYVLMLIELPLGSGPATLKDTALLLSNAAPSRQLRTKEPVKKSAGFACT

SEQ ID NO: 922381 - protein, 176 aa, Homo sapiens
MRGYSPTAGLMSFSGREASRAPVCAFMTQNYIKLNCLKLLLFYHVKPLSVTNLPLCSVLLTPLLIPAAPATANPGHTVPLPRLLPLPGMLSPFSSTHQTPIHSTKASLKVPFCKPSLTGNTIQSVIPTIGPYVSFLWVLLIHHNLSCLYLSLKQKREFLEDNSYLPLNHLGLPLCS

SEQ ID NO: 922382 - protein, 140 aa, Homo sapiens
MFLWSRVMLQLPGKVGSGTRYGDGHADLVAKVTHPRPHMEEAAARVSTAAFAIEKPDPQPARSGRSREKEWLALTLPIRRINQYYQCACLEVLGCWRNLRAGLGLLLSGSGTAWSSVTVTREVLGQQVWELVRGIQWPLK

SEQ ID NO: 922383 - protein, 147 aa, Homo sapiens
MMTMAVLSKASLVLPPAPAAIVPLHSCYPDQDSAALPGWALVLWSLCCPLFLHLLLLFFQMRSSFVTQAGMRWHDLGSLQPQPSGLKQSSHLSPQPPPQEPGLQRRSLNVCGLCIVLILEKEVSKALWNCVCERGMWIVYVCVVGQC

SEQ ID NO: 922384 - protein, 278 aa, Homo sapiens
MEDSRWGDRDSEGTWRKGPEADSEWRRGPPEKEWRRGEGRDEDRSHRRDEERPRRLGDDEDREPSLRPDDDRVPRRGMDDDRGPRRGPEEDRFSRRGADDDRPSWRNTDDDRPPRRIADEDRGNWRHADDDRPPRRGLDEDRGSWRTADEDRGPRRGMDDDRGPRRGGADDERSSWRNADDDRGPRRGLDDDRGPRRGMDDDRGPRRGMDDDRGPRRGMDDDRGPRRGLDDDRGPWRNADDDRIPRRGAEDDRGPWRNMDDDRLSRRADDDRFPRRAR

SEQ ID NO: 922385 - protein, 139 aa, Homo sapiens
MNISKPGQPLNKQQKYIGEKYSRGGSEEKPLRDLPVEDQNLHSPCCEGWILSMDGDSRPRGASERYGAWCFREPEGPSWGVGEDVEKLEPSSTGNVNWYSHCGKQCGGDRKRSKFLLIHKSLEQLYFIAPLFPSVHKMN

SEQ ID NO: 922386 - protein, 135 aa, Homo sapiens
MGLEARCGCGAAALISAKECAIGVSLISEKLESVVEGPRALGQTTGVSPRVQRSKNLESDVQGSIQHRKKMKARRHSKPVYPTFFCLLCSSHAGSRLDGALNIRSILLNFEVHNAVLLTIDTELYNRPLELIHLT

SEQ ID NO: 922387 - protein, 172 aa, Homo sapiens
MSCQWGLEHGNTAPGGGSEGIRVGLYKHGASICSASGEASGSFHSWQKAMGEQTCHMVTEGAREREEEVPGSFKQRIELEDSSGRIDAFPVWTVSLLGCGYAFETEQGWPVLCEPRYWKASGIEIRIVFNSLWSCACQQLVSFIFNESLHSSTIHLCPVDCKTKGPISDVNL

SEQ ID NO: 922388 - protein, 227 aa, Homo sapiens
MLRTVPGHSRAPSAFTCLLTLASLGAEAAPWTPELGVGSAVTPSAPFTMGCKMGLLLGSSTCVSGDSTSPEARTGWGGTSSPSTLAAGRATAETPGAAPLPCGRAPPLLLQVPPKVLGMGTGEVTGLLALPSVAEDPQCPQVQRGRSGGRCGAAPTWHLGEEPLPRFDAPTHSTERPAPALDIGVCGHLVQTRYSKFDKRTGATGLLFTGELCFLDPLLMLGSNDIF

SEQ ID NO: 922389 - protein, 288 aa, Homo sapiens
MGCCGCSGGCGSGCGGCGSGCGGCGSGCGGCGSGCGGCGSGCGGCGSSCCVPICCCKPVCCCVPACSCSSCGSCGGSKGGYGSCGGSKGGCVSCGGSKGGCGSCGGSKGGCGSCGGSKGGCGSCGGSKGGCVSCGGSKGGCGSCGGSKGGCVSCGGSKGGCGSCGGSKGGCGSCGGSKGGCGSCGGSKGGCGSCGCSQCSCCKPCCCSSGCGSSCCQSSCCKPCCSSSGCGSSCCQSSCCKPYCCQSSCCKPCCSSSGCGSSCCQSSCCNPCCSQSSCCVPVCCQCKI

SEQ ID NO: 922390 - protein, 238 aa, Homo sapiens
MGCSGCSGGCGSSCGGCGSSCGGCGSGYGGCGSGCCVPVCCCKPVCCCVPACSCSSCGSCGGSKGVCGSCGGCKGGCGSCGGSKGGCGSSCCVPVCCSSSCGSCGGSKGVCGFRGGSKGGCGSCGCSQCSCYKPCCCSSGCGSSCCQSSCCKPSCSQSSCCKPCCSQSSCCKPCCCSSGCGSSCCQSSCCKPCCSQSSCCKPCCCSSGCGSSCCQSSCCKPCSSQSSCCVPICCQCKI

SEQ ID NO: 922391 - protein, 167 aa, Homo sapiens
MPQPSTPVTAVRQVDPTAPPRFIRTSNDSPAPPATRGLTHLVPSVLTTSEGGGCLCLSAGEAACISHTFGLLDLALQGTAATEPGPLFLLLAPAAGWALALRPLAPLAKWSFVGKAGVLWSQPRGITQPPPLSPPTPAFRAGTQPLAFPKCHCDCRQPPLPSLGPVR

SEQ ID NO: 922392 - protein, 175 aa, Homo sapiens
MEEGTPLTSRLGPWDCPCVHRPCVGEEGLQGTRGAAACKPVPHSLQGAAAPRSQRGYCVQACPQLPARGCCSKESEGLLGASLSPTPCKGLLLFQASPSWTWGGGEGSHRDWSGTLAGPGPVCAYILGGRRVLPEPFTGSAASRWVWCSQEQLRQERGSPCFLEVCGRCQCLSCP

SEQ ID NO: 922393 - protein, 159 aa, Homo sapiens
MSILRPLHTPPELAIRWGPSPIPGPHSTCEKHSTGLGAEDAKQHFCKRPQHLLGKVKQRLLRSKGRQSRHLVHCQHSRCLLWTGPGAADAKQHFCKRPQHLLGKVKQRPPSQRNTWGPGQYEAFTVQSNQHKNINGKEFPQICIQNFKKQNLQSICRPV

SEQ ID NO: 922394 - protein, 154 aa, Homo sapiens
MMSTLLEHPPAFAARSGTAGENGLEAGPGALKPLLLSSFQRTCSIPGGCGQPFPWLRGANYITGNCGGAEVEGVCLYPNAKILPSTDFCPRGPERDVIKARSATTPGSPCREFPGQQETSYPDYTPGPVARQRHLQGSRIGGGENLHGARPSRP

SEQ ID NO: 922395 - protein, 175 aa, Homo sapiens
MDDGATALEKSMAFPQKVSVEKRKHFTELTHLIEFHFLVQAHCTNPLYFSLPGGRKATVFPSPSMSSSASVLVQYRDTAEDSAASNLAIPKVRGALRVTQLADEQAEAEQVRLAESDLLPGQTQDKAAFLPLDLRIQVRDAAGRGSGPRYSTPPPPPGPLAEDSVVICVDSKEKQ

SEQ ID NO: 922396 - protein, 153 aa, Homo sapiens
MAVGVAVGVADLTQGRASGLHGEGPDTGRLCWSPGAGQDLSRLSGLLRRPPRAHPALQGSLRGAVSALHPLVGCPHLYLLPHPARLQSCVVHAHLQGPHGAEGDSRAAQLQGDPGEPRQELQGSIKGNGSRRGGGHFLMETALNATEGTGGAK

SEQ ID NO: 922397 - protein, 188 aa, Homo sapiens
MEHDWFGVLIPDCGVGSWAVPTEAACRRLSGGILVTSYYPCSEATVHIKKRRNNSVACPRPTPADDSPALPVSQATGPGVSLGAGFSHFLHPTHQQFPWSQNLTPHLLPTCCISAVAHSALSCPPALQPVLLFSARDNRILLRYEEQTQEQDLAWTWQVLWQAQARGVTLTGKRCSGRILLNGRVAVT

SEQ ID NO: 922398 - protein, 133 aa, Homo sapiens
MGLGPCRAREGCQGLGLHLPETMKILEDNIGKTLLDTGLGKDFMTKNPKANAIKTKINSWDLINLKSFCMAKGTVSRETDNAQTIPLLGIYQRKISHYSKKILSHTFIAAQFTISKSWNQPKCPSINECIRKL

SEQ ID NO: 922399 - protein, 121 aa, Homo sapiens
MIPSDAGQWREHSSRPTYDCRPNSCYSRTLWRWLILPNCRCTNGCVEVAHGPLTQDPQELWPVVRAGAATAPETQALVHPGISAGCGCEASWSIKALGSGSRTLGVISETSMGHPKHAAPF

SEQ ID NO: 922400 - protein, 135 aa, Homo sapiens
MRAMYAGVGEGAGSRCDRELDRRSPRRIRVAAGLLLCLEGAVLPLPGLSPSVIRNSVCSLDVSPATTPPPGNAKLLLTVVCTSTGSASRGTWEGGLKSSEMSQAQPIHWLITDEPVKISHIQPRVAEVPHRPVDS

SEQ ID NO: 922401 - protein, 198 aa, Homo sapiens
MFCTDGTFIILTMKVATKEASTNSRDDKQDMLSNHNAIMLEVNHRKTALSPVTSGKHNNSRARGKTVMENTKDINQAMIEAAYIDSHGMQKEEPLPWSWPPQAYMGYCQATTNVHFKPKRPSVSLWSMLPGLSSTEFNAGSHNHCTLLPPVHRFSMPQDHYWGVEEGWLQGFKTVFSTFLGASFSDRKLKPGKDYKFL

SEQ ID NO: 922402 - protein, 326 aa, Homo sapiens
MTYAFLHVTRRARVHTALGVLVQHSELSVGEGVTLQGASMGPWRREAPGRHSKSPPEDPQCPAAASSRGVCPPRGSTAPVCREAWLHRTLRHWARRRCSCQELLRKWLEAPGRQSRWTGLDTGCLFRASVFASEIKARILALARCLCRGRGFHHEPSAPSRLEGEGVCVRVNASHSCVNASYACERRCLCTRVCVRVNASGYPRMHTRTCECARVRAQRTALSRLGTSFLSPLRVLGDQPPYPGAVGSPEASAHRCARAPALWGPGLPGPEEFHAVATRWHRRLATAERGGSRLPAASPRAVARAVSLRPRPLLPGKAGTIASHAC

SEQ ID NO: 922403 - protein, 151 aa, Homo sapiens
MYAGVGEGAGSRCDRELDRRSPRRIRVAAGLLLCLEGAVLPLPGLSPSVIRNSVCSLDVSPATTPPPGNAKLLLTVVCTSAGSASRGHPYKHYRYYRLMLIFKAILEHSDYSHTVLQMRELKPKEVNELDQDHTNWGCNRDSTIQLQSLHF

SEQ ID NO: 922404 - protein, 115 aa, Homo sapiens
MQSSGCGHCMFCTDGTFIILTMKVATKEASTNSRDDKQDMLSNHNAIMLEVNHRKTALSPVTSGKHNNSRARGKTVMENTKDINQAMIEAAYIDSHGMQARSRGCWFCEEILNPH

SEQ ID NO: 922405 - protein, 328 aa, Homo sapiens
MTYAFLHVTRRARVHTALGVLVQHSELSVGEGVTLQGASMGPWRREAPGRHSKSPPEDPQCPAAASSRGVCPPRGSTAPVCREAWLHRTLRHWARRRCSCQELLRKWLEAPGRQSRWTGLDTGCLFRASVFASEIKARILALARCLCRGRGFHHEPSAPSRLEGEGVCVRVNASHSCVNASYACERRCLCTRVCVRVNASGYPRMHTRTCECARVRAQRTALSRLGTSFLSPLRVLGDQPPYPGAAGSPEASAHRCARAPALWGPGLPGPHHEEFHAVATRWHRRLATAERGGSRLPAASPRAVARAVSLRPRPLLPGKAGTIASHAC

SEQ ID NO: 922406 - protein, 315 aa, Homo sapiens
MTAGAQTRSRPSCPPCACGNQPTEPLCQTAVFLREQFYDSYFNENAKNIRCYLDLMMQNVECQITTYYYVGFAYLMMCRYQDAIRVFANSLLYIQRTKSMFQRTTYKYEMINKQNEQMHALLAIALTVYPMSIDESIHLQLQKKHRDKMLRMQKGDPQVYEELFSYFCPKFLSPVVPNYDNVHPNYHKEPFLQQLKVFSDEVQQQAQLSTIHSFLKLYTTMPVAKLAGFLDLTEQEFRIQLLVFKHKMKNLVWTSGISILDGEFQSASEVDFYIDKDMIHIADTKVSRRYGDFFIRRIQKLEELNRTLKKMGQRP

SEQ ID NO: 922407 - protein, 134 aa, Homo sapiens
MCDVFQGSELRNRGSGGLQEHAGTHLGSHVLRTSDLGSEDSLGVRVPPRAAGAPGTRPAAGSAGRALWATWSCGRPACSGWASGGLPLEDPALGGLSVDEHLRVGEVSPVWKRPRTCGIILSDAKSSLWDKAYM

SEQ ID NO: 922408 - protein, 291 aa, Homo sapiens
MDFNGIHSNGMEWNGLKCNIVEWTRMECYGMDSNWVEWNGLEGNGLKLNGLKKNGMECNGLDSNGREWNGFEWLGMQCNGLECNGMEWIRMVGNAMQWTRMQWNGVDSNGIEWNGPKWNAMEWNGLEWNGMQWHLQEWNGIGWIGFKRNRMEWTQMTWVGMEWNGMEWTQMEENRMEWTRMERNVMESNGMECNGIKLNRIEWNGLEWNEMEWNRMECNLLEWNGMDSNGIEWNGMEIDSNGIDLSGMEWNGLEWNGNDSSGMEWNGPEWNGIEWTRIEWNGMDTNGMEWT

SEQ ID NO: 922409 - protein, 498 aa, Homo sapiens
MEWNGMEWNGFKWKRIQQTLMEWNAKNGFKCNGIEWTRMEWNGIEWSRKEWNEMQRNGLQRIGMVLTRMELNGMDRNGMDWNGMDSNGMECYGFDLNGMQWNGFQRNVMEGNGTEWTRMEWNGIEWNGMEWNGMAWIRMECNGMEYKGLNGMQRNVLECNGMEWTRMEWNGIEWYRKECNEMQWNGLQRIGINSNGIEWNGPEWNGMDSNGLEYYGLEWNGMEWIRMESNGIEWKAMDSNGMEWNGMERNGMEWNGLDGMKWNGIERTQVEWNGKEWTQMEWKGMEWNGKEWNGMDTNGMDLNGMEWNGMKWNGMDTNGMEWNGLEWNGMDSRMDSIGFERKGVKWKGMELYVLEWKGMDLNVLEWNGMDLDGKEWTRMEWNGLEWNGMEWTRMQLNAKDLSGMEWNAMDLNGKEWNGKEWTRMERNAMEWCRIEWNLMEYNGMEWNGLKWNAMDWKGHEWIGKNDLHWYRIEWTRMEWNLMDSNGMECNGMDSNGME

SEQ ID NO: 922410 - protein, 163 aa, Homo sapiens
MCLLHSTPITDSSQATAPKEPPSAGSLLLPPVNYGENIKPEDLPRSVSIPGALRAESRSYSGLGLKFSFTIRKERAVNPAFAISWELTDYHENCMAETSPVIQLSLPDPTLDKWRLLRFKIQVHCPCRQDSRLFVTSNVLVGSAKVNIAHLETQKTSPEMKSP

SEQ ID NO: 922411 - protein, 132 aa, Homo sapiens
MHINLTKNHNLNGRMGSRSGAVSGHLQATEGTVLHTSEQKSETLGLGICSSNIPLPLAAEDHACPRGCGLSWPQHLISQSRVFSHYVPILEDCLQPSQFASLCCAEGFISLGPYSSTLLLAPIRTSKAYQGC

SEQ ID NO: 922412 - protein, 167 aa, Homo sapiens
MVHAMALMCPSRYGCKFGTDPQGNAGGVCSRVGSFGVKLKLPLWTKAPSGKCRRCCGSVFVVAVVVFVYTVSITITITNDTTVMFAGELGLTQCSVAGCRGSCQPMGVVKVSVSVPYPSQPLVYSGTLCDKEPGARLVAQETGVRLAGASKKKGAEAEAAKEKKSRQ

SEQ ID NO: 922413 - protein, 166 aa, Homo sapiens
MDLSLKFYSHREDPENTPLTTSIRNKFVRGALASLQSSVIALLCRPDLTAETAVTELGNSHKGVIGSWVAGALNPKRQRLPDTGSELTLIPGDPKSHCGPPVRVGAHGGQVIDGVLAQICLKGDPLGPQTHPVLVSPVQEYIIETETPNSWQNSHSMGLEITVGFG

SEQ ID NO: 922414 - protein, 150 aa, Homo sapiens
MQGRADLPYPGHGSLSKGSGYHHLGENRYPRQSSRVALYLRSADCLAHVVLKKAVERKWIGGHLDGRTVRIRRLTVLGIKEKKESGENPHLEPEEHSVPQESLRGSDDRFQNILPPPAELSAHQGSVMSAPKLVYAKTAGQGKMDFTGMY

SEQ ID NO: 922415 - protein, 141 aa, Homo sapiens
MRCCSEAKSIQFGETALQGSVWVCLLWEIPLNGGFDDSSREAAVVRLMLSSVKEVNVTRLGESTGRARGLWPGKTWDASGVAGRIPGTSVRLPGPGLQGPSRWYWGEVEGTQWVGGSRRCQSLGACSSAQVPHHALLKGTS

SEQ ID NO: 922416 - protein, 174 aa, Homo sapiens
MSKTSWRPFGIQSQDNKDERTTAVREAKEEAKQKQGAFLSWSHIHRRQLVFRGFRNHCVLEQFTRQRVEIQIICHQVFGHICLLAPFHPSLPQGSPPTPSYWDVLPGPSGSCWTVIVLAPAMILHVSSGFQEKTLDDAGDMGGDTADEMGSPLRTGTGLIFNHKVQDLDFICGS

SEQ ID NO: 922417 - protein, 160 aa, Homo sapiens
MSGQLKRGFAFVTFDDHDSVDKIVIQKYHTVNDHNCEVRKALSKQEMASASSSQRGRSGSGNFGGGRGGGFSGNDNFGIGGNFSGLGGFGGSRGGGGYGGSGDGCNGFGNDGSNFGGGGSYNDFGNYNNESSNFGPMKGGNFGGRSSGPCGNGGLYFAKP

SEQ ID NO: 922418 - protein, 138 aa, Homo sapiens
MLFSSHLFSRKSPRKKAKWMQFVVERTLKARRSLLFPGEGPRRGWPSVMRSAMPRLPGERKGAQRVLNPSAPDQARSRGCYRRWYWAVGCGEVPSGQPGRLGKDNRQLATFNSLVLALSPLFPFMLLKEQQTFTDLGK

SEQ ID NO: 922419 - protein, 403 aa, Homo sapiens
MAHTKLVKIQRSEGGINTSVPYGGIYVKSIVPGRPAAKEGQILQGERWGWVLIGNSVLHGGDTWHLSFLSHFSRLHGGVPGRVLLEGNLLQPQAPGHDMTSIPFPGDRLLQVDGVILCGLTHKQAVQCLKGPGQVARLVLERRVPRSTQQCPSANDSMGDERTAVSLVTALPGRPSSCVSVTDGPKFEVKLKKNANGLGFSFVQMEKESCSHLKSDLVRIKRLFPGQPAEENGAIAAGDIILAVNGRSTEGLIFQEVLHLLRGAPQEVTLLLCRPPPGALPEMEQEWQTPELSADKEFTRATCTDSCTSPILDQEDSWRDSASPDAGEGLGLRPESSQKAIREAQWGQNRERPWASSLTHSPESHPHLCKLHQERDESTLATSLEKDVRQNCYSVCDIMRLGR

SEQ ID NO: 922420 - protein, 183 aa, Homo sapiens
MTHILSDSPSSPGYRDPQCPSPFLLVSPLPPGTVPQDPLLGQPFLPLHISGSEPRMPLGSAGYTLNPSSPEPSGPSHPRQLLWDPLDQPTILSSSIMSPVTKGLWHVLLSPCPPWHPSPTNLCPRPALSLFPLLSGISSLQVGTGAAGRHGCELLSHPEGPSLPDYPVKLDPMVSPRRTKRGY

SEQ ID NO: 922421 - protein, 142 aa, Homo sapiens
MRRHSKEEASMRKQAFTRHQDCQHLDLALLSLQDCEKQSSVIYKLPGLMHFLVAACTDSDSGLMWMMTVSPFRTNGREGGRKEPQRHVAIEEGPMGCKVANGESGEEPNAKKCRQTPECGKGEKKDPLEPLEMKVAFPPPRF

SEQ ID NO: 922422 - protein, 163 aa, Homo sapiens
MEEERGKEVGAQGLPCLYGDHGVEVLEDNFQEKTPELSADKEFTRATCTDSCTSPILDQEDSWRDSASPDAGEGLGLRPESSQKAIREAQWGQNRERPWASSLTHSPESHPHLCKLHQERDESTLATSLEKDVRQNCYSVCDIMRLGRLNGSHLVAILDDCQR

SEQ ID NO: 922423 - protein, 252 aa, Homo sapiens
MGIWAGGYSLNTFMCSNDAKAKTSLSPPASVWIVPFPSTSYFQQVESKPYFHVEDYIPASLIERMTALRVQVEVSEMHRLSSALWGEDAELKFLRHQRSINIDLYDDKDIDDDDDDNDDDDDDDRVSPKNGIPDFSNTTLLRGLQMPGARGPCCGSQRHINLLMGTGVFLVKMKVTQQLPEYGVLVHQVFSEKRRPEEEMALGICAKGVIVYEVKNNSRIAMLRFQWRETGKISTYGYTFLLGKVFLIWRLH

SEQ ID NO: 922424 - protein, 134 aa, Homo sapiens
MCETPSHRVLRSALAPGVHRLPLGARSVREAEPKGELEFPHGKDVSQTGLPAFLAPAEPGRRLRFEDLCVVLLNGQHLEVKCDVESTVGAVFNAVTSFANLEELTYFGLAYMKNTEGSKKNSGSNSVYSYPHFY

SEQ ID NO: 922425 - protein, 150 aa, Homo sapiens
MVWLCPHPNIILNHSSHNSRVSCEGPSERLKFYIPERKLDLHKEMKIPEMVKMKINVHLFNAGYIITHVTGSSTVWPVSNNSLQDTWKVILASFNHWHLDSCYRLNVSLPSSYVEIYSPLCDDIRRWDIGRRLGHKRGALMSGISALIRR

SEQ ID NO: 922426 - protein, 147 aa, Homo sapiens
MAWECTILASEETDLARGSVHTNHEIHRNGKPNSFPAPEVDADILNQSPDAIPLMMMINLSRGSEEKETRCPAVGPSHKRKLMLRMKSGAMEIIWGPETKMGEGETMWPQMTKQVRNRACLDAQVPDVCFKWFFVSLSITKDLMKAD

SEQ ID NO: 922427 - protein, 167 aa, Homo sapiens
MWPIQPTQFNIVEVGKAPEVYQSSYILHCKGPDGQPATIQPIITSVPINLCGRDLLQQWGAQVLIAEQLYSPQSRHMMHEMGHVPGQNQESIWIPSRLLKPYHKPDAKEEALGVSQGSPSCSHVEIDNPNCHEQHPSNTATHLGTDQEAVTDGGRKPEESRTTTHYE

SEQ ID NO: 922428 - protein, 150 aa, Homo sapiens
MVPQSPNQAWENAYNFVWCPSLSVSPSFSPSWRQGFGGTKCSPLAWLHGSPVERRPHYKAVCDQHYGNDPAKSYRSSLKKEIPGSCGKYGMRKFLGGEIGFTVSKKKIGVVTQSSGKVQLHPASHVLDSTQEDEKAIHVDFYQLRYLQAQ

SEQ ID NO: 922429 - protein, 398 aa, Homo sapiens
MNLPRAERLRSTPQRSLRDSDGEDGKIDVLGEEEDEDEVEDEEEEASQQFLEQSLQPGLQVARWGGVALPREHIEGGGGPSDPSEFGTEFRAPPRSAAASEDARQPAKPPYSYIALITMAILQSPHKRLTLSGICAFISGRFPYYRRKFPAWQNSIRHNLSLNDCFVKIPREPGRPGKGNYWSLDPASQDMFDNGSFLRRRKRFQRHQLTPGAHLPHPFPLPAAHAALHNPRPGPLLGAPAPPQPVPGAYPNTAPGRRPYALLHPHPPRYLLLSAPAYAGAPKKAEGADLATPAPFPIESIMQGVRGAGTGAAQSLSRPAWSYCHMLQRPSSLSTILQQQQRHQEEVCANGCAPTKGAVLGGHLSAASALLRYQSVAKGSGLTSLPPLWPERGPHQFF

SEQ ID NO: 922430 - protein, 137 aa, Homo sapiens
MPRHIPALGLVLLLFPLPRSCSPCPSLPECSRVREKGRTSPYSYRDIAYGPPSGVCCDRNHLSCITADTGLDITASEDGGEICKILLQFLSGVHLIMNENATLSHNHDTCCQRGRATCEHRPCSCQAVWEQAGDSGE

SEQ ID NO: 922431 - protein, 535 aa, Homo sapiens
MAGGQAAAALPTWKMAARRSLSARGRGILQAAAGRLLPLLLLSCCCGAGGCAAVGENEETVIIGLRLEDTNDVSFMEGGALRVSERTRVKLRVYGQNINNETWSRIAFTEHERRRHSPGERGLGGPAPPEPDSGPQRCGIRTSDIIILPHIILNRRTSGIIEIEIKPLRKMEKSKSYYLCTSLSTPALGAGGSGSTGGAVGGKGGSGVAGLPPPPWAETTWIYHDGEDTKMIVGEEKKFLLPFWLQVIFISLLLCLSGMFSGLNLGLMALDPMELRIVQNCGTEKEKNYAKRIEPVRRQGNYLLCSLLLGNVLVNTTLTILLDDIAGSGLVAVVVSTIGIVIFGEIVPQAICSRHGLAVGANTIFLTKFFMMMTFPASYPVSKLLDCVLGQEIGTVYNREKLLEMLRVTDPYNDLVKEELNIIQGALELRTKTVEDVMTPLRDCFMITGEAILDFNTMSEIMESGYTRIPVFEGERSNIVDLLFVKDLAFVDPDDCTPLKTITKFYNHPLHFVFNDTKLDAMLEEFKKDQPPKAS

SEQ ID NO: 922432 - protein, 126 aa, Homo sapiens
MAQVEPRLMETYYGQVLKRSADLQTNGCVTTARPVPKHIREALQNVHEEVALRYYGCGLVIPEHLENCWILDLGSGSGRDCYVLSQLVGEKGHVTGIDMTKGQVNLELTSFIITLFAVSNYTQQIT

SEQ ID NO: 922433 - protein, 181 aa, Homo sapiens
MSDFDYFSEMMNHMGGEEDVDLADGADDHSQDSDDEKMPDLEKEFQGKLVVVASKQQRTEQKSWRPRVRNRSLTEMMATGTPESQARFGQSVKGLLTEKVTTCGTDVIALTKQVLKGSRSSELLGQAARNMVLQEDAILHSEDSLRKMAIITTHLQYQQEAIQKNVEQSSDLQDQLNHLLK

SEQ ID NO: 922434 - protein, 502 aa, Homo sapiens
MWELVALLLLTLAYLFWPKRRCPGAKYPKSLLSLPLVGSLPFLPRHGHMHNNFFKLQKKYGPIYSVRMGTKTTVIVGHHQLAKEVLIKKGKDFSGRPQMATLDIASNNRKGIAFADSGAHWQLHRRLAMATFALFKDGDQKLEKISECQAGPWGWGWIPQELLEGEEGWAGEISTLCDMLATHNGQSIDISFPVFVAVTNVISLICFNTSYKNGDPELNVIQNYNEGIIDNLSKDSLVDLVPWLKEKFRSDSITNMLDTLMQAKMNSDNGNAGPDQDSELLSDNHILTTIGDIFGAGVETTTSVVKWTLAFLLHNPQVKKKLYEEIDQNVGFSRTPTISDRNRLLLLEATIREVLRLRPVAPMLIPHKANVDSSIGEFAVDKGTEVIINLWALHHNEKEWHQPDQFMPERFLNPAGTQLISPSVSYLPFGAGPRSCIGEILARQELFLIMAWLLQRFDLEVPDDGQLPSLEGIPKVVFLIDSFKVKIKVRQAWREAQAEGST

SEQ ID NO: 922435 - protein, 156 aa, Homo sapiens
MANLSQGGLADKEQKQKGSSQLKEDFLVRELVSSEAGLEGCLGFADAGMQEKREWLWPTGTGEFTEILTSRELPSGNWQNSGGLVPVVFLNTAGSPSHGCKKVLQDLRSKLLPVCHSTLPQLRSLSSWSRRYAELKSSRAWFGYGRGGKVKETKNV

SEQ ID NO: 922436 - protein, 193 aa, Homo sapiens
MIRTTWGKRVCQDLFLVESNQKLEETRGETGGCRPQKHASWTQSRVERVKNKCTKYNHKFTHLCVSFPAVFWGDIALDEDDLKLFHIDKARDWTKQTVGATGHSTAREEMILLQLDEYPEGQELAANTRQLQGVCGLEEQASESSPDTTAMDTGTKEAGKEALKSVDVSGAGVLLAKGMEGRHLVVRNSIALR

SEQ ID NO: 922437 - protein, 227 aa, Homo sapiens
MVWTLCQRETVSFVGFSRRFITTKSSRTIFGGNFCIGSLGGKCLTWFSKGLTQCCVTGQEYNFLKMEAGEVSSLGETYDFDSIMHYARNTFSRGVFLDTILPRQDDNGVRPTIGQRVRLSQGDIAQARKLYKCPGPTCAFVSQKTSICLLHFSPTCSEGFGWQRACGETLQDTTGNFSAPGFPNGYPSYSHCVWRISVTPGEKGGMFSTLLQGTYCYIHYLDKEFEA

SEQ ID NO: 922438 - protein, 239 aa, Homo sapiens
MNEDNKSSLNGSVFFWLANYSENPPKLHTCLSKSQVPCGNDVTYLFLADLAIQGVTHFPVLRGGHCNGFHQPAGLEMSHRNDGHGDGWSSGTHVLHPTPAGDIGCITGSRSVFVCLLSFCRGKCNLEFLGVHRTFGRFMTATRCCEAPALVRPQLPSEDQKVPKYPRTRSELCGKAPVKGCGKDSLRYSVDSLSTGRIGLLQPLSTPPYNPSSSYKVTVHNCLGTTELVFSLPLFQDDL

SEQ ID NO: 922439 - protein, 157 aa, Homo sapiens
MPFYKITKERLARPSQGCEGGFCIVPQTVGLKPKSRMDLASVEMAKQFTSWVLQSLPPVDLSLCHWHKRKQPFPIHRPLSDSPDTLGNCAGTAAPRTGGLTLTFTETDSVSGNGQKGTKAGAQGSPERVCDLGIVILPPWPPFCRQWNGIDNCESAF

SEQ ID NO: 922440 - protein, 136 aa, Homo sapiens
MTWMSMSRYSCSQAMGTEFHCSLEVVFRTCFTFVRGTGPGCGKNIIKTFDLIHQRARGCKEWGQVGYLTQMKTRSAEIPGIEPGPNANEAKQNKTKTMIEKGQRYRSIGQNIGCRNRPAHTWLIDFFDKGAKAIPW

SEQ ID NO: 922441 - protein, 152 aa, Homo sapiens
MWLPPSHHTKCSSLGGNRSFLDPWKNQLSKLPSLWCSQRLFSKEVWDSCRYLGKDSSGYSKSKVQSSDPQANQGAWSTVVKGRWQKMRAGTCGTRPRTEGPSGYHEERRGQEWKQREQRGGECNHPGPWSSESGKVEDVEGALRMADCEFRG

SEQ ID NO: 922442 - protein, 155 aa, Homo sapiens
MGTAAPCPEVSTATQLIAFDGGRRGKFQELRTPKLLLGTSNPTHPKASAPPAISRLVPDTGVLSLRSDPMHRHLVATNACLQDDSAANRGADPDPSPHRLRANKTCWVEAGEGQQPSGTMPFSGMPLPQLLLMHPLCDDVGSWPLSPAGLCVLQA

SEQ ID NO: 922443 - protein, 380 aa, Homo sapiens; identical to SEQ ID NO: 915729

SEQ ID NO: 922444 - protein, 132 aa, Homo sapiens
MNIHIQVFEFLFSILVDGVPGASGHQVSRNNSSQKMLFLWCITEARGAKPIHANTFKTLAAITAISLAKTSHPFKDHESISGINYSPRGTFSEMDSRLEKSPAGDVFLQCLGLCSPSEWLELSIKNSDFREE

SEQ ID NO: 922445 - protein, 138 aa, Homo sapiens
MAASGTNRSERGLFLLYPPQSNPGLSFLLPTCYHSAVVPAWLQGASSYIIDLPKGWELVGEVHSGAHSNLRWLGGGRSRPSSSGSPRDWLSMFSDTYQSGPANLCSSGISASLVAVNVPWESHRTPLLLSVMGVIDPT

SEQ ID NO: 922446 - protein, 132 aa, Homo sapiens
MLEEFGGQSDWKGKEGNLENMTRRREHHVYVEAEIEVKLPQAKEVRLLAPTARRVTWNSNVIIPRAWPEFRGISDAVAHASELASHSPRVTSTPRQLSGAPCFVGQTPTGHPDLASCLLGCGSGITLGPRER

SEQ ID NO: 922447 - protein, 136 aa, Homo sapiens
MLRQLALSPGTFNPERDRKRNLLQNLGELINPQFAVYDGKNFEVLPNPKGVYGFKEVAGISNISTRGCHVDITSPASPARLTVALWGTVLRRILKPKLINKVSQWETVGRAPTNFQGVGKIYVDMVSFCVPTRISY

SEQ ID NO: 922448 - protein, 153 aa, Homo sapiens
MQEGAEGEAELQCSPNKCLSHPPSDLELGWPSELSEGWVVIHPHPHFLERQRDLTTKASTTGFCRCESQICHWLAGKPWSHLQTLPNVPWRTKSPPVENHFSRVIAPKCMSSPISPLAGPISALAGTWQFNSCTRSRKQQYDAVGCGWRAGGA

SEQ ID NO: 922449 - protein, 183 aa, Homo sapiens
MVEWPSQKGWQTSDGQISDKQILMGNPQLGWQTGRPPWVAFRWADLTEQLSDGQTSMGRAQMGRFQPPGWPFSRSGILRAMDIKRRSSAGSTGQVPVNTFVEDTEFRSKLQPSFPLHSSSCSSIHTVIQVSHLDIFFSSPPPSAPEPSGIKSCLPIRLSVTSPLPSPHCPGLGSQHLSPGLGR

SEQ ID NO: 922450 - protein, 143 aa, Homo sapiens
MSVLWFRSCCWRTTDIKHEGVFVTLSSLYGFSSESLCCFGASEHKKGQNLVAMKKAISWIPLISALSGIKSCSRPGGVQEERKGENSKNYEMDIDEARNHDPQPTNTGTENQTLHVLTHKWELNNENTWTEGGEHHTLGPVEG

SEQ ID NO: 922451 - protein, 204 aa, Homo sapiens [sequence omitted]

SEQ ID NO: 922452 - protein, 158 aa, Homo sapiens
MSRKVKSAGSLLKFLLAYVSVDVSFLMNISFIFLRSGGNEEVKKEGMGRGGREEGREEGEMERERRIKRGRKEERRERKRKKEKKRKERKRKKRKKERKKERKKERERKKERKKERKKERKKERKKKREREREGRKERRRQGGREEGRKKGERMKEKE

SEQ ID NO: 922453 - protein, 353 aa, Homo sapiens
MRETKWSLLQEQKMAQSNMYMLESYINNLRRQLETLGQEKLKLEAELGNMQGLVEDFKNKYEDEINKGTELENEFVLIKKDVDEAYINKVELESRLEGLTEINFLRQLYEEEIRDLQSQISDTSVALSMDNSHSLDMESIIAEVKMQYEEIANHSRAEAENMDQIKYKELQTLPGKHEDHLRSTKTEISEMNRNISRSQAEIEGLKGQKASLEAAIANAEQRGELAVKEANTKVSELEAALQRVKQDMARQRREYQELMNERQAGPGHRDRHLQEAAGGRGEPVGVWDAEGDLSSACGGLTSPGLSYAMGCSFGSGAGSNSFSRTSSPRAVVVRKIETRDGKLVSESSDVLPK

SEQ ID NO: 922454 - protein, 183 aa, Homo sapiens
MSTHIRKYRGTEALLMERQLLPLLPPLASPSCCWEPEATAIRIPGEGLSNQPTADGPGGQCRPGDTMGDGMARSCSQGPWNRPGGKTGGSRPKTALGLVCSRSQRNDHPCFWATRKKRGSEDTGSSALHQRRQTGRRWLGFGEGSSEHSRAQAGSSGQDTAVGKRLGGSGGSETVLAGTQQEG

SEQ ID NO: 922455 - protein, 321 aa, Homo sapiens
MNQTLNSSGTVESALNYSRGSTVHTAYLVLSSLAMFTCLCGMAGNSMVIWLLGFRMHRNPFCIYILNLAAADLLFLFSMASTLSLETQPLVNTTDKVHELMKRLMYFAYTVGLSLLTAISTQRCLSVLFPIWFKCHRPRHLSAWVCGLLWTLCLLMNGLTSSFCSKFLKFNEDRCFRVDMVQAALIMGVLTPVMTLSSLTLFVWVRRSSQQWRRQPTRLFVVVLASVLVFLICSLPLSIYWFVLYWLSLPPEMQVLCFSLSRLSSSVSSSANPVIYFLVGSRRSHRLPTRSLGTVLQQALREEPELEGGETPTVGTNEMGA

SEQ ID NO: 922456 - protein, 142 aa, Homo sapiens
MDPMAPECPSAINLPHLLTGAICAAQMAEHRLPALDASPTLLFSGYTYRKALQTIRIGTMSVPVITSPSLSSLNPPSRGPRCPSLFPRTPVTSLSVTQELKGGHLAQQGPSSCPRPWVSVPAAQSLCLAGDEMYLFPIRLPP

SEQ ID NO: 922457 - protein, 141 aa, Homo sapiens
MLTLRPEGEGGGGCSRNPQESVPGSRTAAGAVTPSVLVGSGVDGSEPTLHPVVPQHVIVCHEKVIPVSKNCSLLRMMGNLARQRIQWVQANGSIAFVKTKLLDQKQCVGNTLMICKVPYAHGWWFWQKHCRQGRQIHIQNK

SEQ ID NO: 922458 - protein, 303 aa, Homo sapiens
MWYLGLAVYSATNVELVTRTRTEHLSDQDKSRSKGKPSSHPFSVAGKTPFQSFLGMAQQHSSHTGAPVQQAASPTNPTAISPEEYFDPNFSLESRNIGRPIEMSSKVQRPDELVTPIIDLMAISNAHFAKLRDFITLRLPPGFPVKIEIPLFHVLNARITFSNLCGCDEPLSSVWVPAPSSAVAASGNPFPCEVDPTVFEVPNGYSVLGMERNEPLRDEDDDLLQFAIQQSLLEAGTEAEQATVYEEQLQLERTPPAPGPPSFEEQLRLALELSSREQEERERRGQQEEEDLQRILQLSLTEH

SEQ ID NO: 922459 - protein, 193 aa, Homo sapiens
MTVIQLGLLPVIQDDTTEEEEEERRRRRRRRRRQKKKRKKKRKKKKTKKKKEEEEEEEKEEEEEEEEEEEGEGGEGEGEGEEEEEEEEEEEEEEEEEEEGEEEGEEEEEEKKKKKKRRRRRRRRRRRRRRRRRKRKKERKKERKKERKKERKKERERKKKKCQEQQSSKIADITRHRHQVWKNLGSDYSSTTH

SEQ ID NO: 922460 - protein, 135 aa, Homo sapiens
MTNNGSVTSCETVHSLKEGTVSYVISYLKKQAPCLVLDRDRNQDVLHEFSDPDYRSMGVLSGGICDGQDLWPNHNSRNGVDEPGPADGGPSGLQEPSRNHCFWMTLCTELGKELAPMPGMVSPKTSCLNCEEKTP

SEQ ID NO: 922461 - protein, 135 aa, Homo sapiens
MKIRSQGTAQSEFSTGIFQHNLEVRAVLGSQRLGEANSGQGREGGGHEGDTASQKHSNKQRTGKSEQQQVRRNPRVGGLLLDASLICGTVCSEVHRDELPWLECSGVISAHCNHCLLGSSHSLVSASGVAETTGM

SEQ ID NO: 922462 - protein, 175 aa, Homo sapiens
MAHVYIGEVIPSLCGKHPKYTRGTARKASASFLCIRVHGSHSGSSQLVGIGAVASERREVIVPTSAADLGVLGPKPASCCSAPAEPRKGVSDLLPVGAVPCDLESVLILSSRAFVPCDLESVLILSSRAFVPCDLESVLILSARAFDRWQCPVPMDLLFSASPTSNKVSRAGKCF

SEQ ID NO: 922463 - protein, 138 aa, Homo sapiens
MRFDSPSSYTSRKCSKEKHSKVCKAAYTKKSSSKSCLFMQSDRRMSVINHVEVLYEYLLQRRNIRRLRVCLLQTASTVYDNNVDHLIKGHPEGHYSCSVARISFKLSDCLLTAICNKLLTFALPPEQLPARVECMENR

SEQ ID NO: 922464 - protein, 146 aa, Homo sapiens
MLLICSSPPAILSPLTTADESYIVNSQFPTMAPSRAGLWAACWIKLFLNAVASPKLELQSPLKTLEITAPGMEFQRQQRSETNSYVVTSFPSVTETINSKFAVLVVQGLPDNSLALGFLVWTLATGEPTDNAEELTGKLLLLYSQA

SEQ ID NO: 922465 - protein, 153 aa, Homo sapiens
MSSLKSNAITNECVAKQTVCELPQRARCGQVAMGVSEMGRCFGGQKSSMIMPLHHISIPDTSFSNQGACTILINFLSWTKKLVLKGGSENIARCSLEDRAKAEGVCFTSLSDSDCQGPTVAPCCGGGSICYRAHFTRKGPSPPPRSQPTIHLI

SEQ ID NO: 922466 - protein, 154 aa, Homo sapiens
MLRPHEGTEGIGNVLFRDQRGLVQRSHCSGVTLKPFPCETETFHPKATTLLVSPVLFSSCVSLFTVKLMATFKMTGAAESLIFRLAWCYAAVADLQGEIYRTFSSCKTENLYPLNNHSPSPSSPELLEATIPFCVYDFNYSRNLSWKHIVFVLL

SEQ ID NO: 922467 - protein, 141 aa, Homo sapiens
MQNRPRFDQFCYWFLKSSKTMHLLFAHICRVFPCLPLCAMLSLPKRLYSLYAHSHLIPSEVLPVPCMGQGGSQEQEASMQLRSLEQLLCSHPLSRGHHILIVGPRIRRSMMQATCSGFTAQNRGPVNPQPLINVRNKCLLL

SEQ ID NO: 922468 - protein, 152 aa, Homo sapiens
MSSSPLSPLVSSIKRPLSFPQCADASLPALTIRHLGVWKESTEFPWKPGLTDGPSLGRVPGIEDEASALRSSECAVSTEVSPDIQVKADLGPINLRQFTEKMFSLDLMFPDVNCRAADSNQRKFLVRLLGGLCRSRGVRCTCWSSAWIRPEF

SEQ ID NO: 922469 - protein, 157 aa, Homo sapiens
MTPLTWCPHGFTALTLLFFLFYRSPGTSFALVVQYSVSPPVKLICTLKGPTVPDAGTQACARTLPAPGSQMPQASVCGAQVEVWRLRQGTVKDDDQHTTQNTQTELDSLLPTLKEMALLAAIASLKRVRGRRVTSSADTVCRHSTVIGSQEHSCRSA

SEQ ID NO: 922470 - protein, 162 aa, Homo sapiens
MALQRTDSLWLQRVFARRCASLRDTQINTLIWSLRNSEPSGGSREENYVSPCVIPMQQEVSVCQAESACSYWSLSAALPNTSSNKPMAIGLKSFVFKLQLFGVCHVLPWEMKVCVQGSLTGNTICSVCPTIFTVPFCVSLKIHCKPLRNLPSFSISPLNFLS

SEQ ID NO: 922471 - protein, 134 aa, Homo sapiens
MVGLPIRLSRISFQNLDEAGLCSARLSPTGIGFLGPQILCSTNGHTYLQQTRFQVQLSPLFSTVPIFRSSSFEKAKGYSSTYPVAPSETLTTVFQAQFNRTGIWAADPGIANVILEPATSVFLGWCRRKCGFCH

SEQ ID NO: 922472 - protein, 215 aa, Homo sapiens
MSLGFKVSWALGHHSCEPHFISFLRASLQDELQWLSLVLGLTTHSLSGAFTSPHPVFALVQMLLHTQNNTRATRMQHACTPPRGSSTCVHSTQGQLNTRALHPGAAQHACTPPRGSSTRVHSTQGKLNTRALHPGAAQHACTPPRGSSTRVHSTQGQLNTRALHPGAAQHVCTPPRGSSTCVHSTQGKLNMRALHPGAAQHACSPPRDSSCETRV

SEQ ID NO: 922473 - protein, 141 aa, Homo sapiens
MRGPEKGLIPPQTQKNALGKSAETIALFPLQFAVINFMEESTSHRGQDTVGTARLSSTDIPEKEISALNIRRKKKKKKKKKKKKKKKKKKKKKKKPEKKKEKEKKKENRMVKETQELTRKLQNLIGHLKKKYTALGKVLRA

SEQ ID NO: 922474 - protein, 156 aa, Homo sapiens
MEKKHPMQKQKKEKDKKKRKKKKKKKKKKKKKKKKKKKKRKKKKKKKKKKTEHAGALCRQTPGRTRLRAELLRYCLQQSSMSLPVRRIGISKEGHEGDLSPHFPISPSSSLGIREHILDGEAPPGTAWLGGTAIPARSRVVIVTCSLPPPPPGSGR

SEQ ID NO: 922475 - protein, 138 aa, Homo sapiens
MRTRTLQAAASQKSCVPPGFSGPLNIPELHPCQGGASTGLQAESPDSSGNSHCAEPGARVKRAPTEALGPTRFHLLDISEKKELYLSCKGNTGYSYHKCREGFQTGLKLHETSPRLCADSWPTLEPRLLLPGLLVNPP

SEQ ID NO: 922476 - protein, 178 aa, Homo sapiens
MQAQSKRPARCKGKATKAIASIPFTLHGEENILHEHHSMDKEGEYLYFIHCELLYPKQSLNKICVENYRSIVVITAPLYASDDFDICVLSVLLFEESLCHVNEDLPVFFIMPKILGLAQNCLVFKFQVPTSLPRVVVSKITLFAKPLRHCSEISGVCATSVRTGKWAIAQFSSQALCR

SEQ ID NO: 922477 - protein, 209 aa, Homo sapiens
MDAPPEYTFRCECVHHGRSPRIHIQVSKVEREKNQELRQVREHEQHKTAVLLTELKTKLHEEKMKELQAVRETLLRQHEAELLRVIKIKDNENQRLQALLSALRDGGPEKVKTVLLSEAKEEAKKGFEVEKVKMQQEISELKGAKRQVEEALTLVIQADKIKAAEIRSVYHLHQEEITRIKKECEREIRRLPHIDVTLATQGPGPNQHS

SEQ ID NO: 922478 - protein, 187 aa, Homo sapiens
MIKIVNHGQVWWLMPGIPALWEAQDPGSMGCVLGAAAPDGHSGPPFQVARHSSCSSALSKHFLDTSPGPGIVDLPGVARCSWVCVSPVPVDILLLTQGPHPPLRVGGVRSCVSPPSRPAPRRLAVYGAVRPHRATSFQCTELSVPHPTPRPLRAECPLMELCVPPPRHELSVHRTVCSPPPAPPPAS

SEQ ID NO: 922479 - protein, 239 aa, Homo sapiens
MTVSAGRWPWWEQAGQPTWHSLPAPRPLWVPLVAQDPTPALSNPHSSGAQTCSFLTCCMWPASKVASSRGHLGGTQPHPGPKARVRSGGCRNAKGRCWWSKDVPRRVDQEERVRGSLRRSIWVASCERRRGSPAARRFLSVAPWAAAFLNIWNMLTPFFLDLFLRRWSLSFLFRDSLALWTLGFRSLARRRPLLSTVGRPESRKSVPVTGGYLLPDSGKMAVRWKVPGILWDPCPTPQQ

SEQ ID NO: 922480 - protein, 140 aa, Homo sapiens
MKVSPAASPACAVPQHQTWALGKQGWFLFVPAPCGKFQNSPSERPKPFYFKGALPSSLSHSEEITEVQNKEEIDKEGIVTKHCPHKKVCQSQQCFTLNVLCLKCRILGYLEPEKTSWPGDADSIKTSLGSSNHYFKVSSW

SEQ ID NO: 922481 - protein, 146 aa, Homo sapiens
MKIFPWHVRGLHGSPSHHSPRGLEGKDGFMGQAQGPHAVCTASQPLQLWLRGANRGQCRAWVVASVGASPKPWQLPCGVEPPVKAAKREAVPCKATGVKLTKTMGIHLLHQHDLYVRHGVKDHFGALRFDCPTGFWTCIGPVAPLF

SEQ ID NO: 922482 - protein, 136 aa, Homo sapiens
MSFSGGEIAKPKILIDLITAISKLRPWVRTFLSGAVCSGKQEEQVHSKVERKVQRFPIYPRLHTHTASPMANIPHQTGTFVTIDDPTLTHHKTQSLSFTLGFTLSGVRSVGLDKRMMTCIHHYCTIQNSFTALNTL

SEQ ID NO: 922483 - protein, 151 aa, Homo sapiens
MNDQEHHLVLKVQPPHVKMHSPGPRSHVGALKFAQRKGAGRVVHICNLPEGSCTENDVINLGLPFGKVTNYILMKSTNQAFLEMAYTEAAQAMVQYYQEKSAVINGEKLLIRMSKRYKELQLKGPFCLRPTGLNPPSRLKLEDKGLVDVSG

SEQ ID NO: 922484 - protein, 141 aa, Homo sapiens
MEACGFCSPSLSQIISAQSQEGLHILGKRNSPGGLLLVGIPLNGLNSLALMLQTEKQPCRPPLAQDAGTLLLNLWGVSPGAAQEAVSQAQDMVTWFVSWPVGVSAEGVPMGLFLRFGISVQGYQASHGRVMPISGILRKRG

SEQ ID NO: 922485 - protein, 237 aa, Homo sapiens
MHTNPMYVVYAPCKAWKSRKWSFFPVGADILLLNGSPYPHLAPTVWEMLERNKRKCPLKIELPGMREASGLEEFWKVTKIEERGCEEAAWQRVMGLAVVLEMSDQVTSASAISGAPALAFSTRGMQTAAALPPFLWLFLPSAVCAQLASTHQAEDDVCIKVLPAVANESAIVYPPLTGYTWVFEGWAGIWFHGQLHVKLLPVPDTGLSCLDRTWTTPLLFFSSLLISSCKAFSSRCG

SEQ ID NO: 922486 - protein, 161 aa, Homo sapiens [sequence omitted]

SEQ ID NO: 922487 - protein, 288 aa, Homo sapiens
MADFSTFPLTLPGRVLLCAAGGTFEVDQTVPIEVHVLEDLVHLPLAEALPQQGLEGRPELAHADAAVPIAPHSRQTRSLPAFSPSAALFRKASRSSRTPIMSAVSASSLGPISSTKSSKSTFPPPGGPRRQGRLAQFPMGPEPCQAWNPGGGPGGPRRMLLPEDSCQPPAAPDESLGDPSWALGSSPRGSPNCLHLAPPAWTGAPPLDEEQKGTAYVLWAVTGLGCLHLGLELPEKLSSPGGCWGSRGLAGSWSASEGLGSRWEAALCWALGLGHGDEGLLNLELGTW

SEQ ID NO: 922488 - protein, 134 aa, Homo sapiens
MVPLGVAQALRALEFYLVFVVLHLGDKLYLQNLSVLVRGPHPRLLQTQPGDRSAATLTSEAAAWSSDSAGWQHQTTVLGASLRQRSQRKEQAAIFVVLQPPLVTPPGVGGTQMHRIWSGPPANCSHPMEEGPEW

SEQ ID NO: 922489 - protein, 151 aa, Homo sapiens
MLLASLFPQLADAYWETSPCNPLPCHEDTQAALWRGPHGKALGLLPTAGEQLPCEEVILEMDPATQWSLQMTMQCGLLNLISQREGGFECDSKPVQYSKSYQRVQSWERGGEEQGHPEGSVTKDWAAAEACSVGRGSRKEPKSPKVKMMYR

SEQ ID NO: 922490 - protein, 148 aa, Homo sapiens
MFRPTERGQRAWMDLNIWIVLAAAVGSGKPAGRCGRRGWSDCGMMSGKWKLCLPTPSEEQESQSESQNLKSREADSAAFSLWPKAREPLANHWCGDKWNQALDDIRNIMEQKATDLPPWIDAPNKHLPTDPFPRKVRDQLRDTYPPDK

SEQ ID NO: 922491 - protein, 144 aa, Homo sapiens
MELSWLSQVIPESSPEYFEFLVLSHTIGHTPHVFKITLSSKEFPKITLYNPSTELMVLKTVFCEELPKSPGCTAGNLEVFATSSALCWMDRRLLTKWPTNSRKTKLCQIIVSSAVQEEKLIYKTMRLHSGCQNLQLHCTEGLHE

SEQ ID NO: 922492 - protein, 157 aa, Homo sapiens
MPPKFDPNKIKVVYLRCTGGEVGATSALAPKIGPLGLSPKKVGDDIAKATGDWKGLRITVKLTIQNRQAQIEVVPSASALTIKALKEPPRDGKKQRNIKHSGNITFDEIIKVARQMRHRSLARELSGTIKEILGTAQSVGCNVDGRHSHDIIDDINR

SEQ ID NO: 922493 - protein, 134 aa, Homo sapiens
MRSLATWLHVVSEDHEEQFASSWLGQQFTITLSPQNFINLLILCHNLICRNLGCLSIHQAMTPIECFDDTKLIGSDEQELVSTVSISATTCYQGLSYTSHSSWNEPLFAIRTIWKAQKRESVYSAHGFPFSESH

SEQ ID NO: 922494 - protein, 150 aa, Homo sapiens
MPKAHTLLRPEVDPEPGRIQWGALHGQQVKPLGDAQGSKGDIIDGKAAPLGLWGTLVGSLEALKDSYNCGSCERAAVVDPHTGQKVYSESLLCRMSAAARCNRNDGWEPTDVPPTWHQQPGPLKATVHLGPHPANINTPHHISVDVWRKC

SEQ ID NO: 922495 - protein, 137 aa, Homo sapiens
MKVAKGSFGLFLSLYLSENTFFSERYNSKGKFDSHCQCLQQSVCVPGYLRLGSGDDSQRACCLQASVQQSTSCTALNPSNPEWTQHMFQRAQGWGMKLAGGKCHAGMCSLTGDSWLERRKSETSLTSLLWKLPPECL

SEQ ID NO: 922496 - protein, 757 aa, Homo sapiens
MLTIINQLQGVIYPETLKLEGKGPELVGPSKSKPRGPSPLPVGQMPVTLQPQTQVRENKTQLPVAYQYWPPAKLQYRPPPESQYGYPGTLPAPQGRAPYPQPPTSRLNHTAPPSRQGSELHEIIDKSRKEGDTEAWQFPVTLEPIPPGEGAQEGEPLTVEARYKSFSIKMLKDMKEGVKHYGPNSPYMRTLLDSIAHGHHRLIPYDWEILAKSSLSPSQFLQFKTWWIDGAQEQQVRAICLRAWEKIQDPGTACPSFHTVRQGLKEPYPDFVARFQDVAQKSIADEKARKVIVELMAYENANPECQSAIKPLKGKVSTGSDVISEKRAKGPASGPTTNWGIPNSALCSSGFSGTTTPTVPSTSGNKPVTTIQQLSPATSGSAAVDLCTIQAVSLLPGEPPQKIPTGLYGLLPEGTVGLILGRSSINLKGVQIHTCVVDSDYKGKIQLVISSSIPWSATPGDRIFPFLLLPYIKVGNSEIKRTGGFGSTVPTGKAAYWASQISENRPVCKAIIQGKQFEGLVDTGADVSIIALNQWPKNWPKQKAVTGLVGVGTASEVYQSTEILHCLGPDNQESTVQPMITSTPLNLWGQDLLQQWGVEITMPAPLYSPTSQKIMTKMGYIPGKGLGKNEDGIKVPVEAKINQEREGIRVSLLGAATVEPPKPIPLTWKTEKPVWVNQWPLPKQKLEALHSLANEQFKKGHIEPSFSPWNSPVFVIQKKSSKWCMLTDLRAVNAVNQPMGPLQPGLPSLAMIPKTGL

SEQ ID NO: 922497 - protein, 260 aa, Homo sapiens
MNKMMMSEEQMKLPSTNKAEPLTWAQLNKLTQLATKCLENTKMTQTPESMLLAALMIVSTVVSLPMPAGAAAANYTYWAYVPFPPLIWAVTWMDNPIEVYVNESVCVPGPTDDRCPAKPEEEVMMINISTGYRYPPICLGRAPGCLMPAVQNWLVEGPTVSPISRIISYMVSGMSLRPRVNYLQDFSYQRSLKFRPKGKPCPKEIPKGSKNTEVLVWEECVANSAVILQNNEFGTIIDWAPWVNSTMIAQGKLSRVPVHK

SEQ ID NO: 922498 - protein, 151 aa, Homo sapiens
MTAGDLFNVHQYSSVLPKLCFFWSINTLHFPAFVATSTAIFKNPVEIHLEDFKNWERFSSGWDGLSVMLLEFGANGHKIFPGPFFELPELYTLIPVILTWEWFGFPTPPRRHLAISEVSYNVQDSPYNKELSVPKCQQAKFEKYCLMLTSF

SEQ ID NO: 922499 - protein, 136 aa, Homo sapiens
MLCICQRRGRCAREVVGRDSGKADAIRGYGLEQKGNKADPSKCGVLSEKSPKQPVHPRQRENIVKSGYAEKISSNTIKVIVIIMLIVIIITSVKINQTPEISQKPQKKIRCIDMYHTEHSITPACKKTAKRKGMLV

SEQ ID NO: 922500 - protein, 134 aa, Homo sapiens
MGDTWYFPTAKRRTQASAQIGQEQTTPLPSAKLLAYPESIAALSRGDLRVHPRKGGNFNAQKKYYYSCEKEARDMGLCFPVILATDDDYCPGMENVICRRNKSQTYDVSTNDFHFDFENTTKSLEWKVKISKKF

SEQ ID NO: 922501 - protein, 151 aa, Homo sapiens
MSTKQVPVFYDDICGPKLGTQHSTSVPEIAKYLAEKLIRPTNLHGSKCLSYNLASAFSNQLLLVLPADFWANPKRGKKQNRILILAANRFKPALTSASNEFGCLLGLSNIGKFPRRVEEFQDVFSTASPINLDFIMNHNQEDRPVNLLPCD

SEQ ID NO: 922502 - protein, 174 aa, Homo sapiens
MDLWAADRERPSIESQRCCEEERRGEERRGEEKRGEERRGEERTGEERTGEERRQKRREKASKQGFESLQNLLIEMQGELGYPSAISTEAKESELITLKRSVDVAFIKYSDIQEQADKTTQLQTGATFHEKGKMIPRMESQAPGGDPRAWENYSAILKSNQETSICSDAFWNCL

SEQ ID NO: 922503 - protein, 162 aa, Homo sapiens
MLSLLFLCTLHPSLSSLSFGLTLTPIKLSKLPRLYCCKGSQTAPITSIKPKFLPHLPNRHTPAKAGFAIVQATSPPLRTSHFFSIVEIYPQGNNFSVFHLLFYYSSGIIQASSLPHTSSSRNCPTQDWQISFTPHALSQKTNISLGLGRHFHWIGTSLSYRV

SEQ ID NO: 922504 - protein, 165 aa, Homo sapiens
MPPWGTVILSVVPFSAIPREQGQNSKPCSNALNRSTALSGNLNVVPNNTRLTLDYRKWLPYAGKEKQDRITLPALSTSGAPQLLKSLLVPFVMPTGLVYPFWPKKDMMTRDTDPPGMRADHPTRREVSSKLEGLFLGVHGEVYPSSAEMDEREHRGAQPGPQRRT

SEQ ID NO: 922505 - protein, 155 aa, Homo sapiens
MRHQIQTSPQLTFCDHKCIELSSLKFEKYQGFPHMLPQGPGCWTCFLTFSSPKDVDKFNLQWLSWGLSAMTCLSAHSKGAPSFGVPSLKLSVSHSGGCDQQGLAGFPEFGSAAKWVPVVGNAYLEIFYVPMQYLGLAGPELAELSWWCTLRTPLR

SEQ ID NO: 922506 - protein, 171 aa, Homo sapiens
MCEMSKFTSPSTRVGSGLWGSDGTGFRWQSHERAGPGGGSLGMKSQQEPCREMMTPWTTGECGDYSLSIADAVWTGISDRLNVSRGRDDGVQQTHEDEHCQEENSPSIVTREKEGKMGTNMEILVNVENSENGHFLRDKKDKLNRIEGPLKVSEQLFTVTPICRNCIYSVA

SEQ ID NO: 922507 - protein, 149 aa, Homo sapiens
MQCERNLCHWLMPPHPHLFPDFPYIHDILCTLHHNAFSFTSVLLHMVSPCLQNLPLSHSSIQSFYFSSKKECRHHLLQESSLIFPIILIPGWIRCWYVEFSKALPKLPNVTWVRGGEIAPGENRCHAHLEVRSARLEVPESLDFQLVMF

SEQ ID NO: 922508 - protein, 164 aa, Homo sapiens
MGLVKGPATLHSLTALEHRFPHPSCFSSSQGSKKPRAVPRGNVELEPLHRVPNGVLPTGSVERELPLSRTQNGRATISLQPQCGKATGVELPKALGTHPLHLCALDSLYPKRTLLHCYYSEAQSSQGRCFQFGFAVNCQPCRPKLEGKAPGLIQAGQSKNGMWW

SEQ ID NO: 922509 - protein, 158 aa, Homo sapiens
MNSNSRPFYKLIDQYTLKSVKIMQVKESLKTVTEVKLPTFTLSVTALNAVHLELFVPPGGFVVSLASGVKLQTFAASVTAHKGNVDPKIVQQQNLLPRAKEQTFPSVEKDPSGLPLLTPAACFYSLIWPHPHPADWSILQRADWSVLQRADWSILTGC

SEQ ID NO: 922510 - protein, 324 aa, Homo sapiens
MNNLISQESSERKVAMQQVASFPLLCFLDFWIISERLWLLGMLTSKADPKHCQEQDTQKLRGGAKQNYQRLGTDSGAQPELGTPGSLNIGESREKDKKVNSESGTRKDWDESGKRLKAKREKQGLAPSPKLECSGVITVHCSLYLPSTMVVDKNKRLTKGGKKGAKKKVVDPFSKKDWYDVNAPAMFNIRNIGKTLVTRTQGTKIASDGRVFEVSLADLQNDEVAFRKFKLITEDVQGKNCLTNFHGVDLTSDKMCSMVKKWQTMIEAHVDVKTTDGYLLRLFCVGFTKKRNNQIRKTSYAQHQQVLRNPEDLLCSVPAKSGRR

SEQ ID NO: 922511 - protein, 211 aa, Homo sapiens
MEEQWQAFSLIGSGNGCLTGSGAQRTPCQIRRGGSQRRVCEGGKQQWWMCIMAPAFASMSLPNKGVGLSGIIRKACENSKVPQSQLSGWEKYLVTACPRTPRIVTDLEDSCPGQERKTEKAAPVSRRQLTSWPLMVKHTRGLCEGDGMGWHLPPAPSVLLLDHLISYAHRRSSPASFFPHFLTTKKGVWAAGFEWSFTSVPNIAFVLRDES

SEQ ID NO: 922512 - protein, 420 aa, Homo sapiens
MHLLRGEFWQVRSAGQMLEGYGEWVFFGDDVELTVVSKSVFLNWPAYQKCRQPDCGAEILSSLVVALHDNPWVCDCRLRGLVQFVKSITLPVILVNSYLICQGPLSKAGQLFHETELSACMKPQISTPSANITIRAGQNVTLRCLAQASPSPSIAWTYPLSMWREFDVLTSSTGEDTALSELAIPAAHLVDSGNYTCMASNSIGKSNLVISLHVQPAQALHAPDSLSIPSEGNAYIDLRVVKQTVHGILLEWLAVADTSKEEWFTLYIASDEAFRKEVVHIGPGINTYAVDDLLPGTKYEACLSLEGQPPHQGQCVAFVTGRDAGGLEAREHLLHVTVVLCVVLLAVPVGAYAWAAQGPCSCSKWVLRGCLHRRKAPSCTPAAPQSKDGSFREHPAVCDDGEGHIDTEGDKEKGGTEDNS

SEQ ID NO: 922513 - protein, 166 aa, Homo sapiens
MTCLSILLNAFFGFLLSGMFPYFSVAMAAMPPLSSGQRDDKFSFRSHSKSCHAHSFPVDQSHKEEGLTWRQSLLPNFSSLANSVHSSEASGEPCSRLGKIISSSFFKTHSFFPVIFNNLGFWNIKARSHMSYFCFPLLNVSLGAVSSELVKGLFKGETRRSGKDKR

SEQ ID NO: 922514 - protein, 371 aa, Homo sapiens
MSDLLILSHSWTNDLEPGSLIDLTVGTPVTQPQTLNTMGIIGSRGGRGQVAALNRQRQGTTDTGPELTLIPEDPKHYCGPPVKVGAYGGQAHQKQFAFSWQGQQCTFTFLPQGYINSLALCHNLIRRDLDRFLLPQDITLVHYIDHIMRLDSPALTASWGVLYDQLIEEENTRDWFTGGSAPYAGTTPKWTAVALQPRSRTSLKDSSEGKSSQWAELRAVHLVAHFVWKEKWSDVRLYTDSWAVANGLAGWSGSWKKHDWKIGDKEIWGRGMWMDLSEWSKTGKIFVSHVSAHQRVTSAEEDFNNQVDKMTCAVDTTQLLSPATPAIVQWAHEQSGHGGRDGGYTWAQQQGLPLTKADLAMATAECPICQQ

SEQ ID NO: 922515 - protein, 168 aa, Homo sapiens
MLGRGGQLQGMASKQGGEETIWKHSGGCGEEDTYSCLTGRVSKIFMPELAIQRLRRPNVTLDLALLHVVKNRTKALSPPASFTAASFSGDSFGWRELPCSSLCLLSADSLQPGLVDEGVQRPEGPPSMFSRCALQRIHGNMGGKGTTGAGQCIAHFPVRLSCGAVSGN

SEQ ID NO: 922516 - protein, 140 aa, Homo sapiens
MLGAFHTQNKMLSSPQEQLVDSPLGSLMMTGGEQLRCGREQLRWVGEQPRRVESTITAKSEHRQHEKFKVANGAVQRTCLGYLKRGGSEKSSDNETMLHLTAESDSRPITSSKLIIIIIIIIIIIIIITIIFFEPMRCQD

SEQ ID NO: 922517 - protein, 135 aa, Homo sapiens
MYLVTVLRNLLSILAVCSDSPLHTPRYFFLSNLCWADIGFTSATVPKMIVDMQSHSRVTSHAGCLTQMSFLVLFACIEGMLLTVMAYDCFVAICRPLHYPVIVNPHLCVFVLVSFFLSLLDSQLHSWIVLQFTIV

SEQ ID NO: 922518 - protein, 315 aa, Homo sapiens
MGEQLELWRQQLSLGLAWGVDLGTPQKAPMWRLTERRRKAHRMLKLYNGLSEGEAVGLPAGPDPLDPTDLNGAHFDPEVYLDKLPRESPLAQLMDSETDMVQQIRALDSDMQTLVYENYDKFIPATEMTNSIKLYEELQETRNFSNKLVKEEQKVKLQTFSSPTDSGAQLASPSGFCTGAAGGAACQFLSVHPHSSALGWSMGLGAVEQGAVLVGEARAAQEPMEGGGSGMAGCRSQALPHMEAAKAQREAEHSSCWPTEGASSDLGQPRKGLPPCSHGLKGSSSATKVGAQAEEALRVSEGCEGCQHTVTSHKE

SEQ ID NO: 922519 - protein, 136 aa, Homo sapiens
MFRAEPPGESGPIRQSCHRRSPECSAKSSFFLVELSEYVLCAMEAAALSGAGQVTARPSPCLSLQVVVGCSMGLQHGTAAWDRRGSLAPAIAAPCFLCLAIAYSVPCCEDGRKCLEWCQPEGLQTGGTCWECAIRH

SEQ ID NO: 922520 - protein, 192 aa, Homo sapiens
MRGRCWKTCSHPDTLEPMAGSLGWGKWKDSVCADFLFTNRAIRLDGKLGESVITGAPGMTQANPRPRASLQCLGPVSPLVAPSDCGGHYTDEYGRIFNYAGPKTECVWIIELNPGEIVTVAIPDLKGFACGKEYVEVLDGPPGSESLDRICKAFSTFYYSSSNIITIKYSREPSHPPTFFEIYYFVDAWSTH

SEQ ID NO: 922521 - protein, 335 aa, Homo sapiens
MIREWKNDCQRIEKQRASDTMVQERKNEKPVRIFNTNSSFQDQAPTCCQEDLSSASPLRIWSKFYRSDPRIALGKYSPLEKEILRLGGIHTIAARRLLAYKQEEECRMLKELQLLSPDYKQAMEYKKKHSSPCAICVPLEKIWTAKVIAPLEAFKMPQREQVNVSKHIERMRLARALGNHQPLPYIERFTRSSFLSGVGLGPMAKNKARRKEDNYDTHNCDDANQDKKEEAEGKNTKRREIKMNVVFKSKEPKKCLTYHGNDRKSFLPAKKPERSIAGLTNRNLFCISEFPGDLMLMNQDFISRRDHFSDLVKTYSLEEESIWKERMRKATPYHY

SEQ ID NO: 922522 - protein, 311 aa, Homo sapiens
MGGSGRCLGRVEILHQGAWGTVCDDLWDLNEAKVVCRQLGCGQAVSGPGEAHFGPGSGDIFLDNLQCTRVEHYLGQCTHLGWSEHNCGHHEDASVICSDAEDLPPPTPPDSSTASQDHIKAMTLQAVMTLQAVIPKPGPICTLQAHCLPSVRLLMLRGPYRNPRNSFRPPESQIVSPWMWFGVCLYRKDGPELRLVGGSGQCSGHGEVLHKGSWGTVCDDLWDLNEAEVVCQQLGCGKAIAAPGKAHFGPGSGDILLDNIQCSGSENHLGQWPSSGWSDHNRGHHEDANVVCSGGLSFHDRFLLIFHPKTS

SEQ ID NO: 922523 - protein, 143 aa, Homo sapiens
MAHGGLCATTSGASTLPTWCASSWVVGRVLATPGNGHLVAGVGGGGVGHILLDDGQCQGMETTLGQRGYLGLSIHNCGHHEDAGLICTDTDFQLSPEAARAMTLSGGPGNQCEEVWVSLASSKQMPKVHSQHELLGQRIHNDI

SEQ ID NO: 922524 - protein, 136 aa, Homo sapiens
MTLAHESTTTKKAVVKLMARKSLILGKELPLSPQIQHVDSKPRAAVTYFLLHGYLGTFKAFAGWLVSINQCKHRRILSLDFAVLVDKEDEAQIPVCALQSPEGLALLPSSLSFAAPPHWELQTWENVAFSQPSPLC

SEQ ID NO: 922525 - protein, 141 aa, Homo sapiens
MPPKWEPRQGRCREQARALRTASTLSPLSNSTAPSLLYIVDIILTPHNNSPRSIPKRIYQNLELAYENITSREQFIKPPITPWTPFGSVLALDDRNTCQDPRWMPEITDSTESYIYTTFFLYIHTHDSLIYKLGKVRNWQQ

SEQ ID NO: 922526 - protein, 137 aa, Homo sapiens
MAKPCTFHSGLLLPLPAAFSQQWADLWNVKWPELPAQPQMQGEGNKAEWSWTAKPTTWILQCDMNLIVTNGHDGSIYTTGIGVSGPDGTNDLKEITLPDIRKSDQNTFLEKLSVYGKIEQKIKCSHMLLPPQHLPYY

SEQ ID NO: 922527 - protein, 146 aa, Homo sapiens
MAFHRRLPMVKLCFLSASTLLHYQGFSSSNNGQALHFSLRPPAASPSCLQPVSAEAPLQWADLWNVKWPELPAQPQMQGEGNKAEWSWTAKPTTWILQCDMNLIVTNGHDGSIYTTGIGVSGPDGTNDLKEITLPDIRKSDQNVSK

SEQ ID NO: 922528 - protein, 135 aa, Homo sapiens
MGSTLPRSLGLRDVRTQKTNGDASSFSPSHTLSIHWEEKVTRDTFFPSFEMGNQSSSVCTSLKCLLNHCDSFGKKKCLLSAFSSSVLSLGMGNCVPVPNIGHSPWMCPPNWEELISPTLKMLGLKLSLGEGNSEA

SEQ ID NO: 922529 - protein, 164 aa, Homo sapiens
MANTTPALFPMSHTAKEISTSCILPLSALVCPAVPTDPWTHQQEHIPSQDKQGCGANTAMTPLREQLHYAAQAAESLSVLPPNLDVSVGPDFIAIYKALTPAIVKLEESIQQQHAAGEGYISYNIPSGPQPSSGCHGMWQRAFCQQHRQPGYTLAVTSMQGFGN

SEQ ID NO: 922530 - protein, 135 aa, Homo sapiens
MSDESSKASAAPCLRLPEATLKCAPSITRASEFSRDASNLAFKYSQFLDKKQIQAIFLFEFKMGCKAAETTWNNNNAFGSGTANERTVQWWFKKFCQGDKSLEDEEHSSLPLEVDNDQLRAIIEADHPYNYTRSC

SEQ ID NO: 922531 - protein, 136 aa, Homo sapiens
MNPPACSNFQCSSSSFSGEKQNTEPVDDDAMAGHPPGAEEQSVETNLGNERPAGLKAESPGLELLKPPGFCRPGQDQMPENPHPNSATPGQFTSRNQKVFVMRVLSGGEEAGEMGWMFMEHLWSVNLKSQKLSLSS

SEQ ID NO: 922532 - protein, 153 aa, Homo sapiens
MGISHLLPELPALWTQQCNFTAGLVMGWSTAEESINFIGIYQNIYQNPEAFTPSHYASEHAFGWTETDMHPILGNLTLHSQHLPENSLYSHEKEGYPLSRLLRRYSLTRKTFSLYLPPPDLFFKQQQQMLEMGSETAGDQLSYKRVPSALAAD

SEQ ID NO: 922533 - protein, 232 aa, Homo sapiens
MTSDANIYDDDDDGVDDDNDDDGSDDGNYDFQRAKNEVLKGEATTWMVNVCPQHWPPAPGQGQRQNQSRRWMMTPRLYGYCPCNLNFQRGDRGPGREKHTEVTAASCSVATPPHLPQAISKVGQVPQSCSGVSCGKQAAFDIWVGERERQAERGVQEGKLSSEETQSGKLLRQGLGEERKAPAGICRNLGVDASWLLDAGWGWEPVSVALMGRREPEGWKISRHLVAVTWVT

SEQ ID NO: 922534 - protein, 143 aa, Homo sapiens
MTQAQASSSHDPRAPGSPSRLRLLCPFIRNLSSEEIDLQPNPAAAMGKKQQGFSQKQISGATTAWGLFRKGHLGWAWEGSPSGSADWKNKCDALKPRQIQLPNLVSLPFTFSLCLSPFPPLPSRARCSSPLPCCQLQDAATNK

SEQ ID NO: 922535 - protein, 139 aa, Homo sapiens
MIFAVTLAAPKKAFVEASHWKGGSQAEADMRKPPWAMTLGHLQAPCFKHSRNLFGKRVTEDFKYKNNWVRLEFFSQAIPGHRGDGWVEKELKKTAREGHQLQNGRQVEEQFGEVHIAPGKLDSASLIITWRTEEESPSN

SEQ ID NO: 922536 - protein, 189 aa, Homo sapiens
MEHSHHLNCNLTNLTRTLAELDSFPLSSLTHLTNLVNKSPLQQDNGGNADTAKPAPDGEKCSGCRLGWGVCSVGRVGTDKWKTFFPALYQVVAEMGTVLHLWGAMATQVGSHHRLGSKKVPRSFPLLEEHEGGQKRGDGTVNWGLEDDKDMSLTGWTGMMTGPPRIIYENQISSLKVECGPKYPEAPAL

SEQ ID NO: 922537 - protein, 424 aa, Homo sapiens
MRMQEGTGLQEGTQMQEGTGLQEGTQMQEGTGLQEGTGLQEGTQMKEGAGLREGMQIKEGAGLREETWMWEGTRMQEGMRTQEGTELQEGSRMQEGTGLQEGAGLQERAGLQEGTALQKEMQMQEGTQMQEGTQVQEGTQMQEGTGLQEEMQEGVQVQEGLGLQEGTQMQEGAQMQEATGLQKEMQMQEGMQMQEEMQMQEGMQVQEGTGLQEGAGLEGTGLQEEMQMQEGVHVQDWSGLQEGTQMQEASGLQEGRQIQEGTRVQEGTRVQEGAQGQEGTRVQEGTQEGSGLQEGTQMQEGTQMQEGTQMQKGAQMQEATGLQKEMQMQEGMQMPGGMQVQEGTGLQDGMGLQEGAGLQEGMGLQEEMQMQEGVHVQDWSGLQEGTQMQEASGLQEGTQIQEGTRGQEGTRGQEGMRGQEGMGV

SEQ ID NO: 922538 - protein, 247 aa, Homo sapiens
MAQSLLILIALTSEAYNSISSSSLGAQNEEPKSQENCLFFCLGSMKNGQSCRNVIGQKAPADDKSTKEFIDKFVKVITDEHLMEEQGYNADETSPFWHYCPRKKAEEDRKMWKNLELPRNMLNGFDQNANSDITKEVQAEVVSDVDDELHNQNWSNGHSCYALAKVLVGFCPCPRDLWNFELERDDLGYLAEEISKQQSIQEEAEHKRLENLQPDDAIEKKKPIFWGEIQACCRNSIKDYASENKME

SEQ ID NO: 922539 - protein, 148 aa, Homo sapiens
MFLFPLAFPLKHLQPCLLHSLWKCASIKPLFFINSLRTRDKRILKEKRAIAKDTLERKGCKGISIYRRESDLVREEEKKICKEKVKAMEDFTDDENRVSEMCSIRVQESVRGSPVSSAADPQGVNGLVPKICLTGNFPCETERGQVLY

SEQ ID NO: 922540 - protein, 143 aa, Homo sapiens
MCTQSLAISRGAIWEPETKVKNLNTLPADPPLTSIPLDPAGSLLCSRSSKVTIAAADRAKGLPLAITLTTWPKIPFFGIREAKNPRSENMRLATILEVARCHFRSGPPLSWELWAQGPLGEVVLCTTKMFYIDSLTKFRKIIT

SEQ ID NO: 922541 - protein, 192 aa, Homo sapiens
MWVGPDKRIKAGCPSQQWQPAWVPFHTVCSFNPEANETTNPPGGMSNSRRAALRAVTLTGKVCSFTPQPARPRTHQREETPNTSEYQNEQTPDTPPLRTVTHTTRVHSFILEVSETKNPPILHTLPYNRALCPEVVANIWADKENGTYTVNSVTLRPILCGASPSDLSQIEAEPYSIQFSPKSSVPQITAQI

SEQ ID NO: 922542 - protein, 162 aa, Homo sapiens
MLWAKRRRGKLQPFGRPDLGAPQAKAVSPSLGPCSSWHFQASGHHCIPRCQPRKLLTVCLLQLQPHREPAPMPAPGAACHAAAAGMSDCVVTRPHAFPHLTCSLPWRHGIQAGGVPKAGCQKRAEFWKFYVAKNRKSSVKTRKSLLKWEGSLRNRHTDFHNG

SEQ ID NO: 922543 - protein, 148 aa, Homo sapiens
MMLAVGLSYMAFIILRTQREKDGTRIYVRDYKQWQAQTSKRKKERVTEKAIEEEYEAIRFQFCRVLGSFKLSYIFLSSEPSKSPGSSKLSHIFLSFSETSKLFQPLPVIQFQSHFHILRYLYSSNPPQVLEREPGLTQNGYNEYLWGD

SEQ ID NO: 922544 - protein, 152 aa, Homo sapiens
MAPGPRQNSKFQALDQPLQAQAPCLPQYRPFPGSRSISVAPDARGARVQACPSRHYRQIGPCRPSLQDFPHRSRFQDSPCRCRYQVYTCGLRIQACPSGPKWIQAYTHRPNQQAHPSGSNFQAQLPAKPGIKSANWTIPAEISPKDHARQAT

SEQ ID NO: 922545 - protein, 160 aa, Homo sapiens
MRERGYLGKYSRGCLLLIGKGLSTQEEDPGLGEPELKGQSSSCLKSVVNAHQMRVLKKKDGSMTPAPTLQQFAKKHVRPQRLSDRLPLHLSDVALFLTWKGPASQNGRIPKCHLLVSSWNWGCKCLTPQKNYLTETVHPYSHLSFTVMFTDANLRHKPVK

SEQ ID NO: 922546 - protein, 142 aa, Homo sapiens
MEKCESLNFPLLLQSAKTKNPNPSLYQIISLQIPDIRSLNQLHYLLGFPRQLTHVLSYEATYDKGRIMRPLMPVDKWVCHQFTAGETTNFSYVKFCDKDLELFEEAFPGTNFSILSQNNWVSNLAKYNLDESKHCPSSSIRV

SEQ ID NO: 922547 - protein, 151 aa, Homo sapiens
MKLRTLAVSVTVLKLVYLELFIPPGGFVVSLASGLTLQTFALDIKVLQVPTSQETSWLHPVDPALGPQVELPASPGLCAHTPQPLGPGRNRAQCQWASTAGGPSTPSAAAGPGAKPLIAPAGRAGLPLGVQGRQAHAHPELQLACKCHGSH

SEQ ID NO: 922548 - protein, 178 aa, Homo sapiens
MVQCVRACVCVCVRVCDACARACVMRVHVSVRVWVCVCISLNSGRCEQLRDGCWDWLGLGYVFQEQVASCGHIQDGVGSLQSAEVVSLAPVPPENTCSDTGNPAPVYGSSDTCSDPDPDPTQAPVQGSSARLTELPGIERISICDSTEEASDGRGLSSECAWPHRTWREQCGEWPSLF

SEQ ID NO: 922549 - protein, 187 aa, Homo sapiens
MPDYFKLAKLINLTQSLAILIICRVKGGLIEVDLVEVGLVEVVLVEVGLVKIGLVEVGLVELDLVEIGLVEVDQVDVDLVEVDLVEVDLGEVDLVRVDLVEVDLAEVYLVGVCLMEVDLVEVAYPNPTHLAPTKGMYSLETSTCGLRCPPPFPVLLGMALTFDLQGAETSHVLPVEFGGPDPVQLQG

SEQ ID NO: 922550 - protein, 179 aa, Homo sapiens
MHAFPLGYSRYHTLRYARIHSGVLTLSHTEIRTHSCWGQAETQETHGQWAPLYHITTCRYNRKPKRPMNNGLPTLYHITTCRYNRKPKRPMNNGLPTLYHIVTYSYNKKPKRPMNNGLTTPYHITTCRYNKKPKRPRTMVSQHRSTSQLVVQRKTPNNNLNKHNNNSKRTKREPEIPSA

SEQ ID NO: 922551 - protein, 293 aa, Homo sapiens
MFRCISAPAIDTPLAKAQIPVPKPERTVLFLKDCGSSVKHIISSTLNTRTCILQGSSVLLPPPACPSGPHSVHYESVSVISMSTRNVPQQTFSVPQPLPRADTPGLSALLYGPRPSRNGSQQQNACINISNVTEAKPSTQSSEARTATGSPRTSLARSREHAVGEEGAGETRRQEELPGVPAGPARPRPLSTVMQRRRLLLHWKKQVCSQSVGFYSRLCWSLMAESLRWAPPALVQDSLGHPRVVGRLESAGLMAAPPAVARRGRRLSDRVLIFHTPPLSREPIFPPFPCIPL

SEQ ID NO: 922552 - protein, 150 aa, Homo sapiens
MVLDSIYGKMPHKVHIMGHIPVPKRQSRVCQHNAYRNLNPNLNSRFNFICLSQHSLTLFSEKPVQPKPLNQPSLGGAPHLSHQLHVNWGTTTSSQSPFYVHPSPGLQRIKLQFGEPMYAREEKDAQCRFPGSTLLLKWHLRNNSAILETG

SEQ ID NO: 922553 - protein, 151 aa, Homo sapiens
MSQCQDFEQRTPSTRGQAFPRGNVGAKVEAERLRRALSLGSLCQTSLYYFWVCFRNVCSNPSCVLGGKEQGYIVLTYLWDLKIKTIEFMELKNRRRLPEAGKGSGVVGEGGGEEGAIYNQKVGSCLAPSSWTSRLQDHEKELFVDKPSSLW

SEQ ID NO: 922554 - protein, 153 aa, Homo sapiens
MILKRGGERGHPCLVPDVSTKALSFLPLNMISGKRFFSVYSKNLVKLLEVKLTKGWRPLCLGPLELLMFRLVHTESPGIYQLQLGGTLTGFCSDWVIYKEEKLSSRSSGGWKFKIKAQASSVSDEGSVLASTALSYCSILRRKGTLRLPMQKK

SEQ ID NO: 922555 - protein, 155 aa, Homo sapiens
MGPMRNVSEDSSIRNSQHNTGNGSLFWTPSEGSRAEWNRLLDGKAPGKDHFPTPSLLQAPHPSTDSHLHHLIKPPYSSFKSVTQFFQDAEQELEIQQAVTLALCPCRRAESPMSWLTLKPSVDGRAKRAHCAIWLSLLCLVVPGAWGASAEVLAL

SEQ ID NO: 922556 - protein, 122 aa, Homo sapiens
MINVTHFTEETTKVQSRALTHSIKEIAQLTRVQQTQGFQDAASFQYPANKSQAVLQLRTSVFVRTLNPTPTPRVSKSLQEMHWLGRLPGGGLAMYEQHLEKQYEVEKGTCLTNAVGPRSVPT

SEQ ID NO: 922557 - protein, 222 aa, Homo sapiens
MKVELPAQVHRANDPLARGRRSVQHAHRAWRRILSHCAEPPPCLDSGRPPRSNSPHCEGCQRPQPMKGKAETGITLRDSEADVIKCQDDDKTVKFAQQAVEEMEEKVPRNEKMFLYQGRIGICCGEGPGQGRRDILVGEERRLSFKVRVTTAEQLTGRKHFTPSLGKGGDDATKVTLPVRQEPGFFRSKTSEKLKGTWQELKELQTWLLPAPSTRFSAEETL

SEQ ID NO: 922558 - protein, 144 aa, Homo sapiens
MGTTPSPGPVRMPGKNHFVHFVCNCSLLNDAGVYTVIESPLSHLVLWAARRDRKSGICRQRQQRLLCRKNSAETHGRTEPLPNVTIADVEYWQWSSHKFISSAPQRHRPASSRKLKLGPDQRPPSGEMNLEYTKDAMDRDDKQG

SEQ ID NO: 922559 - protein, 140 aa, Homo sapiens
MSHCDEPEYQFQTVLLQSAHHRLSWLQLYAVGVHGLHLEALAKTIIAVIFDSTSRIKLLFGVAQNFSPAFLLLTKRQQLKQPSITRPEDLAHCLLVLRIKKARYGRDKHHEQASIACDYKMKGTITFKSYSVFHMGNTCM

SEQ ID NO: 922560 - protein, 236 aa, Homo sapiens
MGSENAPAGRRSGWSLCPAMKTWAFSGTPLTLRGSFTTHGIETCRKERAGLAREGPRGGGRGVANPPRAHWLRCAAAAEVGPRAGDGPAPGSQGTSVRSSCCQAEGGPGQAQVWSYLQPTGPSSGGPPLGTSYGKRVTDLVLLCVSAASVGPLRETAGGSSSSLSAEPAFSSLLLKSGPGRVRAYRPCLRSPGLQELRAAPARWRGRGRFSGRLAWTRTGLWKLPALTGLPVTTAK

SEQ ID NO: 922561 - protein, 151 aa, Homo sapiens
MDLSGSSYPLFSCLLIPFAMKVHNKSNLCSTLSETPSIWTSLPASLLAFWSESFNQSLGSSKLSHLPFFFQALSTLPMSICSLIPKLLPHFQKEKDYWEFGNNPEMECAFARRHSKNPINLQVMCKIQELRDPCVQRQAVYMKCHNFDKGC

SEQ ID NO: 922562 - protein, 257 aa, Homo sapiens
MAKTLFTGLGLFKTIKQIVRACEVCQRNNPLPYRQAPSGEQRTGHYPGEDWQLDFTHMPKSQGFQYLLVWVDTFTGWAEAFPCRTEKSQEVIKALIREIIPRFVLPRGLQSDNGPAFKAAVTQGVSQKLGIQYHLYCTWRPQSSGKVEKINQTLKQHLKMLTQETHLAQPALLPIALLRIQNYPHKAGLSPYKMLYGWPFLTNDLVLDRETANLVADITSLAKYQQVLKTFTALEPVPVWIGPPLTDYYNKSHSKIQ

SEQ ID NO: 922563 - protein, 758 aa, Homo sapiens
MVTLQCPRASGSLQELHGRCVRHCSCLSVIMPEKPIDFGLSEATTRSRIARTLGLRRPVHSSCIPSVLKPVEPSLGLLRADIGAASLSLFGDPYELDPFDRRRLPAAVPEPDLEEEPVPDLLGSILSGQSLLMLGSSDVIIHRDGSLSAKRAGRGTRAESEASSRVPREPGVHTGSSRPPAPSSHGSLAPLGPSRGKGVGSTFESFRINIPGNMAHSSQLSSPGFCNTFRPVDDKEQRKENPSPLFSIKKTKQLRSEVYDPSDPTGSDSSAPGSSPERSGPGLLPSEITRTISINSPKAQTVQAVRCVTSYTVESIFGTEPEPPLGPSSAMSKLRGAVAAEGASDTEREEPTESQGLAARLRRPSPPEPWDEEDGASCSTFFGSEERTVTCVTVVEPEAPPSPDVLQAATHRVVELRPPSRLPALGEAHVSPEVATADKAPLQAPPVLEVAAECEPDDLDLDYGDSVEAGHVFDDFSSDAVFIQLDDMSSPPSPESTDSSPERDFPLKPALPPASLAVAAIQREVSLMHDEDPSQPPPLPEGTQEPHLLRPDAAEKAEAPSSPDVAPAGKEDSPSASGRVQEAARPEEVVSQTPLLRSRALVKRVTWNLQESESSAPAEDRAPPQTLAPVPAALTPASEPASQATAASNSEEKTPAPRLAAEKTKKEEYMKKLHMQERAVEEVKLAIKPFYQKREVTKEEYKDILRKAVQKVGCVRACVWGSGSRAVGERPPEVSSCLVTSQPMLPPPTDTVGPSVAL

SEQ ID NO: 922564 - protein, 261 aa, Homo sapiens
MSGPKRAAIWSLLIIYVVTILEDLAVVGTIRASHHLHISTHLFLAQLSVLETLYTSVTVPKLWLCLHLAISAQLSSFPASFVSTALNSSLRLRSPDVLNHFCDIPPPLGLSCSSTTTIEMRTQAAQVILAASLQATTTLVTTQGSHSPLPPGQSASPALAHITQSCQEHRVATGKHLLEQWRGRDARPGPQHCQDSSLPQQLGASSPGEAGPGAHKKPPLTASPLTLSDEQLLWRPATLPSPAGPEGWSPCHEVPAPQSRA

SEQ ID NO: 922565 - protein, 190 aa, Homo sapiens
MRTTGNNCTGPMRTAVNTWAVHNEDSYEKPRTPGVGSTKAIVSVWACHNEDGYKHLAGPKMNGCQHLNSPRQRRFRTAVNTWSCPRNDSNEQLSSANGNGLRLDVNIWPTAANTCSGTNEDAYEYPGWALGEQLGLTVLGPKHMATNTWADPSVDSYKDLGWAQEDSCAILAASNEDSCGYLHLAPLKQL

SEQ ID NO: 922566 - protein, 146 aa, Homo sapiens
MTMAAPGIPNEQVAQFAQGRQEEPTPSIELKQQPMLNKIKSGTNGDIKMNLKAYSVIFSRIPSKNYKGESGCRKSPQDARRNLLYTPRALGSEMKLTRKDLTTQYKAWLGQVSLGTLPIAVSEPSGQDWTYPPAAQPQAETPAPLK

SEQ ID NO: 922567 - protein, 357 aa, Homo sapiens
MFQLLVLVPVQTGGRSSELTNGICWAQKGPSALVCGLSPAHLLRSREAASVCPLSLPVDRKPQMAQQFDTLQCFQSSQKKRQLLGKGEKRVIRAIQRRMGLDKEVGGKKLEKTKEAQKLNQAERKGPECGALCPPAAWLGPADVLAAESKSTKTGQVVVTVAIVDSYPGWERGPLQVTVCPGTADQLGHGAYHWLNVDSGENQLFTGVNETGNISAFRYMSFGRERFDDLMMSPRALGDGSPDICQPVWCSAEAVIPMRRQLYLVCRLNIAREQCLAHLGHWKRLPGRQLTDDKEEASVFQEERLPRQCHGVEQELRLTGDGREALRLRTQQQQPWVPLWGTPKTVDVGMLFFRILG

SEQ ID NO: 922568 - protein, 164 aa, Homo sapiens
MGDGVSQHCSFSVHALVHLLIHDRWSLVCVNVNVDECERQDEAINTHIYHFYNGTAKWRLIKTTEVYTRYHPGRGGAGLLPAAKELPKAPPQGADVFDLSCLPKMYEAKLHPNHLGHMFSSRPEGCVMGHVEQTLHQRRYTDGKQAHEKTCNIIHHCDISRKSE

SEQ ID NO: 922569 - protein, 155 aa, Homo sapiens
MLSPCIATFLLPDTYPNATGRADKIHKKGHQETILLTANQRESTLHSALNPKHGFWKIKIYDLDRGSDESLGDTCFLAQLVKTSAQLSSNYRASAPVASENKWADNYSLRRSWSLHFPALRQPVRLMGSHYEVWALFQDFSTPSVFFQDDFTSHH

SEQ ID NO: 922570 - protein, 191 aa, Homo sapiens
MFSPQRNNSDIPGNRTSSQNHNSKFCQTILQSLNSNGRFVRGVWAQYSPARSKGTFARREKFKPPSLRATWEHFGAADSGADAISRTASVASAGGTFGERSRTPPSSVPGPLHRSLSAARGPVRELPALPWGRKSLFLQRATFPLQAAGTPSRSFGQKIPESYTSCAPRPRGRRAAPPARPDPRRKEDLVD

SEQ ID NO: 922571 - protein, 139 aa, Homo sapiens
MLDFDLDCFMKLNTKSGYKVICLLLGMVQSAERNPALESLRSHPVGSGGKASGPWASKLLATWQDVRLWSLHSPGLLRTVWYCQCWVNRPRREKGERAVLGREAGCASKLRWKEAFYFSECTWEQTKVEKRKKERYIDC

SEQ ID NO: 922572 - protein, 127 aa, Homo sapiens
MLPEEAPTCCQHWESLWPPGSEDSCANHLASGGHGEAQHLQVCSTGTQGPSVWDGCSCRIHLGNPLRVALCLKTKGQIEKQIRSTPKRDSAKMNFIIIIRPKQLGHTEPFSLSSTNHGTKASVAALP

SEQ ID NO: 922573 - protein, 148 aa, Homo sapiens
MAGYSSETKLPEEPSSSSICGSPKIWDYVKRPNLHLIGVPESDGENGTKLENTLQDIIQENFPNLARKANIQIQEIQRRPQRYSLRRATPRHIIVRFTKVEMNEKMLRAARKKSRVIHKGKSIRLIADLSAETLQARREGGQYSTFLK

SEQ ID NO: 922574 - protein, 145 aa, Homo sapiens
MGKKQSRKTGNSKNQSASPPPKERSSSPAMEQSWRENNFDQLREEGFRRSNYSKLKEEVRTNGEENYVTKKGAQASVTDAINGKKGISYPAKLSFISEGEIKYFTDKQMLRDFVTTRPALKELLKEALNMEWKNRYQPLEKHAKL

SEQ ID NO: 922575 - protein, 140 aa, Homo sapiens
MSLVKAGTGHLDVTRPGTILHPHLYPLYWMFSSSVTFPETWLFHGKRFLLIFFKWGMLILLYSLGLASFELPIPPSDHYFSDAMCNSLVFLRFMPFTFTTLYHSLLSIIYQPLSHSLSIKAFSMRFIIFPLIPEFMSLPT

SEQ ID NO: 922576 - protein, 196 aa, Homo sapiens
MGKSRVSQGGPGWPGDEDRELRSLGSTTVVGKNKHLTKGSKKGAKKKVMDPFSKKDWYNVKASAMFNIRNIGKTLVARTQGTKIASDGLEGRVFEIRKTSYAQHQQIRQIQKMMEIMTQEVQTNDLKEVVNKLILDSIGKDIEKACQSIYLLHDVFVRKVKMLKKLKFELGKLMELHGEGSSSGKATGDKTGAKVE

SEQ ID NO: 922577 - protein, 151 aa, Homo sapiens
MLAVGAGGRGQGNGHIDDGFCLPKDAVQACFIPPTLLQASGITSSVRLVDDSGSAQPLMSPFLCLPVALHCWPTSSQVMRSWIQGLSLQCCWLAVPQQVCTVLRSFISVFFPKRLGLVGTLGHDCEWRRPVLWGRSSPGTLQGWRILCSSC

SEQ ID NO: 922578 - protein, 609 aa, Homo sapiens
MTADGCSLMNKWSVMDGCSVIDGWCVINGCFVVNGWSVVDGWCVMDGWFAVNEWSMMDGWSMMDGWSVVDGWCVIDGWFLVEGCSVIDGYSVVNGWTVVDGWPVMDGWPVMDGGSVVGEWPVMDGCSVVNGWPVMDGWPVVDGCSVVNGGSVVNGGSVVNGWPVMDGGSVANGWPVLNGWPVMDGWPVMDGCSVVNGWPVMDGWPVMDGCSVVNDWPVMAGQPVVDGCSVVNGWPVMDGCSVVNEWPVMDGWPVVDGCSVVNGGSVVNGWPVMNDWPMMDGGSVVNGWPMMDGGSVANGWPVLNGWPVMDGWPMMDGCSVVNGWPVMAGWPVMDGCSVVNDWPMMDGGTVVDGCSVVNGWPVMNGWPVVDGCSVVNGWPVMNGWPVVDGCSVVNGWPVMNGWPVMDGCSVVNDWPVMAGRPVVDGCSVVNDWPVMNGWPVVDGCSVVNGWPMMNGWPVVDGCSVVNGRPVMDGGTVMDGCSVGNGWPVMNGWPVVDGCSVVNGWPVMDGWPVTDGCSVVNGWPVVNGWACDGWVLCGDWVACDGRVFCGGWLLCGEWGLYGEKVTYGEWVACGEWLACGGWVACDGWVACDEWVACSGQEKGINTHYTW

SEQ ID NO: 922579 - protein, 145 aa, Homo sapiens
MKKVLGFLRPPQTCGTVTRHRSVTHTQQPFHRGSPDLLLSLAPWAVLGLQELAIWVGPDSHGGPPTHEAVQERVPGFRVGELSRASHGCFDTSRSPSGPCACPELQSRPEQPPLPASLTAALPSNISFLTHEAAHSLKTSPKPPP

SEQ ID NO: 922580 - protein, 154 aa, Homo sapiens
MSAGLSDFLVYFNTIFWLPRQQQQQNSSNSNNSSVNSSSDSSNNSSSDSSNNSSNSSNNSSNSSDNSNSSSNNNSSSNSSNNSSNNNSNSSNSSSNNNSNNSSGNNSSKTATAAAAATATINDLSEGSFCTGHKGVTVQSWRLHLRSKCAPPAG

SEQ ID NO: 922581 - protein, 155 aa, Homo sapiens
MANQAQAKLPSPSTLFLLTAPGSQVHRALPCGEASSAQDVALEMCSDHAQSHTDPSAARTTHTGLPLPSDGSFWPKDHPLLIETLTRGCSGERGGFFRGRPTGNSAPTARPPAACESSDNPLRKRGPSGRPGTCVFLPLAAHPTRGASSRQRDLP

SEQ ID NO: 922582 - protein, 156 aa, Homo sapiens
MGLRRPSCAAVQLQDPPKCSSIFCSSGPSEDDLLVAQMLQPSRDFASVHSSWGPVQTKQPNLRDGTGSLSQGMRRGEQPGTREDDDPEGILWKNGIVLLPGTEKHIDFKPNTPAGLMRPQGGWFASCVLCHLNVELFIEQDRVKSKSIPSDGLISN

SEQ ID NO: 922583 - protein, 152 aa, Homo sapiens
MGTKKRTCSFRVPRQEPWDMCTGPASSPAFSGLQTFQRPPSPPAALLRLPSPPPTSEALPRLPGSRSSELPAADSSACDPDPARDSQTPALGTPGECLLPQSSTQHQPARSPSFSSFAAVLTGQSLEHPCCQVTNPVTQRCTSFSQGDTMWS

SEQ ID NO: 922584 - protein, 236 aa, Homo sapiens
MALQTLAERAGARRQDPDSCGSSDAFICPNGLTMAVPQGQECVPVQCGASGCLCCTLLELQDGSFPLDPLDTDIFVSLVFGIWPQALPQEDRLWLLAWFVDPNDEVSMMQLVLLPTLHTLCPTLVNFPADYGVPNWGKGANHPPTWILSELEIPSVSCCVEFKNDVQMSSVSIAWLCSQGLRTKQDSVVTGNRPCSLPCSTSGPTYGFGGFGAHSVPVLLCQLQVSLTVPEPILRV

SEQ ID NO: 922585 - protein, 136 aa, Homo sapiens
MFQYQMALDTVLIHAIIIVILLLLLLLIIITLTVILITITIILIITIIILTIITIIITLIILTIITITNITITIITIILIIILTIIIFIMLLLIISIIIIIIIIIIIIIIGIQEESRRNSGDLQQTDPVKKATQRL

SEQ ID NO: 922586 - protein, 148 aa, Homo sapiens
MQHLLNLQLPHYLDTQPPNVVSLCLSSPTCPRHPGCVLGLCALATLTVTVQLSLGIDVVPGPRLGTGVHRSDQKVPAMQESQGVGVGSGGAEKLLQACEPAASCIGKGQFHWSKGEEKLEVRLPWASVRPSNCTPKAEAIINSSPPHP

SEQ ID NO: 922587 - protein, 195 aa, Homo sapiens
MSLLNWRGLSSAGMAQGADCEEETVLWRLYQAKCISGRILSQLLNSEGPTHSLASSMVENSSPRLFLQKTLNTSATCTFWLQEGSRALGLSLIQLCPQNFFCFPLGFLKTIEMVYVKAHLGQAQVPDDEEEHDKDDDGEDDDEDNGDNGDGDIGNSDDGEDDEGDDDSNDGEDNDSDDEDDGDGDKDHGESDDDK

SEQ ID NO: 922588 - protein, 137 aa, Homo sapiens
MIAWGKWTHTVRLLIFEVLQKWGSGLSLPDPTPHHGGYERAFHSSPCPPPQSPLSWKPPPSGLNLHYQLHVLLMGYSCLWRSLHRHTKQGLALPRVCWLPGSEETCQALRWQALGVALTPVQHGDARQRECIMQAQF

SEQ ID NO: 922589 - protein, 148 aa, Homo sapiens
MVELVYSPTNSIKVSEKFDSLKPSSLNSSKSFSVQLHFIAVKTLTCRSVGVCWRSTLTLFAWLSAAEAAEERILLNSKCCCLIVPLEASSQRGTQLCEVSVCPYWGVPPSKATRWSGTLLRRHPVCSQISNSVLGEPLLFSKVSDSDI

SEQ ID NO: 922590 - protein, 157 aa, Homo sapiens
MAYFFHKYLLNANSITMIQEVYLLTFGLKHTGGVGKKCSKCVINGSICCKSFFFSLVSLVLDLIKHFSISQQNSPPKTLSGFFTLSLAPLPRMLHGFLTWCLCSAAAASTTPSSSKPPLGTKLSSHPLLVLCPPHSVELAPFTSLQQINVGGGITWD

SEQ ID NO: 922591 - protein, 179 aa, Homo sapiens
MNKAAINIHVHVPVDTDFQFLWANTKECDRLLNHMLRVYLVCKKLPKSLPKWLYHSAMNESSCHSPSLPAFGVASVLDFSHSNRNNWCPFIPCHFPAVPSKMKHEALVMGSTSREMPPIRQLVLCLPLDLRYAAFLTARCNGVHSVLVKEEGFLVKSPPGHWPEVHNDHNCHCRKKTTS

SEQ ID NO: 922592 - protein, 156 aa, Homo sapiens
MVLFISKMLSTTLSDVIECNAQWTHQTEKGKICCQKSKCASQVAAAQTSLFWLTENCEMNFCYLEATQFTIFCYSNTTGKHSGTVALPGRTLARGADPHPSIPKSREPVPPLGNPPRLTQHPLSNTQITFSPTREPASRGVKPLFQLLFGARKLKN

SEQ ID NO: 922593 - protein, 162 aa, Homo sapiens
MYILDKQRSSQGPKALNFLDKRKAKFPLHPLQSPREKTAMSSLVNGPTPAVNYLRQALLHGGLSFQHMNISGHIQTIAGSKARASFPTDSCTVLAIKSLPGVSGDKQNLVPRNNFLCDPKPTSAPFEATTSQWCEVPEPQIQEHGMGLGVTPAEVSPGSFTY

SEQ ID NO: 922594 - protein, 138 aa, Homo sapiens
MYAIHKCMIYHLDTHLPLIPHWAHHAHITGTHTAYTNSTLYFQIPQKTASKSHKHTNLYLEIYPNIFNRNWINNLPNAEQTKEENITDQPTERKEDKIRNTGNVINVKDKIRLLLNVLVIRIHPKISGLNFPIQRLST

SEQ ID NO: 922595 - protein, 189 aa, Homo sapiens
MLPSVGAVVQHGCLLDILVCTYLAEKGLSGSCGLTEALVAFGEGSSLGRKNCRDPWGSLRQEPHWSDPRISSCLVAMLKQEGNFFLLGVKEWCDYQQDHYSYLHFSGPLTWSLDPASRNHGPYKVENVKVRDLEYNCAHLAAESKMDLCIFYPMHLHQHDPFSDMHSTLRVANFHIHFSYLIFTYLVRK

SEQ ID NO: 922596 - protein, 164 aa, Homo sapiens
MVLAVKGPLQFHGVEAENNGSTFLDIPPLERKIHEGSEEELPFWSLIECCRECRGGWEAPCRNQHQKERHPGVLLGSGPSPALPESSMPWRKASVREGKALNLDIGCVASEWRRCSVVLPGSLTDETAITLPWTPCLRVSVLLLGVTTLESNKEASVGARTTRY

SEQ ID NO: 922597 - protein, 146 aa, Homo sapiens
MTPAAMHWLLRAQAKCQPTLPHCVALRVLDPLRVQVMSPSTRGQLTAQQKSKKCLMPFWLKGEMDEEPQTRRPGLVEPLRLPFSDLHCDWPYSLSLKPGHSDREEGSVLHFPGTTGKYWDSMVTLFLQDFERDLNSILETTDCPGQ

SEQ ID NO: 922598 - protein, 130 aa, Homo sapiens
MLTVSAANFSSAGRQFCKQGSELEAQRVSEASCPQGLCLLHVGAPTSRDAKHRGPLEATPGSAHSMDRGMKVRRALGELCTESTAEGLTYSTPSFQGSLIRSPGQNHTCGKLHNHQGRQSSESCINGEFQ

SEQ ID NO: 922599 - protein, 164 aa, Homo sapiens
MPTLQLFTVAAVHGTCGTARHSVSGRTVDTGIPEQTVKGTGCWKRECGAWLAFAAGFGNTGATWTSGTIMRECLFAGFVYLALSHECLLVSGLSAISPEHPVVEHPLSYTYCALYWMQYGHHDDCRWRLTWHLTVSWGRLVGELCLALGTCLGLYVLAERLVLL

SEQ ID NO: 922600 - protein, 146 aa, Homo sapiens
MGFQYRKRICGKGRVLVEDEVGDPRCQRTGGRADPPNLLRGTTHSALLSPAARARWQRLCFLPLFWVAMVAGLWAAADAPAYGHSEHPGPSQLPPRGLLDGGGCTFSPAPAKQPNSHAPYPETKTMCSTVWTSMSVQHERRGGPMT

SEQ ID NO: 922601 - protein, 216 aa, Homo sapiens
MGNDFDELTEVGFRRSVITNFSELKEDVRTHCKEAKNLEKRLGEWLTRINNVEKTLNDLTELKSMEQELRDARTGFNSQFDQVEERVSVTEDQINEIKFTKFEMKEKVLRAAKEKGEVTHKGKPIRLKADLSAETLQARREWGPIFNILKEKNFQHRISYPAKLSLVSEGEIKSFTENQMLRDFVTTRPALQELLKEALNMERNNQYQPLQKQAKL

SEQ ID NO: 922602 - protein, 185 aa, Homo sapiens
MPSLSLCTEAAWVCLPSAPTGNPHSPHAGHQEWAAYSNSPSAVNQVLKYIWAPTGKDLNHPFIQHLHVVDAPCWWSLTLSAPGTQPQTCSRCKDPGSSEADNSPSNNLSEGQWQANAASQCLHHVPQLPLHRTTAQEKGQLHSTLESKVELNSDFSLRPWIFTVLIHGRIERGKFGLVGPHNLEY

SEQ ID NO: 922603 - protein, 136 aa, Homo sapiens
MQVAQAHQLPLVMESQGEWFQLSLIQCEVGSVFVIDGCYYFEEHPNFPRLSNKGPEASPFDLFCLARWEIGCPQQMDRSVTFVTSLQLLVGCFLQPIRLIAGHHFIYMRLLLHGPQTQENRLLFGFFLSINIGIYK

SEQ ID NO: 922604 - protein, 155 aa, Homo sapiens
MAEPCVHILKCCLQRQCQNSILEPRENSKLVLWQKLKYIYRFKMAFSTQILSVLCSLKENRINNSNKRWMGKNYVCVSRGTSEHRGCEENRGKVLRGMENIERMPSEKKVIDGVTMILVILTTCTRDCAGGRLPNAMMRIDTSIHSISLRKVKCL

SEQ ID NO: 922605 - protein, 190 aa, Homo sapiens
MCSFDLGANAFLCGITGRTITGKSIQRYLLKHGKADCTQDPRNRYPDNGILQWRKEIDLNSQYSTSRWGLTAKEQGEDVTWWMVEDEEPDQILSGRFWLNGLSSVLADTEFCKEMHRWVQEKDVPVCSALSIAFLCVKGKGANASLCGITVALLCGILAEPGFSQDKRSPSISRKQGSCCECGIDKQIPL

SEQ ID NO: 922606 - protein, 139 aa, Homo sapiens
MPAPLRNSQTASLESNNININKKDPHTKAPSKGHQPQRSKVDKSMKMRKNQRKNAENSKSRNASSPPNDCNSSPARTQNWMENKIDKLTEVGFRRWLKEHVLTQCKEAKNLDKGLQKVLTRITSLERNINDLMGLKNTA

SEQ ID NO: 922607 - protein, 150 aa, Homo sapiens
MAEQGALRKDLPVRGHTGKETDKFLDIIKKIIEEKGYLPKQNLNTSESAPFLGKKCHKKNPFIGGIDKSCQWNCCGIKERPGRAPRLMPRATNMMELTFQEMLRLWRNKCGEKGKLSFGRAGFEVLVTYPGKDVKKMAGQRGLEAGAEVW

SEQ ID NO: 922608 - protein, 196 aa, Homo sapiens
MSRGRSQGQRQQSFWKELTMALKDKGKRVGVCQVEKQNSISRRINRPVKAQKYEVTNVLGTDPLDNGETSQDFKRLHVQTCLWKGLSAAVQEMNEKARCPLHKTKEEASAIIGWNRVKEYMCWGYWECHRASMAAEIPVHGSLAVPQRQYSMAQQNQPSSHSASYYLGQINSCSWTSFLIYEVVIIILLHDTVKIK

SEQ ID NO: 922609 - protein, 177 aa, Homo sapiens
MALECTESSRLQKATPVPRGHLDQGSGCLRTSFKVLSLIVSSATRADRHKHKRVRKGLHEEREMKDLTCAQAHKKAEGKEWVTLQRYNWPPESCTGGACKVLYEVSALKPGWGPDLFWGIGGVRALTWGKLTSPERRAVETQWKTFLGLVSQGKKNNNNSIVIIVVLIVGNKCLLCA

SEQ ID NO: 922610 - protein, 139 aa, Homo sapiens
MTQWLPNSALGLEVFSQKALGPWGGWEGLKPWALWSREKPFPQYSKFFTHEICGNACLPDAHLLLRSPAPNRLVLVRGLGAGDPNCSGQLNLSPPSDRSTGLSDSITICDMVTELKSDPLTYLGMNIIRRQRKWVFLFV

SEQ ID NO: 922611 - protein, 134 aa, Homo sapiens
MCNGPTKLLTHSHLQMEELREHCNTLSGALGSQAPPPGCGRGPCMELVSTGAWSSWLDLALTRFTCFLLQVVKCGGLSKWGTLVTLYENGTRNIMDAYLRVEGGRRVRIEKLPIGNCAHYQHDQIICTPNPRDT

SEQ ID NO: 922612 - protein, 158 aa, Homo sapiens
MKSHHSPLGIAGPVKGSRCQRSSKPGSQALAGARAWTERLDPECAGSRELDLKLDKREFIGTKKQPPNFLGLTVIISSCFLNAREVALAVHCLAQVSHPSSPQARAFKIALPLCAPLSAPHLPPDGILVANQPVSDPASKSLFKVSFLGPLTVPTILR

SEQ ID NO: 922613 - protein, 167 aa, Homo sapiens
MLFGVSQKLCFNPYDSGRGLYSATAVSVVGELLQGHKEDQVLSEELRPREDSLSARASCERMAHKLLVDQRRRGRVTRRLSSRHGDTDLRAPITERQVECRECVQMKQWLGREGPDPPCPGPYLQDSVTALGGRGVGTTRGQDSNLEGKEHCLGIEDETICISPTSS

SEQ ID NO: 922614 - protein, 252 aa, Homo sapiens
MAQSGTRHVLETARGECCLGESRFTGAAVSICEGAYFVAQLLAICFQCQPGSLADRVREKAHWLGCFQKFLAYLLLSVACFLHPVLVWHVTIPGSMLIITGLAYFLLSKRKKRKAAPEVLASPEQYTDPSSSAVSTTGSGDTEQTYTFHGALKEGPSSLFIHMKSILKGTKKPSALQPPNTLMELSLEPADSLAKKKQVHFEDNLVRIVPSLAEGLDDGDSEPEETTSDTTPIIPPPQAPLFLSSLTATGLF

SEQ ID NO: 922615 - protein, 211 aa, Homo sapiens
MAALHRCSAQVSLATESPRGKYPPHYCWHFLLYSTNYFTGTYSRPLPAAWRLLSLEMSSQQRSEWEPGDESDWSHNPQEPEAKLDTGNTINKYLLVIGGQLLSNGRTIPVQRSSPLGSSQDNTEAILDPELSVDGPLLQLHCNPFFFCPVLLSSLPHVYGTQDYAPVKLSAHNLSGSISQQTQPKMVVAAVAGGALERHHFFNKHWAHCHS

SEQ ID NO: 922616 - protein, 235 aa, Homo sapiens
MTQEDMLQSTLLGGETGIKRHLPGKDWGVELLGRVESCVPQWRRDKPCSRVAAPLDLLSSMLLGAAPAETVVDTEAQRERGPCCGSRPLSPLDLPGWQQQSCTLQRCRNGHSVFRFLLLFLCLHLGSLLLSLCLPLGSLLLSLCLRLGSLLLSLCLRLGSLLLSLCLRLGSLLLFLCLHLLFRPGYPVREMGKETSPTRAGIPGGKNVLKLCKALVFDVEEVDSWKLLEPFEDLD

SEQ ID NO: 922617 - protein, 126 aa, Homo sapiens
MRWQVWRFGFCKPSLRRLSGPGARRRVHDARITEVPAPRGEGSKERAWARPARLEQQFSGSPALPRVGPLRGLGASRGGGLEPLVLAEVLMTGERDAFAVFEATLSSDWQREAVGCGRKHIIIVGG

SEQ ID NO: 922618 - protein, 153 aa, Homo sapiens
MERNRLEWNRMGFNGMDSKRMEWNGFEWTGMERNVLEWNGMEWTRMEWNGTDLNGIEWDLMEWTLKEWNGMEWNGFEWTGMERNVLEWNGMEWTRMEWIRIYANGMEWKGMNSNGMVWNGLDTNGMERNGMIECNRMEWIRMEWKAMEWTRMD

SEQ ID NO: 922619 - protein, 139 aa, Homo sapiens
MRSGTKCHQLEKVNSEPSGTHQNFLRRDGLTGLAGPGQGVGVGEGRAGGKAASPRPRPGPTKPGDPPRHRLHGDDKQASSFALPAPPRTQSLVETREMEPWGEEQALGWKVGGRRAWQGTGGLGPAQQALGGQGGSPRA

SEQ ID NO: 922620 - protein, 143 aa, Homo sapiens
MSKPLTVSPLDLASSSWLSKNLLPTSCQAAGRQSDRGRHQKQVYLEDQSVLEAHGAWSRGPCLGAPSVAPECLGATESSSVWSPYAHSAFLVTGEASWTFWVQQGLRDRPPQPVPPRDEHWEGSRTDPRKEGEKGNTWSVSNQ

SEQ ID NO: 922621 - protein, 239 aa, Homo sapiens
MAFIVSAIVILATARVALASITESVQTAAFVDNLAKNVSNEVLQQGIDQKILARLQAHKAALEYVGERQDALAFRQQLNCDWEHKHIYLLMWGRGYACVFAGDEQTMWVPSRCVQPWKGRLEGPMDSNYRPGSPSMSNEPVESECENRTRTNQSHADTNPRQPGFTPAVDPKAPAPREAHDKAVWPCVSEAIRYELRQLLRATQVKGWGLGLHLSMEVYPGHTVERAYVTTFGNAIKSS

SEQ ID NO: 922622 - protein, 187 aa, Homo sapiens
MLQVELGVRFSIHSPLVWSPPPNQPQSMGERLSCPTALKEGWRGTLDRAMGEARLSVMPFTDQPDPSCCREEGPSVLVFVTQEFSPEHRPQVLSSVLTNSARLCGRQPRTLRQREVPTFAESWIRLQSCRILSLNDSRCLTLPGCPQPQKRVLRALCGLVPCRAAAGAHSALQRRKLSRVERHQSCP

SEQ ID NO: 922623 - protein, 150 aa, Homo sapiens
MPPQTAVRILTIAVLGNLAGLSPSLHPEIGMPASWPVPVRACACACVHVHGPGGIAVLPASSYLSSVEVGNGLGLAQWGRLQVRAVPAVEETLGLGGPGSSQPAEQQCRTEDGGGEHWPEFAMSSDNYILQLPVPVGSISMEIYCGQVCR

SEQ ID NO: 922624 - protein, 116 aa, Homo sapiens
MSFQNVAQSCKAGGKKRCQGSALFLGGNEVKSRAVVKYSSAPPRTAFARLEEKTDLKLPPANWLRESAKLGPAGTTILGNSKKSKPFSRFKNPACWVTYTLTLTPELMVFKVERVA

SEQ ID NO: 922625 - protein, 220 aa, Homo sapiens
MYNFEYTVIIRFARKVLRVNEEACGPGPKGAGSFREPLGLGKNSASSDFSEKESSLVPLSAGGQLSAGEQGSSEKFVITDRLKPSSLNLSKSFSIQLCSIAAEELRPSAAGLLEFAGGSLRMLFAWVSPAEAAEQQILQNGKCCCLILPLEASSQRGTQLYEMLVGPYWSFVLHQVHFLFFSQGVLTKSSLVEPSASSLLSLPKHQQSLTGVTHNSTYGK

SEQ ID NO: 922626 - protein, 141 aa, Homo sapiens
MKVEVAPLTITSSDPLAEFLLPVTVTLCSASLEVLAPEGGMLSPGDATMIPLNWKLTLPPGHSGLLLPLSQQVKKRVPVLVGVIDLDYQDEIDYYSSMKYYHALGLRSMALRPYHTESIPSRLILEAKANGKLQPNPGRNK

SEQ ID NO: 922627 - protein, 135 aa, Homo sapiens
MVEIFTPQKYADSINQSLCFPEKFPSEDSSQREFFKQVRTGILTHRWPEDIWDTLVAWGHLWVLETLSGDGHLEMQRGLQTPSVSTEKTDQACVSHADSHWDWNPVAQSGDNSGTRERLVDPMLGSDPKMKFPSR

SEQ ID NO: 922628 - protein, 180 aa, Homo sapiens
MVEGKEEQVPSYVDGSRQRQNEEDAKAETPDKTFKSHETYSLHENSMGETAPVIQLSLTRSLPQYIGIMGVQLKIWVGTQPNPHNYGIMVVSVVVAVVVAVLLVVGVIYDQPNDLGLVYGSKTGQHDILVLAKIGLLLHFSSSIAPKDGDEGKCPNSIELPATHSPVPVPLTEKWKWVEI

SEQ ID NO: 922629 - protein, 124 aa, Homo sapiens
MPAFLEGFAEGEVEIGQTTPVFVAPSMTLLCKIITLLNKFCLLGLSWKNSLFPSESEVLSMPLILPSLVTCSSLNQSVWLWIEWDHPDWLRKTMTPFWSWRVVVESRPHPEPRGCYKIWARKAA

SEQ ID NO: 922630 - protein, 138 aa, Homo sapiens
MLNSIHSNTGRAGEHEAKQKVFLSAGCCAFARGHKPMKLGLMIGDVLKVQRSQRGFADLVGVNVGSVVWSQTNQTKGVGICGHSDFMQPGYCWLWMVDTQCDVSLHLYQDNGATIPPKSSIIHNRIFHHQFGESLWYT

SEQ ID NO: 922631 - protein, 136 aa, Homo sapiens
MSAISDRNSESKSGDSEWQVQAQSCSADLGNKQPVGQEQAKFPQGKSLTIEGRGWNRWETSSLDILEDMHLCCCCCVVETGSFAGRCGHGTEFCSKWAEVMCTTSSPQPGPGGQGNLSSPNSKSLLGLGKDVDAEL

SEQ ID NO: 922632 - protein, 152 aa, Homo sapiens
MIGKESFPILHDCSVEADICILHFHKPIKSFQPLMKTTSWAAFLAAGRVAPSQMQVSWLWKGLALHHLLSHDAQRFLLGVSHRPFNRSVPWRVGRGQDSLVPVGKLSLRAMRDWVRGSLEWQGWHLGECWCCQEPVMEQGPALAFDLGLRSS

SEQ ID NO: 922633 - protein, 145 aa, Homo sapiens [sequence omitted]

SEQ ID NO: 922634 - protein, 304 aa, Homo sapiens
MTSTTLRYGLLLLLKHPELTGRTTDDEQSEFQNNAEKMVPVFSILFLLEKLHSLNFCVISCNLSKFDDMIKKDIFAQWRRMTEMNQSQTAELAASKAPWALDLLHQAREGISRSASCEDHGKSAVFGQECTIPPGLVEFAGCLLQTLFAWVSPVKLAEQQRLLPVPSSGSFLPEELPLDASQMELSCVICLLTPARRCLPVRRHRDQGPTGGGSLFFQGALLREEESREAVWLQQLCQAVVGSAQFKLPGGFVYTKDNLEHMFHHANFRVTLIERMLEKHHKQGQQPLQGPPCCDDVIPLFLSR

SEQ ID NO: 922635 - protein, 222 aa, Homo sapiens
MNYSFHLFQVLSHDRKNYPVFWERKKRFGYQQGWPEARQPPERSVGFECQGWTFIQLDTFTPQERGKILVHCVMGRSRSATLVLAYLMIHKDMTLVDAIQQVAKNRCVLPNRGFLKQLRELDKQLVQQRRRSQRQDVIAESICKLLSAVEWDDGAASQARWLRDFHSEGENGSRHEAGSDSFQGQESQTRQKPKRVAAVGDAGRQGPGMEMAWRNQNVIKAF

SEQ ID NO: 922636 - protein, 258 aa, Homo sapiens; identical to SEQ ID NO: 776973

SEQ ID NO: 922637 - protein, 265 aa, Homo sapiens
MQIYKKVERVVQSTQPRSLACTVHNSSHSYENLSLRCSDRRWSSGGNAHSLATHLLLCGPVPNRPSSTRRLGIPAQYDILPLRLLASPEPSLYLIREEPAEALMHVEGYEFGTGRKAFWLSRNNGLTETKGLKYLVEDVQGLWPDDETAMLRPRKGVSFPWRSQGTFCSTRFLWKAEYYPGLPAVIRRPKPLPVVLCFNAHAPGPLSCSSCTPGSSLKFVVDGGRRNSESLKVFDLSYKCIEENADVCCLLSLLQLHKRESTPVL

SEQ ID NO: 922638 - protein, 136 aa, Homo sapiens
MLGHSEKAAVCKRERGSRFFWYFQSWTMWNHHSLPTPASLQIRSEEISVPRGRKLLQLALQEVWTKEEADENLTACLNESYHQGMSHCPGPFSSCSVPTFFFFPPLPPPPLLLPSHPSPFPPPPLLLLLFFFLQMV

SEQ ID NO: 922639 - protein, 306 aa, Homo sapiens
MASTTNSKVSAWMEGHNKIRFVIHTRDRITFELLINEDVHILNVRMLYPGVVLCVISVIGSVKVEAHHLMTLLCQFMASKTGTELKITDMIRLTCDAMYRDKGMNEFSFVADDMALEAARFYFRDQEVSDDDLESAAAGWVDQNQGEVEKRFKSAFITPIITRHFCKYGKVAKVKVGRNDAAITMITVIVTDEEVPVKKRRSRKKVSLADCLDSFVVDVGKLADSELMTRDVNEIVRQMKAHIEKCEAFQLNPETFGFNGDYRTTFEFVRYVKKEFGFEVIHAGLVSGIQTFIFKPNEIRCFTLMK

SEQ ID NO: 922640 - protein, 144 aa, Homo sapiens
MRGCLPGAPGGGPRAWLSWKRTEHSRFHPKLYLLAEWVVPTSQVSRAANDPMLEIVGNVTNSSQPRLSNSQLSTVMAAEAAEESIKLQKQTHREETHKEKQERPREYQHTGVKQPQAKERLEPPEAGRGRGRFSLRAFGGSTPY

SEQ ID NO: 922641 - protein, 171 aa, Homo sapiens
MPTPLSKSTFLCLWDSFLLQDRLLHMAGDTAGNKIHASQISLCHPDRIARCHCGVNISHITFQSHSHDSGPVFHPSGFWSNLQCILNSCPKCCFDAVLLTALEDITSPVPLSHGCCFSLSLPLQTPVGLKLYSWSSIAACKPLRFYLKSPSLWNQAIRPCPPPSLSLLFTH

SEQ ID NO: 922642 - protein, 142 aa, Homo sapiens
MRDPLSHCDPKVSFPCMWKVFHALTCHQQVPSSKGFLTIQTGKNLVDMLLRLEKVDDLESQNLISRPNPATYQMYDFSHIYWRFLLPDTHYNDSKGENKRNHHITSKSTGEGGSADKDFQENPRSMEKDEQDTRKPLLRRVL

SEQ ID NO: 922643 - protein, 150 aa, Homo sapiens
MLSLPPYTAQLIDFSFCYRQQIDRFLFPQSFSRDYLRCSPGHLNLHATSWIALLSLWDSQVSDTRVKDMAGVSLGVCSALITCLHMGGAGHNGREETKGIGIYEGEKAGACVGVWKAPSEPTLASRGQLCVNAAHCYRGLSIACSSDEER

SEQ ID NO: 922644 - protein, 181 aa, Homo sapiens
MTLISKLPLSYFANFSPEASQWSSTQMPAFPRHALSIQSASWTPTCLPVLALESSPLWSLSCFLSPGRTDLGPLLMCTPVPCTPLYKKGVWTQMHKEMRMSCEDTDSEGRQSVKTEADIRTVLPQAKEGLGLSHARRGKEGPSPRGFRGAWPCQHLGLDFYPSELCEAIQLMVLCDSSPRK

SEQ ID NO: 922645 - protein, 148 aa, Homo sapiens
MMMELNRQPKSFQLQLNCCFRNIFYHPESSYKPSGPLWLHDRSQRIAESEQRPQLITSTWSVKDNLIVSKSQRPYNPSHCSHKTSSQLSLLRGGKRDTPGNVLTHIPCRKWRSHKRSVCSSPSMGKENCLVALCSRSTTETLRYLHNA

SEQ ID NO: 922646 - protein, 150 aa, Homo sapiens
MHSISYSANTPFLQGNSSGALLGPALVYLKLDYVQLHSMSSKLALIFKWKRRQMGGGRDLSLCSCFSISRSCGRQTGQYSAFHVMVCRFSLERRKGKSPSSFKHESLAHGLCIRLYFCSSKVRMLSVSDAEEWLSDLEHRFLDPGYSTSQ

SEQ ID NO: 922647 - protein, 143 aa, Homo sapiens
MSEYLLSNKSEGSLDPAKRRVVRILYPHLPIQTQAWYLPTCRSCSFLSVWLLESPFSNDLIHLPESTVVCPDWGVQTHLEGAEQRATLLLYCHKSDSMSQHSLGAHKMVISKDSWQSPIAHLPLGHRRAAVSLCTLAHVFDKN

SEQ ID NO: 922648 - protein, 148 aa, Homo sapiens
MKLENMLGFRMCSVESETLEMPPSRDQQHWPCPPGFDSSCFSHILWLARQAHAPSILPSPPPTLDLCGVVEADGLAARQRFFPLKLLSIPKSWELTESLWNLLLNGQPMVEASEHGRTSASLGQRLGRSLESFPEPNVRSKAKRGWGN

SEQ ID NO: 922649 - protein, 140 aa, Homo sapiens
MYYLYGDRALHSVLPDISLTPPAKGHQVDSSYQDGKSLWLSLVFVSLPYPDPASIKYSKRNQAPKEGLRSVSHGELPPTKPGLVNRNQPPAWVPPARPAGRKAAKAADLTKEFSITFTCAWCKKGKEGGKNPSGIQKESH

SEQ ID NO: 922650 - protein, 139 aa, Homo sapiens
MHQSHSQSSVLQGHVAGIIPSFIEKVCGCPLAVPWSRETPLCPPKPQQGNLILANDHQMADDHKGAWPFERPFRVEAITLQECQAKQDVACPTLTAKDCARRRSPQDKSRGREKKTAKRSGKTEKEIHLNLENMGQDVF

SEQ ID NO: 922651 - protein, 188 aa, Homo sapiens
MAAQPDGDSSTGQICAAFISLIKPSLLIPPCSLCSCGNFHQLALQRSVCVSRSMEAAGVLADPVLPMQDWRGLGSPAHVPPVHCLCRSLSLRTGSTVNPLCLPDENWVSQEKAASTYSLHLFVPGNVPMFTHARIGLGDLESEMSQQALAKVMVTSMKLLLFQVRSWFDPREASLKSLSWAAWPTMCT

SEQ ID NO: 922652 - protein, 206 aa, Homo sapiens
MASIALQHRTTRMASIALQHRTTRMASIALQHRTTRMASIALQHRTTRMASIALQHRTTRMASIALQHRTTRIPTGRQALLFKTRPQVWQALLFNTGPQEWQALLFNTGPQEWQALLFNTWTTRMASIALQHLDHKNGKHCSSTPDHKNGKHCSSTPDHKNGKHALQHRTTRMASMLFNTGPQEWQALLFNTGPQECSRPLLLLPP

SEQ ID NO: 922653 - protein, 181 aa, Homo sapiens
MQSQKRAARDKRYEASAVPQKCAGWTLVIGGRVRKNRNRDADWEDVAGAQVMVEVTVARLVTALILDEKTEVQRISETYSYSQSFQTSFPPDNNSHNIFPTALKGAFVWTRIQLCLSQHLCMWPYSSGGLATEQAQAFSFGGSVERGRQRLTGRSSCDSGSWQLSCPVRVPNIGTGGTCSG

SEQ ID NO: 922654 - protein, 158 aa, Homo sapiens
MVELGSPPLGRDVGSVPQREQVTFIAPADFPNHQMREGILEHMASFEPPAGHSDQPSHSRQTAQNCPGTLPAFMKNKKCLLFKATGWGQFVRQQKLTDTQVKINLPRGAYHFGVCEEKGIPAKRLTLLNTGGFPGSSPSKILTEIQNIASASNTLLNE

SEQ ID NO: 922655 - protein, 302 aa, Homo sapiens
MRIKYDDRYKGMLYTYQLHSFVRKMEITASSMCRHGEDLKQDNEAGTSSLLHLRRSGCSQLWSSVAPELGSQASLGLPRAHSQALAPRWLEALPVSFGVGMAVGSVDPCEPGAGGSGLSCCGPHGLVGVGCSLAANQDVQMVQEPDPASQARVADCARTRYQLPVSPAGLCAMCHFKENRPSSSTHTAAASCACVPGSQPILPGTRRVTGSFIASLHPAQNLLELLPAEYCWGHALLFTVAVPAQVHRDVIPQELWVKASCPSPGYGQHLSNSSVLGRQLKVEGCGKKIRMENDAELHEDRR

SEQ ID NO: 922656 - protein, 250 aa, Homo sapiens
MGSRPVVQAEHSLPGQVGPAGQLKDVGVEAVCKLHISSITDLRAVKWYLELCRHKMKWLQCLELILVLCFRVLKMESKWIRKGLSISTVQHSSAELHWKLQNAPQRRSENQGRKSAVKGAKWEAKHQLSVTSNELEKRKEGKAIFNEPPALPESSITSLLPPLENACRILAHHSRPSQSLPLSDSKFALPLAKLIQQPNSPCSHPPLISEEGSFLSSISHTSADEGKDHTRRNPKPGPFKPFVPACCLKK

SEQ ID NO: 922657 - protein, 152 aa, Homo sapiens
MQTVASFSALKPPVFNAFWLKRRLPFQAMSISSEKGLVAAAGTGRGGRTRPQGEVPGITASKRGYLPVSQTNMQTTVMSSSFPSGDPIAMSKNGIFILPIFYQGKALGSTAGVLQGLSDSARSHQESCLFPPVILDSAHLSQAPGDLGRHII

SEQ ID NO: 922658 - protein, 157 aa, Homo sapiens
MSAGRSSSEHTGQEQGSGVLNTNACRKTEHQRTRPPAEGRVIPHTCQGRGENVLVEPSFKGGVEEETAWRERTAERKNTNVTEPPAPWEADETSPFFPRQWAAAHALGISMKAGELKCGECFTGKEGAKAEPCYHRGMRAICISRGEHPCSNLSTTL

SEQ ID NO: 922659 - protein, 174 aa, Homo sapiens
MAENSKNQNASSPAKDHNSLPAREQNWMENEFDELTEVGFRRWVLTNSSKLKEHVVTKCKEAKNLEKRLEELLSRITSLEKNVNDLIELKNTAEELHIEGQLNEIKHEDKIRKKRMKKNQQILQEIWDYVKRPSLRLIGIPESDGEKGTKLENTLHYIIQENLPSPERQANIQI

SEQ ID NO: 922660 - protein, 185 aa, Homo sapiens
MRRLALLFLRELNVLPRQLPCKTLLTLLRTVPPPFFASRPLARFKSQQASKGAMQGDPKCHCGPSVRVQAYGDQVINEVLAKWGLEQEKALRQVQTDMKAALQVRPSDPSDPMVVGESMSDKDVIWSVWLAYHNVDSGLYIKEGKWPVVQLYTNSWAVANGEARWSGAWLDHDWKVGDKEVWEEA

SEQ ID NO: 922661 - protein, 155 aa, Homo sapiens
MEAVAAVWIRHDRSLDYSGSHSNEEFGRCLEVQVCSLWQAKDGGDVVMCHSPVLQLCKWPPYMEVEVKTKVTGDEDDGQSCLLHQVMNGSVPFISESWSSCQSTERHRYNVMCQPLMFLFYEINIYNSAVSPLTDCKTCLIGSRHINHKAPLVEG

SEQ ID NO: 922662 - protein, 153 aa, Homo sapiens
MGALPHLIHLHAPWRAWFQMYHHADVYRHISGSFQTEEWEGDDVQARRMCFSPTLKSHSTRDYEVSTVQVREAVQGGRRGMGIQPVGFGIFAPAHSGLNMYVLLKGEKGGLQLPLYKNTVCLSPILNLPKAHFLHCENLLGATHRDTSGTHLS

SEQ ID NO: 922663 - protein, 170 aa, Homo sapiens
MIWVEVAVPRNRRLAHVGEDSGCHPSPGGFTAVLGGLGARPAQKVSQAQISHSLGSTHGKVSWLKKAPQVGMRNREKQEKERQETPQTELTPFNTLPRASSDFDLQMLPTFSGSSSQLVVIKSPPLGVHAEKMRILRDSVSPMFVALFAIVKTWRQPKSLPTNEWKKFGL

SEQ ID NO: 922664 - protein, 147 aa, Homo sapiens
MPEPPTHSMGSCVARASPTSTTPCSTVPSPIDHPRAEECECTAQDWQAAPPAAPLKVCDAPIDTLYLAALLKVCKHTNQHPVFSSRFVNAPIDTLDCKRTNQHPDKTGHSALPISRMWVGPDKKIKAGCQSQHWQPARVPFHTVEAL

SEQ ID NO: 922665 - protein, 137 aa, Homo sapiens
MLYFEGKKITLKLKSKRISSLQFERKLETELYKKCISCKPRRNPSEVQTIPRMVKATKITGNPHFSGETFAAGGWGSRKETNNIGITWKCNRNAISLAPAQTNSSEALGVGLVCFMMPSSECEVVPHCGCDLHLSGD

SEQ ID NO: 922666 - protein, 150 aa, Homo sapiens
MSLGEGFHGKMWPNLGTKWLLLATPLHTLQKEGELHGCLRCGFISCTSVVVEEHGGREDCLGQRPKTVDTEGNVLHTSGCDLFVCSVTDTVTVLLGSVAGDAEEPDSQAPALASGMDQPTHPWPCFSAGKHDSVPKLLIDTYSPLAFCVL

SEQ ID NO: 922667 - protein, 164 aa, Homo sapiens
MAASLQSLHCSLCLHITISCSCVAHRLLQANDFPEDTTSKTLKATRNGIQTGQCLRMGRGDMQEEVARSDEKDLLCFTSDTTSKTLKATRNGIQTGQCLRMGRGDMQEEVARGRRNRPHLLMRSGRFGRICGNEKYCSGHFWSGATDTQTLYVQVCASIAPVQK

SEQ ID NO: 922668 - protein, 142 aa, Homo sapiens
MILSTKLILPQGRDEKQAVLRGKNMPVVGLLILTLVPIVAPRERENEYKVWAPGGRGGSCGPAMLEIDINPMHKFPMFTKEFPWHQNLWEKEESKSGQKEKFICDVCPITVSADHPGRSGARTALQIRLATDQDEQQFLFKC

SEQ ID NO: 922669 - protein, 145 aa, Homo sapiens
MATKALDLHGPHDHYKASGIYSNTNELRKTTGTKERVVAIKILENVEVALELDQGIIRTFKDHYTWSSMKRTVNTMEENPDSTLRKSEENCPDVVHDFTGFNLSFGGVKSSIKNGLQSNKPTLHGLFLLFGGKTAYLRNKTKTLL

SEQ ID NO: 922670 - protein, 253 aa, Homo sapiens
MGVWFPGQWSCSHNHYGCLCCITQVTRELGESRQSQAPLSSYVTHSPKEIYGTLNLRDDLGYLAEEISKKQSIQVVTENKSLENLQPDDAVGKKSPFSGKKFKLAAEICVSNEEPNVNHQDNGENVSRAWAPCCVQPLELVPCTPATPAMAKRGQGTVLAIASEGASSKPWQLPHGVGSRDLDVRHGVQEDHFGTLRFNDCPIGFQTCMGPVAPLFRAYTAAEFSGRPEIGPSPFSTSLASRWQHKSESFFFM

SEQ ID NO: 922671 - protein, 155 aa, Homo sapiens
MSMPSECLQEKETVCRLLYRYLNTEFFCQFLCFVAGTFVNADPVAPFHFAAEDSAEKQRLSLASSGSSGEPQWAGRWHSQSMLEESTELCLQLEVFSFCPQLRRRQHLGSERKDEKIPAGKGSAGKETVYKVTSKLTFLVAFDFHNNSEKQQRQV

SEQ ID NO: 922672 - protein, 172 aa, Homo sapiens
MTVLNFPLKRMYQLRLSVEQDLEQLRFILRGKDQLTRAQASWLRGQTFCQHTSVWGNGKQRHLIPKLHLRHNCSLKPPPSSELLVIRPCGGQRCRCLSFPSFVDVRRNGGETVQQGLRHEQPGQPASDGTDGMQADSRREKARKQILPPGASYGNQPCQPHDFSPVTVIAGF

SEQ ID NO: 922673 - protein, 143 aa, Homo sapiens
MECPHRAFPFLVTQPYHLYRDPQPARAFQKVPFRNPQLCHRSCPLNVVKVGIQNTRALGKTDTCCHLVRQRSANCSCFSLVKSQEMVLNPGRQKGGEGEPGARPTAWDGQRKAILVILNKCSFHTKAARKGGKTVSALKRFAV

SEQ ID NO: 922674 - protein, 146 aa, Homo sapiens
MKKGCFNVSFQEEELEFDCRKICFMAVTNFRGSTQVGCCPEEKWECASPPLQDENHCCLHSASARCLSVPADVEEGTKALPGHLLRQQRCLQDGSFPLMVYDPPSSYLGPASRLKNENERNSQTHVDPGSEAICSLRAMAKCRAFD

SEQ ID NO: 922675 - protein, 212 aa, Homo sapiens
MELMFVGGEYGGNIKPTPFLCLILKMLQIQSEKVKRKKRRMRSWKECHHLIASGEATETWTSPVHLPHCATEGVGVCLPEGGIDLPKVEAPSPAEKGIRARVQDITAADPETGGTDPVPSPQILTVVTDTGATQNLPKGLRRATRRAGEGMNGNTDTEKQSHLLSVPQLVGVQVKLRIRVLVFWPYYISAIFPLQRHNSGLILFRNVEAILV

SEQ ID NO: 922676 - protein, 174 aa, Homo sapiens
MEDVTASPSAMIRNYNGNEKCYEPDAEKVPVARIRRGHKEAIGFHWSGRDSHKVHNTLSGLLDAVMRKNQGSKPLTLYERCPEQAHVFETNSSELSNPGEELQGPTQIWPAHGSPGFLKCRRVKDQGWWLDVPQSPCLWIATNAGEIDCKPVHLDSCSCVSAIDTAVQIPVQRC

SEQ ID NO: 922677 - protein, 142 aa, Homo sapiens
MVPISAWKPCENTNCWATPPEFLIYQRGFSSRWPLNLNWNLGFLGSAACQPLDWNWSFGSPGSPACAVCCSFQTCQPPSCSKDALGGISEKHGLISDRDGQSYPQMIGDSISNGWKTLIKGTASWTCRRKCYGFACVEAPKA

SEQ ID NO: 922678 - protein, 157 aa, Homo sapiens
MLHLGITSVFQVTSSCRQIIRDKNHLELTSTDFSTTFSDYQPIDLLGCCNSNCSFTIESKGKNCNYICINLIASQRRETREMTGQPAALLSSCVFWKILYLTCHLQALGITTLPSLTAMSGEPTATPDDQTLRDRDSTEVIQIADEWLDSQTLTIQF

SEQ ID NO: 922679 - protein, 144 aa, Homo sapiens
MLCNLLYLPEPQCSHLRNGNNSVHIMRLPEQAQGVGSHKENLEMTGKWRQIYRAGFLNYCCSKHVRIIDEIWGKKVIFAQKHNEHLHGLLKMNLKNKIFKQMKKSNPKKKANKIKQQEEKFNTDKIKIIRLSDRYFKICLSCSN

SEQ ID NO: 922680 - protein, 144 aa, Homo sapiens
MGTLDFQFHTIEFILIFSLYIFAAHFSSGKNSGFIILNVLPSLINPSVCDQCPCPPLILPSSNTLLSAWAPNPPFQATCHLRIDALISSGTQPPHICQDPPRERLDPLVHLLLVPPRDLHTRKRSHPPNSDKPELEPWHVCALS

SEQ ID NO: 922681 - protein, 118 aa, Homo sapiens
MISTWPTGKLKHRQSHYAHGSAAQVTDLGPVADFQAGALSLVPSGEWFSSAEIPSSFLFVNPNPPQSADTFQVTFLPDPTSPHQDCDSTTLTKSLRWGQSLFLGSSTFLISFQPTENM

SEQ ID NO: 922682 - protein, 145 aa, Homo sapiens
MVLLPNRDNDKMSSNRKSENNQIKIGISSTLAYFLPYEVVCQNPSREHSDLTHLHAIAQNALQHFSLLTPSEERPHAILNESFIRRSGSWVKAPAPMWEWTDLLAEMNVVAVRLFPCYKGHSSIPLVREREVLHTLLNLESIEKP

SEQ ID NO: 922683 - protein, 184 aa, Homo sapiens
MLLDQRLGSATSPTWSSCSHGTVEVTTPELPLSPLSPWTWPWQSCLPGTSWEAFGPRSPRLPPQLSIVTKIALLGEGSEKLFHGRLAVHKADVFQEMKLQPKPFMEKESRLTGQLLALPGFHNCVESETPGRGPSEEGEEEKPPQPSPSPDDQVRFIWLCPKRLSPLIDEREYRKKNHRVSVWL

SEQ ID NO: 922684 - protein, 140 aa, Homo sapiens
MGCTATVAAHVFVCVSVFRSSYQNTGLQYLEGKFPFVHFGSHKLYASCSGNVCISSCQGAVKPVLPQGSLRAKFDLIGCSPRSKESHGANLRTATNTGSSLHLQWVSMRGFWDMDEAGNHHSQQTNTGTENQTSRVLTHK

SEQ ID NO: 922685 - protein, 153 aa, Homo sapiens
MCRLVTYVYMQHAGALHPLTRHLTLGECKIHGITYAGDYAHNKRNGLPQRDQGKLGFMDPWGAARIPATPLTSYVILVVMGDYIKDSKPKLGVQGKPLGGSDISVETRLNGIFHLQMMLHDLFLMFLWPKARGPLANHWCRTNSPKAEELGVL

SEQ ID NO: 922686 - protein, 134 aa, Homo sapiens
MTSDQTDLTDNYRTLHSNATEYTFFSSAHGTYSKINHTIGHKTILSKFKKPKSYQPHWNYSTIKIEINTRRLLKTIKVHGNIKTCSRVTFRKPTKMNKFLKTYNLPRLNQEEIGTLNGPIIPTRKSPRPDRFSV

SEQ ID NO: 922687 - protein, 141 aa, Homo sapiens
MNQHIWGHQGFGLEISTCASHSQAKRRLQHRSLYPKALYHLDIGPRVEVLESQRAGLGHLGRVPGSLHLEHGQLWRPSCRHQALKMPPLQGQCHLSRATMEPSKVEAWVLLAQISGQFFLLSGFNNLGQDLIRKIANIIEH

SEQ ID NO: 922688 - protein, 131 aa, Homo sapiens
MSVLHTEDPKAGPAKSQDQVSGGGMPSVRGQIQSRIFWEFKLHGAGMGIPGRRSADHEFAVLSFPHFGISGGSLAVHRRAEGARSWPAGSVNISNFTCYSTITFCLMNKQRHYLWISNSQLVDPCEDRDGV

SEQ ID NO: 922689 - protein, 134 aa, Homo sapiens
MASKESADVSDKCSTGDAQGVPDTLAVPFENGMSSFLLKVQDDPSQQNQLHYPDNHTFLHASQDLPIEESRDKIYFLQSLLLLWGSGFDTHYKYLTRKIIPKSLPSSPRFRQIHVVLSEVASSLLCSAEYQGSS

SEQ ID NO: 922690 - protein, 146 aa, Homo sapiens
MPEKKEEAEKTEKAKLDGTNCSRTRGLTSFGPHLVLVWLLVSMTPNRRRFQFAPVLKVPLEQYVENKPELWGHTRSGGGDASDENGDGAEGEDDGSGSDSSDGEEATEKEIGDKGLRDGSFSPNGRGGFCLGRIMLSKPHVTLGRG

SEQ ID NO: 922691 - protein, 136 aa, Homo sapiens
MSCLAYEGHFQVFSWYSINFCSTLVSSFINQSVLSLQFQEFSPSLNDMIMKLSETCIQKCFSGSFPSFPELPKIHHIIGFCVLVWSPGHQTEVHITSDSFQHNQGEWLTPYVPRPHLESNGSKAATCTVKEQTRWH

SEQ ID NO: 922692 - protein, 169 aa, Homo sapiens
MRENHCKNAENSKNQNASSPPNDCNSSPARAQNWMENEIDKLTEVGFRRWVITNSELKEDVLTQCKEAKNLDKRENGTKLENILQDIIRENFPNIAKWANIQIQEIQKTPLRYSSRRATLRCTIIRFSKVETKEKLLRAAREKGQVTYKGSPIRLTADLSAETLQARRE

SEQ ID NO: 922693 - protein, 164 aa, Homo sapiens
MDCYVIDSNGMESNGMQSNGMECNAMEWNRMECSGREWSGIKWNGIEWNGIERNGMESKGMDWNGMDSNGIEWNNMEWYRMEWNAMERNGMEENGMELNGMEWNGNGMECNGIIWNGVEWNAVDTNGMDWNGMDTNGMDWSGMDTNGMEANGMEWNGMEWNGME

SEQ ID NO: 922694 - protein, 488 aa, Homo sapiens
MERTRMEWTGMEWIERNGLERNGLEWKGNEWNGTEWNGLKWIRSEKNYGMESNGMESNGLERNRMERNRIDSNVMDCYVIDSNGMESNGMQSNGMECNAMEWNRMECSGREWSGIKWNGMELKGMEWNRMEWTRMEWIRMESNGTIWNGTEWNGIERNRMEWIYGMESNGMESNGLERNRMERIRIDSNNGMECNGIIWNGVEWNAVDTNGMDWNGMDTNGMDWSGMDTNGMEANGMEWNQMEWNGMEWKGVDSNGMKSSGMESNGMEWNGNESNRMEWSNGMDRYGKTSNGMELTRMEWTGMERTRMEWTGMEWIERNGLERNGLEWKGNEWNGMEWNGLKWIRNEKNYGMESNGMGSNGLERNRMERNRIDSNVMDCYVIDSNGMESNGMQSNGMECNTMEWNRMECSGREWSGIKWNGMEWNGIERNGMESNGMDWNGMDSNGIEWNNMEWYRMEWNAMQRNGMEQNGMELNGMEWNGMEWTQME

SEQ ID NO: 922695 - protein, 160 aa, Homo sapiens
MRKLRHQAPSTHVDPDVEILHNCERNWGNKGWKGLVGRSESQTGQSEKLSMSSHHRGTVREELVVEEYIGGWCLCGSAWKLLVTGLEQLLFSRTRPQEEAVDKTWRTARQLESGTLLCRHCITLPWPSERNGGCFLSPSNMVCKLLFGAQNHNHNMKGFS

SEQ ID NO: 922696 - protein, 134 aa, Homo sapiens
MHLQDTSLSRKGSQSRGNNYANLKCKLSGAPATTCSVLPKLISNSVKNHSPAFILLLSVLLLRVAAEGTLIRQLSWMDLYKNHDVSKAAHGLGKLERILPMERDNITAATTMLSSEQMSDVQRDQVILIRIVEV

SEQ ID NO: 922697 - protein, 185 aa, Homo sapiens
MTDMEHGNQFLPKPVRTILYKLGESAQKPGELTGEEGHSALRPALFHPCTLSCSHPRLLTPCLQETEAQGQSDKNWHVKASRFGYVSFNSKSLVFSTPLEGIIVSGAELQETWGAWAQEKSPGKGEGTEKGDGETQITCFSFTAISGATSSWNKRTLRQSQVEAIDDFQLLPACPEPFGQCFKVS

SEQ ID NO: 922698 - protein, 260 aa, Homo sapiens
MGGSRVVLWGPGLGVVSGEKGLQRVTQLQVKECQQPPGLKRQGTGSPLEPLEGGWPCQHLDLQLLSSFQNCERRSSVVLSHQLVVIWYSSHRKPYANSELDVYEPVEDTFLLLDVLQVAAAELAGVEICLEIGAGCGQMFATNIEGKVDLLVFNPLYVVTPPEEVGSHGIEAAWAAGRNGQEVMHRFFPLVPDLLSPKGLFYLVTIKENNPEDIWKIMKTKGLQGTTALSRQAGQETFSPQVHQVLAYNVCPVLLETECI

SEQ ID NO: 922699 - protein, 119 aa, Homo sapiens
MAANPQTGFSQLREKLTDQWREKMYIITNFTNDVKRAEEKEQGSMRKFYKENKFYIERCVNSDQNVKGLATDGAYSFQAWDVDKTVQSFCYKKPLKPHGSKVHFCYLQAKNSKWDSAFC

SEQ ID NO: 922700 - protein, 138 aa, Homo sapiens
MGSTAGLLDFAGGPLQTLFAFVSPVEAAEQQVLQNSKNCCLILRIEASSQRGSRLYEVSVSPYWDVSPSVGCTHCPPTVQPVPMRCTRYLSCKCRNHPSSASVTLGAADWSCSYSAILEPKAQTFYQSKSVWFLQLSI

SEQ ID NO: 922701 - protein, 153 aa, Homo sapiens
MGSTAGLLDFAGGPLQTLFAFVSPVEAAEQQVLQNSKNCCLILRIEASSQRGSRLYEVSVSPYWDVIVGYHLASGPMSDPWWVLSEFCGTNDEPVNNIWEVNASELLLFSRGLGHQLSAVNIKTSVVHCKPHLGPLAFCFSFPWQAREENVSI

SEQ ID NO: 922702 - protein, 177 aa, Homo sapiens
MENGTAILEDNFSVHQKVIKVTIRSNNSTPSLYLLQIRSQLQQVEEYHNSEQERMRNEISDLTEELHQKEITIATVTKKAALLEKQLKMELEIKEKMLAKQKSMDFTNREQSRHTSINKLQYENERLRNDLAKLHVNGKSTWTNQNTYEETGRYAYQSQIKVEQNEESTGNNEQFME

SEQ ID NO: 922703 - protein, 143 aa, Homo sapiens
MLFLDKLSFIDELSEEAEIEAHEGESQGFPKTILEVESTGYFRMNEKRNPGPDKFTAEFSQRYQLFFGHLAEFGCESWSRDFFERQSSSYFGCQRLHCFVMIFGFLALGYDMLLYLSKIHFIFLIYTLKPTSVTSAISFSGQF

SEQ ID NO: 922704 - protein, 266 aa, Homo sapiens
MDYGFSLQTLPFSIPADTENSLYIVAEKYRKALLGHRGMSITLPLESGSDLQGLVPTDAWYDTTPNKNEYTYYGYKRNTPTKECFTTTVAFLASVFPDQGILHCPCDFSYLGPDQEILHLLCGFSYLGPNHQGNTLPLLLRLLHWSVHRVTWSPRYMKILSQAAGLFLPALLSPGLSITLGGSQFLTPEATAMRQLGAPPHGRGLDPPQRRMGILDGPPNLSEINFQCHERNSIRTLIFSARQFYFYRRVCLTGEAMARASLISFM

SEQ ID NO: 922705 - protein, 159 aa, Homo sapiens
MRILRVLLGRQLPQWNASPEQCVAGPHEGSMQWLNTRKELALRVRTSETWEETAFLGDLKGFSELKNFQELINQSALVHPRVDVWWYCGGPLLGPLPNKWSGTYTLVQLAIPFTLAFHQPEGEKIRHHKAREVPYGSFDSHVYLDAIGVPWGIPGQFTA

SEQ ID NO: 922706 - protein, 160 aa, Homo sapiens
MVFPTLPSSQSGGPLQLPEVNADGELLPLPRVADPPTSPLSDDEEEFDLSLFSPQEEEPGDDPLPPPPIMETVYVNSSSTKLLPPLPEEDMRHSSEWSVSRSSCPFGPLPFSKPTVSFDAPGPLLSEAWNPASPQSASQRPHSPSLPLSLHNGCVSHLFR

SEQ ID NO: 922707 - protein, 145 aa, Homo sapiens
MSVVLLWRNPALYPEDNATEVQRYSSSFGGQSFLTQNNSALKHHGSPVTELGSLQRTMIPPGKEKTIKEPLKAAILGWHMRNWEKPTKIPLAWCGHRALDKFYLMCTEEKHSCHHCWESRGKCERGLDWQGLVRWSGPKIAQQTE

SEQ ID NO: 922708 - protein, 142 aa, Homo sapiens
MKTLRVVTVTDGGPSPKQSTIWVVVQVLDENDNKPQFPEKVYQIKLPERDRKKRGEPIYRAFAFDRDEGPNAEISYSIVDGNDDGKFFIDPKTGMVSSRKQFTAGSYDILTVRSSKLQQHSRWGEVVMFLFKYTPLSNKSLE

SEQ ID NO: 922709 - protein, 157 aa, Homo sapiens [sequence omitted]

SEQ ID NO: 922710 - protein, 149 aa, Homo sapiens
MERWGTKYYPISTSLPSHRWDPFCSWCLTCISFAPGGALPGRVLHQGLDLQETHNFLGSTSSLCLPKSEWVVGYVCECSGGAVVQEQRIPRKESCTTVTQLVWRSSLIATDSATMDCKGRGAPNSLVVSSLAEGSGRGEALPPTLSAGL

SEQ ID NO: 922711 - protein, 194 aa, Homo sapiens
MQVCYDVETTFNKQDPCNWLELTYTVNFYSEEEPDKTLALFWLSSTVVKESKEPQGYGYSVCMPAFLDYALITQVWNSATCSKYTSKSPDWERQWSPHWIRSTADTLLDPEGWKSAAGLQWQQIAVVDGEQKLSLSRNKHGPEECAVARFNRVKTELPYKGRGPKGGLSSATVYGELPVPLAEPPDVFRPLYLY

SEQ ID NO: 922712 - protein, 174 aa, Homo sapiens
MVGKANWKPSELPLPRKMAHQKLFAISWQGQQYAITVLPQGYINSPALHHSLFGKTLIAFCFCEGSVAAFGLSYNQERGTTPGGPIWIFEATHSSFGCDNMARLMNNYCLFERQLLACYWASVETECLTMGHQVTMRPELPVMNWVLSDQSSHKVGSALEHSIIKWKWYIHDWA

SEQ ID NO: 922713 - protein, 137 aa, Homo sapiens
MSRDGAIAPQSGQQILYSFDVIANGIAFIILFSYCSLLICRNTIFYYNTLSSRVHVHNVQVCYIDIVFLIDNFFLTTCDISFHYLRTSKVFDGKSAHDGIENSFHVKSLLSCCFQDFVFAFVIEKLYYFLNNNNSYD

SEQ ID NO: 922714 - protein, 172 aa, Homo sapiens
MGLPSHQLRTWYKPLVDLLFWDLEDGGPDLNAPLDRAPVGTLWGSNPTFLLCTALVDVLNVGSTPAAEFCLDIQGFPASSELREKECHQGKCQILIKPSEFMRTNLLSENRMGENAPMIQLPPPGPSLDTRKFLQFKHSSVSKLLLNVHIMILISDKSEDFNNSNLAEAELK

SEQ ID NO: 922715 - protein, 150 aa, Homo sapiens
MARLAREECDLSPNQVLCSKGPCSQEHMKKKYSHSASDQRSSPKAQEQTSGRQSLNSHPQITAVNVWKYKMIEYSMVEYKPMCQRLLLSTVHWIAKSESGWQESSLIPKNVETQSKISKEFSKMIQELKDEMHILRKSQTKLLELKNSLQ

SEQ ID NO: 922716 - protein, 144 aa, Homo sapiens
MVACCIHQPIIYIRKSTWSTGLSLVCCDSQCRTFTLAAAAKFLDGHSSSCSVSITLQLVVKMPCSLCLSSELHCRRLALKMFFSEAAFSPHSGLYFEYQADTVAIASSNRVHLHFNTAPNLTQPAAFPPPYGEPPYSTPLRNTF

SEQ ID NO: 922717 - protein, 137 aa, Homo sapiens
MAGCPSETKLPEEESGSNMCHSAIFTVLQPPLVVIPRQTGSQVDLQQTPTDLQLRVLTVRRKTKKQKGHPHQNPILITNFSKLKEDVRTHRKEAKNLEKRLDEWLTRINSIEKTLNDLMELKTMAQELRDTCTSFSS

SEQ ID NO: 922718 - protein, 162 aa, Homo sapiens
MARAHLNKEGEGGLIPDAARDNEPQLFPQTDNTTSLWGLAQDQNQNRRYIHQRGPSRRVGLEKVLKQLKISRQDYTLVLSEGFWTDPTSNCPAGCPQQDLQLSYRKISSFPIRKGHLMVLQAWKFKDMATLASGEGVITWQTRSKEKRTGTKRENLKSIWAL

SEQ ID NO: 922719 - protein, 157 aa, Homo sapiens
MSSEEGLSLPLVFRRTESFHKSLEKPRGCASQGERQGGSALRWSPGACLTEEDLATSSGISFLCISICQLVCQGPEFCWQIECTCLAATLSSRKDLCLRPLALPSVSSLKTTEYMSSLYPVKVEPRAAWYPAGVHGDPEAMLMSQSLMLSSAIFMSV

SEQ ID NO: 922720 - protein, 117 aa, Homo sapiens
METYTLLCFADRWGNRQRYVTLEVTALTFCRLLKTALAFSEQRTIHKNAHGLQCIGVCLQDHRLRPSQKGPGEIIHLITFHLQRIICSFGKHYLIRFFTFFIINIIINFNSFSSKHR

SEQ ID NO: 922721 - protein, 153 aa, Homo sapiens
MRVLYVHQQLGIYTLHMWSTSWPLCQGQRESRVSERWTVIEALNLALAVVRFLSKTWLRPPVFEKVGACPDVLTHMHCDGCFCLFVAPVYAAVLVIKNILWLRWRTIPCDAFSTETSMESTLHAYYYCTGSPNSLMSQVEVRNQDLSVYPLVD

SEQ ID NO: 922722 - protein, 122 aa, Homo sapiens
MQCLNFLPLRLPESPLYPMQAPHPSLLIHPRMSGWCGGQSCSFKTGTQLPVPRGRDRHNRHQRLFTYLRDILALSKICMCLNWRWVGKCVEVVWNFCGSPESSCHCLLHSPSLPGGRVCIIC

SEQ ID NO: 922723 - protein, 153 aa, Homo sapiens
MCPEALGLSQPPELVGPAPPGQRPETLNVSPSTSMGKALCPRQGTSDFWASPPNHDHPPSFSPWSSSESKGDPSGASKCQWSFPSTGLCAGHCGDLPPDDPVILGGPVISLRAGDPLNLTCHADNAKPAASIIWLRKGEVINGATYSKTTNLR

SEQ ID NO: 922724 - protein, 139 aa, Homo sapiens
MVTGQSLAQSCFIPTSPFLQGWFWVPEPSFPGSGWVQAVQHHLSDSRLELVGREGSCLSILSLVGIKWKRIPPRALGPTWGMFRPETVLGRAPGLRDAGGVGRGEAGTPSGFPLFAECSVTHQLDFRALCTLAQASLAL

SEQ ID NO: 922725 - protein, 138 aa, Homo sapiens
MWFEPPFRYCGASVDSSCGVLISNVWGSRGGWQRALSQLLLAMQQSPQDTKAHRQAARHRQMALHQGIGPRHPGAGVNAADSQRFQDKDTPVSLEVFAEPGETAVCVAVNVGVRIDTLLLMFLDVYSEVELLHQMWLS

SEQ ID NO: 922726 - protein, 141 aa, Homo sapiens
MTTFNLNRLLKALAPNTVTLEMSVAKTDTCTEHDLIAISAKCQKGEGINTLNLLGIIHCLTGVFRTIKSLVMIHSVLGEHKKITTQGFSGNQHRVCAYGASLKIWNDSHHVEGFNASLEQKPRWPCQSDSWHKIRCAQMRF

SEQ ID NO: 922727 - protein, 137 aa, Homo sapiens
MLALWGATRGKNCAVFSIYNQMHSISPSSSHLHAQAVMAKRQAEEMEISLPWHLSPSLYHPLHHFSYHLCAEISPVYISRPNLSSMFQTQISTGTSNSTCSQLYRSASLKEQKEERKARRKERTRFFIPHLRSGPCR

SEQ ID NO: 922728 - protein, 148 aa, Homo sapiens
MRKWSLKDAASVACSPQIQNNFGIRLEYFRPKHIIHPGFGSAGNPEFFGKLSEKIWVWCDRHNKLKRAARRGGAAEMQPSTLWFPILVLCFLPALDFYHSTQTELSVCDEVRKECKVSRGAIYSWKTSLAFLSGTSAPSPGESEHTVL

SEQ ID NO: 922729 - protein, 137 aa, Homo sapiens [sequence omitted]

SEQ ID NO: 922730 - protein, 225 aa, Homo sapiens
MTAGHTREANTSSFPDNSSQCCSLDLTVHKKPKQKWLLCGPLPAWYLMIDTAYIFVPFLIFIPWDLKSLGIQGHCSPEFPRAAASVGSRPPALGMSEHGAMEAPSCALRQLPFLATAAFERCHLAEESDKPLHTVWPCVPPASHAPFHLQGLSSYVCGNQDSSAQKSADTKAAKKGEPLRRRIECGAAEGIHEGREEGGKTGRLRKGRRAHPPAFNTQTRPPDLE

SEQ ID NO: 922731 - protein, 127 aa, Homo sapiens
MKEARRERSHIIRFRLSEMVRTEWSFPAESGRMGTADVSQMGLCLSHILVNACQKQVSDVKFHTNNNPDERDCAAHWWYTCLAHFRFSGITNAVIHVDDLAETLTPNSCRRYTIAICPFTNKVDFDH

SEQ ID NO: 922732 - protein, 150 aa, Homo sapiens
MGQVGRQLAITRTTSTGTMTSEFQTMLQHLQPTAENAYEYFTKIASSLFESGINRGRVVALLGFSYRLVLHVYQHGLTGFLGLVTRFVVFMLQHGIARWISQRGGWVAALDLGNSPILNVLVVVGVVLLGQFVVKALTPIPGGLGPLPIL

SEQ ID NO: 922733 - protein, 149 aa, Homo sapiens
MSSNSCEAYRWRLTLLYYSPYIMKGHTTQSVDTWSDYLKSIPKPHKQPSLGYALEGIQQQIKFHWLIKIRNSTTTTTTTTTSTTTTNDVTTYLALTEFQSPLSVDDGLGVGVRDGSVDACLSRRSCPLFLELVKGKTPESDGWGSIDVR

SEQ ID NO: 922734 - protein, 162 aa, Homo sapiens
MAFVNCIGAVGSVAVRMTRKREREREREREARNLTGKKCLPFGRHARLLNGPSDPMGPVIFNPTSDLEFRHDTWSLGKMAALSNRKDKKGKGEREKHCLWQCGEGEMLRGYSRFLGRQKDVTGPRHLPKGEFMDFNNYKDDQLDISEFSVSFAVTELLELER

SEQ ID NO: 922735 - protein, 154 aa, Homo sapiens
MSCYMNMTSRQGTEEETLPKTGRWWSGVQSRGMKWLTVSGQHLSKKMPPATKINKPIRRAESRPEPLGVGPHLQKKAQRFFLGTDGPPAQGLTLCIAILKFLIIFEQDIPHSQFASGPANYAASPGLERQRAVTLYSPRHQVFAVSELYEELRI

SEQ ID NO: 922736 - protein, 173 aa, Homo sapiens
MCNKKIPIVIAGERQVLTEKMNSLHPRNICSEKPVNIVEKFKECRSLLVSALQTGEVKNIFTEEASKEKVQRKTFLEEAAAQKNRDVTNLLFFPRPGSQEFSKLQATQGPRFSSLFAGSSPHLRALQNPALLMNKHRCVCGAPYTLETMFSFKVFRIAQSGFVNDISGTALSG

SEQ ID NO: 922737 - protein, 164 aa, Homo sapiens
MDRRMEELDKCWSFPFKHLDSRQLAAFGSLLPLLCNLLLRESNEGEKILSAGEEAVRIPVWTKTLLSAKSLLKPPFKFKTSGQTQLLKWKRKDWVGGRQIGLSTVKLRPVFEGCVKHPLFQDVKEKAQSSAVSYLKTMPEAHLMISSPTLKSRVERCVEKRGEA

SEQ ID NO: 922738 - protein, 149 aa, Homo sapiens
MCHLDKEEGQKLVPGTGKGIQGIPELGKAAQEEWLSFEESAAFRHVLHNVKDVAWPEKLSGISQKREEPGGQMLAKAWRRRKSHRWVLNKGQVKSISPTLSKSFHITRNLCKLGTPSGNQSPKAILNFINVISIQPDMSLSLPNMIWSC

SEQ ID NO: 922739 - protein, 187 aa, Homo sapiens
MSDLHGTYYIIETNANYESSDPGAQDKVIDSWKNRQLDTRRPRVTKGVEYGELLKKTDARPQEGECKHLCWPGSLLWSPCWVLKVDEVDSNLGNGARPCLKEEEEEGGGGGGRRRRRRRKKKEEGGERKRKKKEEEEEEEEEEEERGGGGEGEGGRGRRRRRKGGGEEEEEEEEEEGGREEEEELEK

SEQ ID NO: 922740 - protein, 142 aa, Homo sapiens [sequence omitted]

SEQ ID NO: 922741 - protein, 174 aa, Homo sapiens
MCGKYDRGRCYLEGCSHLSAQVKTQLILTEAGRKLAERMLPITSILDPVVVAYLGAAAGSNEELREIAPSLNVRTKPLISLSPWTENGCICTLHGRKEKGLFLCQKCSAEPQRGLRDSYYSDTCNSGPGRPAEKHQGGFLVLLTSRMKLRTFAVSVTALKGDMDPKSEQQQDLL

SEQ ID NO: 922742 - protein, 179 aa, Homo sapiens
MVTRVCWTEVMSIVPNYTGMLDRATASAHTGRAQSPGASAATSHSSVRCSPTAHAAFRISSKHTLYDGPTCNASFLGKQKAPRAFLHCDISGGQQNTDQRLNTGIITTFLHCQKKLVICLFDYSPGLNTEAQELDSILITLEFTKGVCILNVFVLPLRKWRESSQVKQKPSYTFLYVFP

SEQ ID NO: 922743 - protein, 246 aa, Homo sapiens
MVGYFHIWIPGFAILTKPLYKLTKGNLADPIDPKSFPHSFFHSLKTALETAPTPALPDLSQPFSLHTAEVQGCAVGILTQEPGLCPVAFLSKQLDLTVLGWPSCLHAEAAAALILLEALKITNYAQLTLYSSHNFQNLFSSSHLTHILSAPRLLQLYSLFVESPTITIVPGPDFNPASHIIPDTTPDPHDCISLIHLTFTPFPHIPFFPVSHSDHTWFIDGSSTRPNRHTPAKKGYAIVQATSPTS

SEQ ID NO: 922744 - protein, 166 aa, Homo sapiens
MHHQTAPSGPSNWQTCLAVWTDSPVDNVTCESSSLGLLTQWAEQVCSSWNFEVKSAYRALHFGGKQIDPQRTKKGREWGWGNSPSRSNTEPKEPSPHSQGKRPCHQGFGSNTQSYMEFQQSSCSLTPVPGSGKVENSSVHIPRKRAESREPNSTPLQAPLPWHLTT

SEQ ID NO: 922745 - protein, 164 aa, Homo sapiens
MTDSASHNEGCDWNWKFKSQGCSLYHSRAPESLSLLLIPFYFKRNHVLSEAVSESRDPRIWSTGHVSLWLSLLLTCLRAYQVTLSSYSCMSALPTTFSKDCELCKDYMSPILSPGISADPWKSPSALLPASTINSPSLMRMAVTSLCPMQCGMKSTSDAGGPHG

SEQ ID NO: 922746 - protein, 155 aa, Homo sapiens
MRNGSCQEISVYISKRIDYSELEYLSLYSKHKEVQQPVESSYDYLKEKEAEAEIMIHITPAIVISTHSQEFPIYEYIYANTGSCGVIKALTSGVHTGSSSGFRQRLLVVFMHDDLRVQCFMFALHLYPGKLITIQNPFVLLREKQIRIQKSLVVH

SEQ ID NO: 922747 - protein, 161 aa, Homo sapiens
MSLTPHPYPTVVETPYLFPPDPEACVFSSLLMSLKFRINLSKASSLAFHCFANYYFSAYQVFRIKNGENCLHLLMRGAERSGHSKPQGNGRGNIPNLVISRNNGWCNICETASKCTWMNIECIISSGEQLWTMGDVLESLPLPIDVVINCMQWINSSCEED

SEQ ID NO: 922748 - protein, 225 aa, Homo sapiens
MVPLLWSCLPVPRHALSLFSPWVVDGTGRVEHGAALIGEAPAAQEPTESGESQAWWAAGPETCPVGRQLRPGENLSTAAAGPGAKPGRPAAPSAGSAQPTPTRNSRWPASTARSPGSRLRLSLHTSPQAEGAGSGLCQPRKGLPECSGGLKGSSSAAKVGAQAEEARRASESWQQSCPGQRSPKVQSALNILHSYLSGLGPTGFFRWLSGDVLLGDQNFGIRYLP

SEQ ID NO: 922749 - protein, 153 aa, Homo sapiens
MFRCNENEPCLAYEGNLAHQVAFASGSNKNALQNSFCNQAAWVEYSPADSRKILNVKTVQYGKRTYDRAVAECEITHVPKCLPTTWNTRPHAAGPPPQVKASVQLKRSFDTLETEVEPRGWKSLPVTTEFSEHNCKYPLGLFGRRMCIIKYSL

SEQ ID NO: 922750 - protein, 157 aa, Homo sapiens
MEKRGRVGWSSREALWSGEGEEEPNKEKQQSTWNISIPPSKAVLEEQPQSPIVPKSGKSVKTFIRNRYEPAKRCEELICAELIRMNKVTTDSAMGIADKDLSEELQCRSCSSIILVVIFFSRDSKLIEAKNEAFVSWGLITLASNTMPHASRCSRNA

SEQ ID NO: 922751 - protein, 438 aa, Homo sapiens [sequence omitted]

SEQ ID NO: 922752 - protein, 179 aa, Homo sapiens
MWVNPNIVYPPGKLEVSGRRKREDLTSTLPSSQPPQKEEDASCSEAAGVESLSQSSSKRSPPRKRFAFSPSTWELTEEEEAEDQEDSSSMALPSPHKRAPLQSRRLRQASSQAGRLWSRPPLNYFHLIALALRNSSPCGLNVQQIYSFTRYVPGALRGGGSGGQGPGLMPSNPSQALGC

SEQ ID NO: 922753 - protein, 153 aa, Homo sapiens
MFMCKAFLHWYVGWGMDEMELTEAESNVKDLMSESQQYQDAMGKQEGEFGEWAEEEVAWSILLLSEGWKSVTDRPGDEKGLYCVASGSGVRDVVLLNGGGQRFWEAHLCQDKELPHRTKSLTGLMGLTGKERDFLALIEACYQKFAEEIRYFP

SEQ ID NO: 922754 - protein, 141 aa, Homo sapiens
MVELVYSPTNSVKVEFPLSQCLAEPGAEPPQKPQTSGATDLQFQPSIVIDTRLQCVRDVAYGVPSKAMMMGPPKALGAQFLSHYVWKAGYQVKKCYSRVWKFNVACPNGCLEDREDICGLLGGEVSMEHTPPSQLRSNEGS

SEQ ID NO: 922755 - protein, 135 aa, Homo sapiens
MQFRSPDSCSNTLLPVQGMGLPESRTVVIVSALLDLATQWSYWALGWYWGVSSESCDVICLQVLQPRIVAPAPAELPSRDGSFLGDFLKFVFQHSIDYYGNMFYFVNYDNNKCEDLQSVTLLITPSATWKMSVKM

SEQ ID NO: 922756 - protein, 490 aa, Homo sapiens
MQQMSSFWKTRRASESMFLKIKKKKSQMASRVLSLDGLTQENSWIQEESDKGMVALCVLIFSQMSESVLLHMPQPVNPEFPTGPITGPVDRLNHFRGHWSNKDILRLLECMENNRPSDDNSTFSSTQSYMDWGKVAFKNFSGEMCRLKWLEISCNLRKFGTLKELVLEAKKCVKKMNKSQKYRNCPDFPKRPLTAYNRFFKESWPQYSQMYPGMRSQELTKILSKKYRELPEQMKQKYIQDFQKEKQEFEEKLARFREEHPDLVQKAKKSSVSKRTQNKVQKKFQKNIEEVRSLPKTDRFFKKVKFHGEPQKPPMNGYHKFHQDSWSSKELQHLSVRERMVEIGRRWQRIPQSQKDHFKSQAEELQKQYKVKLDLWLKTLSPENYAAYKESTYAKGKNMAMTGGPDPRLKQADPQSSSAKGLQEGFGEGQGLQAAGTDSSQTIWVNCHVSMEPEENRKKDREKEESSNSSDCSSGEEIEVDNSCTSVTLF

SEQ ID NO: 922757 - protein, 191 aa, Homo sapiens
MQKPQPVNPELTSWCITGVLDMLNNFRVDNALSTEMTPCYISLSEDVRYVIFGDDHLSAPTDPQGVDSFAVWGAQAFTSGKHYWEVDVTLSSNWILGVCRDSRTADTNIVIDSDERFFLISSKRSNHYSLSTNSPPLIQYVQRPLGRVGVFLDYDNGSVSFFDVSKGSLIYGFPPSSFSSPLRPFFCFGCT

SEQ ID NO: 922758 - protein, 239 aa, Homo sapiens
MAPKNNQTGASGKSSRQGNTQIRLAHFHEQDHTVTKDQNHQEGHGQLQLAGGVDKALRIFAPSSVQGQKRQFHCRGSVRGLFVAPGSATSNKLGATATGRVQPGDRAALLLAQARGSACWEAGVKGSQRGETGILLVGGCGMLFAWMKPSGALFLSQAECIRGRTTPVAVAEGLFIASGSLSPGKLRASTSCCVHPWVGQLFCGPELVALPGDELGGGGSREEELDSSPFGGCCMGVPG

SEQ ID NO: 922759 - protein, 126 aa, Homo sapiens
MRSWIRLMKHFVPWWRGYVLLGGKPLVWDAGIPQNYQDERLSLLLCRLWPPLPLGVQAQVYSNSVPEPLAGVIGETARKPHTLRKDVSGYDYTTSRKTRKPNRQKSDNSKYYQEYGVIQIIIFFGV

SEQ ID NO: 922760 - protein, 136 aa, Homo sapiens
MVTPVISIPSILWGALELEQPYRIVLYQGKDLHLFTAPSITYCMMMAFPAKDSKLMHQQALPLKGEKWSHSVLKWYLGGSLQHPLPTGHIRNLHNSPSHHKHGGLGGKNCFMGQVQARPAVYNLGTWCPAFQSLQP

SEQ ID NO: 922761 - protein, 213 aa, Homo sapiens
MDEYSKLVTVEWGAAEKLPENVEATLELGNRQRLKQFGGRRRQEMWESLKLPRDLLNGFDQKPDNDMDNKIQLKWSQMEMNFLGAEAKVQLRLLLQRVEAPRPWQLPCGVDPAGAQKSRIEVWAPLPSLQKMYGNPWMPRQKFAAGVRPSWRPSARAVQKENVGTEPPHRVPTGVPPSGAMRRGLLSSRPQKGRSTDSLPLHLEKPPALNANP

SEQ ID NO: 922762 - protein, 175 aa, Homo sapiens
MQKSSGWHLVGAPLGQSFQKKEQAAIFAVLQALPVISRQTGFGVDLKQTPADLQQKVLTIRRKTKKQEQYQHQQKGCPLRDPTGRSPTSKTKATQQNWMENEFDKLTEVGFRRWVINSSELKEHVLTQCKEAKNLEKRLDKSVTTITNLEKDINDLMELKYTAWELHEAYTSTDS

SEQ ID NO: 922763 - protein, 135 aa, Homo sapiens
MNCLLAWWLGEIPIFGHRNLMFVKDVYMCHVVVGGIGTAPVYSSQRERRRRRVISAFPTESEKGDRRHLENLVTHTLILSFSNGLSKQHTRRSYPVPCSDAPTPTEPRTLLAQQSEIKLQGGSEAGGGAPAIAQA

SEQ ID NO: 922764 - protein, 132 aa, Homo sapiens
MARENEEETKVESCDKPIGSHETYSYHKNSTRKTSPHDSITSFWVPSTTAGILGDRIQVEIWMGTQPNHIIPPLASPKLNSSLLCNCRLNTTWKLAPLYWYQFTVLVRFHAADKDIPETGKKKRFNWTYTSM

SEQ ID NO: 922765 - protein, 476 aa, Homo sapiens
MPEAWAGDRGTSQMASRVLSLDGLTQENSWIQEESDKGMVALCVLIFSQMSESVLLHMLQPVNPELPTGPITGPVDRLNHFRGHWSNKDILRLLECMENNRPSDDNSTFSSTQSHMDWGKVAFKNFSGEMCRLKWLEISCNLRKFGTLKELVLEAKKCVKKMNKSQKYRNGPDFPKRPLTAYNRFFKESWPQYSQMYPGMRSQELTKILSKKYRELPEQMKQKYIQDFRKEKQEFEEKLARFREEHPDLVQKAKKSSVSKRTQNKVQKKFQKNIEEVRSLPKTDRFFKKVKFHGEPQKPPMNGYHKFHQDSWSSKEMQHLSVRERMVEIGRRWQRIPQSQKDHFKSQAEELQKQYKVKLDLWLKTLSPENYAAYKESTYAKGKNMAMTGGPDPRLKQADPQSSSAKGLQEGFGEGQGLQAAGTDSSQTIWVNCHVSMEPEENRKKDREKEESSNSSDCSSGEEIEVDNSCTSVTLF

SEQ ID NO: 922766 - protein, 252 aa, Homo sapiens
MNSGILQVFQGELICPLCMNYFIDPVTIDCGHSFCRPCFYLNWQDIPFLVQCSECTKSTEQINLKTNIHLKKMASLARKVSLWLFLSSEEQMCGTHRETKKIFCEVDRSLLCLLCSSSQEHRYHRHRPIEWAAEEHRKMPAFHHEEEKHNLEMLKKKGKEIFHRLHLSKAKMAHRMEILRGMYEELNEMCHKPDVELLQGKGPSYFIHQPQNFVEWSRSESVLLHMPQPLNPELSAGPITGLRDRLNQFREW

SEQ ID NO: 922767 - protein, 152 aa, Homo sapiens [sequence omitted]

SEQ ID NO: 922768 - protein, 136 aa, Homo sapiens
MEEKPTFLPDTTTGHGIPPVSMREDGKYQWGSREAPHSPDFRPQAPQGKHPGQQSQVPSHPLEEVEDTELKFRYGDVTQGFEHSPSNGDWMLPVLSTSTFHGEGTKMKDRTTAVKVLQECHHFKCAIECVEDFHNL

SEQ ID NO: 922769 - protein, 154 aa, Homo sapiens
MESSTGFPFEIHKGCTGNGLEPWCLKWQSFQGTSGGLCPCTTNARSTAGPQRLLAPNIGAGSAFFFDFDASQILGCSLVSFFGDGCQPTSKPVKAVSDFDGRGGDLSGRGGRRRGLIAGPGICSHRACGASRGCCWLQPLGAGLAGKIHLSRKV

SEQ ID NO: 922770 - protein, 264 aa, Homo sapiens
MPEIFQDRRRKKYARRDHKKVAMPISGRCGIPRGDGPRAPGEGEEPGGKVDADKTPVERAGQQAPQDIACSKGGLGFRAHAHQRDHIKRLQLPGVNKPMGSAGAGRGPWERFRFRGLLEIGLRLTDLWGPGGLVRTLAFALSKRVPEYKSTKAAALSGKGRRPASPPPVLTTTEILLSTDPWQTCGRNWRPPARNGCGGPWIWPPGPPEPRGCCLKGAPPSLGHTSTVASWPLVTPLSPHEAMGTSMTAPHLGWVLAWPSEALH

SEQ ID NO: 922771 - protein, 129 aa, Homo sapiens
MSCHRILAGHQGHARKLRTCILTSTELCLKRRHVGSISTPRHDVQDSSGHLVSAITTTTTMARGFQALSKWCWPGLSWDFLTISDRRKKKDIVERWLSFWREKTLPLGMKFEEPSTCGVWDSSFSTKGL

SEQ ID NO: 922772 - protein, 378 aa, Homo sapiens
MWNCKDSGHSVCGPCYDILSRGLHPVGQSFPSYLWGLVNLQVGAALWREASPGDRGWDASLSIERNPGAPGVPTPSHCQGYGKDACLPPPMAGTPCAFGLQQQKSGVTRGRPDVTTLFTSSLAGPTGHSLDRFSEPLSFFLQGPPRKEKTPSTLDARLLITQTLLPQRPQVTPDSLTPCKQGNCQHLARAMSAAMGWGELQSLELAELAFKAKTSSSLCSLLVQPPIRPWGGQQLGDAASAFSGLHLAGETKQRHRKQRVKRGLAQKGDPSSKKVAPWLSSCHPDDWPTHGQWGLSRGRRGGFGGSHLLCMELGRTGGSHLATQKTHLGQFCKKTKATHCHFGGIHLGSNACGPLSPRGPSEQTWPPLALCVQHSPAQ

SEQ ID NO: 922773 - protein, 156 aa, Homo sapiens
MKRSHEIQGGEIGTQGYWRSYETISFIEGPPKECCSFRHSLCSVHAIQPNLPGPQWIGWCPLTLRDGQSSLHNPLIPTPMSSGNTFTDTPRNNALLLSEYPLTWSRTCSNNSEAFCPVSDSSGNVFSGRSLSTKVVASFKWIFSSWQGSILLVFTY

SEQ ID NO: 922774 - protein, 203 aa, Homo sapiens
MTLTFLLPDYGEAQEANPRPETPDTPNPRPETPDTPNPRPEIPDAPNPRSETPDTPNPRPEIPDAPNPRPETPDTPNPRSEIPDTPNPRPEIPNAPNPRPEIPDAPNPRPETPDTPNPRPETPDTPNPRPEIPDAPNPRPEIPDAPNPRPEIPDAPNPRPEIPDALNPRPETHDAPNPRPDTPHTPNPRPETPDAAVLTPGSK

SEQ ID NO: 922775 - protein, 203 aa, Homo sapiens [sequence omitted]

SEQ ID NO: 922776 - protein, 204 aa, Homo sapiens
MPLTTATSTNTGFGASGISGLGFGVSGVSDLGFGASGISGLGFGVSGVSGLGFGVSGVSGLGFASCQGRGQPGPSHVSGLDLGLVLCMPGPDPLLKSKRTHQVIHEGFASMTQTTPTRTLLQAWGSNSNMGFGEDMGTVPKTWQLDASEHTDGGCYQEGERSHNNTGLQVHLPIPGTLQHHFQFPGNRATNIGGKTPFQYEDAF

SEQ ID NO: 922777 - protein, 153 aa, Homo sapiens
MELASSWLLGRPREAYDHGRRSHKNSLSQRQHQAMRDLPPGPRHLPAGLTSSIEDYSSTRDVGKDKYLNYVTTELRKFSQGLVAVSQERQAKVHPGCLHLQILLRELAVPDSPQPLCGITLLGGEPMQATPCSLSHPCLEQCLAQARHTGVLS

SEQ ID NO: 922778 - protein, 176 aa, Homo sapiens
MKAARAAGQPPRHLVHGPGPVRPAGLVAGPFPALTPNRRPGRTSAAVTHCAQRKNKASLPDSWALEGPKKSLSPRACAAPASFSWGNQDATSGPLGQCGASAWAPGPNILTGLHACPHKPEYRQTGKMGSEAVCQLEMQDWVTRIKGDDKTCPSKLGQSPRSPADYSLCTEDKGSL

SEQ ID NO: 922779 - protein, 147 aa, Homo sapiens
MQRFDDFTSINRHADHCQFSGITAPDTPGCIIFAPGWNIPSHGQGVQPPSLEMLCCKCPEMCISLAGAGLTAPNRSWQQALTGSTGAPGSSKPSGKNLDFDTRQPGFKSWPLPLVAVDFWPSHLTPLSLSFLVYTYGGKNSTYLMRA

SEQ ID NO: 922780 - protein, 326 aa, Homo sapiens
MSSKGSIVLACSGSLDTFCILVWLKEQGYDVIAYLASIGQKEDFQEARKKALKPGAKKMLIEDVNREFVEEFIWPAMQSSTLYEDRYLLGTSLARPCITHKQVEVAQREGAKYVSHGTTGKGNDQGHSDLTEYAKQRGIPTPVTPKNPWSMDENLMHISCEAGILENPENQAPPALYTKTQDPAKTPNTPDILEIEFKKGVPVKVTNVKDSATHQTSLELFMYLNEVAGKHSVGNIAIVENRFIGTKSRGIYRAPAGTILCYAHLDIEAFTMYREVHKIKQCRGLKFAELVARSLQNRPPYKEELGPPQFADRPSKGANCCDNLYL

SEQ ID NO: 922781 - protein, 196 aa, Homo sapiens
MQSVYYSTTEVNGKLQQPNSLANPGRTTNDPDPSGMKVCATPPGKKPQPAEVLAEDKRNTEWVVEAPSPTNHDPRNTHLTSPLNVGPTKQEAVPRAERYNFLFKGDQLETQVCVLEVRGRCLRRERLKGEERRMWVEKRLEGGTSVNWPVVQKVLKPGAKSTGNHEFPSRPCVFEADPWKSRNPWLGFWSGWETVY

SEQ ID NO: 922782 - protein, 138 aa, Homo sapiens
MLITLESIAISAKRIIGLLPKEVLLNKLKDLRQLEEKVSVRRTAKGHPYQSPGAELTSVENSTHRDRSPGKFPRILKRPRLMVCELPTKTPRSEKCYLAVLVSGMQLYPSSTKAALYRVLLIISGVVRFVPLHGMKNV

SEQ ID NO: 922783 - protein, 141 aa, Homo sapiens
MEWEGGLPLEMGRPVAGLSSDCPWLTNPQRLHCSTVAGQPAPAGVCRFPHYSIYCKQPGQRCLGCGVDSSWLGAILAIVSKGNKVGYTKHHPVIKWKRYIQYLASAGPQGTHKLHEQVTPIHMYTFSAISLPLSQSTSVVS

SEQ ID NO: 922784 - protein, 168 aa, Homo sapiens
MTKSEDPHPVTTATSGLQEALQATADVPLRLRVPHSVCGEYFLVWDSPFREMVSPLARSRFRNDIQEPSTESSAPKAHFVLHTPVAELFAGNKSCQDWFLPFKAANFFMAQGVSRNVQELAGWKGGLMTLTGALYCFGCAGIQDARQSPPHSSISSPQAEERGLKNEK

SEQ ID NO: 922785 - protein, 144 aa, Homo sapiens
MAASLSDEGTLTGFVDDSLLVSSNGREKREREQMLMSFNRGRLQAEEQGSQSKSQNLKSREADSAAFGLWLKARESLANHWYAQTGTSHKSGLPELLTTQLQVGVHMTPPLRTEALYPLNSSSPSHCPAHFHLPQPPGHLFLSL

SEQ ID NO: 922786 - protein, 157 aa, Homo sapiens
MCGVISEASSGPSAAGLLEFAGGPLQTLFAWVSSAEAAEQQRLLPAGRCLPVRRHGELAGRDGRLSLLKLLPQPPLPPGALSQGDGNFIYKPLPGAAVFFSEMPCPERRSLERQSGYSGFAELWRSPLSWNLPVLCLNCEGKTAYSSLNNGGRPSPD

SEQ ID NO: 922787 - protein, 206 aa, Homo sapiens
MRPELPIINWVLSGPSSHKVGYAQQHSIIKWKWYIHDQFRAGPEGTTTPVIAQWAHEQSGHGGRHGGYAWTQQHGLPLTKADLAMATAECPICQQQKPTLSPRYGTIPQGDQPATWWQVDYIGPLASRKGQRMVSENKIKENSDQNAQGMLLLSCEVDPSLLNLHFTFPVAASDPGSSVPLSTTVDSLPQCTLTLHMGQVVNLRWF

SEQ ID NO: 922788 - protein, 170 aa, Homo sapiens
MPHTPYALFTAEDPPPGHVSCCSLDRKPIPKTRSIAKEEGFNQVLQLSRREISLKSICLTDYNERANIHVLDTNIVSCQGILTASVLCLLLCAPVSEGIWPDLHRCITFPSTGKFSVKEKWQVNLDLDVQIYGSSMTISLSCKNECFTFTGKPHMEESYSYPKCSKQTSK

SEQ ID NO: 922789 - protein, 142 aa, Homo sapiens
MFGVSLSLVSLAAQDCLLQFSFIFLMLLFIAEEKKSRKQRPLNKSNFTEKPVLKKGLSDLQFGILHAFRRISSKSQESDILLNANSNVKALRKIENTIIGNIEGSSTVQFATVTGQSLHKAEGHYNVVNSTLNPVYIKMILH

SEQ ID NO: 922790 - protein, 142 aa, Homo sapiens
MGCHSTVKCKGFCRQAGGCKLTVEPQWGQDPSRCEPSTAYWAKQAERGQWASSAAWTEVVAAAEISGWQSNTGGVLTKPNEGFVRAFVMDSKPISNIKICSDKDINLAKNDIRGIIHISLGLSKGVCIMKQCLNKRSDLSIV

SEQ ID NO: 922791 - protein, 178 aa, Homo sapiens
MITEVKRQQRRFSGQIKPSKMNLTQSLEDRKTYKSTACSILIQKEQQGKRPEEGAYCGFQNTIEEEREFNPRLNYSTINGLCYVLQVCLCGNCSCKIEGRVGTEYSLPVENSVQETGKRKVPVSMHTFSLQIDQMTVTLERMEQYRIKNNGNNTGRTVNMTSPVEISDQSTINGYKIN

SEQ ID NO: 922792 - protein, 164 aa, Homo sapiens
MLVVAEIRVTLSYWWWIHTGLQQLQFCLFRRNDYTEGHIAEKETKASSKAGDKVYFKRLLNRKERKICLQETQVDKNGHLTLILGLYRLAPFPGFFFSERRSNKRLHECCSLWKWSLGSIKQRRMKNNASVPESFETMWITCLSTFYLSNRRREHTFTFFSTVE

SEQ ID NO: 922793 - protein, 138 aa, Homo sapiens
MNPQGRNEQLQARHVQCCVKKPVEVNPSSLSQKNGTYGPASGSGSNNSKHHVNLNSRVPIDSDFCSNYSSKSFGQFEAARPALPNGTIDLWLLQSFSNGDSNRYNTTDTPEASLAYGSLALGSVPCYFSWRDERWCLL

SEQ ID NO: 922794 - protein, 147 aa, Homo sapiens [sequence omitted]

SEQ ID NO: 922795 - protein, 185 aa, Homo sapiens
MGATIQDEIWVGGTAKPYHLWRFINYTCWVPMPRSLLGSQHLCLHRTGITVQGTEEAEAQLKALLEFTWKIEAIGRDLPPAPQEMLLTQSSKCAQDSTNPPHLRCCYLVQASISHLGCCSCLLTGLHKAANILCYINLSAQNHPSNGFHLGQRNSAHEVLCDPSPTTAFLPLFPMLSSFQACSFL

SEQ ID NO: 922796 - protein, 289 aa, Homo sapiens
MRSTVLSIIDVLPHLDLLPPASPPPPVLLPCEDEAPAPMGASLIADLEQLHLPPSPPPPQAPAERPSVQPGPDPLWPVEKELPPPPAEPVEREASTDIRAFCHKTVSPQELAVEAMKRQYHVQFFTCRTCRRQLAGQSFYQKDMRPLCEPCCQDTLQKCSKCGEVVRDHIIRAPGQAFHPACFTCVTCARCSGDESFAPGSQKEVYCLDDFYRKFAPVCSICENPIIPRDGKDAFKIECTGRNFHENCYRYEDCRILLSIEPTDQGCYPLNNHLFCKACHLKQSAAGCC

SEQ ID NO: 922797 - protein, 145 aa, Homo sapiens
MPLTIDGVSQRYLAVFFSFLLLKKTVIGLIRVRLAQRAKKHLLRKPHQEENLSTARGALLGSLSGEVQDSKWELQTQRMGKGSSMDRRWDGRDRNCRVRRRNCSPKANKLALWNPRKAQELRDITEGRVKRGREDREMEGRKLLK

SEQ ID NO: 922798 - protein, 141 aa, Homo sapiens
MLHKYLNSQDSEPSSAWLAAGLVFYKFPALSHCQGSSRSFRKFVPAIALHCCQQVEGDIQSCPLRPDSTSPGLPGSLQGAIPAMPPAPAGICSHKCCCLFELSCCCWSCQELSSPLAEAVSVHKLPWFQPLPVCTGILGLS

SEQ ID NO: 922799 - protein, 145 aa, Homo sapiens
MASHSNAPEHTTREYWAQSQDYPSVKPTPFHINSKLVLGTEEAVFHAEDKNIWWTYHPNYLGRELRGYMGVIICQCRLHPGCAHLWTLNLCTSVPPTPTRLCLPLANWDLQLQLQDNGASHLAASVQAQCARNLGPKEEELRALS

SEQ ID NO: 922800 - protein, 138 aa, Homo sapiens
MNEGDGSSSPHGVVTVKMPAAEGEVQLGLCAPWSYSSFLLVAPPRKLRNEWEKACSITLGTRISTYGFAGDADIQSITGTLGACSSNSSNKEDCCCSYPVQRPLPFTAVPLVSMLLLTAHLLPLTTLMLVMGLWSCLS

SEQ ID NO: 922801 - protein, 151 aa, Homo sapiens
MNHAHEQRRYMPYVCPSFLPSHLHTEFSVPHEHKILVDPQYNTWEKILTIVEETAPIEIKDAKDRITELGCVNAAGTYTCKLTVIDGEIVEMVLNQGDSDSRDDEDVVNAAEKMPIDDMVKMCDGLIEKLEQHTFITEQEIMSVYKVKRNP

SEQ ID NO: 922802 - protein, 147 aa, Homo sapiens
MSLCLRRLQWINSKCPENTTISPPYLWVPHLWIQPLTDWEKWEITKPRFLEEPEREGEEVYSSPDTEKDTTSFLGIQQEAVKGNFDQDILVGFLKKMNNRVESVTNSCTWSCTPKCGLAKRLSKLEGCRPECPGSLPNQQFAFGPVI

SEQ ID NO: 922803 - protein, 163 aa, Homo sapiens
MAWPGLRGLTALALSCFTVGMTLDKITLNKATLDSGDQIADQAMSLNSPSDCGYNLLLSLEVLYPNYRIHNSSLLSWIPFHLSPNKSQFRCLTDRLSLINNCLSLLLSYLLEKGTIPRLQDLEMLNRQPSIDPGASKEPCFTRKAEDDHNGCQLCSPETTSWG

SEQ ID NO: 922804 - protein, 173 aa, Homo sapiens
MAVNIDETSLAHPLFTSCCVDQYWSMALGLETPALELQNYPLHRMPVLLWDGGGVVLLIQDWFSYVFSTSFSDMKLRPGTIDDPNSNLEEAINEAEAITSVNSLGSKQALNTDYLDSDYQRGQLYPFSLSSDVQVATFTLTNSAPMTQSFQERWEAFTEGVTKLNLTFSSYVQ

SEQ ID NO: 922805 - protein, 600 aa, Homo sapiens
MTFYPTMEEFADFNTYVAYMESQGAHRAGLAKVIPPKEWKARQMYDDIEDILIATPLQQVTSGQGGVFTQYHKKKKAMRVGQYRHLANSKKYQTPPHQNFADLEQRYWKSHPGNPPIYGADISGSLFEESTKQWNLGHLGTILDLLEQECGVVIEGVNTPYLYFGMWKTTFAWHTEDMDLYSINYLHFGEPKTWYVVPPEHGQRLECLARELFPGNSRGCEGFLRHKVALISPTVLKKNGIPFNRMTQEAGEFMVTFPYGYHAGFNHGFNCAEAINFATPRWIDYGKVASQCSCGEARVTFSMDAFVRILQPESYELWKHRQDLTVVDYMEPRVAESQEPSNWREDIALRRAALGLRHLRNHITSCPTRTVAPRLCYNPKGGGTDAVPGSAIQALETSAWVLPPSTGRWGPCRGCGRGRGRGRGRGRRPRELGTEETTVQSAAKRRLSVGTGSRAPGRKPQLQFADEALTDKPAPLSGGLPHFAKASGCCCAPDLQPLGPPLDPDEPMHPGPCLLSLDSTASSLPLVVPMTPPSVTVPLITLSRDTGGDWKSPVNLAKVVAMDHSYASRVIVTKISENVEVALELGNQQTLEECGGPRRL

SEQ ID NO: 922806 - protein, 628 aa, Homo sapiens
MTFYPTMEEFADFNTYVAYMESQGAHQAGLAKVIPPKEWKARQMYDDIEDILIATPLQQVTSGQGGVFTQYHKKKKAMRVGQYRRLANSKKYQTPPHQNFADLEQRYWKSHPGNPPIYGADISGSLFEESTKQWNLGHLGTILDLLEQECGVVIEGVNTPYLYFGMWKTTFAWHTEDMDLYSINYLHFGEPKTWYVVPPEHGQHLERLARELFPDISRGCEAFLRHKVALISPTVLKENGIPFNCMTQEAGEFMVTFPYGYHAGFNHGFNCAEAINFATPRWIDYGKMASQCSCGESTVTFSMDPFVRIVQPESYELWKHRQDLAIVEHTEPRVAESQELSNWRDDIVLRRAALGLRLLPNLTAQCPTQPVSSGHCYNPKGCGTDAVPGSAFQSSAYHTQTQSLTLGMSARVLLPSTGSWGSGRGRGRGQGQGRGCSRGRGHGCCTRELGTEEPTVQPASKRRLLMGTRMVAFSILPRLLAAAVSLIFNSWGPHWIVMKPCTLACACYPSTALLGHWWGLELIKFTRDTCLVNMGKAVAMDHFYGSRVLTPTKFSRISWAPDSSAGSKDTEFRDIFLQYMINPLDPRLWNMVTNVSVSLIPTPGSEKILYLQWGLVGDDWIMGVVCHE

SEQ ID NO: 922807 - protein, 143 aa, Homo sapiens
MGDDSSMHGTAPEDLPMGHDVEVEDSDIDLTPLSEEDMTLDDPDPTSRKDLLPSHEESVRRQHVAVAVSSTSSDWHQSLIQSNALTFFNSVEAERGEEAEGEKFEASRCWFMKFKERSHLPNMKVQGKAASADVEAAEVIRDI

SEQ ID NO: 922808 - protein, 156 aa, Homo sapiens
MYGQSFLKDLAYKLNNTVTYLLFPILFQKDGLRFKTFEQICSKTNKHHIETREHRDNCSMPSLLHLTLAVAAAAPTHTRTWRLGLCLLESLTGFPGSYSLLAAGMRMLLSCALSEWAQVLLIATQAYTCPRFWDWVGYVCVALSWPPTDRGYGFLP

SEQ ID NO: 922809 - protein, 176 aa, Homo sapiens
MGYILTHCSLLSALTNTQYSNRNDGEKNKPEEQSSFQPSCSTFLTASLESRLGFSKVPLHREAPGGRVGLKHLHTCAWWTTHSPPQRPHQEVTELLPPGKKFLYCEPHKRIKEVLEEERHIKRDECHIKNPAAVALEGIWSIKRNLPVGGLKPGLPSRNSLLPQAKYYSRHGGLRR

SEQ ID NO: 922810 - protein, 145 aa, Homo sapiens
MSLSLFFQPCVAFGGKDQLKFLSKSNEGKKEWYQFLLVPLVEFGCESIWSWTLVGKLLIIATISDPVIGLFRDSTSSWFSLGRVRYYVPGNVPYTGDTAVNKTGEVLPSWSLLSKSELPTPAWNTKIIFISGSSNRQSNRTLGSN

SEQ ID NO: 922811 - protein, 177 aa, Homo sapiens
MKLPEEGSGSNICCSEIFAVLQPPLLISRQTGSRVDLQQTPTDLQLRALTVRRKTNKQRANPHQNPICTSPSSKTKATEQSWMENDFDELREEGFRRSDFSKLKEDVRTHRKEAKNLEKRLDEWLTRITSVEKSLNDLIELKTMARELHNECTSFSSRFDQLEERVSVIEDQMNEMK

SEQ ID NO: 922812 - protein, 155 aa, Homo sapiens
MPLEREERNEYIKGTAWRNSQNCFPSKFTQNINKSGQINISPRVRRSFLNKDTECCSDEFIPHSENLSFLLHPSSKEISPCLEGFLLFWPLLPGWSSRTFSPYPDLPALAQLLSLTSFPCTHLLACSRHPGLLPFHEHTNLIPASGSFHVLWNMN

SEQ ID NO: 922813 - protein, 547 aa, Homo sapiens
MAFSTTKIQKVGAEGRHCYSLGLWPSWLEEVQAGWVLTGAAGGAQTALPEEVGIYDYHHLTDKKLRVIEEKEIAQAAYLTSDGDGTSGRNKNDDMVPPGKNYTYVWPVREEYAPTPADANCLTWVYHSHIDAPKDICSGLIGPLLVCKEGTRNDVDREFVIMFTLVDENQSWYLNENIKHFCTNPDSVDKKDAVFQRSNKMHARITNISGPSRLCRGVSSTSVFLFPALNGYLFGNFPEPDMCVGESVSWHLFGMGNEIDIHSIYFYGNTFISRGHRTDVVNLFPATFLTTEMIAENPGKWMITCQVSDHLQAGMLGQYNVDNCKSDIFYPKMKGQQRRYFIAAEKILWDYAPQGYNKFSGLPLNASGSDSDLYFTQGDNRIGGKYWKVRYTEFVDATFTKRKRLSAEEAHLGILGPVIKAEVGDTLLVTFANKADKVYSILPHGVIYDKASDAAPNLDGFVKPGAHVKPGETFTYKWTVPESVSPTAGDPPCLTYLYFSAVDPIKDTSSGLVGPLLVCKKGVLNADGTQLCLHDIKHINEKRKTVI

SEQ ID NO: 922814 - protein, 150 aa, Homo sapiens
MIIWGALSRLYERESIIKELRGFASVLASLKSPGSVHSIDEERKFHMCSDNGSRCVGILSLALATAVIIANLLLYFPSGQVLEPAKITDLMKCVPKDLSSHKAIISSGGHLTYAPRAWPAALPLYPVVTYEKTIYLCEIPVPSTECSANG

SEQ ID NO: 922815 - protein, 159 aa, Homo sapiens
MRSFWIRDGPKSNMTGIVIRRGKEIHTGTKEGPVKTKAEIKVLLPQPRNAKDFWHRSSLAQSGSQSLTQTLDARCLVQKQPAQPNRVTLLKPQMSNSPANRGCFCSFPLALTPGMKPDTDYPEDELSTLQWAQHTAASETIFSALTTLAGSSLWWGNWA

SEQ ID NO: 922816 - protein, 128 aa, Homo sapiens
MIQPSRLSFGMEDREFPITEEWDQMAWRCPPKTRLSASAWHMLEPSWTNVGFLYWRNQERLCRFLLTRLAGYLPVGNISDRCACTERRLEAEDLPLSNCCGLLSRVEDSSRDLMVMPGPDAQLAHSAR

SEQ ID NO: 922817 - protein, 140 aa, Homo sapiens
MAYFWTQLYSIDLSLMYNASAFDSEGFSTLAAYIRFFSCTGALMYNEIALHSKAFSTFTAYMGSLSSMSLLMYNKKMMISKASNLLLLPSLLHLSYLAFGSQDLRAAPESLQTLLAVTKHGIHVRNRFLFRCTPARPTGR

SEQ ID NO: 922818 - protein, 247 aa, Homo sapiens
MAHVYLYPTKILPFSYSRSFLHHTLSFLEVFLTAGMERNSSDAKNNTKEKIPMGLPPVGCTHCPTSPNEMNQVPQLEMQKSPIFYVNLTGSCRPELFLFDDLGSDSSGLPELRAFAASILALAPWIHFLSQTVFSHSFDSAGLHCPHDLVLSLITPTSGVFALTIFCILTNQSACTPHSESIKDPALRSLNCVTCTPYLGYMCEKAYLQASGRLGACWLRVDVETVSQRVIARPRCWKSQHFMIPPP

SEQ ID NO: 922819 - protein, 151 aa, Homo sapiens
MQTGRHLPAGADRPKLEKSMKMVRNQHKKAENSKIQNVSSCAKDHNSSLAKEQNWMENELDELAEVGFRRCITTNFSKLKDQVLTQCKEAKNVEKILDELLTRITSLEKNISDLMELKTQHENFVKHTQVSIAESIEQKKGYQGLKINSMK

SEQ ID NO: 922820 - protein, 149 aa, Homo sapiens
MCIFEYKKRVTTCEKGEYEEADIPFVNQRTRRPIYPGQSGPDGEWQEINSEKWYLVVEISKEQNIQELTLVLLKAFSFMYSQIHGLELELTLKREGEHKSLENLQPDDAREKPFSEEKFKPASEICQCENGLEQYLFSTGKFIVDMTKI

SEQ ID NO: 922821 - protein, 179 aa, Homo sapiens
MSVRLPQPCGTISEDVWKCLVVEAKVCCRYLLNGCDQNADSDMDNEVQVEVVTEGNEKLTENWSKNHSCYALARELVSKDVWKFLNVQTEVCCRGRAFMEILNHSSAERKCGVGAPDRVPTGGLPNVTVRSGPLSFRPQNGAQFLQQHDQDVRLGVKGDYFKALSCDDYAAGFQTCMRP

SEQ ID NO: 922822 - protein, 880 aa, Homo sapiens
MDSKYCLVGNHCYPVDTKYCLVGNHCYLVDNKCCLLGNHCYLVNNKYFLVDNHCYLVDDKYFLMGNHHYPPDTKYCLVGNRCYPVDNKYCLVGNHSYLVENKVTTVTQWIISIASQPVDTKYCLVGNHCYPVDNKCCLLGNHCYLVDNMYFLVGNHCYLVDDKYCLMGEHHYRLDTKFCLVGNHCYPVDNKYCLVGNHSYPVDNKSCLVDNKYCLVGNHCYPMDNKYCLMDNHGYPVENKCCLVGKHCYLVDNKCCLVGNHSYPVDTKYCLVGNHCYPMDKYCLVGNHCYPVENKCCLVGNHCCQVDNKCCLVGNHSYLVDTKYCLVGNHCYPVDNKCCLMGSYCYPVDNKYCLVGNHCYLVDDKYCLMGSHHYPPDTEFCFVGNHSYPVGNHCYLVDNKYCFVGNHCYPMDNEYCLLGNHCYHVDNKCCLVGRHAYPMDNKCGLVGNDYYPVDNKYFLMGNHCYPVDNKYCLMDNHCYPVDNKYCLAGNHSYLMDNKHCLVDYHGNPMDNNYCLAGNHCYLVDSKYCLVGNHSYPMDNKYCLMSNHCYPVDNKCCLVGHHCYLMDKCCLMGNHCYLLDNKCFLGGNHCYPVSNKCCLMGNHCYPMDNKYCLTGNQSYPVDNKYCLVGNHGYPVDNTCCLMGNNCCPVYNVLPRGVTTVTWWIILVASRVTTVTRWIISIASQGNHCYPLDNKYCLTGNRCYSVDNKYCLMGNHCYPMDNKYCILGNHCYPVDNKRCLVCKHCDLVNNKCCLVGNHCYLVDNMYRLMGNHCYPLDNKYSLVEKHCDPVDNKYCLVGNHSYPVDNKYCLMVDNKNDLWGNHCYPVDKKYCLVGNHCYPVDNKCCFMGNHCYLVDNECCLVGNQCYPLDNRFYVVGNHCYPL

SEQ ID NO: 922823 - protein, 135 aa, Homo sapiens
MALYVSLKSRITFPNLPIYTLVSVHLHFGQCHSEGNAFSGPEAAKVKGLSFPERAGQIDFLLDLTAGTLAGSSGPRRATSSTSEQREVGELDLITPGYKAEASEEDSVHVCYLPKDGFFMISESEDGKGGREGGP

SEQ ID NO: 922824 - protein, 144 aa, Homo sapiens
MVICLCFCYSFCYFITFCLMWFCRLSPCLLNWPGCPRSPGNTTCKVLAHHQGLAQHVRSIRQIPGDGTRSNGKKCQGFRGPGTVPGLRYMMESWTGGAPLTGSRQASGKDKETILMNCAVVSYGSTWKRQLNWSMGSWRAPRRQ

SEQ ID NO: 922825 - protein, 149 aa, Homo sapiens
MIYLSDLKSTPLSHFLQRSEAAQCDWEADSPAEGPPSLLSPGKGDSLKGTKTYQTRILNIGPHSLLARRVSGERSAVSLMGFPLWTGPSAAGLLEFARGPLQTLFAWVPAAVAAEQRILVNCKCCCLIVPLKVLSQRSTRQCEVSVCPY

SEQ ID NO: 922826 - protein, 150 aa, Homo sapiens
MVRGAKWSLRLDMGLGPLQTLLEEGHTPVAQRSSRTSSLGRRPPEKILFIFPARRTTSISPVRGMGFFLKIWMRILAFPISYLFWRHWPTGPRKLPCAASRVPLTLFFPLPGMPGFGKDASAGSGSGPLSVKLCLTFFRVSSLSPLLVFP

SEQ ID NO: 922827 - protein, 141 aa, Homo sapiens
MYRQGNEASQESVGPSLKRGLGKERGEDVKNKLNIRNRDLWASECSQLRSFKEKASAENLHEDSPMSGFDSTPVEKGKSGFWWTTSILYCWCFKSQVETQQAVGRGSRAERGGEERQPLLAAFNQGDLFDASDDGPQSMDG

SEQ ID NO: 922828 - protein, 189 aa, Homo sapiens
MLKPLVSVFHARGNENGPLDYLCPQVVAHVSIERHVNCSYRPFACPEVSSESQRLESKTLELYLMFYCISAELALKLQDASLPTLSIFFQRQRSLILWPWPTKAHRKYCQTTTDVPLHGLFSQLVVDVAWPGTHCSGQWAPLWPRASPEILTKSQTLELGTLRGHLVLYPPVAELVPKVKDKCKDNDMK

SEQ ID NO: 922829 - protein, 146 aa, Homo sapiens
MGIEDSGNRNPENRVEIPGDEVLAGKAEMSFAGSQPHRKAEYSRLDGELEDNSLITNAAFESGKLLSFRVRKDAATKRCDSSRQQPSPNTKLAGALILNFPASKTVRNKFLFFMHHPASEPESTMSFCSGSVHIPLGKLQWALPLG

SEQ ID NO: 922830 - protein, 136 aa, Homo sapiens
MGKKQSRKTGNSRKQSTSPPPKECSSSPAMEQSWMENDFDKEKRIKRNEQSLQEIWDYVKRPNLRLIGVPESDGENGTKLENTLQDIIQENFPNLARQANIQIQEIQRTPQRYSSRRETPRHIIVRFTKVEMKEKC

SEQ ID NO: 922831 - protein, 151 aa, Homo sapiens
MVQPLWRAVWQFLIKVNILLPYNPEIVLLGIYPKEVKAYVYAKACTQMFIAALFIIAKTWKKLRCPSAGEWINCGTSRQWNIIQCYKGRHKRLQFTIANDNLILSVRGSCQVPKTMEAHPLHHRALDTHRQKELALSEMRLWTWTFVLMLE

SEQ ID NO: 922832 - protein, 189 aa, Homo sapiens
MLPNSTEFILRQPALLLPAMVSVVLCAPTPDSALENSHSVEITAKFSWKFPSPCGLFPNQLAAHPKDPCEIKSEMGSLGAGSAFRALPAASSTFIFASLSKFTSALGKVKTFSDDLDFQSSCGAATLKAFAVEIPESQTSDYYCSSGTSQPVGLPHSRLVLGNVCKGSGVVIHLQVSQQWVPARVSLHF

SEQ ID NO: 922833 - protein, 147 aa, Homo sapiens
MLCCPELEEKQCGQGKGYMELGMFKMAAPSSFLFASHVYSKEQAIWHRPGDPFPEVWETLQRSPWRKQYSVKLVRNNLAQEMGLFGKCLTESEEQPCGQEMKSEGVEAVFCTESVPGWEQDDQMRQFIIWVVPADPSSAGSAKYVKP

SEQ ID NO: 922834 - protein, 171 aa, Homo sapiens
MRKMSPGHVRGLHGSPSHQRPGGLGGKSGFVGQAQGPCVVCSLGTWCPMSQPLKPGLKEAKIELGLWLQMVQASSLSSFHLVLGLAVQKGNVGLQPPDRVPTEAPPSGAQISLLRPDDFKKRSSPEQVLSLSLPAAIHVRCDLFIFAFCHDCEASPATWNLVLVLGPNLKE

SEQ ID NO: 922835 - protein, 158 aa, Homo sapiens
MEFCCGACRVAQCWRLELPNRAQCEGNIFYWPFAEQGKYPLIMQVEAQMIDFTSFFSNTCIQRYNSPSEHCFRCTSQILIQRKMVEKDFPAIIPLQKFQLEQLSKHKNAFTREKKQTKKWEMTEPGCSKIIRKDVLKKANGTLTHYLHHPRLTPGNTA

SEQ ID NO: 922836 - protein, 149 aa, Homo sapiens
MENAGTKTKQPEWERYFQWYLESKRGEDLLISLQKANNQFRKDNQELSNFFSLLKKPWESLTSPLAPLPPPPTPQLYPDLSEFPQPDLYPPSPACSNLPSSPPCLPLAQTKTVESLTSKTLPPADSLVAPVAASHWKMWRRGTLQGHFS

SEQ ID NO: 922837 - protein, 158 aa, Homo sapiens
MESLQGHPPLSYRATQEVISPSEESTGGIRTSLGPSQVLTCPLPLCFLLPPPGITLFPTGSTSLPSSPPVSLPQPETFRPEEHPGICWGSEGFGDRRELRVEKGSEVGTENFSSGRGWPALNLTGTIVLLPWTCLSVYSGGPGPVILATPSLIVASVS

SEQ ID NO: 922838 - protein, 135 aa, Homo sapiens
MKSCPAVLYSLVKSRFFSSPCFTEAQHTSIESEGSTFMKEAPESSFTSFTLEEQERVPSMNKKMGPHQTSNLQAPSSWTSQAPELVPPSMNGTLESGHCALITSTAGIDATFAPMTTDGGGDFGQISALNIICLD

SEQ ID NO: 922839 - protein, 149 aa, Homo sapiens
MCFVKHMLEGSMLIKNHHHSLISSTQGHKHCGRLQGPLPRKARDLCSLSDFELFIWGYSISFYIIGKCSKTFHIVLFWHHHKLLAFTNRPPDSSFPRTTVPISLYLPKIGSLIGTATDLLKSDKLPRYEPSPGSASLISSTCFPNLLVL

SEQ ID NO: 922840 - protein, 139 aa, Homo sapiens
MVLGVVCTESCDVNTHRSLSHGYQHLFQWRWQRVQWTLEEQFANLTAPRTRQVQSDSRSAMWSYNIAGQKGKRHRNFKTRTQNSQNCDSKRTVVLLLTELLAAGVKELFPVFPAPSTEETALSPVYVLGTFVKNEFTNH

SEQ ID NO: 922841 - protein, 187 aa, Homo sapiens
MNNITGKCKAPAMNNVTGEVYAPCYIGSNIILSPLDTKNNTTVGCTPRAILGVISSSPLLDIRNNITEGMYTLCINGSNILAPLDIRDNITVGMYLNCDVKSNIILLPLDVRNNITGRVYTPCDIGSNISLSPPWILETIPQEWCTLPAKLGEISSSPPLDITENITGEAYTCCDIGSNIILSPPGY

SEQ ID NO: 922842 - protein, 161 aa, Homo sapiens
MSLKEAREQQRLVPAPSGTSDLKGQQPDASRITPNCQEKRPSPLVQRDCCDTSPNSNSVPEPLAGVIGDPAGKPRPMRKAGSGLGLKRHSGHRNCHSQCASVAWVREWDLPIRGLHSSVEKAQFPWLGSTLTRHLPWLGGGGSPSPCGSQVGRAPHCSFSP

SEQ ID NO: 922843 - protein, 176 aa, Homo sapiens
MYLEGRKMYGSKAQKRELGGRKGFGDVSVYTTTYQKNTECAKMNKIQSLPPRSMQSHGEKNRQTVTAEGMVAVPRKNVIRSGIGEREGARGEFLNATLQSSLASSAARWVWLPQEDHCCCCCCCQWCTLPPPLAKRPLSRLLASSFSLKCFLFPPPVWKDPPNSTSSFHNELLGSG

SEQ ID NO: 922844 - protein, 330 aa, Homo sapiens
MVLLDCRDCTVEMPILKNLATMAFCDAQSSQEIHQTVLNEAVGATMYHTITLTREDLEKFKALRVIVWIDSGNDNVDIKAAASSELLCATSQHGANPRGGLGSGPHPWVDAVGLMSFGRTRQAVAFQAKAFGFSVIFYDPYLQDGIERSLGIQWVYTLQDLLYQSYCVSSHCSLNEHNHHLINDFTIKQMRQGAFLLNAAPGGLVGEKALAQALKEGRITRDSFAQGPLKDAPNLICIPHTTWYSEQVSLEMREAAATEFRRAIKGRIPESLRNCVNKEFFVTSAPWSVDQQTIHPELNSATYRYPPGTVGVAPGDFLQPWKGSSLEASQ

SEQ ID NO: 922845 - protein, 156 aa, Homo sapiens
MRDKNSRCPIHGQVCASQLLLQQLLNECDSRHTPTHGTWADKLILNHVFSDNHFRPEKGLFSKCFCSQSQEGGKEVWLTSSGVLCPLLRVYITTKAVNDGTKMERRRHCDCLMGRVCVRKKASGGEKHTQGVHLILPPEQSGLWFSFTREMSLTLV

SEQ ID NO: 922846 - protein, 142 aa, Homo sapiens
MPASPSPLIPTVTKDAVYSWRNYIETTLLHTHTIKVKCPNQPTAYIQLEEKVFPYNIEFINWKKQLLQQVHRYQCKDKKTRKIKFVISRTQNSSEIDPNQKEIYKILEKIIQNIDFKDQSKPPYVNSNLKYNELNFPLKRYK

SEQ ID NO: 922847 - protein, 140 aa, Homo sapiens [sequence omitted]

SEQ ID NO: 922848 - protein, 288 aa, Homo sapiens
MGRPIYREGQPTVGLFRAVLTLQIKLLFIVFTLHLSAYLILPAHKTRTWAKVPPATEVSSQRRDTPNIPRELRQDSRLQQPSSLGEQFLSLLRAHNFKGVRFTPNQNQNQNQSIKKSKPGRNQNESIKQSKSSQKQKPKCRYRHTVGVQATLPLKWNGQVPKTSLSKFQMSGLQVPVPSRCSATVLILCGGLHALLWQGIPPGQLPTQERSQDLRCSSWLESPAGMFHRASLSHLRGCLNRPLITSLPGQGTKKCSRTSRRQNPSDTKLKKEGLYSARSFSKTHVSNN

SEQ ID NO: 922849 - protein, 382 aa, Homo sapiens
MHLFLWLVTENIQAFSTMNLASKLLNLRVILGNSKLIVEKWGIATKIPENVEAASEVGNEQNLEQFGRLRRRQEDEGKGCMEMPGFPGRSLLQGWSLHGEPLLGKGGGEMWGWSLHKEFPLGLPSGAVRKGPLFSRPQNGRSTDSLPHAPGKAAGTHFPSNSQARLLQVCRSLLEVCSQPCLPGYLWQRLQNSKDCCLFFPLEALSQRGTCQMPARALLYEMSVSPYWEVSSSQDTRGSVTHLKKQAVPSQILNAVLGDPLLSSELPGSPWLGLLPFFQRRPTQRGGNLERQFGCSSLAELQGAPPSSNFLELCLHYEDVGSSRVDLADLLHTLYPHRFPQRLVQPPVLPVQMEVELTICSTAMDRMLHTAILSLLAALMFS

SEQ ID NO: 922850 - protein, 271 aa, Homo sapiens
MDQVEGKAQEIIWHEKDVKMIEQHNQEYSQGKHSFTMAMNAFGDMTNEEFRQVMNGFQYQKHRKGKQFQERLLLEIPTSVDWREKGYMTPVKDQGQCGSCWAFSATGALEGQMFWKTGKLISLNEQNLVDCSGPQGNEGCNGDFMDNPFRYNPKYSAANDTGFVDIPSREKDLAKAVATVGPISVAVGASHVFFQFYKKGIYFEPRCDPEGLDHAMLVVGYSYEGADSDNNKYWLVKNSWGKNWGMDGYIKMAKDRRNNCGIATAASYPTV

SEQ ID NO: 922851 - protein, 157 aa, Homo sapiens
MFYLLFLSAFAALNTEKEKKPESQRLTEKAPALVPVMAPGPGLQRSLELAVTGRRSWICIPGLARCLSLEVLTPSQCTRTPFCCQSWLVVLSGMAAFPIPLQAWVDLLAGKRTKELQVVQIRSTSCPGGIDIHQIASLIGGSECGPIYPVAVLRFND

SEQ ID NO: 922852 - protein, 142 aa, Homo sapiens
MSGNYLQHLNIGLYLWVQLVSQCCRPLDECEYPYAPHISQPLGRKVANELQHLKTDVLPLAFSSVVMVALKVRAPRFTAIRFKQIESLSCPGGQVGRRKPPGPSDRLVLALPGSTQGLEGEAQNCARSFLYGLLCLDPAGLA

SEQ ID NO: 922853 - protein, 140 aa, Homo sapiens
MTCGWGTAEETLGPENTLNCHRNHRNTGPSDKGYGFDIYLAVPTPYVRPTEVESQGSRLDVYLSHNPAGTSVQNMLHWAQASSSSTKKDVQDIGLPTDEETDRSSYEHGLPEFQQQQTAASLNINHDENNFKLKIRTKLE

SEQ ID NO: 922854 - protein, 236 aa, Homo sapiens
MTRPLDRKQSEIIQHQGYPCEEYEVATEDGYILSVNRIPRGLVQPKKTGKSKITLSSFLLALHSQSTVTHTFSPLRDKMRQMEFMKTVKMLDEFGVEGFCPTGRLHVCLVPVYSNNNKSYPSDLRILMVCYRAEQVYMLPTLLLEHLCKIFYTGARDMTVPTAMWTGGQDWLSNPEDVKMLLSEVTNLIYHKNIPEWAHVDFIWGLDAPHRMYNEIIHLMQQEETNLSQGRCEAVL

SEQ ID NO: 922855 - protein, 150 aa, Homo sapiens
MVQTPPTRPHLQHRELQLSMRFDPGQTSKPYHSLCKKQTTDRLKDTIFALESSWFNGGNSCRDNCHIMYRSSCQHQEWGTMRFILQMQTLRPKEVRQTAQDLMIASSLCECLLADTTWAPANENEHCPSCHIGACISLFSCCYEDISKTR

SEQ ID NO: 922856 - protein, 133 aa, Homo sapiens
MQLTAQFYFFFPLGSLGDRQFAIGHIMTKKSKELSQALQYLAQTIAAGNCRLSELEDSLQITRGSSFTDEENQAQRENVTPQGHTALTLGELFTLSGYHFPYLEIESVETCGSSFEWVLGRHKKGGPFSKCVI

SEQ ID NO: 922857 - protein, 176 aa, Homo sapiens
MNVDQPNPSVRKSAALCTNSQLHGSASDQASARVPEGNPLNAALESSPPVSPGIGHHSPSRQSSREACCSQGFGVFPEEKGGGNEMAFPHLLCSPLSKCKSNSSNTHLHNSLRGGEWSGEESRQEDSKLLLLGDRGERDSQRKREKGDNEKEKGKKEPCSASAGKRCLGSPLATTG

SEQ ID NO: 922858 - protein, 142 aa, Homo sapiens
MGVGTQIRVRGHGRGHSDPCARPWARALRSVCEAMVRALRSVCDAMGMGTQIRVHSRTNPPPPTSQINGKMPPDNCRVTHFLRWAKDRLDLFLSYHCFLCLNTYEEILRTYGIPILLLKHTCRNQKLHTDGSPCIEHSRQTR

SEQ ID NO: 922859 - protein, 128 aa, Homo sapiens
MQSTSCTTILWSPLFMVIAVIHNSIFESYTLDIQSGGSGRVTAAPGLQCRLAAPGLQCRLAQIFGTCQRHELLLTHDDYIQAGTLSVLDIEDDELGVCVNECMPSDCINSPNLLCGASVVSDQCLLDE

SEQ ID NO: 922860 - protein, 199 aa, Homo sapiens
MHCAVDSCCGVLGLPSILGFTPEPASYDCVGQLEKDDPRPLKFLCPDPKHRPECSWGPGASTHYSLGPTVCTLRPGGLPLLCTCLSQAGGHQRLCPHLRIRSHLASLPGCGAFRRALPTVTICLTLEAQATVELCWWTGSGVQFPQLHLCIPQSNVPAFTGSCFFPPSQHRGTVPMQCSRGSGDLRLLTTSWLTVTFNS

SEQ ID NO: 922861 - protein, 149 aa, Homo sapiens
MLLRGKGVGHLVCRHRKEEGNRRDAAASLGVVPWQEVEGARGLYLLWKIEIKTVTQEQGGCGLAGALWREGEAQDVAGGLWREGEAQDVAGGLWREGEAQDVAGGLWGEGEAQDVAGGLWWEGEAQDVAGGLWRERGARGMAGGLPPVR

SEQ ID NO: 922862 - protein, 144 aa, Homo sapiens [sequence omitted]

SEQ ID NO: 922863 - protein, 269 aa, Homo sapiens
MPKGKKAKGKKVVPAPAGMKKQEAKKVVNPLFEKRPENFGIGQDIQPKRELTHFVKWPRYIRLQRQRATLYKRLKVPPVINQFTQALDCQTATQLLKLAHKYRPDPKQEKKQRLLAWAEKKTAGKGDIPTKRPHVLRAGIDTVTTLVENKKAQLVVIAHNVDPIGLVIFLPALCRKMGVPYCIIKGKARLGRLVHRKTCTTVALTQVHLEDKGGLAKLVEAIRTNYNDRYDEIRRQPSVVTELMGQWLREEAVLQTQGPSGEHTTDMSH

SEQ ID NO: 922864 - protein, 139 aa, Homo sapiens
MLMVTTSQASAGVGTKQWVRMIIKMEIIDTGGSKSREDGRRTRVEHLPVGYNVHYWYIGDTGSPIPTELDLHSNAASQGHNLELVIIYTVFWSPHLKLPVPSALPPLLGNILSSTFSTSPRLQLRHAPLMHHLPSIRAR

SEQ ID NO: 922865 - protein, 147 aa, Homo sapiens
MQRISLYVCWGALGTSNESLKEGRFFKSGDLADTGSSFFLGTAFLVLSPAVRLGLLTGGCHTSWTFLPLSQLAPSKLTVAPDCSRTPASWPICYQHYTCLSVPPGNASVLDLFLHINLPWSSRPTFPTFSLPAPLSQLSRRQMQTVT

SEQ ID NO: 922866 - protein, 151 aa, Homo sapiens
MNRDFWAPSLSPPSTWLPNSLLLFSQCSSPHLLNLPLLDILTLPGAIIFQLPLRGTWVPSLETDLLMVIWSSGTLGKGGYHRWSDDTGGWMMFGIYLLYLPDHCSTAIPATHQNATFGPFRKLNCVIAICCQTFASAVPCTGTLSFRLCEI

SEQ ID NO: 922867 - protein, 143 aa, Homo sapiens
MSTTPCSRAPSPIDHPRAEECRGTALDWQAAPPAAPVWDPPGKASWAPESAVTLTVKVCSFTPEASETTSPPGRTNNSRRAILRAVTFTARVRGFILEVIFDNLIGIIGAASQGRYPRFKARGIFKDSGLGLSHLLESKNQNN

SEQ ID NO: 922868 - protein, 154 aa, Homo sapiens
MTVSEAFKVFPSLMGATAWSHPGVSKPNYAHRLSSSEKIFSFKKGVLKKAICFPSSKSKCSKVKCWRHLWEDIEGQGGPLKLHQPPPPHFYGKIVFHEIGPWCQKCWGQLPWTTPEGSTHLEDNGMVPYGVLQRDGLDLGPSCSNHDVLITCLS

SEQ ID NO: 922869 - protein, 141 aa, Homo sapiens
MRIIWNLLKPLVLRLYPKIIEFKSLGWIPCIGVILGFQVQLRLPVEIVRTHSCFRMVRAVNGPGDWILAYICCQRAVELRCCLKLVAWDARAAASPLCPPWWLHCQKQHIVSLLDACRLQGRDTSDSWPGNSPDVNCQNTP

SEQ ID NO: 922870 - protein, 137 aa, Homo sapiens
MWARDTDLLSIPHNIMLVQKGIVHIALWQTCLFQQQLHVNLLSEFRMHSCLCRPIGYSVPNSRYNRGLRFLTHSRLEILQRHQGCTFLKAELSVLLLCSPSFNGPIIYGYCEKVHILPGVIPARTGHIIGCARLVPT

SEQ ID NO: 922871 - protein, 182 aa, Homo sapiens
MVQITDQGQRQSDSGGVMWMRMSLRKLAEASHFEHLCVRPWAGAFSDRILLNLPILQMRKQKLKLLNWSKIPRDLNQGCLVWRPKHLQFHFTAWDWYSLRSHWDYAHMNHLCKIMVTAITDNSSLRWVSSQLADTRLCEFGSNRFHPGLILPPPAQSSLWTLEEGPSIHNELLVGRGNNGSY

SEQ ID NO: 922872 - protein, 135 aa, Homo sapiens
MVRIEKKDELSERKLVQAKNSGQQWDPKKWQVAGFPVPAFWFHSSYLRSWKTNISRQKRLYYQLPREEATVLCWHYSNPTSWGIRKPFQREHSPGSDDWAGPHDLTRPSLLIYFGAWVEATAAMAQGLQEQESHR

SEQ ID NO: 922873 - protein, 139 aa, Homo sapiens
MAEDEEEQRDVLHGGKQGNMCKGTPLYETIRSLRTAKEGLTEDVTFEYRQECEGVSHFDIWGKNIPDGGGTPDAGETGAKALMGSLIHVLKEQEETGVAEMEGAQQEMQSEKERGGGPGPTGPFKGFGFYFDKTLMERT

SEQ ID NO: 922874 - protein, 140 aa, Homo sapiens [sequence omitted]

SEQ ID NO: 922875 - protein, 135 aa, Homo sapiens
MRPQTHQKEENSNTSEHQKEQTPDTPPLRTVTLTMRVCGFILEVTREESFDDVLGSLLALASAKRGPQPPCNCSSSENSRAIGPEPSKSSRKDTKHDTISGFARLPSTTPELLSPWLSVNSILFLAAHDCCLDCP

SEQ ID NO: 922876 - protein, 134 aa, Homo sapiens
MQPSVFLTFLGPRKIIPVVRKWACCAGEALHCIANGDGSSLDIPVLTKSKNIFHVWEGLVWGQRQIQVQCEMDMDEAGNHHSQQTNTRTENQTPHVLTHKWELDNENPWTQGGEHHTLGPVGGNLHILHLYPRT

SEQ ID NO: 922877 - protein, 201 aa, Homo sapiens
MAIYELGSLPSPDAKSAGALILDFPVSRPDFRPNTCSALDSKRPPQPTLPTGLSSLATTASLAQRGAWVLSEAPAPVLGLYVTRWGCGRPRRSHPRSTRCMYIHCCGAICEAQLVPAPPSAALYVPSFKGISLLCCSTSFQGYHRMSLELCSLNSLDSSPKSWQPSLPHEKVAGATFGNDSVWEGGHCRTGFCAGGPVEAW

SEQ ID NO: 922878 - protein, 155 aa, Homo sapiens
MTVQRQGQTLIKLGKNRGFPHFLISLRGRAVSSRLVICGFYYVEVCSQVGVEPGHGAAVDSSVGSKAGGPLTRVFFAKIYGLPVKMESSAGEKKAPLLPGFLETHITFHFGESEGGEGDLEDPEIFREEARMDDTFLQRVKRYLKAWSNGNEIEY

SEQ ID NO: 922879 - protein, 140 aa, Homo sapiens
MTLALHRHAPFYKLCKQYASAKIVKQRGIRAVSPFAIITGDRVGGGHVDNNRVIRPMGCGLLSVVSSPTKWSFLACTLLSPFLSAACPWMLISRVATVQQGNLPANTALGTAAGHVPAHQDLSVIRANDVSIPVHEITWR

SEQ ID NO: 922880 - protein, 136 aa, Homo sapiens
MLLEDGRESWSSSVLASENRDSGGWERQARVISALGPLPNVSCLPPYAGVSEAAASVAADAGYAQQGRRLRHEETWPSRRALWKLAGMLLETHRQPRGQGPEDSESQSGCRPGINEDKGMEALLTAVLRERFFAIQ

SEQ ID NO: 922881 - protein, 193 aa, Homo sapiens
MWTEKCPPYLLGSLEQVNMSPSVHPVVINCSGPGMLPSASHGHLCTPLLPLETSFSLASVTFTWMAEGKHKTDLLLCDVQSCWAQQVLSKLFLTFSQLATILKESSFFSPGKIPNSVSPKERLKTNLHLHRGRRTPCNPCPPPQEAPPPLSGVWSYPLASIKTTKLPKNTAEQRWYFPIHLAVLLVRSDWQFD

SEQ ID NO: 922882 - protein, 148 aa, Homo sapiens
MGEIRKAEISPELSSRRPPYTECWSCPHLSYDHSFLPSRAGAKHWLLLSKGMTMMIFASQKDPSERRLENEWVDVCIKIKGFGRRLVRGKGVEKQKFTRSKDNNAELTCWLTREVHQLLSESDLILSEEQIENIKRRDCGNGMILKGM

SEQ ID NO: 922883 - protein, 137 aa, Homo sapiens
MKRGKSGEGPEEGSQPIVFPEVSFKEACGAYLREGIVIEKWVKAYLELIVIPVPRIKGDISVEERAASIIDVYSGKPQSAWSPCDMQFFVTIVGSTTLTRKRGYWLSILSLRGTGLLSMLSVFGLWITHSRKPAGTL

SEQ ID NO: 922884 - protein, 134 aa, Homo sapiens
MFAQGPGTLPSANGKANEAYVLPFRVAMSPRPQSLFQRYEVKTSSREYEGNYYYIYFLETKNFDRSPKAENILCYSAYEEQAQGWWQLPAVCQLLGASPSLSHLNPTLFFVNCPFIKLSSSILFECAMYFLLRP

SEQ ID NO: 922885 - protein, 185 aa, Homo sapiens
MNPNLSSSKLTGFLPLSSCFNEDRVGFSVPSKIHHGVEGLLRGVGQALTFPTVDSWEQTLPDGLSQPDPVSADALLTLPPSTSCLSQLESGSIAQHRGSSWGSSLAGAQSYSLHALEDLHHTPGYPTPPPYPFTPFMTVSNDLPPKVGPLSPDEEADTGSLHDPSPWVKEDGSIAWGSYECRRAY

SEQ ID NO: 922886 - protein, 152 aa, Homo sapiens
MEKFLEDVTSKLSGRRSGNQQDKGRFGGRRVACRGNGTLKDPSMKKKEDVNCHVVSCSMEKSAWQGIKGCQQLAASKKLRPLIQQPMKSKFCLQLWHFQDLPPVGPSDKTAAPADILLQPSEKPLGGSMKLSPVQIPNPETMRQYLSYLVWK

SEQ ID NO: 922887 - protein, 162 aa, Homo sapiens
MQPTPGRLDHLSGKGTIWASGLPYVQMCLEFLPSSGFVVSLTSRIKPQTFTVSVTALKGGADPKRHPNCCWELGNDHSSYFLLDRGEEGEEINAEKVCQCPGGSQFPGLQCLNVWGLSEGDDMSWHLSWAPSVLLLGHLVGGFWPREPLSSGAVCLPVIASA

SEQ ID NO: 922888 - protein, 152 aa, Homo sapiens [sequence omitted]

SEQ ID NO: 922889 - protein, 164 aa, Homo sapiens [sequence omitted]

SEQ ID NO: 922890 - protein, 144 aa, Homo sapiens
MRLLDTAGPEFNIIFIFDRLAQPPSLNYSSSHNPTMLWAGPWYPRPKTFQSLETSHNLLWPDVKEWSPDLTVPVSKVIHSLNSYTQKCSGFAPLGPLPFQGGIPEEGTVIIGGDSSIHITAPEDLPVGQDVEVKDSDTDDPDPV

SEQ ID NO: 922891 - protein, 125 aa, Homo sapiens
MPNCSATQWRFELNHTQFGQFRHDDSQVPQSGGRAPPDPEPTEDAAFLGRSLRHLSGDPWSLALPWSITHQVLLQDLALGFSTYLLPGWLYKPDDGYLNTLEKVNSQRLSQGKSYQLGSSYIMLG

SEQ ID NO: 922892 - protein, 138 aa, Homo sapiens
MGSQHRCIDSESLRSHHTRLSAPILKQRLPNPPHLQGWRGWCVQTVFLGALHGWSQDSFNLDMVGGMAGMPMHLVAGHWPTKQFTGLREWLQASIPWGMMRNHQPWGHLCDEYLLVEQDGGWELGGTLEECCDNYNKR

SEQ ID NO: 922893 - protein, 148 aa, Homo sapiens
MEYQREEDWHAWEYRQAHGMLHHPLLLRPSYSLALFISGKEDVKARISIPGSGGHHIEQRKDQSSLLGQLTRDICKYQRTHPQICREAGTWEEQFPQQLAKLGSSKWMQRPALLPSPSSESAFSGLLLQRAIFFHMALIFLVLCFMTP

SEQ ID NO: 922894 - protein, 175 aa, Homo sapiens
MGGYHEDAGYLELLGQRQEGFKGLAHSGDFLSIHADLPNPHDPGLHLVQFQIKSLPLGQDGGNTGADPAKEGEKIEQMYNWVLYRDIQFPGAGRRQWPSPISTARGFPLLLIHLSTDPLRVSGRVTVRSFSSHEAIFQTITWGETLDNTPLSRAGVPAAFHSALCPWFIETREWR

SEQ ID NO: 922895 - protein, 188 aa, Homo sapiens
MKLSEEGSGSNICCSAASAGDTQANRVWSGPPANSNRPAAEGPDCHQHQRPKVDKTTKMGRNQSRKTENSKNQSTSSTPKDCTSLPATEQSWMENDELTEIGFRRSVIRNFSELKEDVLTHCKEAKNLEKRLDEWLTRINSVEKILNDLTELKTMVQELRDARTSFNSRFDQVEERVSVIEDQINEIK

SEQ ID NO: 922896 - protein, 135 aa, Homo sapiens
MGPSDKKRAAPAFLPTFSPQEVPRELQALKGNEDPGSGSSSSLAPGHSLMKSSEEASAVIVATSSLPGPVLGLIQAPAPRGKLQMFLLFLDAGMLPMNEPVTWKSQFSLQSLLLTRSFPFIVLPDFSSYYGTGMK

SEQ ID NO: 922897 - protein, 153 aa, Homo sapiens
MTYIHHYSIIQNSLTALKTLCAACLLSSLATTDLFAVSRVVAFSDRLLCLAYPQFVLTYLEELNAQVDVTQTEYHIHHGAWTTAHQEHGRNLAEEVLQESASNLGLKQLPEPSDNHLMPEGSLEETGELTVALVRKLEEKHPKASAQSYCKRG

SEQ ID NO: 922898 - protein, 150 aa, Homo sapiens
MAHVCIRYKPARCPHHVTTLKVFDILLLLGFFIQPSPFSNQRILFYHLYHDMPKCITSIPSPTPLDCSRLCGIPCMMFLFLLFILSHYFTFSLKLKPFNCSHPKEDWFLAAGSSALWGPTSCFASYSSFPSCHWCSLTGSHLGERSVFYC

SEQ ID NO: 922899 - protein, 124 aa, Homo sapiens
MRNINFSEQSRGKRSDLTLENGILTGCCKAKDKKKETWMELEAVILSKVMQQQKTKHCIFSLEAEIHYEEQIGKIIVETQELKWQKTDPKVVQIVGVKSGLNYMKDKSETDLSVEGKNMEGKNR

SEQ ID NO: 922900 - protein, 222 aa, Homo sapiens
MSNGTLHHYFVPDGDYEENDDPEKCQLLFRVSDHRRCSQGEGSQVGSLLSLTLREEFTVLGRQVEDAGRVLEGISKSISYDLDGEESYGKYLRRESHQIGDAYSNSDKSLTELESKFKQGQEQDSRQESRLNEDFLGMLVHTRSLLKETLDISVGLRDKYELLALTIRSHGTRLGIYLEAVDERHQATLASATTKARLLEAIRSYKKPAGVLCTAVPRSCVQ

SEQ ID NO: 922901 - protein, 180 aa, Homo sapiens
MSHAAFTTVVNACMEGGLGTAKEYVPHRAAATANENGSCCYRRMAAATLADTTQQNVVTSSLGAPRLFQCSGFPTLRSQRTKSGSSTSPPELEHADKRKKKPSKCQQLQRLKEDKPTKMRKNKCKNSDNSETQSAFFPSNDRTTSPTRVLNQAEMAEITEIEFRLSIEIKIIEMQEYFET

SEQ ID NO: 922902 - protein, 139 aa, Homo sapiens
MVECCVGVLGAGRILLYSVPGFSMGPGGGFSRGPPLWIVECLTNGQKHVSPGGSPQSSSQGPSPPSGATGHAESLWQAAGAAKAFGYFAHFINKCAPMPTTWRLPPRNKSRNMLWGDFWLDFGDKGNRQGSMGRRESGS

SEQ ID NO: 922903 - protein, 390 aa, Homo sapiens
MITSSSSGRMNSFSAAQPCALGSSTLCTGQLNPMYWEALPHALGSSTPCTGKLYPMHWAALSHALGSSTPYTGRLYPMHQPALPHALGSSTPCTGKLYPMHWAALSHALGSSTPYTRRLYPMHQPALPHAPGSSTTCTGKLYPMHWEALLHAPGNSTPSTGKLYSMHREALPHALGSSTPCTGKLYPKHWETLPQALGSSTPCTGKLYHTYWEALPHALGSSTPCTGKLYTMHQETLPQAPGSSTPCTGKLYLMHRKALLHALGNSTPSTGKLYPMHREALPPCTRKLYSMHWEALPQALGSSTPSTGKLSSMHREALPHALGSSTPCTGQLNPMHRAALPHALGSSIPCTGQQLDSHWYCCHQAIYSWHCLPHPSLPDPTSPLQWALLE

SEQ ID NO: 922904 - protein, 154 aa, Homo sapiens
MSHKVMPGCKEGWEVYKNELSTCVGLILQADSPLCEQLSQTGESRDTRTGHEGRSTQKNTEDRENDLAPDKDGFSLSSRISVNEDSVLEDSRCLTSWRTKQKSRHFELSYPCLNISAQVTGQWLESKLPRLLFTVNSPAFSKQRKAGPSTDVYI

SEQ ID NO: 922905 - protein, 144 aa, Homo sapiens
MVLSVPVIALGATLGTATSILALCGVTCLCRHMHPKKGLLPRDQDPDLEKAKPSLLGSAQQRAESGRNLKDSSPPPSSSELQPVRGGWYGLPQDVSADVPGDRRAFIPCICSWPEPLRAGNSPCSHCKEQQKGSGEAVWKDFPA

SEQ ID NO: 922906 - protein, 150 aa, Homo sapiens
MATPPLSPHPIYDPITLKTQSPLLNVSKGEDESEKNNGKPERNWETWRLRGSKQRQKIWSWREKDPDHSSHHMLLPQSNPPMANTQSKAPAVMQSSMVHLLSAYSVSGTVLSTSCALSFHCSSNDCHAHVQRLSLAACLYPHSLPFITWP

SEQ ID NO: 922907 - protein, 145 aa, Homo sapiens
MFTFSHYKIMYQSFPSNSQAPLLQVCWSVLEVYSRPCLPGYHQQKLQNSKHCCLFFPLKASCQRGTHQMPTSALLYEVSVDPCWESQQAITFKSAETAPTAALSPRDALPREEESREAVWLQQLCRALVGSTQFKLLRGFVYLES

SEQ ID NO: 922908 - protein, 454 aa, Homo sapiens
MKKPATTDVFWSSLSAETGSLSTESIISGLQQQTNYDLNGHTISTTSWETHLAPTAPPNGLTSAADAIKSQDFKDTAGHSVTAEGFSIQDLVLGTSIEQPVQQSDMTMVGSHIDLWPTSNNNHSRDFQTAEVAYYSPTTRHSVSHPQLQLPNQPAHPLLLTSPGPTSTGSLQEMLSDGTDTGSEISSDINSSPERNASTPFQNILGYHSAAESSISTSVFPRTSSRVLRASQHPKKWTGAATNAADTVSSKVQPTAAAAVTLFLRKSSPPALSAALVAKGTSSSPLAVASGPAKSSSMTTLAKNVTNKAASGPKRTPGAVHTAFPFTPTYMYARTGHTTSTHTAMQGNMDTASGLLSTTYLPRKPQAMHTGLPNPTNLEMPRASTPRPLTVTAALTSITASVKATRLPPLRAENTDAVLPAASAAVVTTGKMASNLECQMSSKLLVKTGMRPLF

SEQ ID NO: 922909 - protein, 161 aa, Homo sapiens
MLLFYPTVLFLTQRRVQISESLKFSIAKGLTQALRKAFHQNDVSAHIVSTSNASQAVTLVYVVGNQSTFLNGTVASSLLSQLSAELVGFYLTYPPLTIAEPSALPSASTVLQGVDNSLVGLHNQSFARVMEQRLAQLFMMSQQQGRRFKRATTLGSYTVQA

SEQ ID NO: 922910 - protein, 137 aa, Homo sapiens
MSGLLSSSQCCLSCPSCWLFPTAVVKNPPNNLWIIAAVLAPIAVVTVIIIIITAVLCRKNKNDFKPDTMINLPQRAKVYGSVSGPDGLWLSDAHSAISASKCFIYSSSLILTAALGGSTIILQMRKPRHRKLQAKET

SEQ ID NO: 922911 - protein, 144 aa, Homo sapiens
MCLCCASVPASDEEEGAVLFDNSSKVAAEPFDTSSGSVQLIAIKPTALPMVPPTSDRSQESSAVLNGEVNKALKQKSDIEHYRNKLRLKAKRKGYYDFPAVETSKGLTERKKMYEKAPKEMEHVLDPDSELCAPFTESKNRCSL

SEQ ID NO: 922912 - protein, 191 aa, Homo sapiens
MVTALLLLAVTVSQIFLIFDDLDSFWEVSIDISSRSLVLSTMSSLLMKYGNFTFTSRNSSKLSFYCFYQLLTPAASASDCQIIRVAGGGGKLGTKEEKKERERERERKKEKERKKERESQKESDKERKKKERGRERKKRKKEKEERKKEGKKEEGRKEREGRKGGRERRREGEFTISFIPFYKQVNRVLES

SEQ ID NO: 922913 - protein, 138 aa, Homo sapiens
MIKKGTDLATGHIYSQPYKIPSSVHRNYKSSKYCPIYPFLSPALQLEQEGPLPVVWLGTESGETWILALAHHWFMAHEPISSSKNEESPFLSYPICLHSGFRANFRWAICSLSSVPLPKLSPAPQSPPSLPCVYLFKN

SEQ ID NO: 922914 - protein, 169 aa, Homo sapiens
MSGFHCLLPAPGQQPAELGPTLSQHWVTPSPKVCGHTEPAHGAGVEPRGQGHLKEFNNPSPAHRLLPGKPDAMLQDFLWRGPLGKELMSLASSQRGPKICQQPYEKLMALGPFWSLRRDCTSLAARAPQGTRPQTLKLNAVSLGSREMRVQGTVHYCLYFGIYFLEDLN

SEQ ID NO: 922915 - protein, 150 aa, Homo sapiens [sequence omitted]

SEQ ID NO: 922916 - protein, 135 aa, Homo sapiens
MEACSSCHTLTSRATSLPLPHLGPVAMGRQGHTQVGQGSPRRPENNIFNDADIGEVFDPDGSDARCLPRLGYEGSYAFHLVLLGCQLLEPPCFEEAQAACREAHLRKNHSPLLAAQANSQRQPASHCPNCGFKSK

SEQ ID NO: 922917 - protein, 122 aa, Homo sapiens
MPVVGLPPADRPCRKAFSGRCRTALYALWGFGIGGTEVHSVEWGGRRGRRRVAVRSVQPSAPSGPLTSSHGICSFIHSATILCPLYVLGTALGTGDDEEKTLPTFMELICWWGPQQLQGEHR

SEQ ID NO: 922918 - protein, 169 aa, Homo sapiens
MELNSRAAEITVEREKVAGQTWCSSPFTTGLHPTLALTFSINSEKACALTSCSGTLNLISHSTTLSLYLSHVGNHRPSLDIHQSKPLSTAMLLWAAGVDDVILTGYKVPAAFQLRPACLCPVFSLDGPSWVVLSRPVQVFIIIHQPRSPSDDFRLTYSLERLPEPEPSS

SEQ ID NO: 922919 - protein, 171 aa, Homo sapiens
MVIRKEERLHIARRNLVQIEAEPPLVSWMALLMGQNAPPPRLGSGSQDWVSPMDSLLSRPAAWMAGDSEIPTDQCTWWQPLPMSGSTAARSSLLCCSKAIDWRLISPGTDWDWEPQTERMFNSRFLNCAGKGVLGNGRAMKGAKWWGGVGQGESYREKKQFTSGGLERLTW

SEQ ID NO: 922920 - protein, 146 aa, Homo sapiens
MPSNLLCSFFSVVSSSIERLLFDDAYQNAITSMSASPQPQDHSDSHPKMIPHQGTSDNMETFWWSQLGQCCCLHRVGRGHNVPYNVQHSPHTTNNYLASNVHGAEVEPLALEKCRVCPHTYGNSSSGSGAPQEKFLQDKSPELVRN

SEQ ID NO: 922921 - protein, 306 aa, Homo sapiens
MPLCWNCNLVLLPCTGLDLFPRSPVAQTCEGTKARGRKALPPDPTPPLTDPSLTGSIEQEKKKKMKTQKTPKTQTGRRCGEENVLGASVASLLLVVSGIFRGLSRARTVACTRGSPIGHWALRAVLGVVYLPAQAKDLAALVGALRVAHLQGHERVVTLVGSQLGVIDVPPGPGSRRAHLAGTLVCTHLEADGRAVHGGQYVVLGVIEMPPRAVRGHAGLAGAFVGAHLQPDDALAGIHGGVLKVPLLLLRVRVTDVRPSLRPLSLGLPCQGEKRHLHLHRVPTLRQVVGLKQVHGVHAIWTCQPS

SEQ ID NO: 922922 - protein, 167 aa, Homo sapiens; identical to SEQ ID NO: 759607

SEQ ID NO: 922923 - protein, 136 aa, Homo sapiens
MVGDIPTAFPGLMAKENEVQFEVSCNIILLSGQKKELVCWQGQGSSSGPSSTMDLLWDFRQSTSSLLASVPSMKYCSVYCLLCAHKNSLLQVGRTCGMAECRSQQILFSQNNYEARQNCQRQSFKDWKFDQSHTTD

SEQ ID NO: 922924 - protein, 164 aa, Homo sapiens
MDFQRPAGHRATEAGSLGDDNTAVKGKPRPRPGDLIEIFRIGYEHWAIYVEDDCVVHLAPPSEEFEVGSITSIFSNRAVVKYSRLEDVLHGCSWKVNNKLDGTYLPLPVDKIIQRTKKMVNKIVQYSLIEGNCEHFVNGLRYGVPRSQQCPGLGGPWCEKPPVP

SEQ ID NO: 922925 - protein, 251 aa, Homo sapiens
MAFEELLSQVGGLGRFQMLHLVFILPSLMLLIPHILLENFAAAIPGHRCWVHMLDNNTGSGNETGILSEDALLRISIPLDSNLRPEKCRRFVHPQWQLLHLNGTIHSTSEADTEPCVDGWVYDQSYFPSTIVTKLSFGLRTCADYEILLWWLVESARWLIITNKLDEGLKALRKVARTNGIKNAEETLNIEVLYGAVALIVRCLALLTLNHMGRRISQILFMFLVGLSILANTFVPKVIVHMLVLPSIEWA

SEQ ID NO: 922926 - protein, 162 aa, Homo sapiens
MNSLTQKYIQVISVWVKKLYKKQVTKKIRLWFQLYKYLWENSTQVWAVKAILRRESKWEPIYIPPLGCIISMIHYHLPGGMEEITATVQKLVEVNIIWPAEFFQSYVTEGLWASDEMFRLGQSGFAVGHSLEMAGTSTWGKGDWWLFLEVHCDIVYLKPYLK

SEQ ID NO: 922927 - protein, 137 aa, Homo sapiens
MENEFDELTEVAFRRWVIANSSELKEHVLIQCKEAKNLEKRVEELLTRITSLEKNTNDLMELKNTAQELQIGNYVKRQNLHLTGSPESDGENGIKLENTLQDIIQENFPKARQAHIQIQEIQRTPTDTPREEQPQDT

SEQ ID NO: 922928 - protein, 171 aa, Homo sapiens
MDLDLTLNFSIHLLMCPQFSLPLLPSPRSPTLPPHPLGLTVYQQQISHILNIFSGQFCHLLALKETWLSCDIITSPAALRLMPSGLGVASVHSAFCPPLSSEGPGPLKFVPSDLTTSPVCSPAHSSQELFHIVSSLSLLSLIPPAPGPIADHQGLYCLPSHGDSGPQLLPH

SEQ ID NO: 922929 - protein, 186 aa, Homo sapiens
MEDANKLALGQKLIVRVPQAVDTLMQQRGHSALLDKLTAAWGSGRGAMPDKLIDASYTSVTTPKMITDLLYQRRTISLAGCLTQLFVEHLLGGSEIILLIVMAYDRYVAICKPLHYTTIMQQGICHLLVVIAWIGGILHATVQILFMTDLPFCGPQYHTSEFQQQNLNLGLPNLSRTSNKTVVHER

SEQ ID NO: 922930 - protein, 138 aa, Homo sapiens
MGSNIIFSSSGSRNNITQVCTLSVILGVISTSPPLNIKNSITEWMYTPCDFGRTISQNGCTLPAILGVISFSSSANIRSNITGWMYTHCYIGSNVILHPLDIRINITGWVYTYGNIESNTMLSPSMDIGNNIIAVFSH

SEQ ID NO: 922931 - protein, 263 aa, Homo sapiens
MIILTKLDSHLHTPMYFSIRHLAFVDLGNSTVICPKVLANFVVDRNTISYYACAAQLAFFLMFIISEFFILSAMAYDRYVAICNPLLYYVIMSQRLCHVLVGIQYLYSTFQALMFTIKIFTLTFCGSNVISHFYCDDVPLLPMLCSNAQEIELLSILFSVFNLISSFLIVLVSYMLILLAICQMHSAEGRKKAFSTCGSHLTVVVVFYGSLLFMYMQPNSTHFFDTDKMASVFYTLVIPMLNPLIYSLRNEEVKNAFYKLFEN

SEQ ID NO: 922932 - protein, 138 aa, Homo sapiens
MDRGESSKRVGWSTLALGLFEPVQIVAGERSQDVDLKRGFLDLMHKGIQGKSQSVIRDVKVLNLKRYKFGDDLISVMTKSGSLLKNVKSLHSNCFLIHDSKGTFENMQSSFINKTIGDKVGERNHKVKGIFYYIKKGI

SEQ ID NO: 922933 - protein, 280 aa, Homo sapiens
MTRKNYTSLTEFILLGLADTLELQIILFLLFLVIYTLTVLGNIGMILLIRIDSRLHTPMYFFLVNLSFVDICYSTTITPKMLADLLSEKKTISFAGCFLQMYFFIALATTECILFGLMAYDRYVTICRPLLYSLIMSRTVCLKMAAGAFAAGLLNSMVNTSYVSSLSFCGSNVIHHFFCNSPPLFKLSCSDTHLKESIFSTFAGVNKVGALLVILSSYSYVLFSIFSMHSGEGRHRAFSTCASHLTAIILFYTTSIYTYLRPSSSYSLIRTKWFLCSTQW

SEQ ID NO: 922934 - protein, 171 aa, Homo sapiens
MYLVTVLGNLLIILAIGSDSHLDTPMYFFLSNLSLPDIGFTSATVPKMIEEMQSHSRVIYHGDCLTQMSFFVLFACKDDMILTVMAYDWLHMKSNDKCYYKRQRGRRSLRGKKVQRNREGHHVKVKAETGMIQPQTKDGQDSPKQKGARNESSLKPLKEVSSCQRCDFGGA

SEQ ID NO: 922935 - protein, 230 aa, Homo sapiens
MLVDLLAKNKSIPFYGCALQFLVFCIFADSECLLLSVMAFDRYKAIINPLLYTVNMSSRVCYLLLTGVYLVGIADALIHMTLAFRLCFCGSNEINHFFCDIPPLLLLSRSDTQVNELVLFTVFGFIELSTISGVFISYCYIILSVLEIHSAEGRFKALSTCTSHLSAVAIFQGTLLFMYFRPSSSYSLDQDKMTSLFYTLVVPMLNPLIYSLRNKDVKEALKKLKNKILF

SEQ ID NO: 922936 - protein, 175 aa, Homo sapiens
MGNYLLHQRDLDVRHGIKGDDFGTLRFHCPAGFWMFLGPAVDQRVQHGVDNCVKYRGHFDCLPRVFGVGYTVKEKDGPMEDGDRSQDSPVENSDGSQVGSTGRESFLVPNSRRHFYDSNKDENIGSEDDSQAAHLIEYCNDKTKHLADVGVRAGDRDDDRVLTDKIIDDVRPTEG

SEQ ID NO: 922937 - protein, 162 aa, Homo sapiens
MPLPVDTSLSSQHNCLAGTDMFICQLNTHQKLQPKWTGPYTVILSTPTAMVLEIVTSQTALALEMLVQQQNQMGTAIYQNRLALDYLLAEEGPVPRCKAICTSSMHQQDSRNRKRASQDTGKNNQDDADLLAHDGWVTQGLTDGHIAINSHENEDKDLHAAK

SEQ ID NO: 922938 - protein, 183 aa, Homo sapiens
MEDANKLALGQKLIVRVPQAVVTLMQQRGHSALLDKLTAAWGSGRGAMPDKLIDASYTSVTTPKMITDLLYQRRTISLAGCLTQLFVEHLLGGSEIILLIVMAYDRYVAICKPLHYTTIMQQGICHLLVVIAWIGGILHATVQILFMTDLPFCDHTSEFQQQNLNLGLPNLSRTSNKTVVHER

SEQ ID NO: 922939 - protein, 140 aa, Homo sapiens
MDTRCFHILAIGNNAAINIGVHISYQVPTFNSLGYIFPEVELLDHMSRVLRDGAILEDWERKHGALWVEVSQGAPLWEQKQKPEVCGTCSHHLTGLGLVPLQGSQINPVGSQITNQPALSLLAQLCPPGGSGFLQGKAGA

SEQ ID NO: 922940 - protein, 136 aa, Homo sapiens
MILQVTSRTGTDGPCVIAALFVLSTAAVLHLDQCQADIRSSSQRTQVNEYTRERKKELESRAMPEGLTSDLREEEEKEERYTEMLKWKENNLKLSNVKEYVSLKQEIKSSALSGELNRIRALCRIRERWKSLWEVR

SEQ ID NO: 922941 - protein, 150 aa, Homo sapiens
MALRVFLHSSLGVIPYLMWFQFRVDQKNNVHAIWDVRVMQQPFLSEVHHSQTCCQTDKEMSTLWVLGGSGPPLLCIQLVLQTVGPDDQQQLQAVHPQRQTPPEVTVLYGSTGSHLNHLGGEEDLEDLVASRSLNGLKFWKAPGVTYKCDP

SEQ ID NO: 922942 - protein, 151 aa, Homo sapiens
MGNSVYHSSEMGRSLGVLEKLRRGWCGCGLTAIEEFEFQNAGVYAGGFQTGPNITVEMTDNIIATEWQLDEQHRLTKDNGEAHHPGAQGQLQAEFAGHDGGVVKGIADGEVAVKRHDSEDQELGGAHEEVEEGLQQAAGHADYCSCHYKGS

SEQ ID NO: 922943 - protein, 134 aa, Homo sapiens
MGRHWKNLEIPEEDGKTRESLQLLRDLLSDYDQIAHRNMDSEGQADKVSDENHEVIENWSKGYPCYILARNLAALYLYPRSLCKVELKSGRRNLYAAKHSRCGLPAYDSLGSDIKQNNYLKFGLQSHHLPERLA

SEQ ID NO: 922944 - protein, 264 aa, Homo sapiens
MWNMLAPHKNQILESGHSTIGLLRFAGGPLQTPLSLASPASAGGSWGPPLEDLTQSGGTGSRTHPMKKSGCFLVEQTCCAGAEDPPSKEKWVGVPVKEVVWLKKQSVHHLVRQLYCAPGSFPFLCPWQAGMAESTEPQIWWSSLLPGTPCQGEIGVLSVEQRTHAVRRTMSGPRLKKQSGPDLARPLCCTVGAPIHLDCMRSPQPASWNGCFPLNHKDGGRPSLQEQGLVSSRLNPLPLAGQILTQWVLTHEVLWKWGLQNDAA

SEQ ID NO: 922945 - protein, 238 aa, Homo sapiens [sequence omitted]

SEQ ID NO: 922946 - protein, 373 aa, Homo sapiens
MESRLVARAKCSLPGQVGEKNPAAMSKLKQRNHQPQRFLSGKERDTAIYSINVSFVAKGMTSRSVCEKMTMTTENPNQTVVSHFFLEGLRYTAKHSSLFFLLFLLIYSITVAGNLLILLTVGSDSHLSLPMYHFLGHLSFLDACLSTVTVPKVMAGLLTLDGKVISFEGCAVQLYCFHFLASTECFLYTVMAYDRYLAICQPLHYPVAMNRRMCAEMAGITWAIGATHAAIHTSLTFRLLYCGPCHIAYFFCDIPPVLKLACTDTTINELVMLASIGIVAAGCLILIVISYIFIVAAVLRIRTAQGRQRAFSPCTAQLTGVLLYYVPPVCIYLQPRSSEAGAGAPAVFYTIVTPMLNPFIYTLRNKEEKWCTY

SEQ ID NO: 922947 - protein, 155 aa, Homo sapiens [sequence omitted]

SEQ ID NO: 922948 - protein, 311 aa, Homo sapiens
MSNASLVTAFILTGLPHAPGLDALLFGIFLVVYVLTVLGNLLILLVIRVDSHLHTPMYYFLTNLSFIDMWFSTVTVPKMLMTLVSPSGRAISFHSCVAQLYFFHFLGSTECFLYTVMSYDRYLAISYPLRYTSMMSGSRCALLATGTWLSGSLHSAVQTILTFHLPYCGPNQIQHYFCDAPPILKLACADTSANVMVIFVDIGIVASGCFVLIVLSYVSIVCSILRIRTSDGRRRAFQTCASHCIVVLCFFVPCVVIYLRPGSMDAMDGVVAIFYTVLTPLLNPVVYTLRNKEVKKAVLKLRDKVAHPQRK

SEQ ID NO: 922949 - protein, 311 aa, Homo sapiens
MSKTSLVTAFILTGLPHAPGLDAPLFGIFLVVYVLTVLGNLLILLVIRVDSHLHTPMYYFLTNLSFIDMWFSTVTVPKMLMTLVSPSGRAISFHSCVAQLYFFHFLGSTECFLYTVMSYDRYLAISYPLRYTSMMSGSRCALLATSTWLSGSLHSAVQTILTFHLPYCGPNQIQHYLCDAPPILKLACADTSANEMVIFVDIGLVASGCFLLIVLSYVSIVCSILRIHTSEGRHRAFQTCASHCIVVLCFFVPCVFIYLRPGSRDVVDGVVAIFYTVLTPLLNPVVYTLRNKEVKKAVLKLRDKVAHSQGE

SEQ ID NO: 922950 - protein, 177 aa, Homo sapiens
MLVPRSHRCWKEMEKLFNAIISSTRLHTPMYFFLGNLSIFDLGFSSTTVPKMLFYLSGNSHAISYAGCVSQLFFYHFLGCTECFLYTVMACDRFVAICFPLRYTVIMNHRVCFMLATGTWMIGCVHAMILTPLTFQLPYCGPNKVGYYFCDIPAVLPLACKDTSLAQRRRGSGQKGD

SEQ ID NO: 922951 - protein, 126 aa, Homo sapiens
MEWEDNLPLESRLGTVNLFSEVPPSSLPSKVKLLFSKVQLLLLFSPSLPLCCASLLEELGIFMGTGCGAEQDRVVLEKATFRRENWDVKFSFRAMSPGLRVEPSPETPPFQPSIPCLLSVSVLGEF

SEQ ID NO: 922952 - protein, 125 aa, Homo sapiens
MSPQQFYPLAVTIPGVGVIIVEAQVTARAEHTTRALNYTQVALLLLTDEADQIRKEFLFSNSTGPIALVCLYQLLNDLNIMFGMWKNTSGDIIYSFIMCHANNAPYQPHREVVTFILPFKEEGMQ

SEQ ID NO: 922953 - protein, 169 aa, Homo sapiens
MNLKRGTIQQVLSPTSYSPAELPAAYSLPVSRPFARHPYLLWDLAEEAVTHRALSESHEGPYLRKVTNERGQISKFQAKSKFQPGYGDFQISNFLFTQTSKGSDVMVETTFCSLKTKTAGLCMVTLAALFEKVQFVTACLGYLARKGKSPDPLCFPVPQLHCQWPGEKG

SEQ ID NO: 922954 - protein, 141 aa, Homo sapiens
MAMLGLQEKPAERSVRRAKVSYGSKSSIGRWPVLAELDCRHSCTKCSGLYISWLAAPTTSLSICPCQLECLWVIKGPLSVKVPEACSESQLLLHSSTHSFSWSQEQVLMCDSPMQGSQLSPHSAQLLCLPSVYSLPSSHVC

SEQ ID NO: 922955 - protein, 155 aa, Homo sapiens
MARGMMKAILCWQQECTSQQSRMGGKMFAIVLLGSNRLFDVQQQEKRGYAQRLLYTPVRGQCTGDPGNSPLATPGSRPAQSKVSPQSPRLQTCPSTRSETLASDTRLASADTGSRPTQCHTSPCGLKLRQTHGPDPCQWTPVVGEPPRPRPQNHP

SEQ ID NO: 922956 - protein, 126 aa, Homo sapiens
MVDPLTACTMHLEKPQTLNASPLKYPWWGSVPCKATGLEWPKAIGAHLLHQCNLDGSIQQDLSSLNMCVPNAGAPRFIKQVIRDLQSDLNNHTITVEDINTPLKVLGRPSRQKINKDILELNSTVN

SEQ ID NO: 922957 - protein, 146 aa, Homo sapiens
MTVFLKTPIILDWGLIFLTSLNLNYFPRGPVWKYSHIEDNQTLWASFRKDTIPVLLLAGSNLNLLKPQVHLPICRKYRAQRNIFKCTMSTQSAKSRDCEKLQIKHCVDKEQDVYLKDTLNQNFKVARIKDGILKDKSGLKHTHRGK

SEQ ID NO: 922958 - protein, 126 aa, Homo sapiens
MTEYIVTYAKIDTDHLSTSWYIPEIISMINSKSLLNTYYMPNTGKSMVNKGKVVLVLQKLLDAKTHPSSPAGLPGGQWESKESRQKAEKVSVAAAEPKALQKWSGGYASHGLKPVSKRQWRMLDRA

SEQ ID NO: 922959 - protein, 311 aa, Homo sapiens
MAAENHSFVTKFILVGLTEKSELQLPLFLVFLGIYVVTVLGNLGMITLIGLSSHLHTPMYCFLSSLSFIDFCHSTVITPKMLVNFVTEKNIISYPECMTQLYFFLVFAIAECHMLAAMAYDGYVAICSPLLYSIIISNKACFSLILVVYVIGLICASAHIGCMFRVQFCKFDVINHYFCDLISILKLSCSSTYINELLILIFSGINILVPSLTILSSYIFIIASILRIRYTEGRSKAFSTCSSHISAVSVFFGSAAFMYLQPSSVSSMDQGKVSSVFYTIVVPMLNPLIYSLRNKDVHVALKKTLGKRTFL

SEQ ID NO: 922960 - protein, 203 aa, Homo sapiens
MRKDNDLKYIEKAIKKLSKWQQYHIHAHDPKGGLDNARRLTGFHETSNIHDFSAGIANRSASINIPQTLGQEKKGYFEDHCPSANCNPFLVTEALIRTCLLNETCDEPFQLSSVERIDLEDNTPDEVDQYASNRLVASHKKNKDIEDEDTKSLEEKMDRYCNVGTSQRCGRSEEGEIGSGEEFREDISEGIFEPGLQGSAQYL

SEQ ID NO: 922961 - protein, 150 aa, Homo sapiens
MGQPGSANQSCGPHPGTYSTKEDSFNCCVGLSGLGGGRSAISAGGNHPIGCGPRRNKYRRRICLSLRAGTDFTGAVLDIRSPSSLAFGLKDLLQGTPGTITVLCPSYLQNLGRFSTTLDFTAWGPASVGLPQWEHTKRGIQHKARESEKL

SEQ ID NO: 922962 - protein, 162 aa, Homo sapiens
MHVIPALWEAEEPFNPPLRCGGPSLGLAEAEAGSLCWRGGVEWEARAGAGAACRTRQLARFLGGRGLSGPHFARRPAPDGLDQGDELPLGCWRAGARCRKVPLQVPLRGEAGWASGSAASLLKPARPGTHQKEETPDTSEHLKEQTPDTPSLRTVTLTARLG

SEQ ID NO: 922963 - protein, 139 aa, Homo sapiens
MVRGSRGIFRPRQSSCVKCGSSCAEALQLERSATLQKKSESESAGNKINPSSLCFLFVYFSWVDAQVWEEENGYSSEWVSCEFLASVFLDPTAFGSGGGQKSRFKVPANVVLSGGSEGSVSHASLLASGGCQQSLTVLS

SEQ ID NO: 922964 - protein, 161 aa, Homo sapiens
MPTALSYEQEQPHMLMKLIQLYSLYIPHSLQTTSGQILHILDRISQSSLPSPAPPSMPPLYAGVFTLRHLLEDRHYFSSLKPPVPRSDSEAPGKQLQDADWICGAMLITSHIPLFLSAPLSLSDWLCSRTFQQKGLEAMQITCVPLINNCMLYHGFYIIIV

SEQ ID NO: 922965 - protein, 150 aa, Homo sapiens
MARIIKPSSSRCQRLRRVSVFFDYSLVITYPPEHLQDQFIKQAFMDFGNSFMGTAGYGDPFGNEKRGVVGTALIVTGPARPWVRVACSPASDTDLQQDNRKCGAWVACCVILEWQGLEEYGSERQCRNIVAAKSELNAQNERFTQNVDST

SEQ ID NO: 922966 - protein, 183 aa, Homo sapiens
MPITIPLKPNHPYPAQRQYPIPQHALKGLKPVITRLLQHGLLKAINSPYNFPISPVLKPDKAYRLVQDLCLINQTVLPIHPVVPNPYTLLSSIPPSTTHYSVLDLKHAFFTIPLHPSSQPLFAFTWTDPDTHQAQQITWAVLPQSITDSPHYFNQAQISSSSVTYLGIILIKTHVLSLLTVSG

SEQ ID NO: 922967 - protein, 357 aa, Homo sapiens
MHQFNTVLEFTRWKHRSKLFGENRKYIGESLKDLIDQSQSSGSGSGLPLLVQRTIAKQIQMVRQVGKGRYGEVWMGKWRGEKVAVKVFFTTEEASWFRETEIYQTVLMRHENILGFIAADIKGTGSWTQLYLITDYHENGSLYDFLKCATLDTRALLKSAYSAACGLCHLHTEIYGTQGKPAIAHRDLKSKNILIKKNGSCCIADLGLAVKFNSDTNEVDVPLNTRVGTKRYMAPEVLDESLNKNHFQPYIMADIYSFGLIIWEMARRCITGGIVEEYQLPYYNMVPSDPSYEDMREVVCVKRLRPIVSNRWNSDECLRAVLKLMSECWAHNPASRLTALRIKKMLAKMVESQDVKI

SEQ ID NO: 922968 - protein, 637 aa, Homo sapiens
MGLKAAQKTLFPLRSIDDVVRLFAAELGREEPDLVLLSLVLGFVEHFLAVNRVIPTNVPELTFQPSPAPDPPGGLTYFPVADLSIIAALYARFTAQIRGAVDLSLYPREGGVSSRELVKKVSDVIWNSLSRSYFKDRAHIQSLFSFITGWSPVGTKLDSSGVAFAVVGACQALGLQDVHLALSEDHAWVVFGPNGEQTAEVTWHGKGNEDRRGQTVNAGVAERSWLYLKGSYMRCDRKMEVAFMVCAINPSIDLHTDSLELLQLQQKLLWLLYDLGHLERYPMALGNLADLEELEPTPGRPDPLTLYHKGIASAKTYYRDEHIYPYMYLAGYHCRNRNVREALQAWADTATVIQESLGLPPMVRPLQTLQRPHCSHSYNYCREDEEIYKEFFEVANDVIPNLLKEAASLLEAGEERPGEQSQGTQSQGSALQDPECFAHLLRFYDGICKWEEGSPTPVLHVGWATFLVQSLGRFEGQVRQKVRIVSREAEAAEAEEPWGEEAREGRRRGPRRESKPEEPPPPKKPALDKGLGTGQGAVSGPPRKPPGTVAGTARGPEGGSTAQVPAPAASPPPEGPVLTFQSEKMKGMKELLVATKINSSAIKLQLTAQSQVQMKKQKVSTPSDYTLSFLKRQRKGL

SEQ ID NO: 922969 - protein, 265 aa, Homo sapiens
MMVALLLMVVVVTEMVLVVTEMVVMVVTEMVVLVVTEMVVMVVTEMVMVVIEMMVVVVVIEMVVIEMMVVMVVIEMVVIEMMVVMVVIEMVVMIEMVVMIEMVVMVVVVIGMMVLVVIEMVVIEMMVVVVVIEMLVVVIEMMVVMVVIEMVMVVIEMMVVVVVIEMVVMIEMVVMVVIEMVVMIEMVVMVVVVIGMMVLVVIEMVMVMTEVMIIEMVMMMIKKVLIEMVVVVTEMVVVVVVVMIEMMMVVIEMVMLLVTERSLTE

SEQ ID NO: 922970 - protein, 123 aa, Homo sapiens
MHLPGCIRWPWNRSSGTEVLQQQLDVLFGKKQFKSQDSGRGGVRYKLTPGSEDLRTPKEHFTPLPPITDPILLGMASLGDFLLLPGTDTTQDSEDGYREMGTSRAVRGTLLWEVSAKGKSTFV

SEQ ID NO: 922971 - protein, 160 aa, Homo sapiens
MACMKEAPAALPNPVVVIICSTGLMTGGCYRTGLPSVHGEERIPKRQRPCSTLNPQRQDDAITKMCNEGGKACQAGVFGRNENNPLNDENGTVRNMPEQVLMRLGRNEIGRSEKNGLGKSDGNEQMGVSTLSYVNTTAGPLKLSTADEALKNQIEKEANH

SEQ ID NO: 922972 - protein, 159 aa, Homo sapiens
MLELVAQKQREREEREEREALERERQRRRQGQELSAARQRLQEDEMRRAAEERRREKAEELAASQEPPTKREYDQCRIQVRLPDGTSLTQTFRAREQLAAVRLYVELHRGEELGGGQDPVQLLSGFPRRAFSEADMERPLQELGLVPSAVLIVAKKCPS

SEQ ID NO: 922973 - protein, 133 aa, Homo sapiens
MDLGYWRRKAILEQTNWYNAQEYYDRIPELRQVIEQLSSGFFSPKQPDLFKDIVNMLMHHDRFKVFADYEDYIKCQEKVSALYKNPREWTRMVIRNIATSGKFSSDRTIAQYAREIWGVEPSRQRLPAPDEAI

SEQ ID NO: 922974 - protein, 150 aa, Homo sapiens
MKQPPSKAASAILTPPMRRCGVQIQRSGPKEAMFPQGSAGGGFAMMKLACGGSLLRLWPPFFDTNRQEKKGVPAPAERQQEQIHPLSAFLFYVGPQLIGPTLGEAPLDLDRRSSSHGRDAEQSPDQQVVLWRSGREHRGPVLLNVSGAAS

SEQ ID NO: 922975 - protein, 204 aa, Homo sapiens
MGSDDAPKALISTRYNDKTKLCIKAIRSSTVKRTGGFGNNNPAGKAVYWVNQVSDKRPICTVTVQGKDFEGLVDTGADVSIIAINQWPQHWPKQKASTGIVGVGAASEVFQSSLILPCQRTNGQEGTIQPIITPIPINLWGRDLLQQWDAEIPIPMDQYSNHSRQMMKNMGYHLGKGLGQYKNGQSEPLELKGQTDQTELGCHF

SEQ ID NO: 922976 - protein, 198 aa, Homo sapiens
MAYDRYVAIWSPLLYAVVVSPKVCRLLVSLTYLQSLITALTVSSCVFSVSYCSSNIINHFYCDDVPLLALSCSDTYIPETAVFIFSGTNLLFSMIVVLISYFNIVITILRIRSSEGRQKAFSTCASHMIAVVVFYGTLLFMYLQPRSNHSLDTDKMASVFYTLVIPVLNPLIYSLRNKNVKDALKRFLDNPCRSLKLM

SEQ ID NO: 922977 - protein, 386 aa, Homo sapiens
MYFFLSHLSFVDLCFSSNVTPKMLEIFLSEKKSISYPACLVQCYLFIALVHVEIYILAVMAFDRYMAICNPLLYGSRMSKSVCSFLITVPYVYGALTGLMETMWTYNLAFCGPNEINHFYCADPPLIKLACSDTYNKEFLSILDLCFSTNFTPKMLENFLSEKKTISYAGCLMQCYVVIAVVLAEHCMLAVMAYDRYMAICNPLLYSSKMSQGVCVHLVIVPYVYGFLLSVMETLRTYNLSFCGTNEINHFYCADPPLIKLACSDTYSKELSMYIVAGYSNVQSLLIILTSYMFILVAILRSHSAEGRKKAFSTCGSHLTVVTIFYGTLFCMHLRRPTDESVEQGKMVAVFYTTVILMLNSMIYGLRNKDVKEALKKAIGKQTLGK

SEQ ID NO: 922978 - protein, 313 aa, Homo sapiens
MLHLGKMLNFTDVTEFILLGLTSRREWQVLFFIIFLVVYIITMVGNIGMMVLIKVSPQLNNPMYFFLSHLSFVDVWFSSNVTPKMLENLFSDKKTITYAGCLVQCFFFIALVHVEIFILAAMAFDRYMAIGNPLLYGSKMSRVVCIRLITFPYIYGFLTSLAATLWTYGLYFCGKIEINHFYCADPPLIKMACAGTFVKEYTMIILAGINFTYSLTVIIISYLFILIAILRMRSAEGRQKAFSTCGSHLTAVIIFYGTLIFMYLRRPTEESVEQGKMVAVFYTTVIPMLNPMIYSLRNKDVKKAMMKVISRSC

SEQ ID NO: 922979 - protein, 277 aa, Homo sapiens
MITLLGNIGMIILISISPQLQSPMYFFLSHLSFADVCFSSNVTPKMLENLLSETKTISYVGCLVQCYFFIAVVHVEVYILAVMAFDRYMAGCNPLLYGSKMSRTVCVRLISVPYVYGFSVSLICTLWTYGLYFCGNFEINHFYCADPPLIQIACGRVHIKEITMIVIAGINFTYSLSVVLISYTLIVVAVLRMRSADGRRKAFSTCGSHLTAVSMFYGTPIFMYLRRPTEESVEQGKMVAVFYTTVIPMLNPMIYSLRNKDVKEAVNKAITKTYVRQ

SEQ ID NO: 922980 - protein, 300 aa, Homo sapiens
MVNADDFIASGGVSQWEGELRRGWGGIEKMLNFTDVTEFILLGLTSRREWQVLFFIVFLVVYIITVVGNIGMMLLIKIKKKTISYAGCLAQCFFFIALVHVEIFILAAIAFDRYTVIGNPLLYGSKMSRDVCIRLITFPYIYGFLTSLTATLWTYGLYFCGKIEINHFYCADPPLIKMACAGTFVKEYTMLILAGINFTYSLTVIIISYLFILIAILRMRSAEGRQKAFSTCGSHLTAVIIFYGTLIFMYLRRPTEESVEQGKMVAVFYTTVIPMLNPMIYSLRNKDVKKAMMKVISRSC

SEQ ID NO: 922981 - protein, 225 aa, Homo sapiens
MSTNIVSEKTISFAGCFTQCYIFIALLLTEFYMLAAMAYDRYVAIYDPLRYSVKTSRRVCICLATFPYVYGFSDGLFQAILTFRLTFCRSNVINHFYCADPPLIKLSCSDTYVKEHAMFISAGFNLSSSLTIVLVSYAFILAAILRIKSAEGRHKAFSTCGSHMMAVTLFYGTLFCMYIRPPTDKTVEESKIIAVFYTFVSPVLNPLIYSLRNKDVKQALKNVLR

SEQ ID NO: 922982 - protein, 297 aa, Homo sapiens
MLDDELVGLTDDPVLEKILFGVFLAIYLITLAGNLCMILLIRTNSQLQTPMYFFLGHLSFVDICYSSNVTPNMLHNFLSEQKTISYAGCFTQCLLFIALVITEFYFLASMALDRYVAICSPLHYSSRMSKNICISLVTVPYMYGFLNGLSQTLLTFHLSFCGSLEINHFYCADPPLIMLACSDTRVKKMAMFVVAGFTLSSSLFIILLSYLFIFAAIFRIRSAEGRHKAFSTCASHLTIVTLFYGTLFCMYVRPPSEKSVEESKIIAVFYTFLSPMLNPLIYSLRNRDKASGGMHPL

SEQ ID NO: 922983 - protein, 150 aa, Homo sapiens [sequence omitted]

SEQ ID NO: 922984 - protein, 310 aa, Homo sapiens
MDKENSSMVTEFIFMGITQDPQMEIIFFVVFLIVYLVNVVGNIGMIILITTDTQLHTPMYFFLCNLSFVDLGYSSAIAPRMLADFLTNHKVISFSSCATQFAFFVGFVDAECYVLAAMAYGRFVAICRPLHYSTFMSKQVCLALMLGSYLAGLVSLVAHTTLTFSLSYCGSNIINHFFCEIPPLLALSCSDTYISEILLFSLCGFIEFSTILIIFISYTFILVAIIRMRSAEGRLKAFSTCGSHLTGITLFYGTVMFMYLRPTSSYSLDQDKWASVFYTVIIPMLNPLIYSLRNKDVKAAFKKLIGKKSQ

SEQ ID NO: 922985 - protein, 358 aa, Homo sapiens
MPSHTNLATGIPSSYISKGGADRAVPVLIIGILVFLPVFYHLRIPYYASKGYPMQRSNHTVTEFILLGFTTDPGMQLGLFVVFLGVYSLTVVGNSTLIVLICNDSCLHTPMYFFTGNLSFLDLWYSSVYTPKILVTCISEDKSISFAGCLCQFFFSAGLAYSECYLLAAVAYDRYVAISKPLLYAQAMSIKLCALLVAVSYCGGFINSSIITKKTFSFNFCRENIIDDFFCDLLPLVELACGEKGGYKIMMYFLLASNVICPAVLILASYLFIITSVLRISSSKGYLKAFSTCSSHLTSVTLYYGSILYIYALPRSSYSFDMDKIVSTFYTVVFPMLNLMIYSLRNKDVKEALKKLLP

SEQ ID NO: 922986 - protein, 222 aa, Homo sapiens
MQRSNHTVTEFILLGFTTDPGMQLGLFVVFLGVYCLTVVGSSTLIVLICNDSHLHTPMYFVIGNLSFLDLWYSSVYTPKILVTCISEDKSISFAGCLCQFFSARLAYSECYLLAAMAYDHYVAISKPLLYAQTMPRRLCICLVLYSYTGGFVNAIILTSNTFTLDFCGDNVIDDFFCDVPPLVKLACSVRATRLCCTSFWPPMSSPLLCSSLPLTSPSSPPS

SEQ ID NO: 922987 - protein, 312 aa, Homo sapiens
MEVGNCTILTEFILLGFSADSQWQPILFGVFLMLYLITLSGNMTLVILIRTDSHLHTPMYFFIGNLSFLDFWYTSVYTPKILASCVSEDKRISLAGCGAQLFFSCVVAYTECYLLAAMAYDRHAAICNPLLYSGTMSTALCTGLVAGSYIGGFLNAIAHTANTFRLHFCGKNIIDHFFCDAPPLVKMSCTNTRVYEKVLLGVVGFTVLSSILAILISYVNILLAILRIHSASGRHKAFSTCASHLISVMLFYGSLLFMYSRPSSTYSLERDKVAALFYTVINPLLNPLIYSLRNKDIKEAFRKATQTIQPQT

SEQ ID NO: 922988 - protein, 298 aa, Homo sapiens
MGRGNSTEVTEFHLLGFGVQHEFQHVLFIVLLLIYVTSLIGNIGMILLIKTDSRLQTPMYFFPQHLAFVDICYTSAITPKMLQSFTEENNLITFRGCVIQFLVYATFATSDCYLLAIMAMDCYVAICKPLRYPMIMSQTVYIQLVAGSYIIGSINASVHTGFTFSLSFCKSNKINHFFCDGLPILALSCSNIDINIILDVVFVGFDLMFTELVIIFSYIYIMVTILKMSSTAGRKKSFSTCASHLTAVTIFYGTLSYMYLQPQSNNSQENMKVASIFYGTVIPMLNPLIYSLRNKEGK

SEQ ID NO: 922989 - protein, 157 aa, Homo sapiens
MSMAFFSVLQLRKSLRRAMARLKEHCNTGAAGTHPWTLPWGWRPKHTFWLLQLLISMLTLLALQKSNVWSESPHRVSTGAPPSGAVGRGPPSSRPQKGRSTDSLSCAPGKPTDTQGDVKMTVCSMDSKVDPYLRNTGLLCQPILAQGFLIAIAHLVQ

SEQ ID NO: 922990 - protein, 139 aa, Homo sapiens
MVLRLERKYTIVSEGCKHKVSIMLLPYQCMAIDAWSCHTYWLQVNPGSSPDPVVLRVFIRARLHTAPVIDGQYNHRGPYKQKKEAEVWSEGLEDAVMLALKIGKGLQPRNATDFYKPKQGKKMDHFLEPPERNTALLVT

SEQ ID NO: 922991 - protein, 118 aa, Homo sapiens
MALVVDRIVGPQNIHFLILKTQENVVLRDMRWEDYPRLCRLVHVNRKAGYLGGPYLISKKMGTSILHPQGAEFCQQLEHVRKMIKPKLQLGFPGLSEGPLITNCMSPYWERGLFIWNH

SEQ ID NO: 922992 - protein, 327 aa, Homo sapiens
MIGEEVPSDQYYWAPLAQHERGSLASLDSLRKGGPPPPNWRQPELPEVIAMLGFRLDAVKSNAAAYLQHLCYRNDKVKTDVRKLKGIPVLVGLLDHPKKEVHLGACGALKNISFGRDQDNKIAIKNCDGVPALVRLLRKARDMDLTEVITGTLWNLSSHDSIKMEIVDHALHALTDEVIIPHSGWEREPNEDCKPRHIEWESVLTNTAGCLRNVSSERSEARRKLRECDGLVDALIFIVQAEIGQKDSDSKLVENCVCLLRNLSYQVHREIPQAERYQEAAPNVANNTGPHAASCFGAKKGKGKKPIEDPANDTVDFPKRTSPARDT

SEQ ID NO: 922993 - protein, 185 aa, Homo sapiens
MPPFLGKDGEGGFSWETPGFEIPRSLSSGPRTPPPPRHAPSPLPSHLFHSAAPRQTRLQLASAPAQPPPQAPGSGGVSRRPSPRRPEFLPPSPTGVRLARGKLRDPPPTTTTVARAASRSHAAPPAGHTKDLARTWRLPPPPGPLLARAQPPQTIRKLRIPDTECRDPGKPTESQPNPLVGASQF

SEQ ID NO: 922994 - protein, 161 aa, Homo sapiens
MFRYLSRLKYALTGDEVKICMQPFIKIDGKVRTDITYPAGFMDVISIGKTGGNFCLIYDTKGCFAVHHITPEEAKYKWCKVRKIFVDTKGIPHLGTHDARTICYPDPLIKVNDTIQIDLETGKITDFIKFNTGNLCMVTGGANLCMKNWCDHQQREAPWIF

SEQ ID NO: 922995 - protein, 172 aa, Homo sapiens
MQKSPAFCADVAGSCRPELKLYWLYLEKSDFPPFARHRHILLGPLQLLLTGVLLRYCGQSSQSGSVNTQVKVRPSRWPSKPCSIQLATTPFLSSIFVSFPTLLMLLTLCYLHLLPHSTEDMPAPATNRKVEGPPDSGLGFPQRNRLLLDTVPQFIALFALCMLRGKPHVHNY

SEQ ID NO: 922996 - protein, 145 aa, Homo sapiens
MRKLYACRSVMCCQMNDTCEIQPPDGDPSTFSQGFPLWHLCLHDSSSSDVSSSPELCSDILSKCAASPWQPHSQSPQSRAPWRSHSQAPNISFHQADIFTQCDYHIPWLNLIHTLLNTRNLPDISDLWYMPAHRSLLSHGAESRS

SEQ ID NO: 922997 - protein, 183 aa, Homo sapiens
MGNLGMITLIHADPQLHTPMYFFLSVLSLIDSSFSTVDIPRLLESFLISSQSISFAGCMVQMALMILHGTAECLLLAIMAYDRFTAICHPLLYHTIISQCLCALLVVTCYTVSVANSALLTGCIFKLPYCGPNVINHYFCDIPPVLQLAGADTTRLRPLSSHCVPCSSSLPSPLSQSPMPTSS

SEQ ID NO: 922998 - protein, 134 aa, Homo sapiens
MDTGNADGHKEEPRDLLPGANTQTDHLPVVASLLLSSLSDSALWWEAKGNYTVSSPAGSQLRCDGTAVPEAGLESRTWEDQEHAWGTSKHKPKEANLYGSESRWERAQGGRKSMAFAIKQLLVVCWQFWVFLGL

SEQ ID NO: 922999 - protein, 160 aa, Homo sapiens
MTTAHLSAFKLPDLTATYQAYLAAKALWVAYQNLMSCSEREGPFLGGTYANAWEARLSQVSGQEAFPSPCPFQLSVSFRLAERQCGVTLLLIMVMTSKLPRALEICWSSTKQGDHQKGEAELEENTAVLPSRSLHANADMQQKPYEIHSRKELTTKLENW

SEQ ID NO: 923000 - protein, 192 aa, Homo sapiens
MDPNKEEIPDLPEKEFRGAGLGMQVCQGTAAILQQDHGEVGGAGGEGLVAALSRTDAQDGTGDEHVGDADEQEGDGQHEDAHDIEDSLVNTDGSAGQAQDGRYIAEEVVNFLAVAAEGQAVIGHDRQEETVSTTKCEKEEHLGPTSSQWNGLLGPKNVGKHQGHHNGGVADLYKGQVGQEEIHWGSENAAID

SEQ ID NO: 923001 - protein, 256 aa, Homo sapiens [sequence omitted]

SEQ ID NO: 923002 - protein, 319 aa, Homo sapiens
MPVGKLVFNQSEPTEFVFRAFTTATEFQVLLFLLFLLLYLMILCGNTAIIWVVCTHSTLRTPMYFFLSNLSFLELCYTTVVVPLMLSNILGAQKPISLAGCGAQMFFFVTLGSTDCFLLAIMAYDRYVAICHPLHYTLIMTRELCTQMLGGALGLALFPSLQLTALIFTLPFCGHHQEINHFLCDVPPVLRLACADIRVHQAVLYVVSILVLTIPFLLICVSYVFITCAILSIRSAEGRRRAFSTCSFHLTVVLLQYGCCSLVYLRPRSSTSEDEDSQIALVYTFVTPLLNPLLYSLRNKDVKGALRSAIIRKAASDAN

SEQ ID NO: 923003 - protein, 312 aa, Homo sapiens
MHQGNQTTITEFILLGFFKQDEHQNLLFVLFLGMYLVTVIGNGLIIVAISLDTYLHTPMYLFLANLSFADISSISNSVPKMLVNIQTKSQSISYESCITQMYFSIVFVVIDNLLLGTMAYDHFVAICHPLNYTILMRPRFGILLTVISWFLSNIIALTHTLLLIQLLFCNHNTLPHFFCDLAPLLKLSCSDTLINELVLFIVGLSVIIFPFTLSFFSYVCIIRAVLRVSSTQGKWKAFSTCGSHLTVVLLFYGTIVGVYFFPSSTHPEDTDKIGAVLFTVVTPMINPFIYSLRNKDMKGALRKLINRKISSL

SEQ ID NO: 923004 - protein, 241 aa, Homo sapiens
MYFFLSHLSLVDICYSSAIIPQMLAVLWEHGTTISQARCAAQFFLFTFFASIDCYLLAIMAYDRYTAVCQPLLYVTIITEKARWGLVTGAYVAGFFSAFVRTVTAFTLSFCGNNEINFIFCDLPPLLKLSCGDSYTQEVVIIVFALFVMPACILVILVSYLFIIVAILQIHSAGGRAKTFSTCASHLTAVALFFGTLIFMYLRDNTGQSSEGDRVVSVLYTVVTPMLNPLIYSLRNKEEWI

SEQ ID NO: 923005 - protein, 310 aa, Homo sapiens
MAEMNLTLVTEFLLIAFTEYPEWALPLFLLFLFMYLITVLGNLEMIILILMDHQLHAPMYFLLSHLAFMDVCYSSITVPQMLAVLLEHGAALSYTRCAAQFFLFTFFGSIDCYLLALMAYDRYLAVCQPLLYVTILTQQARLSLVAGAYVAGLISALVRTVSAFTLSFCGTSEIDFIFCDLPPLLKLTCGESYTQEVLIIMFAIFVIPASMVVILVSYLFIIVAIMGIPAGSQAKTFSTCTSHLTAVSLFFGTLIFMYLRGNSDQSSEKNRVVSVLYTEVIPMLNPLIYSLRNKEVKEALRKILNRAKLS

SEQ ID NO: 923006 - protein, 297 aa, Homo sapiens
MDHPKLEIPLFLVFLSFYLVTLLGNVGMIMLIQVDVKLYTPMYFFLSHLSLLDACYTSVITPQILATLATGKTVISYGHCAAQFFLFTICAGTECFLLAVMAYDRYAAIRNPLLYTVAMNPRLCWSLVVGAYVCGVSGAILRTTCTFTLSFCKDNQINFFFCDLPPLLKLACSDTANIEIVIIFFGNFVILANASVILISYLLIIKTILKVKSSGGRAKTFSTCASHITAVALFFGALIFMYLQSGSGKSLEEDKVVSVFYTVVIPMLNPLIYSLRNKDVKDAFRKVARRLQVSLSM

SEQ ID NO: 923007 - protein, 324 aa, Homo sapiens
MAVGRNNTIVTKFILLGLSDHPQMKIFLFMLFLGLYLLTLAWNLSLIALIKMDSHLHMPMYFFLSNLSFLDICYVSSTAPKMLSDIITEQKTISFVGCATQYFVFCGMGLTECFLLAAMAYDRYAAICNPLLYTVLISHTLCLKMVVGAYVGGFLSSFIETYSVYQHDFCGPYMINHFFCDLPPVLALSCSDTFTSEVVTFIVSVVVGIVSVLVVLISYGYIVAAVVKISSATGRTKAFSTCASHLTAVTLFYGSGFFMYMRPSSSYSLNRDKVVSIFYALVIPVVNPIIYSFRNKEIKNAMRKAMERDPGISHGGPFIFMTLG

SEQ ID NO: 923008 - protein, 547 aa, Homo sapiens
MVEAGCFSKDDVVICLCVSSKRKLVLESQETAVGENIKHQVQESEKKEKTNFLVEDARSISYYINTDLCLYSKVNAKFSAEFQRMKTLQVKDKAITTRVQVRNLVYTVKINPTLELSSGFRKELLDISDCLENNQRRMATYLAELLVLNYGTHVITSVDAGAALIQEDHIKASFFQDSQSSRSAVTASAGLAFQNTVNFTFEENHTSENVLTKSYLSNRTNSRVQSIGGVPFYPGITLQAWQQGITNHLVAIDRSGLPLHFFINPNMLPDLPGPLVKKVSKTVETAVKRYYTFNTNPGCTDLNSPYFNFQANTDDVSCEGKMTNFSFVGVYQKCSQFSGNKNVVLCPKLEQKNPLTGDFSCPSGCSSVHLLSKTCEECCNHLECHKKCTLLVFCKTVCEDVFQAAKGEFRAFWCVASSQVPDNSGLLFRGLFNSKSINPMTNAQSCPTGYFPWRLFENLKLHSWEPLVVPATSKDLGAPSLKKCPRGFSQHLALISNGCQVSYCVKAGLFTEKFLPPASLPPFTQPPLMSEADANTVIVTSSENARS

SEQ ID NO: 923009 - protein, 283 aa, Homo sapiens
MTVGYHKLSQVVTPIAAAVPDVVSLLEQINTSPGTWYAAIDLANAFFSILVHKAHQKQSVFSWQGQQYTFTVLLKVKFLGVQWCGARGDIPSKMKDKLLHLATPTTKKEVQSLVGRFGFWRQYISHLGVLLWPIYQVTQKVASFESGPRQEKALQQVQAAVQAALPLGSYDPADLMVLEVSVADRVAVWRLWQAPIGESQQRPLGFWSKALPSSADTILLWREFLACYWAFMKTERLTEGYQVIMEPELPVINWVLSNPTSHKVGHAQQHSIIKWKWYICDRA

SEQ ID NO: 923010 - protein, 298 aa, Homo sapiens
MGLLADSLPFSVLVKKRVFLASPTEVAKVCLQTQMQQLRPLASGPLSVPLVCPVSPVCSVSKYHGLLHCLAMVAHEEGLHSLYKSSSALLFWDSHSFATYFFSYAALCGWLGPTGHSQPEITGPAARPSQRGPGENTSHLLVLQAGAGGQRQTCFSPSTILERQAVLQLSLCAQPPSTLDPRSPTHCSSYTVPFQTKLAGLPSRLGTTGQQGQAWSVPHLSDKRTLPAGVGVLFRQSLRHHGGAGSRPHTSSPNTCGATAPVRPNPDVPLSLREKFSRKPLDFSKMGEVWEVCSPPLP

SEQ ID NO: 923011 - protein, 144 aa, Homo sapiens [sequence omitted]

SEQ ID NO: 923012 - protein, 137 aa, Homo sapiens
MWPQALKGFAYYWGSDGDKNECVGYQDNQESYKDIEAHNINKNKLANMSIRARENHDCWNITEKVMDFIGLTERETKCVPSVDGGIQETTERQVTEKKVHGIVETGIPEYQYNNSQVSNQSDNIDEGERYKEGNLQF

SEQ ID NO: 923013 - protein, 309 aa, Homo sapiens
MENCTEVTKFILLGLTSVPELQIPLFILFTFIYLLTLCGNLGMMLLILMDSCLHTPMYFFLSNLSLVDFGYSSAVTPKVMAGFLRGDKVISYNACAVQMFFFVALATVENYLLASMAYDRYAAVCKPLHYTTTMTASVGACLALGSYVCGFLNASFHIGGIFSLSFCKSNLVHHFFCDVPAVMALSCSDKHTSEVILVFMSSFNIFFVLLVIFISYLFIFITILKMHSAKGHQKALSTCASHFTAVSVFYGTVIFIYLQPSSSHSMDTDKMASVFYAMIIPMLNPVVYSLRNREVQNAFKKVLRRQKFL

SEQ ID NO: 923014 - protein, 314 aa, Homo sapiens
MENNTEVTEFILVGLTDDPELQIPLFIVFLFIYLITLVGNLGMIELILLDSCLHTPMYFFLSNLSLVDFGYSSAVTPKVMVGFLTGDKFILYNACATQFFFFVAFITAESFLLASMAYDRYAALCKPLHYTTTMTTNVCACLAIGSYICGFLNASIHTGNTFRLSFCRSNVVEHFFCDAPPLLTLSCSDNYISEMVIFFVVGFNDLFSILVILISYLFIFITIMKMRSPEGRQKAFSTCASHLTAVSIFYGTGIFMYLRPNSSHFMGTDKMASVFYAIVIPMLNPLVYSLRNKEVKSAFKKTVGKAKASIGFIF

SEQ ID NO: 923015 - protein, 133 aa, Homo sapiens
MQLFVRAQELHTFEVTGQETVAQIKAHVASLEGIAPEDQVVLLAGAPLEDEATLGQCGVEALTTLEVAGRMLGGKVHGSLARAGKVRGQTPKVAKQEKKKKKTGRAKRRMQYNRRFVNVVPTFGKKKGPNANS

SEQ ID NO: 923016 - protein, 254 aa, Homo sapiens
MQAEAPISHTTSSMQPPVTQQEKTPPPRPSPLEAGSDGCEEPKQQVSWEQEFLVGSSPGGSGRALCMVCGAEIRAPSADTARSHILEQHPHTLDLSPSEKSNILEAWSEGVALLQDVRAEQPSPPNSDSGQDAHPDPDANPDAARMPAEIVVLLDSEDNPSLPKRSRPRGLRPLELPVGKDIAPQESCSQAPAEVRHFTDRQPVPRQAFSPCKRRSSQQPKRHGAQTSKDSPKDREVAEGGLPRAESPSPGEPS

SEQ ID NO: 923017 - protein, 164 aa, Homo sapiens
MSDTENPSSNELGSQQQPASKAGSEEHRPVHLWFSTLAGGTQDTCALALRIILPLAPTAGIHPPVASSSSFSSLSWYSSSSCLLLLLLFTQLVFILQLPPPPPPPPSPPPHSAGIHPPVATSSSSSFSSSSSSFSSSSSLSWYSSSSCHHLFLLFLLNAVKFTP

SEQ ID NO: 923018 - protein, 133 aa, Homo sapiens
MGCDLLRRNCPWAFTCTCMPTRPPAVARKHPRSLGYVLHTCCLTSPVGPAPLGQVFPLSINHQQIRALRERPDLGWLLLAITGQQFRPQGESSPSPEAVLSESWTRLRVSERKAWWLAGHRKWWASACQGVGH

SEQ ID NO: 923019 - protein, 326 aa, Homo sapiens
MSVQYSLSPQFMLLSNITQFSPIFYLTSFPGLEGIKHWIFIPFFFMYMVAISGNCFILIIIKTNPRLHTPMYYLLSLLALTDLGLCVSTLPTTMGIFWFNSQSIYFGACQIQMFCIHSFSFMESSVLLMMSFDRFVAICHPLRYSVIITGQQVVRAGLIVIFRGPVATIPIVLLLKAFPYCGSVVLSHSFCLHQEVIQLACTDTTFNNLYGLMVVVFTVMLDLVLIALSYGLILHTVAGLASQEEQRRAFQTCTAHLCAVLVFFVPMMGLSLVHRFGKHAPPAIHLLMANVYLFVPPMLNPIIYSIKTKEIHRAIIKLLGLKKASK

SEQ ID NO: 923020 - protein, 309 aa, Homo sapiens
MYAVALGGNTVILQAVRVEPSLHEPMYYFLSMLSFSDVAISMATLPTVLRTFCLNARNITFDACLIQMFLIHFFSMMESGILLAMSFDRYVAICDPLRYATVLTTEVIAAMGLGAAARSFITLFPLPFLIKRLPICRSNVLSHSYCLHPDMMRLACADISINSIYGLFVLVSTFGMDLFFIFLSYVLILRSVMATASREERLKALNTCVSHILAVLAFYVPMIGVSTVHRFGKHVPCYIHVLMSNVYLFVPPVLNPLIYSAKTKEIRRAIFRIPPLDIRCACSIFTFHSDFKFPEAFPEAEPMPASCFP

SEQ ID NO: 923021 - protein, 137 aa, Homo sapiens
MAAATGKHFGRTAETALQAGKARWRPWERLADWGSFRSDLPCPVGKRALLSPGRILKVCGKSGSLHAYVSHPVPTSTQGQKGVLVLDYPIQAFQLLPVSASSCIHSGCLLSEDLFSVCWSLDDLVSSWEKLLLAVAS

SEQ ID NO: 923022 - protein, 263 aa, Homo sapiens
MGGFGTNISSTTSFTLTGFPEMKGLEHWLAALLLLLCAISFLGNILILFIIKEEQSLHQPMYYFLSLFSVNDLGVSFSTLPTVLAAVCFHAPETTFDACLAQTFFIHFSSWTEFGILLAMSFDHYVAICNPLRYATVLTDVRVAHNGISIVIRSFCMVFPLPFLLKRLPFCKASVVLAHSYCLHADLIRLPCGDTTINSMYGLFIVISAFGVDSLLILLSYVLILHSVLAIASRGERLKTLNTCVSHIYAVLIFYVPMVGTEQ

SEQ ID NO: 923023 - protein, 155 aa, Homo sapiens
MNSFLPMESCTFMVKDYDHYVAICHPLQYLSIITHQFVAKASVFIVVQNALLLSPVPILSAQLHYCRKNVIENCICANLSVSRLSCDNFTLNRLYQFVAGWTFLGSDFILIFLSYTFILRAVLRFKVEGVAVKALSTCGSHFILILFFSTCWLWC

SEQ ID NO: 923024 - protein, 314 aa, Homo sapiens
MASPSNSSTVPVSEFLLTCFPNFQSWQHWLSLPLSLLFLLAMGANTTLLITIQLEASLHQPLYYLLSLLSLLDIVLCLTVIPKVLAIFWYDLRSISFPACFLQMFIMNSFLPMESCTFMVMAYDRYVAICHPLRYPSIITNQFVAKASVFIVVRNALLTAPIPILTSLLHYCGENVIENCICANLSVSRLSCDNFTLNRIYQFVAGWTLLGSDLFLIFLSYTFILRAVLRFKAEGAAVKALSTCGSHFILILFFSTILLVVVLTNVARKKVPMDILILLNVLHHLIPPALNPIVYGVRTKEIKQGIQKLLQRGR

SEQ ID NO: 923025 - protein, 265 aa, Homo sapiens
MTIWLEASLHQPLYYLLSLLSLLDIVLCLTVIPKVLTIFWFDLRPISFPACFLQMYIMNCFLAMESCTFMVMAYDRYVAICHPLRYPSIITDHFVVKAAMFILTRNVLMTLPIPILSAQLRYCGRNVIENCICANMSVSRLSCDDVTINHLYQFAGGWTLLGSDLILIFLSYTFILRAVLRLKAEGAVAKALSTCGSHFMLILFFSTILLVFVLTHVAKKKVSPDVPVLLNVLHHVIPAALNPIIYGVRTQEIKQGMQRLLKKGC

SEQ ID NO: 923026 - protein, 303 aa, Homo sapiens [sequence omitted]

SEQ ID NO: 923027 - protein, 671 aa, Homo sapiens
MADSSSSSFFPDFGLLLYLEELNKEELNTFKLFLKETMEPEHGLTPWNEVKKARREDLANLMKKYYPGEKAWSVSLKIFGKMNLKDLCERAKEEINFIVNTGVPNSWATDPYWSAAPRESGRIAGGDGTEYRNRIKEKFCITWDKKSLAGKPEDFHHGIAEKDRKLLEHLFDVDVKTGAQPQIVVLQGAAGVGKTTLVRKAMLDWAEGSLYQQRFKYVFYLNGREINQLKERSFAQLISKDWPSTEGPIEEIMYQPSSLLFIIDSFDELNFAFEEPEFALCEDWTQEHPVSFLMSSLLRKVMLPEASLLVTTRLTTSKRLKQLLKNHHYVELLGMSEDAREEYIYQFFEDKRWAMKVFSSLKSNEMLFSMCQVPLVCWAACTCLKQQMEKGGDVTLTCQTTTALFTCYISSLFTPVDGGSPSLPNQAQLRRLCQVAAKGIWTMTYVFYRENLRRLGLTQSDVSSFMDSNIIQKDAEYENCYVFTHLHVQEFFAAMFYMLKGSWEAGNPSCQPFEDLKSLLQSTSYKDPHLTQMKCFLFGLLNEDRVKQLERTFNYPDFDDEKQFLSDSSCLESCGLTEAGCEYLSLALISNKRLTHLCLADNVLGDGGVKLMSDALQHAQCTLKSLVLCKEAFDEEAQKLLEAVGVSNPHLIIKPDCNYHNEEDVSWWWCF

SEQ ID NO: 923028 - protein, 137 aa, Homo sapiens
MGLCNVIFEVHPSPTFLETISVYPSTQCTCNPERRGLGGKQQACWKGLSCQAREIDLYPGGNQEMSKLSIMTIKETSLKTKMAPRKAEWRNGKIYVLNGFIKLLVLSPNNAGPYQLGQQPWPARSGSLRPEEHAASR

SEQ ID NO: 923029 - protein, 167 aa, Homo sapiens
MQHFTVTANRTWEEATLHWLLAANERPGKGLPGDPVEPRKHRRPEDKTSPGLRVRFISTSTEITLQKHFKRGRICGCLAFLVAAFFSPCYNQLNSVLAGSWTSSSKHASGPVLAQRMGLETPCRPCLRPGFCWFLSELDPVASSHHNQGIDTGAIEVSLPFGTKTSL

SEQ ID NO: 923030 - protein, 238 aa, Homo sapiens
MHIITHFGFPTSIQSNNGPSFSSQITQDFSTSLGIKWVLHTPYRLQSSGNVEKVNSVFKAKLTKLALETHQSWTGNLPFTLMRLCATQNAPSIYSPFEIMYGQTFVLGPPPLPNSEPVSNYLPVLIQTWSFIHEAANEAMPLPIVISLSSIHNCLAGTDMFICQPDPHEKLQPKWAGPYTLILCMPNAVRVQGLPHWIHHTRVNLTPKATSSSKTLIAELSSRPISPTKLKLTKNFFS

SEQ ID NO: 923031 - protein, 370 aa, Homo sapiens
MFTDGSSFLEQGVQKTGAAITMETDILWAQALPVVTSAQRAELVAFTQALRWGKDKHINIYTDSRYAFATVHVHRAIYQEHGLLTLAGKTIKNKEEILALLEATGIPQQVAVIHCKGHQREDMAIARGNQRADSAAQEAARLPVAPLILLPAVSFPQSNLQDHPIYSAEEVKLVSDPQASKNQESWWILPDSRIFIPQTLGEILIGRLHSTTHLGGVKLTQLLRSCFKIPHLQNLANQASLQCKACAQVNAKQGPKPSSSNRLWGDLPGESEIIPPHGLPAAIGSDNGPAFTSSIAQSVNKALNIQRKFHCAYRPQSSGQNEMRGVFKIFEQIMVENFPNLAKVKLHIQESELTSNKIISNKSMVEANHK

SEQ ID NO: 923032 - protein, 148 aa, Homo sapiens
MHFHRGLLLRQAAGTRRQATVAFIVKRAVALCLRLTPCDWRMRIREAGSGAWLTLILSTIAPPRAYSVVGSHWRRRRLDCELGAGYCSSDSFREKGCVQASGLMGLGIQSARLCGKGKNHDKVKSKVKQRSHTWNSHPTGADEVERAA

SEQ ID NO: 923033 - protein, 147 aa, Homo sapiens
MRNKCQAGAWTCSLVSLQLLSNPDSENQQTWRVNFLVPEQEEMDLAEAGKGSGGSAIALLQAGLADAGRAQIQRSNQALGGGHVALWVGTSLLRWLLVSRGTQPGAPSPHTACWLHCGCCCHHWHTFRWFPEFHIRDSDKRSLQLKG

SEQ ID NO: 923034 - protein, 178 aa, Homo sapiens
MLQLGQHLALTAQSHHEDLRHRDGALGQVVGKLKSENLKSKIFRDLLSAKRVGAQAQELQGVQRGPRAIFPRTKFQINTPPRKEPAIEGTSGVGAKKKFQKYAYGLRAPGLIGDPINGNETTSLLLILPTVTKVSSEDVSTESHSALSAPTCLQPTALIPQPSFVQSSTSLNGRHYPK

SEQ ID NO: 923035 - protein, 124 aa, Homo sapiens
MGLGQVTIISPMDNCSSLLPGLPCIFPPSTKYFKHRSQKVVHASAQGSQVAFTTFRVAFENFSVDQNHLKVLLKQISGPTSRVSNSVAPREHHGILFTSFNSLLNRLLVHEDFPSIFFKTVYST

SEQ ID NO: 923036 - protein, 183 aa, Homo sapiens
MGALPLALRTAGRCVEPLCVGVRMNSFVPWEQLETKFPCNKSELVASFLITIIHSTSSKEMTGPQVMHPHDWEKLAILVLFEHGASSWSCPAAACQAFLLLRTPYSSLFPGFWAPHNDLYEFQSSGDTLHCSACKLGHSWRWDIPELFKRLHPAKFPLAEEPESVLQGGWGQRLKQPHHSTSL

SEQ ID NO: 923037 - protein, 134 aa, Homo sapiens
MPDKPGYFGASQQQNCRLRTKDLAHVHIPAGVTYQLNTSAFSYVPILGKPEIGNLNIISHSENHSWWEKHGSWSWLIDRVFPYKPVAQIQVLMLLEHSSIAATVLSQTTGSCIFNQATWTERSFQWSPTKSSQP

SEQ ID NO: 923038 - protein, 149 aa, Homo sapiens
MPMLPVQEPGLRTTRDGRISTTLMQGTHYAASVCPTRKALSEQGMQLWRAARGSAFLAWLFNVHPPPQLREKHGPFAVAEIVLVRELNDLSLLDTHSFCQPWVTCLYTRIASKFSVHLMRLLESSNRITWERTLEGRRSHSKANTKDCK

SEQ ID NO: 923039 - protein, 141 aa, Homo sapiens
MASTGPIWHLPWVHSGDVPSVSCLPPSSFTHLLALWYEESTGLGNRELTSPAIDVEQGKEDAALRQQPIDHLTKFTEHLHVLEAVLGAVLNPTGLKTPWALVSRGLQIEKVQGIELSERQAGLNVCQPPRPGTIGHRSVKV

SEQ ID NO: 923040 - protein, 208 aa, Homo sapiens
MVWRDTDGDYEYLHLPTDVNQNVNSDYLLEIFPLDSDSTTELSSDTEVPAINSAPDLNSVNPDNTQPGIWPFNALSSDPDQEANGQGQQQCRMSFSPTKEGHIAWEHFPDADTTVYMDTPLFEHHPQLSTLAGTLVVCTHPRQSQSYTYAHDCPFPHAYSPPLTYPNNQSLLAHFQCTCTLTGHAHLPDTLSLNKPCLQCTLWHTHPP

SEQ ID NO: 923041 - protein, 116 aa, Homo sapiens
MIGWGMGVDLGECWMSHQFLQAQGWVQKIMYAKYPGKLKSDFYMPVVITLIIIITVLGKKGPLLSVWNMDEDEALPDLSHPHLTQIIPECVLHNVVVRDSGPLAIGCCFMYSPGIS

SEQ ID NO: 923042 - protein, 390 aa, Homo sapiens
MVCTGARRRETAQLSPGTAAGSSLWEPCSSSQRPCTHHQHPFHLQLKIREVPRRSCSHQSHGAACEAEAPPTGPPPNWHHCCPCPYSQLHVTLGQKQWWGSQGSVKSLSQVRCGQDPHRAGSQGRGRTNLGGEDVCIVGLEGGCGLVDRKKQWAWKSCMIRAGTGPGWIGGPWGLRIQQGAAGVKEEGMTGANTFPPKPLLPSGSSPELSPLSVGHPLLELEIGVGGAKAIISNDIITPSSSWMTVCSSPWLVGLASELDFFRSLLQVGHLHLEGQVVFLHLIGPQGVPPLAQHLADGPVILVGVTLVRPARAWCRLLKIMSATHGPPDVLQDKFEHLKMIQQEEIRKLEEEKKQLEGEIIDFYKMKAASEALQTQLSTDTKKDKHRKKQ

SEQ ID NO: 923043 - protein, 145 aa, Homo sapiens
MSQRGSPHTTRNSLTDTGKGLHHHAKSKAKPLESFDQSSNMMCLGFFKEHSGSCMENRCRNTSQEATAAVKEKEEARTGQRTQALTMEETEHVSAELALTLSAGPCNMLPKTRDPSFSLRDYSLFTAKVERSKTHQLYSVISVIG

SEQ ID NO: 923044 - protein, 143 aa, Homo sapiens [sequence omitted]

SEQ ID NO: 923045 - protein, 146 aa, Homo sapiens
MSIELPIQASAMADAPTPAKLQSPRSKRFGKGISNKINSVVAREESGRVPIESGRLGFNSAATIDISGSQVAKLFAHYVENIPREKWTFISIALGFGCDHQQSRFRMLASHILIKSLVETLGVLSQPQEVWLQLKPPCYGDHMETL

SEQ ID NO: 923046 - protein, 169 aa, Homo sapiens
MIVTFLRPPQPCGTGHGHSWLCSPTDASAPNPLGSISAVFLLLPLLYAALPANWRSARVPEACGKSRLLIASSTHLFSQRHLGPGISPELNLHNGELVVKPEMLTSCSSWQSNPLGDGERESNKFGKARITGSSAGEREEVRCLYPSCPAQAIRLEGVHLVSVKETFPY

SEQ ID NO: 923047 - protein, 197 aa, Homo sapiens
MLLLDQTLAFNEKNVALAVACEFGDTWYLSQVNDRMTTEERDKFPSGQQALPSMDPHWDLNSDHGEWSCKYLLTCVLEGLRRIMKKPMNYSVMSTITQGKEENPSAFLKWLQEALRKYTPLSPKLLEGQLILKDKFITQSAAAIRRKLQKQTLGPEQNLEALLNLAILVFYDREQKEQAQKEKQNQRKAAALVMVLR

SEQ ID NO: 923048 - protein, 142 aa, Homo sapiens
MQINGNKPSKATSETQNETPNPITPLKATSSQTLIVKGSVGPRRSGCARGPEGFGGTGQEAARFSFTRKRCLHPPSMLFLRYHPLAVFWKLSRKLDLSLQRAYGQRTLRMICSSSRSGLECSDHLLNARQDTCELRVLAGAT

SEQ ID NO: 923049 - protein, 144 aa, Homo sapiens
MHEEISQNSTAVLSPFHSRGNCNPEKSDPSWKFTFFRKPSQIKPTPISECFCTWQTSCPANHYFYYNHDSTYGYISKRTESRERDICTPKFIAALFTIAKKVEETKLSINRQMDKRHVIYTYNGILFSLEKDGNLGTCFNMDAS

SEQ ID NO: 923050 - protein, 167 aa, Homo sapiens
MSVTALKAARLDLFVPPGGFLVSLASGVKLQTFASPIDAGTQLASPSGYSTASAGGAAHQSCALCPHSSALGRSMGPGAAEQGAALVGGGWGCPGAHGGDGEAQASQTAAAAADRALPHREAAEARGELKCSAGGPALLGDLAHPPPLLARVLSPSLPGAGGAGRLL

SEQ ID NO: 923051 - protein, 173 aa, Homo sapiens [sequence omitted]

SEQ ID NO: 923052 - protein, 177 aa, Homo sapiens
MSKTPCRYQAKVSYGSKSHLGVWPLLALLCYRHSHTQPSGLHISWLGAPTTSLSSSLCQLECSWWSRSLPLPEFQRHVVRTGCSLPVQLTYSRRAVVGQECFLVCGSPVLGSQLFSISASVSSFQLLYLPSIHSQDFPSEDLSGTCQSSWSLDGWCSTWLHLVGHLTLHSDVTLFTV

SEQ ID NO: 923053 - protein, 138 aa, Homo sapiens
MRKLITELIFLNIWNFTVRTSTVLPQIEDCSQCIHQVTENVLHSAQVYYMNHYRSVMQEDIGSEDEEMLLQWIGKEHLVQREYKTIIGETFEFCENGKKVLRKTVPTLVRPSWTIKRQIMYNQTVLMLISSSLSSPQG

SEQ ID NO: 923054 - protein, 142 aa, Homo sapiens
MNPILYASIPSLTSHVVLLQIAMWQNHSLRLSQLSTPLQGCGQLDTAGENHTTRLTNVTSSDTAPQSYLGPQGCRDAYQQPKIHKAVGIDLMVRVWLVRKLLSKAGNMAIHSCNGKTFSEINAHGFLGKIFVPNKLVAIEER

SEQ ID NO: 923055 - protein, 138 aa, Homo sapiens
MIKSSSYGVHGADPCLRDADGCLWWFLGPAAFLGHGCKSKSFFRNTSRAGEAARTKAVEDTAQVALQKNTPFINTVIEYIKFKIHLPFNTTVKQEDAQSSPFVWDRGVSWGAELSCKTKKVISKLRQVGYPTGKEKTS

SEQ ID NO: 923056 - protein, 745 aa, Homo sapiens
MAQSTQNVDYNQLQEVIYPETLKLEGKGPELVKENKTQPPVAYQYWPPAELQYRPPPESQYGYPGMPPAPQGRAPYPQPPTRRLNPTAPPSRQGSELHEIIDKSRKEGDTEAWQFPVTLEPKPPGEGAQEGEPPTVEARYKSFSIKMLKDMKEGVKQYGPNSPYMRTLLDSIAHGHRLIPYDWEILAKSSLSPSQFLQFKTWWIDGVQEQVRRNRAANPPVNIDADQLLGIGQNWSTISQQALMQNEAIEQVRAICLRAWEKIQDPGSTCPSFNTVRQGSKEPYPDFVARLQDVAQKSIADEKARKVIVELMAYENANPECQSAIKPLKGKVPAGSDVISEYVKACDGIGGAMHKAMLMAQAITGVVLGGQVRTFGGKCYNCGQIGHLKKNCPVLNKQNITIQATTTGREPPDLCPRCKKGKHWASQCRSKFDKNGQPLSGNEQRGQPQAPQQTGAFPIQPFVPQGFQGQQPPLSQVFQGISQLPQYNNWEPPQKIPTGVYGPLPEGTVGLILGRSSLNLKGVQIHTSVVDSDYKGKIQLVISSSIPWSAIPGDRIAQLLLLPYIKGGNSEIKRIGGLVSTDPTGKAAYWASQVSENRPVCKAIIQGKQFEGLVDTGADVSIIALNQWPKNWPKQKAVTGLVGVGTASEVYQSTEILHCLGPDNQESTVQPMITSIPLNLWGRDLLQQWGAEITMPAPLYSPTSQKIMTKMGYIPGKGLGKNEDGIKIPVEAKINQKREGIGYPF

SEQ ID NO: 923057 - protein, 661 aa, Homo sapiens
MNPSEMQRKAPPRRRRHRNRAPLTHKMNKMVTSEEQMKLPSTKKAEPPTWAQLKKLTQLATKYLENTKVTQTPESMLLAALMIVSMVVSLPMPAGAAAANYTYWAYVPFPPLIRAVTWMDNPIEVYVNDSVWVPGPIDDRCPAKPEEEGMMINISIGYRYPPICLGTAPGCLMPAVQNWLVEVPIVSPISRFTYHMVSGMSLRPRVNYLQDFSYQRSLKFRPKGKPCPKEIPKESKNTEVLVWEECVANSAVILQNNEFGTIIDWAPRGQFYHNCSGQTQSCPSAQVSPAVDSDLTESLDKHKHKKLQSFYPWEWGEKGISTPRPKIVSPVSGPEHPELWRLTVASHHIRIWSGNQTLETRDRKPFYTVDLNSSLTVPLQSCVKPPYMLVVGNIVIKPDSQTITCENCRLLTCIDSTFNWQHRILLVRAREGVWIPVSMDRPWEASPSIHILTEVLKGVLNRSKRFIFTLIAVIMGLIAVTATGAVAGVALHSSVQSVNFVNDWQKNSTRLWNSQSSIDQKLANQINDLRQTVIWMGDRLMSLEHRFQLQCDWNTSDFCITPQIYNESEHHWDMVRRHLQGREDNLTLDISKLKEQIFKASKAHLNLVPGTEAIAGVADGLANLNPVTWVKTIGSTTIINLILILVCLFCLLLVCRCTQQL

SEQ ID NO: 923058 - protein, 163 aa, Homo sapiens
MSTCKAAGCLFVRLQGGWLHYVASYFPFCKIPSHCKDCFHHQLPDFVFYLSTLQSLNSGHTGLLLSEDCSRDLSFSGPSFFFFTCMTCSLIFYGSLLKMSPYQRGLPLLPNVNTITHAIFQNSLSPLLGFIFLLFTYSLRYYISNYSLVFCLLPLEGSEHCIQ

SEQ ID NO: 923059 - protein, 142 aa, Homo sapiens
MPVPPLYQGVCGRRAKSPWQTTGVRPKVQKLKNLEFEGRKHPAQEKNEGRKTQQVCTFQLLLPALFYRHWQLIRCCPPTLRVKTSLHEIPQEALEHKLYCRAYFTLKQRIRAFVPTPQSDFELPGTTEADAGTMLPVQPAEP

SEQ ID NO: 923060 - protein, 379 aa, Homo sapiens
MEAKGRVHKASEPKGTRDQDESLPVVPFPSPTNGRTLIQLEPLTSDDSDNYKCIASNDHADAIYTVSLLVTEGQEKMDFKKMLKKRAPPAPKKKQKKVANEKEMLEILSKVPKKDFEKVCMEYGFTDFRGLLRKLKEMKKKVEVEAIRILKPLEDKETKVDTTVVFDCIMELKDPKCQMIWIKRVGHAPSSLGWRWGMETSGSFLLKPFISFPTCSMRQGTEPLRIQYSLGKYDVKQMGTKYMLVISNVNMNDAGIYSLSVGDKRMSAELTVLDEPLKFLGEMKPVKVTERQTAVFEIRLSKKEPNFVWKFNGKELKRDDKYEITVSEDGLTHTLKIKDARLSDSGEFSAEAGNLVQKAQLTIDQGQSDRHQLAASDMI

SEQ ID NO: 923061 - protein, 146 aa, Homo sapiens
MHFLPSQPIKTPSSARLRHSTGQPAVERSCPLQGLLSAKSWEDDPPDPLDSRTERAVTQTGLKHPSCSPHCGQHEGEKRGEKSCDPSGSPDLGVPQARGVTPSLRFRGSWHLQASRYHRVPWYPQWKPFAVEAHAGAWSCLPHCSQ

SEQ ID NO: 923062 - protein, 191 aa, Homo sapiens
MALLTEHLLKPLPADKQIETGPFLEAVSHLPPFFDCLGSPVFTPIKADISSNITKIKAVYDTNPAKFRTLQNILEVEKEMYGAERLKVGATLALMWLKRGLRFIQVFLQSICNEEPDENHLNLIRVNATKAYEMALMKYHGWIVQIFQAALYAASWAECDGGGVPGKDPPLPSQLHGDHRCHLRDVYPDER

SEQ ID NO: 923063 - protein, 152 aa, Homo sapiens
MKLSTGIIFCSLVLGVSSQGWLTFLKAAGQGMSEQSLTALDSQERGKLLAEKLEAAAPPPLALSLPVCLVRGSEWMVESPPLESREWEGGLLLTGLVINLLACLDYSDARENVQRLTGDHAEDSLAGQATNKWGQSGKDPNHFRPAGLPEKY

SEQ ID NO: 923064 - protein, 145 aa, Homo sapiens
MASRNTQKLGPGIFTPSGHGSITDTHGGQQELRCQETVSLDSDSLRWQQCGGRRVLPTPSQSWGWLVLGYWKWDKGPLPGLVTRDQLLYSDPFLALLFREALKGSTGGFWLEDWQDERHLPRRDEQGGSKAPAQAKKPWGRCRRW

SEQ ID NO: 923065 - protein, 324 aa, Homo sapiens
MLAVAVGVRPGPVTMGIAESTPDELPSDAEEHCQRRPAAGAERAAVFAAAQAVCALSRLQKLYLPEEIEELPDGLCRLPRLTRLYLGGNRLLALPADFAQLQSLRCLWIEGNFLRRFPRPLLRLVALQSLQMGDNRLRALPAELPRMTGLRGLWLYGNRFEEFPPALLRMGRLHILDLDRNRLGGFPDLHPLRALRVFSYDHNPVTGPPRVADTVFLVGEGAAALVPGLWAPPGAASAPWKPLQDWAPEPMFWLMGFSHSERRGSRKLWLAFSWCHWATGCRGRAIMSFQCFTSPGPLFQDSLIYFPGCLPPHPQAWARQASRN

SEQ ID NO: 923066 - protein, 128 aa, Homo sapiens
MTGGAPALRELGEFRWPGPLPHQGLWGSCWAPWFCQPERQNPILLYNNHQSSRQHLLSSEGLPGPGAKCITRIIPLNSHRSPVVIPLGSPRAFDGSPCLQKEQIEHPEPPNLKSKMLQNSKLFEYPHD

SEQ ID NO: 923067 - protein, 139 aa, Homo sapiens
MKCQLLGSLCWVPSKWMWSFSSLPWRSNPSNVKEKDQQREAAPQNLFQWVMFLFYVIGLSHRGQADLVVCPVEDGKVLADEDITQDPKLSRFGGDVHALEATDAAPLALEKRRIKVELGHRFSRDRRWVINIQGALVQL

SEQ ID NO: 923068 - protein, 320 aa, Homo sapiens
MRTKSGGMGTTTGVQPWQTSAPQNTTQPKLLAPHQHEKSQKKSSLLKELGAFHITIALLHLVFGGYLASIVKNLHLVVLKSWYPFWGAASKMLCLMTNLISLFCVLSGLFVISKDLFLESPFESPIWRMYPNSTVHIQRLELALLCFTVLELFLPVPTAVTAWRGDCPSAKAPVFEELLARLILPFTFPTVSPLPCSGQQFSPSERSSALPKVAQQSLLRSAWLQWVLRKLQGFVLIIVGRRKDHIHGGLCCPFGYTMLLTTLGLIATKNPARLLQEELPENNRSPTPHLWENVASRALKRGREGRREPGLLGSLIYLGV

SEQ ID NO: 923069 - protein, 142 aa, Homo sapiens
MLHSYCGMLRVPTGALPTRPVRRGPPFSRPKNGKSTDSLYNAPGKAAGTQHQPMKTAAEALPCRATGVELPKALGAHLLHLCTPDVRHGAKGDHFEALEFNNSPTGFQTCMGPVAPLFWPICPIWNGNIYLMLVPPLYLGSN

SEQ ID NO: 923070 - protein, 160 aa, Homo sapiens
MLLIVVMYWVYEQAYCLLWDQTGTSSICRNADVSCIEGVGLHSSCNPEPRGHTSYGDAVTSECSIKAFYRCTLAKLPWEKLWWCLQWWVREIKSPFMQNGERKLKQPAEFQTVHAQNAKLPNQDRNRRMWPESHILPNMTCKTGAPNFGPVARACFLLAS

SEQ ID NO: 923071 - protein, 148 aa, Homo sapiens
MRRPNRLPVMLCFSGHAPGPLSCSTLYTWLCLLDSSSIISESIKVFDLSEKSIEEIMTGLENTVTMGSWGTPDPQQVLVLFPAPVQIQPGIPTLTRGPTECDLAVNFLNLGPGSPGSPVGASSVAPLTLPRGVLTSKSGAVRETRADT

SEQ ID NO: 923072 - protein, 156 aa, Homo sapiens
MAGELEWLPPSIVPQYSQRMDMAKFPRHQHHLLNAVEMRDGETDNVNEWEIEVRIHIANEDMGSNFCNTILELLQPLDYSGLEQESQIKLPYLLLKMILNCFLRQKCTDVFLLDLSDFDIYCTLDSLHVKIKALTVDDCSRWVVNQKHDSNSSFLG

SEQ ID NO: 923073 - protein, 313 aa, Homo sapiens
MLRLDIGSNLIYGVLLVIRFPIILVMRGRENDSRRECRRSVGQHRSLSHELEDLEIRPRVSYVQREEALPQSLEDVKGLGPGRFPEQQKSRTEKVGSRHKVLKVSDMHLLYQSVTEASSLARAAAHQFMWYTATEFVQKMFVECTESWLLVEIRGAPLVENLQPKHNELSLGNGCPVTRMTNDIFEFTYALEFSGIMKYECPWGILVESFVKYQPAFLNFRTYIPVRCALERKPSSFEQNVIQNNTDKSKKIVQTQYYQAGNWGIEECYLGIPEEDIVITGDDNSLCVIAHEDLPVGQYVEREDGEIEDPDPA

SEQ ID NO: 923074 - protein, 146 aa, Homo sapiens
MGSKKKDGLIVPITQLPADSSDVQTPSARSFPVFSHCIDPPRGPATHCSDEASHRGRCLPKGTLRIHVARAGELTYMITRAACKLRSQEASPGPKISEVGKLIMRFQSLAEGLRAPGKSLVLSLRIQKLKNLESDVRGQEVSNKRI

SEQ ID NO: 923075 - protein, 186 aa, Homo sapiens
MGVEPLLRASIRAKLSGNAESEPTQRVPIRDMPSGALGVGLPLRSQNYKATSMQLQPNRAEARTESSKDMGAGKDQLYKKDEAPHTRPERSKAEEMLDSGVEHIGGGTGCPEPPRATGSLGLHSSFGSPFLSELMYKTKLHPDHLGHMFRGSPDGCVTGHGHSYLAVTVFRTFFVFYNFESSEEYW

SEQ ID NO: 923076 - protein, 208 aa, Homo sapiens
MSSRLPAFVTQAVPSSPFSVGLLQFTGGLLQTLVTLVFPVPGGITSEGYETIEDLFKEAVWLHFGRTVVLCWGIPSAADQFGLSKNCRLDQLRCIAAKVMALLALQALHPREKLKPLFTVEHWWGIAGGPSWEDLPSEEEWIRVLLKEPVWPCTEKTAVLCWGTTYASVDLDPPNPAGWNSQVAQTAKVAACPASQVLRPREKSKLCP

SEQ ID NO: 923077 - protein, 149 aa, Homo sapiens
MWSSHPPGPLRVFEHQHSEVRDGVFLMGCQRLTRKAQGLINLEPDLDEVTLCTSGLQQHHHGAGRRPRLWQMQPMAKGDSGQPGAGGFTSLTFHFGVCKLGILITTGLPAVRGMQSVPTNSQRLQSLLAHWGLMAAHAAETALVIAIYR

SEQ ID NO: 923078 - protein, 129 aa, Homo sapiens
MVMLMKDVMMMMTEMIMMMMVMIVMMMVMAIMMVMVIKTMMVDDDGGGDDSDDGDVMMMVMMIMMMMKVVMVLMMVMKAMMVDDGDDDSDAMMAGDDGDGDYDGDSDDGDDDEGGDGDHDGDGDESNDG

SEQ ID NO: 923079 - protein, 132 aa, Homo sapiens
MIDTKYNNTSKKAYEWNAEKRIQAPSKKAYEWNGEKRIQARARLMLKSCLMHKPHLLAFESLLITYMWGGKRKQQALKTLQRFQRWLFPETLLVLTCWGLVTRAVLGAPSSLKVCFLGHEVGAPQILVICGG

SEQ ID NO: 923080 - protein, 284 aa, Homo sapiens
MNQGLDSDNDSDYKRDVVEGSKERHMIGHLLPETSYGIKMQCFSEGEESEFINVVICESKVKRVPGASEYPKGLSIPLNSSGSEGNVRPATSPARSSDILTLWNVLTVKIVETTIAVSSKPTALSAVALFLWSLGWHFVLSMVWESGPQSNEDAHMPGFCIPDCGQLPHEKIKNNVEPISTQHTCCQDNRNNVSSNTQKIQKSSAEETAVSLQKWTATFYIGILLFLPPISEDCAEKTTWPPPGVPLDSPSEVLQQPQETGGCAKNQSRSDFKSVTNCTKQACE

SEQ ID NO: 923081 - protein, 322 aa, Homo sapiens
MSFKGYIFLYFCCSWELCSISHPAQTVAGPDSLCIVKVVLEELLSARGFGRHGGKKLNQLNLLPCRSESVLLHMPQPVNPELTIGPITGPVDRLNHFRDFPKRPLTAYNRFFVESWLQYSQMYPGMRSQELTKILSKKYKELPEQMKQKYIQDFQKAKQEFEEKLARFSEEHPDLVQKAKKSGVSKRTQNKVQKKVQKNIEEVRSLPKTDRFFKKVKFHGEPQKPPMNGYHKFHQDSWSSKELQHLSVRERMVEIGRRWQRIPQSQKDHFKSQAEELQKQYKVKLDLWLKTLSPENYAAYKESTYAKVYRKASRPDGGVSTL

SEQ ID NO: 923082 - protein, 300 aa, Homo sapiens
MNSGILQVFQRELICPICMNYFIDPVTIDCGHSFCRPCFYLNWKDSPFLVQCSECTKSTGQINLKTNIHFKKMASLARKVSLWLFLSSEEQMCGTHRETKKMFCEVDRSLLCLLCSSSQEHRDHRHCPIESAAEEHQEKLLQKMQSLWEKACENHRNLNVETTRTRCWKKMPAFHHEEEKHNLEMLKKKGKDIFHRLHLSKAKMAHRREILRGMYEELNEMCHKPDVELLQAKGPSYFIHQPQNFVEWSRSESVLLHMPQPLNPELSAGPITGLRDRLNQFREVTSKTFYDFTFAGKVTS

SEQ ID NO: 923083 - protein, 484 aa, Homo sapiens
MWTLHYLKLFINPDPKMTCCSFFLRNMNSGILQEFQMELTCPICMKYFIDPVTVDCGHSFCRPCFYFKWQDIPIFTQCFECMKTTWQRNLKTNIHLKKMASLARKVSLWLFLSSEEQMCGTHRETKKMFCEVDKSLLCLLCSSSQEHRYHRHRPVEWAAEEHRYSPAKGFYQAKGPSYFIHQPQNSVEWSRNMNSGILQVFQRELICPICMNYFIDPVTIDCGHSFCRPCFYLNWQDMAVLAQCSKCKKTTRQRNLKTNICLKNMASIARKASLRQFLSSEEQICGTHRETKEMFCEVDKSLLCLLCSNSQEHRNHRHCPTEWAAEERRDYVSLRIEAIRAEYHKMVAFFHEEEQRHLERLQKEGEDIFQQLNESKARMEHSRELLRGMYEDLRQMCHKAVVELFQTEGPSYFIHQQQNYVEWPRYESLLLQVSEPVNPEFSAGPIIGLMDRLKGFREWPRINLDGRVNDEISCGNGKPFFGGQ

SEQ ID NO: 923084 - protein, 139 aa, Homo sapiens
MPGRPCDTAWLGPGLTEPLPGSILERQRGNARGLVVPVAAMVLSPAASPCPLTPAAGAFPAPWPGASSRPPPPPVSPPWPPCKATWVSAGGRCPQVATVLGAALPRRPLGLEGYYEFCDRVYMPCDIQSNVFLQYYKGY

SEQ ID NO: 923085 - protein, 264 aa, Homo sapiens
MRFVKQMLEGSMLLKNTKSSIPRVPHVNLPIIFARCESLSPPYKKTFRFCSDIGIFLRVTSNIHASQISMQEDMTIGSFRLHMKGEEAYRVYALRGITYPAFLCSPLNGTVSVIPVLLRVGAQQTEQALVHFTEHFLCLSVHPTYLLLRSKELPEASFSNKGSHILQTNVSFEVSLPCCLLAYRALSKNCHVLPVEVETGPAKAVPTFYGDWVYEVVHADGTGSASGYLERFVASVRKASIFTKDIDGSILRNFFVIIAFNSQS

SEQ ID NO: 923086 - protein, 146 aa, Homo sapiens
MLVAGGLRGGPRLCLGKSVALYFPKTIQDYLIYLQVVHQIHLFYITAPLQLLPFIYLFSSHQCNHLFECMKLIKIDFKYEWDHEMQQSPQNPAISDKDVRGVCQEVELRISFPNILKAIRLRNLTHVGQKKRKIRLNSDSDSPTML

SEQ ID NO: 923087 - protein, 157 aa, Homo sapiens
MLLSSFYVKIFLFPTNASKRSQYPLADSTKRVFQNCSIKGNVQLYSTKSVSKLLYVKFLYEDIPVSTEGLQAVQISTCRFYRKSVSKLLYEKVKIFLFPPKASKNFKYPLADCTKRVFQNCSMKKCVQLRELNTIFRKKFLRMLLSSFYVKILPFRP

SEQ ID NO: 923088 - protein, 184 aa, Homo sapiens
MAYDRYVAICKPLHYLVIMRQWVCVLLLVVSWVGGFLQSVFQLSIIYGLPFCGPNVIDHFFCDMYPLLKLACTDTHVIGLLVVANGGLSCTIAFLLLLISYGVILHSLKKLSQKGRQKAHSTCSSHITVVVFFFVPCIFMCARPARTFSIDKSVSVFYTVITPMLNPLIYTLRNSEMTSAMKKL

SEQ ID NO: 923089 - protein, 146 aa, Homo sapiens
MPIMKKKISSDTNQKEAFSFETLFLYILQMEIWKLIDAIGEKANIHREKLKGIYQRNQSVMCAFPGRGHWRKSELRPLEKKRISQDKNLKEAIEKLLCDVCFHLTENERAFIAMAHLYKKKGRDVVGIKGHRVEGPAEAMAEELKL

SEQ ID NO: 923090 - protein, 682 aa, Homo sapiens
MPEETQTQDQPMEEEEVETFAFQAEIAQLMSLIINTFYSNKEIFLRELISNSSDALDKIWYESLTDPSKLDSGKELHINLIPNKQDQTLTIVDTGIGMTKADLINNLGTIAKSGTKAFMEALQAGADISMIGQFGVSFYSAYLVAEKVTVITKHNDDEQYAWESSAGGSFTVRTDTGERMGRGTKVILHLKEDQTEYLEEQRIKEIVKKHSQLIGYPITLFVEKECDKEVSDDETEEKEDKEEEKEKEEKESKDKPEIEDVGSDEEEEKKDGDKKKKKTKEKYIDQEELNKTKPIWTRNPDDITNEEYGEFCKNLTNDWEDHLAVKHFSVEGQKKKNNIKLYVRRDFIMDNCEELIPEYLNFIRGVVDSEDLPLNISREMLQQSKILKVIRKNLVKKCLELFTELAEDKENCKKFYEQFSKNIKLGIQEDSQNRKKLSELLRYYTSASGDEMVSLKDYCTRMKEKQKHIYYITGETKDQVANSAFVERLGKHGLEVIYMIEPIDEYCVQQLKEFEGKTLNLCKTMKDILEKKVEKVVVSNRLVTSPCCIVTSTYGWTENMERIMKAQALRDNSTMGYMAAKKHLEINPDDSIIETLRQKAEADKNDKSVKDLLILLYETALLSSGFSLEDPQTHANRTYRMIKLGLGIDEDDPAADDTSAAVTEEMPPLEGDDDTSCMEEVD

SEQ ID NO: 923091 - protein, 153 aa, Homo sapiens
MERIKNRRVVNGKVEYFLKWKGFTDADNTWESEENLHCPELIEAFLNSQKAGKEKVGTKRKSLSDSESDDSKSKKKREAADKPRGFARGRDPERVIGATDGSGELMFLMKWKDSDEADSVLASKEANMKYLQIIIAFYEERLTWHGCPEDEAQ

SEQ ID NO: 923092 - protein, 161 aa, Homo sapiens
MWGRLRKSREIGNNSSFGNVPQPREALTQGIFPLKLPFAYPQPSLAQQSRRTRDECRPVVMEMSVALRSASALGSPQTHFRFRRFGTDTMILLALSSHQGEPTNGVTGPGRGAIDCRDEAQRCCRRWWIALKFQTTQPFPISSFFIPVKSALFEYHSCLLM

SEQ ID NO: 923093 - protein, 149 aa, Homo sapiens
MLPSPHCSYVWTHNKFSPGECELNHLSIFWVNTEDSEAPEEGETTRQPEPVALNKSYVQCIFNASSELTPRILNFQASHTHLRQWMRNGHCPITAVGNAAQSNENVKLHDLETVVTTQLITMEFESMTFTRITKKDIPLPSLLPKIDFR

SEQ ID NO: 923094 - protein, 141 aa, Homo sapiens
MRPHAEAVPGELRVGALHGLPEDHTPLPQTLDRHTSHGELGFSRVPSPQALLPFTHFLTFRDCECSKLSLTFPCPGLGASRDSEACGVLSLEGDVGDRDLHPVLPLVLGTSEVTPGTSEVTPALLSDTTALIPRTSEKEDI

SEQ ID NO: 923095 - protein, 163 aa, Homo sapiens
MIRPWPVLTRLTRAQPGDRSARGDREAPPPSPRAASSASDGAPSGLRSGGAEQSPAGLASPVTSLLKILLAPSACLPQASVRVPVSAFPPRKSAHHWLGTEPGTKERQDPEERERRQRGKEDPGRQQHEIQPSALPAASPACAGPQHQLLQPKGLDIVSLLAA

SEQ ID NO: 923096 - protein, 173 aa, Homo sapiens
MLNQAEPQEPLYSFSRAIIPFIGQHQIEEAGNQTQEPSEENSQNDDRTSRSSTMQHNLCRPASRAKYRTGNLSKVSEGEMELAGVLCIKLCIVVKKVGPRRSYIFTLNEWDKEEVLTPVYEVPPHGQQNPDVKKESTQNERKRPLELHIPISSSQAEETSQLQTQVMYYVKGV

SEQ ID NO: 923097 - protein, 172 aa, Homo sapiens
MPQSRPSPKCHPSSRAPKQIGSVVTVLQVSFSFYSVLLPSSLFREIKVTVKNSDNWLVDGDLLWVHIHETHCASYKDGQLDIGNMCLLLGEEPGYKPREGSRISPPRLTNTRASEKILPYESNFKNLEKVTAIQDAPKSMEGHRKHEKSGKYDTIKGPKLSNNRSQSKIIPL

SEQ ID NO: 923098 - protein, 141 aa, Homo sapiens
MQVRVTEKGLSSVSSKLAAECVSSRKYRGLPIDGILGAPIFGYVCIRRNRKVTIKGDGSSEGEELELLISSSAAAEKRVKTGYCRSHVKAMMYYLDARLRAQYGAEMFQEKGGAEFEGDGRWTHGHTSGFLLNFLIPWDNC

SEQ ID NO: 923099 - protein, 147 aa, Homo sapiens
MGSMMLSNKAQLPRRTHGLAGRPGALLPCVTSGCCSHVPAASQAQLPRRTRRLAARPGHCCPVSPQDAIPTSQLLQLQLLLKLLQEDPCSSACLKMKVETRKHADWGMTYGGDQGFYPERIGKALWCDEGSRLTSPPLSSSGPGGNY

SEQ ID NO: 923100 - protein, 189 aa, Homo sapiens
MLLKAAPTDACVLLLNPRLSTLTPAAWAGDTGLTSCLLVSECLTEGQGMFLQNKEKYSFFCLPRRGVPRAPWGSTLHLGNKMLLCPHKYASCPSSYLVTSLSSQGSAENLENACATISSETKPHCYGTRVGSLRDIPDACATISSETKPHCYGTRVGSLRDIPDACATISSETMPHQGDCEQSLWTCFY

SEQ ID NO: 923101 - protein, 150 aa, Homo sapiens
MHRPEIAAALSAVIISVSEQVCGDHQSVPGTPVDMGLALCVQTWALTARLTSQWRGDRQQTVTVGPWVWAEGTADHSNEEEMTRSYRGHWFLGSLVLEEAGLDLGGGEEVSPAATRTMAALPHLPWASLPLPFPPSPPGGTQSLTSTLVL

SEQ ID NO: 923102 - protein, 156 aa, Homo sapiens
MGDAGKRVLVLCFFSTLCLCAGGEGEESRTVFEMLEGIPGSCQFHCSGALQAPAEAVTKSSNHSFTHHGVSSNGQWTHCPLLRPHGDQHRSSAWVQGASFHQGVYGRSSQARTGRESTPAGEGLCGNYTAEEDFEQLKGVSRTDSSYTCKFVSFDL

SEQ ID NO: 923103 - protein, 143 aa, Homo sapiens
MNFLNNISGTWNCIKYIDQFGHIWREAVPCKGAELLKTMGTHLLHQHDLDVRHGIKGDYFGALRFDCSTGFRTCMRALDLLGWPISAIWNGYLYPMPVPLYLGGVGDRGFRHRGNVLFFKLCDKPIGYHVIILVHVILFNITY

SEQ ID NO: 923104 - protein, 141 aa, Homo sapiens
MPARSYHRNGMEMAAEGTLLCQLRVSVYHIRGQGIILCTDWGIHFPEEDTEAQRRKFAKDDKGSLCLHWAQPLSLDVPTSAPRVPPRTCTMGNILREIAISLKRNLRLFLKTPSPLRIFLELPFAAGVDFSALGLQGSSRS

SEQ ID NO: 923105 - protein, 141 aa, Homo sapiens
MPFMGLLFCRGFPRLDRCIYSAALLGQIGAGRRNNENVIIKGPDLDRGSPIWFPVSPAFHILGPRAHDFSAPLIIMSRHLDPELSCNNLLRGERWGLVEAQREPPAVVQVWKKCQLGCGESGSLDPLRRPLSQILSPSRYW

SEQ ID NO: 923106 - protein, 160 aa, Homo sapiens
MLRMLVLNDTTLIDHFLLITISHKTRCDMKNRNITLEEVSVEFKNQRMEIFTFLLRLKTKCLFVANGAEFGDYAENLPSAAPEYGLYAMSFSLGAAESCRSGDRHGKGWDLRNNLKISPVIKPMWSRTQRPADTVESARVNIFIKCWSQELISALEESTD

SEQ ID NO: 923107 - protein, 156 aa, Homo sapiens
MDTLVAATAGSKLGHTQSSWPPTPLQYWDLPKAHNCYGLIAADVYSRPEVTVMVTEIASENNSLELEALGFFLVLYFTLAELVPVARQSPLYSVVSFSQEEAVCLSSFIAWNYRRSNAGTFVTTTAGVLLGCTPSPQSSTAPGLPQGPQSLRLGCH

SEQ ID NO: 923108 - protein, 229 aa, Homo sapiens
MGRVVSDGELGFVGRVVSDGELGFMGRVVSDGELGFVGRVVSDGELGFVGRVVSDAELGFVGRVVSDGELGFVSRVVSDGELGFMGRVVSDGELGFVGRVVSDGELGFVGRVVSDGELGFVGRVVSDGELGFVSRVVSDAELGFMGRVVSDGELGFVGRVVSDAELGFVGRVVSDGELGFVGRVVSDAELGFMGRVVSDGELGFVGRVVSDGELGFVGRVVGCPTVSLF

SEQ ID NO: 923109 - protein, 139 aa, Homo sapiens
MCLRLVLSLKRSASHVSCPAFSAPPPSWAQYSPAQEYISSKLFVKGIYSTLQGNTILSAPCIYLTPCYQPRNSCELLQECWQTDLSTSQEKNCPAPWREVLGQAQCLGSMGSGIPWWKAQLRAVSKPVQGGHGVESSQS

SEQ ID NO: 923110 - protein, 170 aa, Homo sapiens
MNGQCSGIVRIPILQMSTLRPEEFSQCSYVYRTYKLPFRLGILVPNSVSLCLPHLQAAPGNNDSVKWAAEPHTNSAGSITLDSPASGTVRNKCLLPCRDSSKAALDLDPAACQGPPCAHLPAAKPALASDLKVGGQKKLPRAAAFTLWNGDLSWEILSKLLFPDLSFQTP

SEQ ID NO: 923111 - protein, 150 aa, Homo sapiens
MLAQLLDIIDCCFFSKGTVQTESALCPGQTGRWLDPPLLRRAGDCESNEKHEKECVHPLEAKTGSLADNQLPAVQLPTNAHIPTANANIVLNSVFSLRDFGVTWIIRFAGLTLYDKRRCAGKALLRLIFSIEINPKVHLSSISKTQAKDA

SEQ ID NO: 923112 - protein, 136 aa, Homo sapiens
MGCGKHVGQQEVPAAQLWEEDTGEHNDMSDCPAWLGKGNVKLWNSVDDGCESGEALRDDVEDFHIPGGPPRAGGELLGDGSKNMWYIIDERGDSEESSEEDTAEPNGFIDCPSRGEREKLGEARMDLGVSVLGDRS

SEQ ID NO: 923113 - protein, 145 aa, Homo sapiens
MPRFQRGSVPGTQFEALANLLAHMTQLPGHFSTVPVRAPHPGAQEPLLHSVLTRRPVHLLATVTLLPAEEAPVMADITTQSILTPQLCSGNLLLAHVLATARAGTTLQQVGVPAGHTTGDMASMTLLPGSDTVDVNPSFTSVICK

SEQ ID NO: 923114 - protein, 309 aa, Homo sapiens
MASTSNVTELIFTGLFQDPAVQSVCFVVFLPVYLATVVGNGLIVLTVSISKSLDSPMYFFLSCLSLVEISYSSTIAPKFIIDLLAKIKTISLEGCLTQIFFFHFFGVAEILLIVVMAYDCYVAICKPLHYMNIISRQLCHLLVAGSWLGGFCHSIIQILVIIQLPFCGPNVIDHYFCDLQPLFKLACTDTFMEGVIVLANSGLFSVFSFLILVSSYIVILVNLRNHSAEGRHKALSTCASHITVVILFFGPAIFLYMRPSSTFTEDKLVAVFYTVITPMLNPIIYTLRNAEVKIAIRRLWSKKENPGRE

SEQ ID NO: 923115 - protein, 243 aa, Homo sapiens
MEICYSSATAPKLISDLLAERKVISWWGCMAQLFFLHFFGGTEIFLLTVMAYDHYVAICKPLSYTTIMNWQVCTVLVGIAWVGGFMHSFAQILLIFHLLFCGPNVINHYFCDLVPLLKLACSDTFLIGLLIVANGGTLSVISFGVLLASYMVILLHLRTWSSEGWCKALSTCGSHFAVVILFFGPCVFNSLRPSTTLPIDKMVAVFYTVITAILNPVIYSLRNAEMRKAMKRLWIRTLRLNEK

SEQ ID NO: 923116 - protein, 305 aa, Homo sapiens
MVATNNVTEIIFVGFSQNWSEQRVISVMFLLMYTAVVLGNGLIVVTILASKVLTSPMYFFLSYLSFVEICYCSVMAPKLIFDSFIKRKVISLKGCLTQMFSLHFFGGTEAFLLMVMAYDRYVAICKPLHYMAIMNQRMCGLLVRIAWGGGLLHSVGQTFLIFQLPFCGPNIMDHYFCDVHPVLELACADTFFISLLIITNGGSISVVSFFVLMASYLIILHFLRSHNLEGQHKALSTCASHVTVVDLFFIPCSLVYIRPCVTLPADKIVAVFYTVVTPLLNPVIYSFRNAEVKNAMRRFIGGKVI

SEQ ID NO: 923117 - protein, 230 aa, Homo sapiens
MESSLNGIEWNHHRLEWNGIIIEWKRMELSSNGIKRNHHRMESNGVIIEWNQNASSSNGLERKHHRMYLKGSIIKWNQMESSLNGSKWNHHRMESNGIIIEWNQMESSSNGTECNHHQMESNGIIIEWNRMESSSNGTECNHHQMESNGIIIEWNRMESSKNSSNGIERNHRMNSNGIIIEWNRMESSNGHDWNHHQMGLNGIIKWTRMESQLNGNERNHRMASNGIIIE

SEQ ID NO: 923118 - protein, 275 aa, Homo sapiens
MALGGGYGGASGMGGITAIMVSQNLLSPLKLEVNPNIQAVCAQEKEQIKTLYNKFASFIEKVRSLEQQNKMLETKWSLLQQQKTAQSDMDSIFESHINKLRRRSLDMDSIIPEVKAQYKEIANGSWAEAEGMHQIKMPTRSCRAGGRPAAAEQDMVQQLCHGAPGADERQAGPGHQDRHLQEAAGGRGELAGVWDTEHECPSEDHQWLLRWAELDPRAPHKPSTTGLSYSLGSSFGTGGGSSSFSRASFSRSMVVKKVETRDGKLVSKSSDVLPK

SEQ ID NO: 923119 - protein, 170 aa, Homo sapiens
MEQGAALIWEAQAMQEPKVEGREIQAWRAAGPKPCPAGRQLRPSEKSSTAAAGPGAKPLTAPGLWAVRLLRVRGRPSPCPPGTRAGLQVLRSPRSHLRLCLHTSLQAEGAGSGLGQPRKGFPQCSSGLKGSSSAARVGTKAEEAPREKGESITSREHPMGQRKLNNSLQP

SEQ ID NO: 923120 - protein, 153 aa, Homo sapiens
MKQFSIHNICEDVLYSCLKFKLLITFQIDNLVAIHFTRDAFKNISKLFANESRRDLEPAMDLLVLSHGHQTNILDIILIHQEALTQSHGEQATCGRRENRGAEADGVHYHRNRISLATSAEIHTSIQFTQARDLKSQMDHFLQQEILSFQKVT

SEQ ID NO: 923121 - protein, 210 aa, Homo sapiens
MQIRGAPKSKRQLTLPSYSERSEDTSGSCGHLTCSLSTPGAADSVNKQPWEERMLGGDATVIVVRHPSLTLRGACQSAVTVSQVTRDQMKMFIQQEFKKVQKVIADEEQKALHLVDIQEAMATAHVTEILADIQSHMDRLMTQMAQAKEQLDTSNESAEPKAEGDEEGPRQKAPAEITVNLTHTDSAIKQEACSEGVGAEGEKYSVSSGP

SEQ ID NO: 923122 - protein, 134 aa, Homo sapiens
MGVSEAIGQCQSSAAKLRRSGKSVREPWARVPGHLRVAARRVGQSDFQWCPAQMRHGLGGIPSCEHSLTQTEANREEGGMEGGSLSIVKEASPEKREGIGMGGVLAPQGEVVLATKVKDQSKRPLGDQTPLKCG

SEQ ID NO: 923123 - protein, 153 aa, Homo sapiens
MHSQGAPMGETAVMPGVMDKRENKSPSPGPFIPGSLCSELKTALGRKLSPWRQKLWLSGHIPPSMPKKQDHPTPALLAAAHFLFIPGFWSNEFVSTRDYIMNLSSGIHDVQNMQVCYIAIHVPWWFHAPINPSSPLVDLQSMISLLLLDQFSY

SEQ ID NO: 923124 - protein, 143 aa, Homo sapiens
MISVWPIGEANCCSKVFIVMCNCLIVLSMMLKDPHLVKALSWFQCIWKLYSDLCSYKEFFFNETFQFLFWTMFGMEEHSVVDVPQFLVPEFAGRALYGIFTIIMVIVLLNMLIAMITNSFQKIEDDADVEWTFARSKLYLFYF

SEQ ID NO: 923125 - protein, 234 aa, Homo sapiens
MWRLTERRRKAHRMLKLYNGLSKGEAVGLPAGPDPLDSTDLNGAHFDPELYLDKLPRECPLAQLIDSETDMVPQIRALDSDMQTLVYENYDKFIPATEIDKQCKTTSQCQVYKCVQNWWVLGLTDFKNEAADPPGVKLQTFTCGATKPTPTQNSSWQASSTRSPGSGSCLFLHTSLQAEGASSNLGQPRKGLPPCSHGLKGPSSATKVGAQAKEAPRVSEGCEGCQRAVTSHKE

SEQ ID NO: 923126 - protein, 160 aa, Homo sapiens
MAKQALSGLRFREFRDLPKVAEQSAELRFDPDLSSCGKILCDGTSSAMVRPKGHRVIQLCVAPEHQFTLPGNTACCLDHTEPDTLSFKHHTGPSPHPSVLHCTYSHSHLLTVCLLLYRSDREISAVVGKITHIELTHHPNQQLTIPLTASDMFKVKVLMT

SEQ ID NO: 923127 - protein, 153 aa, Homo sapiens
MTNCRVMRQILKHDSGCDPGVGAQAPVQMTLRLWHTEGDRTLHWDRDSSLCELKQKRRGLNCRGPSPLWQVNRYNTRVGVKDCEEKAHGQQNAQGKGTILHPHMCPQRRKPENQPDRWLLKQFKRDMMIYYNGGGEQIEITFVKILLGGQIST

SEQ ID NO: 923128 - protein, 142 aa, Homo sapiens
MTMGFRQGERMTTSLTNCVTFKPTSIKPKWQEYPSYLALSQGCCEDEMIGIVEKLSNSCSLKTSLMVLDAVTELDCLARIDIIKSLNSRGHAKLLTSRSKDPSLCPNAIHQQSLNKACATLNKGRGKGMERGSNLHNVTDST

SEQ ID NO: 923129 - protein, 151 aa, Homo sapiens
MHLAPKDMGSNGEAYECCHRNEVTISFIPEVSETTNPLGGTNNPDAPPLRVVTLTVKVCGFTPEVSETTDPPEGGNSRHVRTSEGTNSGHTIFKNCNTHREVLDLPDQMPQGNPMFHFSTKRSMICTCDQIRRQMCRYLPYPNIKLVLKCG

SEQ ID NO: 923130 - protein, 184 aa, Homo sapiens
MTSSFKAGHCSVNLKILNVICKARGSSCLNSEESACARILNNAESGRQQAPRNLRPETAGWYSRTKPPGLPWYPYSPRLLAHPSTRSAPLGSGRKPAPMVTGFTSSQYQTNPCGPTLQASPCGFTFQACSSRLSVWAYPSSPWCEASSHDQGSKFTPTDLRNKTGFMVSRITSPSIGFGHDRIM

SEQ ID NO: 923131 - protein, 144 aa, Homo sapiens
MKMSQIALAIWSYPWCNTCQKFLQGNYAALSSSRSFSPKFPQNNLDIFHTLQFHLTGPWTSCESINKSFKRKSSYNLVRGGMGKEDLERLFAFCSAEEVQEEGITHSLVLVCRKMRTPRNCWSHKYGLGHVVQKPVWAPAKTPK

SEQ ID NO: 923132 - protein, 151 aa, Homo sapiens
MLPGAALPKTMRTHLLYQFWKLPSHALFNNNNRGRCCFKIIRGSNRNLVDVGHCFGVVCGMGQRGIVFTLKEKNEYSILDDEENGCLKGLVINKVERHLEEYREPWRMSTHSCFSLQLPLNQTFWASCGFGFCLTTLWEDPPANTNWELTK

SEQ ID NO: 923133 - protein, 171 aa, Homo sapiens
MRCPAPPQDAGECPHWQEGPHQIYCKKIFKFIVHYQFPKEDEQVLHSISKCCKAFLSDKGILLTSLPQLSSSSLKHIQTVQLEHCNSESSYRDLYGDHSTRVNVHQMTTYHMAEEHMNLGYRRIVIPQKEKALFSWEHRQTQRLQKLSTPSEQFLSLLRAYNSKGVRVREP

SEQ ID NO: 923134 - protein, 146 aa, Homo sapiens
MDPLLQVYCTLLDAHFRLCLPEYHQWRLQNSKDCCVLLPLEASSQRSTSLMAAGALLYEVSVHPCWEFSPSQEAQGCDANRRCHKPDALSQGDESFVCKHVTRAAGFPAEILCPHETERKEFSCGLRHKFDGDFQGIQKLEATTEL

SEQ ID NO: 923135 - protein, 136 aa, Homo sapiens
MASVNCHGPGPPSEVVEEEEETFECRFRKPVDSEYRKKAIFYFLRKGYTRQQFCHERSFFSIGSCHSSNYNGGGDRNGKPCDGNISDNMRSYNRDTKPRFRDSEKDFSKEVTPGLTLRMSKSPPAEHSSESLEGSR

SEQ ID NO: 923136 - protein, 142 aa, Homo sapiens
MEWRPVNTGEELLHVSFQQSTKVTHCFQLIIPKPSPAAYTKLTLMASCTIYTYHLIIPGVLCGSHQQLSLSCSCVIQEGSWRWSDLPWTVHLPGLQREFDEGEESGLRPVRRKEGSLNYYKPVMFLEFSSNFIKEGETDIVT

SEQ ID NO: 923137 - protein, 147 aa, Homo sapiens
MPRPASARARCAHTLACAHCLALPSEMNPKSSVDDYCVRTDETLSFPQKPRLKVLGEEGIPACGFSFFENLYCSWSSLKGKGLNLGVKVVVRIYRHLFSHASACFLFLEKKPRVTVGDVVAESELELGLLTLTLRLLSLLRVKAFGV

SEQ ID NO: 923138 - protein, 357 aa, Homo sapiens
MQPKAATTLPRERGECEAAALAGSGPGEFAGSLALQGQRELGVHLEWPTDLAINPMDNSLYVLDNNVVLQISENHQVRIVAGRPMHCQVPGIDHFLLSKVAIHATLESATALAVSHNGVLYIAETDEKKINRIRQVTTSGEISLVAGAPSGCDCKNDANCDCFSGDDGYAKDAKLNTPSSLAVCADGELYVADLGNIRIRFIRKNKPFLNTQNMYELSSPIDQELYLFDTTGKHLYTQSLPTGDYLYNFTYTGDGDITLITDNNGNMVNVRRDSTGMPLWLVVPDGQVYWVTMGTNSALKSVTTQGHELAMMTYHGNSGLLATKSNENGWTTFYDGGLLKRCDQRTRSSAYYNPSNN

SEQ ID NO: 923139 - protein, 411 aa, Homo sapiens
MSLGQRAQQAMTVQCHACGAVEPREEAGILTGFDLVTNGGISIILRFERAPFITQEHTLWLPWDRFFVMETIIMRHEENEIPSCDLSNFARPNPVVSPSPLTSFASSCAEKGPIVPEIQSSHKASEETEIQRVHGATPSSLHSALQEEISISGCKMRLSYLSSRTPGYKSVLRISLTHPTIPFNLMKVHLMVAVEGRLFRKWFAAAPDLSYYFIWDKTDVYNQKVFGLSEAFDLSVTGQDLKECELKDLNVENPTITMRLQNQRALKSAVLAFSVGYEYESCPDLILWEKRTTVLQGYEIDASKLGGWSLDKHHALNIQSGILHKGNGENQFVSQQPPVIGSIMGNGRRRSISCPSCNGLADGNKLLAPVALTCGSDGSLYVGDFNYIRRIFPSGNVTNILELRNKDFRHR

SEQ ID NO: 923140 - protein, 145 aa, Homo sapiens
MRRQNRKQLQGIISTIAFISHIRKRGLQPAEELLMAVSVTERSRPVFLNQDTEKVGKSVDNCPSNCYGNGDCISGTCHCFLGFLGPDCGRGAECDVPTNQCIDVACSNHGTCITGTCICNPGYKGESCEEDELASHSTPELQCYL

SEQ ID NO: 923141 - protein, 124 aa, Homo sapiens
MGPIPLSPQVQDSWTSQGRASLQNLGLAARESVYCFQLSRLVEKKAHWKEVEVGVEKACIWYLLQMWPDNESPVSQVLLYSCVLRVRSPSDTSTTKRAQSDTGVLTVREKITARERESAETSKA

SEQ ID NO: 923142 - protein, 184 aa, Homo sapiens [sequence omitted]

SEQ ID NO: 923143 - protein, 139 aa, Homo sapiens
MDGERTNKVTEEINECYNLEAGAEEVSPGQVEDVEREGVTVHAEAQEPEHDCISCQPDQVNDEDQHYEDQDLHATTMRMGLLCITNWCNFCIQGWDGWIHAQKPYVDCGLKHYSVLGRKLSLRCRNSDRQRGGCDTLMI

SEQ ID NO: 923144 - protein, 146 aa, Homo sapiens
MPHPASGQTWSPKLIVDSLHEKKIISFNGCMAQAYEEHIFGATEIILLTVMACDNYVAICKPLHYTTIMSHSLCILLVVVAWIGGFLHANIQILFTVWLPFCGPNVIDHFMCDLCPLLKLVCLDTHTLGLFVAANSGFICLLNFLL

SEQ ID NO: 923145 - protein, 267 aa, Homo sapiens
MVDNLIIVVTITTSPALDSPVYFFLSFFSFIDGCSSSTMAPKMIFDLLTEKKTISFSGCMTQLFVEHFFGGVEIILLVVMAYDCYVAICKPLYYLITMNRQVCGLLVAMAWVGGFLHALIQMLLIVWLPFCGPNVIDHFICDLFPLLKLSCTDTHVFGLFVAANSGLMCMLIFSILITSYVLILCSQRKALSTCAFHITVVVLFFVPCILVYLRPMITFPIDKAVSVFYTVVTPMLNPLIYTLRNTEVKNAMKQLWSQIIWGNNLCD

SEQ ID NO: 923146 - protein, 134 aa, Homo sapiens
MSQPMCGFLMVVAGILGFVHGGIQTLFIAQLPFCGPNVINHFMCDLVPLLELACTDTHTLGPLIAANSGSLCFLIFSMLVASYVIILCFLRTHSSEGRRKALSNASKGKESTENKTAEKEITRDVEISLYHETG

SEQ ID NO: 923147 - protein, 262 aa, Homo sapiens
MLIVVTITSSPTLASPVYFFLANLSFIDTFYSSSMAPKLIADSLYEGRTISYECCMAQLFGAHFLGGVEIILLTVMAYDRYVAICKPLHNTTIMTRHLCAMLVGVAWLGGFLHSLVQLLLVLWLPFCGPNVINHFACDLYPLLEVACTNTYVIGLLVVANSGLICLLNFLMLAASYIVILYSLRSHSADGRCKALSTCGAHFIVVALFFVPCIFTYVHPFSTLPIDKNMALFYGILTPMLNPLIYTLRNEEVKNAMRKLFTW

SEQ ID NO: 923148 - protein, 240 aa, Homo sapiens
MGLRKIFAPPTAPVKSGEQERENENWLVPSSVATERLTLALAFVDCKHALAPVRCAEDLGGFLGACQDVGTELHCSAVLARAMANLVADRSKGSQGSSPKVGKCYKCRKIGRFGKEHRQTSGQKGFYNAVPPQEKKMPGLCPRTPGNRIRSPREQITLIERNKLTKIPIGIWGPLPTGYIGFISGKGHVNLEGITVILGVDFDCEGEIRVVVMSQNPWVFETGECIPQLLLIPCKLHLSL

SEQ ID NO: 923149 - protein, 137 aa, Homo sapiens
MTVYKCHGKIRKTLPWGLDWDRFLVTGPPSSRLQNGRSNSSLHPALGKATGTQLQPVKAAQGAEPCKATGQSCPRPSEPTLVPVCPGCRTQKSKEIKILWLPFWVSDLHGAYCPFLLANFSLLGCKCLPDVSTSVVS

SEQ ID NO: 923150 - protein, 150 aa, Homo sapiens
MPFFSLFLILASCLHPLCTSPRDPASALGCNIPPAKGSSENLQLVPSIGLFVPGSKCFGINAGMVNSLPHAFTASIQPPIPWWLKKGTPGLDRDNEMEIDWRFGRQVFERRRRKCEGHMLELTMLCPRNQEEASPIPFTSETPVESITTT

SEQ ID NO: 923151 - protein, 148 aa, Homo sapiens
MSYLGSIDGASALSAFLEQGSLWMPLFGSGSSEVPDKKEARWEKELTQNWCEVPFPCSESTLTALLSAGEVTLMGTQVGAEGCKRMKLAVLDFWQYLEAFLVVTTGEGATGIYCILTRQEGKFLPSEECMRPLYKGLNHTHEGGALVT

SEQ ID NO: 923152 - protein, 121 aa, Homo sapiens
MYGFYCVEDFKYRQLLNECSHYPRKQRLEDGKIQQNVEDYGVGILTPPLTFCADLTSAASSVKGLLLPPKPCWASGLAPVLPSAAVLGAEWEDDPGKLLPVKVPGSPCQGCCVIIFNSTNI

SEQ ID NO: 923153 - protein, 178 aa, Homo sapiens
MILFAFHNHMMKISTIFPFADGLPSSVLFPGHTAAPSWVRVRPRLLKTKQRTAVCLLHVALSNLPQPLSPAYFYHILPCSLGPCPWTEAQLPECAVLVHTSGPLPVQLCLYLLTHLLNSCSSSKTQLKSLLIHPLRAELIAPSFEPASHFEQLYWSTYHGVLKLFIPVSVSPRRLGTS

SEQ ID NO: 923154 - protein, 185 aa, Homo sapiens
MDLESTGVPCPGSCSLWKAAGAGMPNGLNELLGDSLSLVNAEPTLTVRPNPTANNRAALGGSGLPVPGTGSGRGGCRCGSSARSAKLLCLGGRGHWATCSRGCPQAGLPGFLTARLAGNDAALWHSEKPPTHWFSSQPAPTAHRNLQPPSLPQLSLCGPHYPTFCRAQLPYPLYRLSGAMVPMLP

SEQ ID NO: 923155 - protein, 142 aa, Homo sapiens [sequence omitted]

SEQ ID NO: 923156 - protein, 207 aa, Homo sapiens
MVCAFVSRQIGSKRGHPLLAAPWSPSRVWGPFLSTLETWGTAGRPDATDGSAAAGTLLVGVCEAHSGCPGAAPAPPSLRQQAKQTALSSGCCSPGSIRAPAAAQLGSRHSPGQEAPAGGLRGGLEDTRSEALFSDMGQQLRTVAGGSLMRLRVRKIGDANHLHREHKAHQMLPRLRGLASHWCWPTLASTRQSPGGLGRSPPRGKFP

SEQ ID NO: 923157 - protein, 129 aa, Homo sapiens
MQLFIHTFLLPQKLGEKNHRGQVSSPADVLILSALCDAWHTVGAQSTFVGSNVLEGAKSKERTCILFVPNRVQRRQWTDSIWIRAVCPGEPKQLLKTCAKAFDEFKLPALSSIKLRWDFDRGCFESGEN

SEQ ID NO: 923158 - protein, 119 aa, Homo sapiens
MCTVGGAVKQPPALAAEWIPNPHRTAKERVTGCLVKVEFQEVLLEPRVKSAPWVTHSTALNDFPLLDSPESTVGAHLHLVCFTPVSFSRSILEYKLPERRNWVYKSLCKRSEYLNGVGK

SEQ ID NO: 923159 - protein, 217 aa, Homo sapiens
MSTLHDAEVWENYANRNESQIRKIKFAFDVIKIPYQEPSNQGFFNLGTIDIWSWIIICFNVKTEVKSIEMHHEAPSEDLPGDNVGFNVKNMPVEDVHCGNVAGDSKNDPPVETAGLTAQVIILNQPGQISAHCESVLDCHTTQIACKVAELKEKIDCNSGKKLEDDPKLLNADDAAILYMTVAMGVIKAVDKARSSKVSSKQWTRRQGIAKELARYE

SEQ ID NO: 923160 - protein, 154 aa, Homo sapiens
MSPVWQPLRSYIPAWAPWRYKFTIMKTNINIRYQSRDSTLEGPQNNPVIYEDFFYPNDTQSQKLAFHCLGLQIRDRFRISAQRRGLDPLAEPVQWGPTRPTRPNLDPTNEGTMIRPSYSTIHWGPGIQKQGNHIPSFCPDLTINSAPLNHKKML

SEQ ID NO: 923161 - protein, 139 aa, Homo sapiens
MPGTMPAASQLASRIQLFTPASKWEGLLFKKNSLKKLSRKPQEKPNYPGLLNSSPSTICSPKQMPLHSASELRLCSPEEMSAGKKPAQASEDIASPVTVDLIVSVIAICPDSFHQLRQSSFAFRVNLCEGDSGSGLPVD

SEQ ID NO: 923162 - protein, 144 aa, Homo sapiens
MPEPPPNPHSGLLSRPSLPKERSSLLHGPGPIYRPKAEECQCTAQDWQAAPSVAPVQDPLGEASWAPEFTPEPARPRTHQKEETLNTCEHQKEQTPDTLLLRTVTLTAGVRGFILEVSETKKPPIPDTIVIEINHKGRAHYFYY

SEQ ID NO: 923163 - protein, 152 aa, Homo sapiens
MYYVPKEKLISYASVSGQNRAKVDSKGVTSEGSVEIAALEEAVVSTEEMLSEHAIAPDVRSRNRAGVCTLIPSLYFQPFPNASPDVFSWQLPITVAQSKWRAHCTLVHKLEMNKAVKYDDIPQQWKDSGFNPGPFHSKEVSAFAKAKKLHWL

SEQ ID NO: 923164 - protein, 143 aa, Homo sapiens
MPAVTDDDDDDDNDDDDNDDSRAPPFFNFRGCMKKSRQKPAAGAEPSWRTSTTAERKCGVGPPHRVLTEALSSGAVRRGPLFSRPWNGRFAGCFHPVPRKATSTQCKHSRAAVGAELCKATGTKLPKALGVHPLHQYALDMGH

SEQ ID NO: 923165 - protein, 154 aa, Homo sapiens
MLLNPFQSSAAYQKLTLNVNTWHTDVGKDKNNIGKYNSLTQREKRDQTNKKGCDTYWYIFVDYNNKPKKKLKINEKEKHQARKKVKHRSKRTTFRRLFVIISEKVTVIWTREVMILGSILDFESRNNRICWSIEYLDGIRERRFLRGFGSGKME

SEQ ID NO: 923166 - protein, 154 aa, Homo sapiens
MLDKPFKIMRDAHGAPPVLVFSPSTQQGHCSDLTRDWLLRFSVLLLSDLIGGRGWSPIKQRKGPREGHNWRNWLFYKGFDWNGMLTGFLKNPVLSKGPQEKRNLPNSQADLEYSCEVISDLWLLLKRNKKDGNDIPAQVSADSVLAVYLETLQR

SEQ ID NO: 923167 - protein, 138 aa, Homo sapiens
MPKTVKLRSGNVCILLRNIEPLEASNDGGRRRGNLRITWQKQEQERGEEVPHTFKRPDLMKTHYFRVYPQFGLPHDQTPVTHFRQEQHESDVMSSIHYIRSHIMSICPITDGPKCMQVPFQHSLSSFPGAAAALEQIC

SEQ ID NO: 923168 - protein, 137 aa, Homo sapiens
MAKELMPLGYSKKMGDILSSVILSHTVSQCEIQGLGGSRCSSVSWIPQEEIAWQEDCPHSTKDSATITFISAAKAFPKTTNFPATMLWYPKRGKQPQMALVSTNATRAKSRMHVEDGESDFQSIIHNIVRTKTRFIQ

SEQ ID NO: 923169 - protein, 144 aa, Homo sapiens
MACGIASLCSPLNFSGELCLEMHILSQVLSSEPSFLLPPSGSQSHLQKNSSLLALQDVERQSPPNSSRFTGGFHVGHLLLISQPVVSLTACQIPQVPWIQNQIHSLTLHQFLFRLVFSFPSLSTHSVINTYIYEERERGRLIDF

SEQ ID NO: 923170 - protein, 178 aa, Homo sapiens
MRLVVGVGEIWGRAHSCSPFCASVKAVLFSTFSEVLFLHLLGLPLLLGTGRGLRFSQGPICTAWGLLASSSRSAVASNDSFHIGTPSVCLAAIGTWITLCDKEMGALSYLAGKRQSMASNFGLAGSKVPSPSSIPNTVMIVLETGPLPKPASSSWCQEGPTPFWARQCVGPASGRPGW

SEQ ID NO: 923171 - protein, 143 aa, Homo sapiens
MQDHYHHQLSQLEPTDSQAHSQWGLSNNSIVHGLEKAHGERCPPGLAQVRDKSEATSGADPGSYPGAHEGPASCLHIYSSGALWCYQEAAGKRRRPESVPGQCFLHSCSFLTLKNGLHDPQNGLLVVTFGRAHADFLKNLLES

SEQ ID NO: 923172 - protein, 133 aa, Homo sapiens
MGRDAKASGSVAFCIHFSGFQIGGNLEADVRREGVRPAFTVQPWPTLRDEGVGSFFLTGLVPLASVGVTLEPSEQLMAAILKTADVIQQLTLLYTCTLQRHTGLRLACRLSSEEFLMSTAQKTRCSEDSCHQC

SEQ ID NO: 923173 - protein, 144 aa, Homo sapiens
MGFFGIMGQDGMSQSNEGPYRSGAQWIKLLAQRHLQCHLGGYGKTTAVIVEIGHWSLQKASWKGHSLAGGADSQGLGWSIPCPPAHNTHTQAIARPSLVDLIACLMAPPLASYESDLGGCLWSEISGSPRSHSVPKEFCLAVGI

SEQ ID NO: 923174 - protein, 228 aa, Homo sapiens
MGMIYKCQQGSLLAAAMFMNEQTSGASGKQEMQGLVGVMTPQIRMILHQNKNTVTYMRSLGDCCLVVINERFPINLGCSKQLYAWERECMRIFQRAFSLETENINGSGGKKIKVTEYGNHHFGVYENHILLTPCYAMGLSEVMRQVPECQMSALLYTYVCSCPGPPAGWQLEIGHSRSIYTTEIGKHYEVGLPPTLHRELVVKHLPACHLLQGKKKFLYALVLTAANN

SEQ ID NO: 923175 - protein, 135 aa, Homo sapiens
MTGGHPFPSPSAAREDQRVGCSLPPRRFSCCLLRFNSPCKGGPGPNICFIKGVGVLETQKLLSVAPFYGLYRSQRGRPPADSVQGHRTLRAFPFSILFLLHSSQGLESLEPKDWDLNPSSDMGQFTPQFSSIESE

SEQ ID NO: 923176 - protein, 156 aa, Homo sapiens
MGLDTEKETDGEDPENISDMVSSLRDALTLTASSYLEPEKAQGQKVLKPGPLAKQANQVTQVTLPGSCQSDGDRDPVGSSPGNRVGTPKQKRRGQSNLKTGHRQGGLLETLPKGPPTAFLCFRDRGAQQLRKQSWGSGLSQWVHQTGESRQLLKLE

SEQ ID NO: 923177 - protein, 157 aa, Homo sapiens
MVTCYAKQTQSLPLECKQRASERSHPTETRSRNKKASRCRGRRRSSICTMGRGQRPSHTHPLPDGETSQHNSNRIVTPVPSSTYPFYRAVVLNPKPQGAILLPRGYLAMSGAIFGCHNWGQGMCQWHLVGRVQGCAKCSTVHATALHNHELSGSKCQ

SEQ ID NO: 923178 - protein, 124 aa, Homo sapiens
MNIKRGKFLDHTCKVSLAHIYLGIWGSYLQRQLICMDESHGYCSLIMMVVCFTTNMCLMAVWFNTEVAHIIGEGVRFQCEGHIKDISELYSFVSNIRYFFREADNSFQILEEYLNVVCYSQCNS

SEQ ID NO: 923179 - protein, 137 aa, Homo sapiens
MLERGGILDFPLIVAGWILKKETEAIDGGNGKVARTGEKEDRFRRIKYVGEWDSGVLGAEPLQRVPTRAMPSGAPGVGPSRPQNYRATSVQYQPEKVTGIKLQLVVRGLLEANLAPLEGVRVWEEQVRSGELPHFGQ

SEQ ID NO: 923180 - protein, 116 aa, Homo sapiens
MLERGGILDFPLIVAGWILKKETEAIDGGNGKVARTGEKEDRFRRIKYVGEWDSGVLAINEEFFFTCRAFIHFNNLFMLFPLFAIILSDEFVCEQRHLKRKKGIGEKTDMLKLLFA

SEQ ID NO: 923181 - protein, 149 aa, Homo sapiens
MIVRPPQPHGTLKIAFTIFRGLYTIQQMYWVLTVSVKAHRDWHREGYQPQHEEGDHQDRKNGLPSIPCPTILPLPLSGFSWCDREKHPIHSPSIPQMTSKFPSLLPMDSDTKDASFIQRLTCFRVARWLQQFQASHLCSQKAGKSYGNG

SEQ ID NO: 923182 - protein, 123 aa, Homo sapiens
MYRSFSEGREREEASSTCLTTYYCLSSFAANEGDADLNNVNQGSTCISPTGPHLEHICKVEQTKQKSGPEPGREAASSRDVSPAPSTDKAYRGAQCKGQMLYTSLWQSSQCSFDGTINNPFIT

SEQ ID NO: 923183 - protein, 139 aa, Homo sapiens
MQTVFDAHPPLVVAAAQHVPLAKEKAHKEAELCGCLGGDSPACRKGSATIAAEHQDGPENLRRTATMPAVVTLSQSKAHVMGWQEPRALPRRLTCQKENEVEKHEKQDRQRSHREQSLAVTPTVSSSRPQEPTRHSHQM

SEQ ID NO: 923184 - protein, 140 aa, Homo sapiens
MCIIQPPQTLPQNCKQQRNIFITISYSTNDNSRFSGLWYPQLYQWPAEFSGLRPQTESSIITFLVLKHSDLDLATLLAFLVLQLADDLSMDFSIFIILSLTNTIGNDFTTVELDTTEVYVYPIKQNKTIWFYSNQAKYRL

SEQ ID NO: 923185 - protein, 178 aa, Homo sapiens
MGAHLLHHCDPDLVEFCGSETTWLPGFSPLPMGVDESPASQKFPEPEDASTPGSQSLPKQPPTCTAAKNLPSSVLETQGPGGMGLRGDFLTNWLQGSMGKVWFFMERTRKIKEVMVLHCDFQCTLLKEYGFHKSWSKEVGPDLKQRVLDLQPVYSLFARSSPSAQISRNHIPKIALLR

SEQ ID NO: 923186 - protein, 153 aa, Homo sapiens
MFKALNQNIVLLRSPPRNQRGQNPPYCKWRKLPKSPPRPPSLQALSGLKAGIHRGTWLSPVSIKATWQIAENEAGFISREEPQLTHLLDKNGCQDPFNNYCHQHTNSLSPIHSRWFSPSGNSNVSRGTGLERVSYKDLHTGGINSNMPEYVGS

SEQ ID NO: 923187 - protein, 184 aa, Homo sapiens
MAEGLRVPGKPLVKVQDSKGQKPWGLMSKGGRNGLKHPVFQAMELPQQKPPQGDKPCLFWASPVEGGIPGSWSSLWTHEPHPCQCTEGTHKSLGALVGRSIAVGNRILRDPKPVGLCGGLSSGSVHTPGSSPCGSVDQRVHEGSSMPRIAKFLGRSVSPQGHSLTHPFPTAGSPPLPRALCQYL

SEQ ID NO: 923188 - protein, 139 aa, Homo sapiens
MRKHLDNSSSSKRRSKRPSRVRLKKSASKPKELAELTASPRKWGQVNAHCQEFLLQHFQNSQEVTDETGSQNLLWLPDVTSALAVLSCHMPKIKTLPMLFLSKALWSSYFGCKRRQMQQCIYRGLRTKTLLKILFRDHK

SEQ ID NO: 923189 - protein, 138 aa, Homo sapiens
MSMFSFVTAQVRMLDAQKSKRGKRQEITKIRAELKETETQKTLQKISGSRSWFFEMINKIDRPLATLIKKKREKNQIDAIKNDKGDITTDTTKVQTTIREYYKHLYANKLENLEEKDKLLDTYTLPRKHFYVGTAKTG

SEQ ID NO: 923190 - protein, 166 aa, Homo sapiens
MQAVCGSTILGSGGQQALPTLPQGSASVKTPCGASYSVYPFGTALVEILSCGEASGDFYSWYKDLVPCVPAMAKTSQGTAQAIISEDTSPKPWQLTNSVGPVGTQKSKIEGSSEGKCEVGAPTQSPTGALPSGAVRRGPPSSRPQNFRSTDNTMHLKKPQILKASL

SEQ ID NO: 923191 - protein, 163 aa, Homo sapiens
MLNRAHRVHVCKKGGKKFFFPGARGRFTILLVIKTDSSLYQPMFYFLAMLATIDLGLSTATIPKMLGIFWFSLREIICDACLIQMFFIHNFTGMESAALVGMAYDHFVAICNPLRYSIILTKKAVSVIGLGVLEGSRRKTLTDDSDGNKTTKINNFKGRMMRA

SEQ ID NO: 923192 - protein, 324 aa, Homo sapiens
MHGTASEFHPSSFLLLGIPGLETLHIWIGFPFCAVYMIALIGNFTILLVIKTDSSLHQPMFYFLAMLATTDVGLSTATIPKMLGIFWINLRGIIFEACLTQMFFIHNFTLMESAVLVAMAYDSYVAICNPLQYSAILTNKVVSVIGLGVFVRALIFVIPSILLILRLPFCGNHVIPHTYCEHMGLAHLSCASIKINIIYGLCAICNLVFDITVIALSYVHILCAVFRLPTHEARLKSLSTCGSHVCVILAFYTPALFSFMTHCFGRNVPRYIHILLANLYVVVPPMLNPVIYGVRTKQIYKCVKKILLQEQGMEKEEYLIHTRF

SEQ ID NO: 923193 - protein, 418 aa, Homo sapiens
MLQMKTLHKASTLWKHRENNYTDCTQPILQLKGHLHTEMGKNQFIKAEQTLREPMFYFLAILSTIDLALSTTSVPRTLGIFWFDAHEINFGACVAQMFLIHAFTGMEAEVLVAMAFDLTFFLIGIPGLEDFHMWISGPFCSVYLVALLGNATILLVIKVEQTLREPMFYFLAILSTIDLALSATSVPRMLGIFWFDAHEINYGACVAQMFLIHAFTGMEAEVLLAMAFDRYVAICAPLHYATILTSLVLVGISMCIVIRPVLLTLPMVYLIYRLPFCQAHIIAHSYCEHMGIAKLSCGNIRINGIYGLFVVSFFVLNLVLIGISYVYILRAVFRLPSHDAQLKALSTCGAHVGVICVFYIPSVFSFLTHRFGHQIPGYIHILVANLYLIIPPSLNPIIYGNTPHAFTLQHLNKTSLLT

SEQ ID NO: 923194 - protein, 321 aa, Homo sapiens
MTILLNSSLQRATFFLTGFQGLEGLHGWISIPFCFIYLTVILGNLTILHVICTDATLHGPMYYFLGMLAVTDLGLCLSTLPTVLGIFWFDTREIGIPACFTQLFFIHTLSSMESSVLLSMSIDRYVAVCNPLHDSTVLTPACIVKMGLSSVLRSALLILPLPFLLKRFQYCHSHVLAHAYCLHLEIMKLACSSIIVNHIYGLFVVACTVGVDSLLIFLSYALILRTVLSIASHQERLRALNTCVSHICAVLLFYIPMIGLSLVHRFGEHLPRVVHLFMSYVYLLVPPLMNPIIYSIKTKQIRQRIIKKFQFIKSLRCFWKD

SEQ ID NO: 923195 - protein, 345 aa, Homo sapiens
MPPLLECNHQYCLNLLQDFGGHPPSPLSPHTMTLGSLGNSSSSVSATFLLSGIPGLERMHIWISIPLCFMYLVSIPGNCTILFIIKTERSLHEPMYLFLSMLALIDLGLSLCTLPTVLGIFWVGAREISHDACFAQLFFIHCFSFLESSVLLSMAFDRFVAICHPLHYVSILTNTVIGRIGLVSLGRSVALIFPLPFMLKRFPYCGSPVLSHSYCLHQEVMKLACADMKANSIYGMFVIVSTVGIDSLLILFSYALILRTVLSIASRAERFKALNTCVSHICAVLLFYTPMIGLSVIHRFGKQAPHLVQVVMGFMYLLFPPVMNPIVYSVKTKQIRDRVTHAFCY

SEQ ID NO: 923196 - protein, 637 aa, Homo sapiens
MLAATDLSLSLSSMPTMVSVHWFNWRSITFNGCLIQMFFIHTFGGVESGVLVAMAFDRFVAIRFPLHYATILTHSVISKIAAAILLRSVGAVLPVPFLIKRLPFCHSNVLSHAYCLHQDAMRLACADTGVNSIYGLLAVIFIIVLDALILLASYILILQAVLSIASQEDRLKALNTFQCLQPTMAIFNNTTSSSSNFLLTAFPGLECAHVWISIPVCCLYTIALLGNSMIFLVIITKRRLHKPMYYFLSMLAAVDLCLTITTLPTVLGVLWFHAREISFKACFIQMFFVHAFSLLESSVLVAMAFDRFVAICNPLNYATILTDRMVLVIGLVICIRPAVFLLPLLVAINTVSFHGGHELSHPFCYHPEVIKYTYSKPWISSFWGLFLQLYLNGTDVLFILFSYVLILRTVLGIVARKKQQKALSTCVCHICAVTIFYVPLISLSLAHRLFHSTPRVLCSTLANIYLLLPPVLNPIIYSLKTKTIRQAMFQLLQSKGSWGFNELTEHLVLDTMKLACSDNKTNVIYGFFIALCTMLDLALIVLSYVLILKTILSIASLAERLKALNTCVSHICAVLTFYVPIITLAAMHHFAKHKSPLVVILIADMFLLVPPLMNPIVYCVKTRQIWEKILGKLLNGL

SEQ ID NO: 923197 - protein, 697 aa, Homo sapiens
MQMFFIHVFGIVESGVLVSMAFDRFVAIRNPLHYVSILTHDVIRKTGIAVLTRAVCVVFPVPFLIKCLPFCHSNVLSHSYCLHQNMMRLACASTRINSLYGLIVVIFTLGLDVLLTLLSYVLTLKTVLGIVSRGERLKTLSTCLSHMSTVLLFYVPFMGAASMIHRFWEHLSPPELCVKSSPSLLVDTLPQRGPEPQGSGVAGPPYFLATKIAVLTDRAPNHGSCLTSAPSWWTLPLIAVYLLSALGNGTILWIIALQPALHRPMHFFLFLLSVSDIGLVTALMPTLLGIALAGAHTVPASACLLQMVFIHVFSVMESSVLLAMSIDRALAICRPLHYPALLTNGVISKISLAISFRCLGLHLPLPFLLAYMPYCLPQVLTHSYCLHPDVARLACPEAWGAAYSLFVVLSAMGLDPLLIFFSYGLIGKVLQGVESREDRWKAGQTCAAHLSAVLLFYIPMILLALINHPELPITQHTHTLLSYVHFLLPPLINPILYSVKMKEIRKRILNRLQPRKVGGAQPWGSTICSWQSQPGLCPFLQEEVYLVFYYTAAELALTSQDTDLPTLPPLFKGKGPSSCSHLPLLAMRSTARKPQMFLSVGSPLAQGSSRNAIQESNPGMGDPKNLLYTPVVVLVPTVQEKVLLLFPQAEGVSPHSQHSWTALSLMHQNFISDTSVSALPSPSTQRHSLHHTAIAIA

SEQ ID NO: 923198 - protein, 210 aa, Homo sapiens [sequence omitted]

SEQ ID NO: 923199 - protein, 138 aa, Homo sapiens
MHASLMCRLALSRTVLLIRPPSPSTGKNDLTNSRGKPIWLWIAQVFPFLRKSQLNIRVFPNFTLSALATSFCIISRVIRPLWGDQRSQGYAGVPKAVLQHRQTFLQQFTPTQLQIAEDSVPLRVLGSFIFLHFYNKRR

SEQ ID NO: 923200 - protein, 136 aa, Homo sapiens
MGTIGEVLVQWEGLACNVNYMEEVTLTTQCSLEKGWDQNEETEQKKHHFYSFSPVLPHADAAEEDLPTCTTQRKKKFAREKGKERSSCGMNVDDVAMDGLMRRHGIHVALLSIHGQAAEINHPSYSPYIAKCAHGS

SEQ ID NO: 923201 - protein, 146 aa, Homo sapiens
MGKKQSRKTGNSKKQSTSPPPKEHSSSPATEQSWRENDFDELREEGFRRSNNSELQEEIQTNGKEVRNLEKKLDEWITRITNAERATPRHIIVRFTKVEMKEKMLRAAREKGRVTHKGKSIRLTADLLAETLQARREWGPTFNILK

SEQ ID NO: 923202 - protein, 231 aa, Homo sapiens
MGTCLKCYQGYGQAASSALMLTALMRLQQMKYKCKRKSVKAGPLSDCIEVGRPNRGIMSDRREEMTVVAFSDPVEKASTHPVKVSTRTNRPGGTAINKPNVIRARNREEGNMGKWGECQVDQRDTVIGVRCGIQNNVGGRIEVRARNNGNCGRLNKEAMAATARRHDGQPKTVRSSCLDKKATGRGPSPCVRIPTAQPCTSAVCNEKGWDESGRASVGAVSKAVFKERKEE

SEQ ID NO: 923203 - protein, 174 aa, Homo sapiens
MGECMLSDYFSPSEKKPDAAGSPSYACNYAEECSTHLGVTSPRRAVLLLNKIVLCLPHSSRQCDLILLGRGTRTRHPLSVGTKKAVTSWLSALRWWGQLPHTMEAGHGHPCLGVTAFPLPGHESPPREWLATRLVQPQALHGACLCECTWNGGLDPTLTYSHIPSHRELSRLLQ

SEQ ID NO: 923204 - protein, 163 aa, Homo sapiens
MNSDISIFHFIVCIFQENRCVIFPTLCPGISRISSFQWVLGLADFKNETTDPHASLLTGSSILDCCASSEQGSVGVGPTEPGTGYNLLVCHLLRPLEKRSIMAGVSRFSRASGSQPWPRAFGSQVKNQTTEGSRRTKKGEISVKSPYGQDARQGVRALELGGV

SEQ ID NO: 923205 - protein, 155 aa, Homo sapiens
MVELPRQPLSSTMVELPRQPLSSTMVELIYSPTNSVKAQAPLLQVCWCLLEVHSRPYLPGYHQWRLQNSKDCCLLLPLEASPQRGTRQIPARVRLYEQSLSAVLGDPLLSSQLAAKMPFPERRNLESQSGYSDFAALWWAPPSVNFWQLCLHCEG

SEQ ID NO: 923206 - protein, 136 aa, Homo sapiens
MGIHLLHQHDLDVRGEVKGDCLLNGFDQNANNVIHNEIQVEVFSDGDEELVGIWSKEITKQQSVQEMTWVLLKSLSFKREKEHKSLENLQPDDATEKKNPFSEEKFKPAAEICIRNEDPNVNHQDNGENVSRAFYC

SEQ ID NO: 923207 - protein, 143 aa, Homo sapiens
MDSFSHLLGLEVEKQNGLGGQRLGGWSSGPGAGSCGEGGWEGEGEVVAGHGGPLCAILWNINLSISAEPHSKGFKWISMYGEWDVICLSALKLGKVDPAAVQAFKKQSPIQLSTSLLLPRARSCVGYLAFQGPVYGVLLSRNV

SEQ ID NO: 923208 - protein, 142 aa, Homo sapiens
MVWLCPHSNLILNSHESWEEPDCVYHQMILTKSKSHQVSIGNSYKGQALTITRNSSCLIYVWKRYVTYCLSKAPSGKHPVHSDAIYISANVSKSTYFGRTNVTFPFITVLRGVVQSYRLSHGALIGMGPRLNTLFQRRQIVN

SEQ ID NO: 923209 - protein, 164 aa, Homo sapiens
MEFNGEIANVTRQKVVRSYSLRKNIWEYFEAYGEKAINFSTYLTGSSLAEYFLEDCIRMTHFVPPPKDKKKKDKDDDGGEDDYIPPEQQRKVLDPVPVGVTKVNIKHYNDGIGSDVDIKQMLQVFKELPKKLHHKQTLSSGKGELAEYVPDSAFTSAAKLVLTA

SEQ ID NO: 923210 - protein, 132 aa, Homo sapiens
MKTRKKLSEKLLCVVGINLTEKLRRDIWKHIESYPEKEISSDKNRKKLSEKLLYKNRKKLSEKLLHDVSIHLTELNISLDSSVWKHCFCSVYELTFQFGNTVVYNLERVISDCIEVYGEKRSIFSQKLEENF

SEQ ID NO: 923211 - protein, 155 aa, Homo sapiens
MPSKATAMERDFCKIVEAGAGEGRGHVVAATNAAPSDLHLLVFTLLGSPLPPGTSDTFSGCDTQGESLHDTEKVPHISGGAECKEQYLKLGPCGAVDAPERDLLMGKENSYLAAGSLGDRTLTHLSERSPASDKHPLFFNGKPSGKPGHHQKIAW

SEQ ID NO: 923212 - protein, 134 aa, Homo sapiens
MTQANPRPRASLQCLGPVSPLVAPSDCGGHYTDEYGRIFNYAGPKTECVWIIELNPGEIVTVAIPDLKGFACGKEYVEVLDGPPGSESLDRICKAFSTFYYSSSNIITIKYSREPSHPPTFFEIYYFVDAWSTH

SEQ ID NO: 923213 - protein, 156 aa, Homo sapiens
MSILLLTDMRLQVRPFTSVNHDFLIYELEIETEKGATSPQSCVPGEWEPLLNTWSPRELRGCSILGVRDESLEGTGKNCSVERIQNLDHLPNTGSSDSEKGLAAQETKMEKQGEKEVENFQPTIHILCGMHITIVTQKVGGEGENLLILPFSVEAS

SEQ ID NO: 923214 - protein, 434 aa, Homo sapiens
MEWNNPWTGRQSSSNGIEWNHRMDSNGIIIERNRMESSSDGNEWNHHRMEMKGMEMNGIVIEWNRMDSLNGIRWNHRMDWNGIIEWTRKGSLLNGIEWNHRMVSIGIIIKWNRMESPNRIEWNNHRMDSNGIILQWNRMELSNAIKWNYRMQSNRIIEWTRMESSNGMEWNKTNGIIIEWNRMVSTPNGKKRNYRMESKRIFERTRMESSNGMEWSNPWTRMQSSSNGIEWNHRMDSNGIIIERNRMEASSDGNEWNHHRMEMKGGIEWNQSNGIIIKWNRMESTSNGKKRNYRMESKRIIEWTRMESSNRMEWNNPWTRMQSSSNGIEWNHRMDSNGIIIERNRMESSSDGNEWNHHRMEMKGNRMELSSNGIEWNQYQTEKNGIIEWNRRESSNGPEWNHLMEWNGIIHGLECNHHRMESNGIIECTRMNNH

SEQ ID NO: 923215 - protein, 350 aa, Homo sapiens
MESKRIFERTRMESSNGMEWSNPWTRMQSSSNGIEWNHRMDSNGIIIERNRMESSSDGNEWNHHRMEMKGMEMNGIVIEWNRMDSFNGIRWNHRMDWNGIIEWTRKGSLLNGIEWNHRMVSIGIIIKWNRMESPNRIEWNNHRMDSNGIILQWYRMELSNAIEWNYRMQSNRIIEWTRMESSNGMEWNKTNGIIIEWNRMVSTPNGKKRNYRMESKRIFERTRMESSNGMEWNNPWTRMQSSSNGIEWNHRMDSNGIIIERNRMESSSDGNEWKHHRMEMKGNRMELSSNGIEWNQHQTEKNGIIEWNRRESSNGPEWNHLMEWNGIIDGLECNHHRMESNGIIEWTRME

SEQ ID NO: 923216 - protein, 289 aa, Homo sapiens
MESKRIFERTRMESSNGMEWNNPWTRMQSSSNGIEWNHRMDSNGIIIERNQMESSSDGNEWNHHRMEMKGRIIEWTRMESSNGMEWNNPWTRMQSSSNGIEWNHRMDSNGIIIERNRMESSSDGNERKSNGIIIEWNRMESTPNGKKRNYRMESKRIFERTRMESSNGMEWNNPWTRMQSSSNGIEWNHRMDSNGIIIERNRMESSSDGNEWNHHRMEIKRNRMELSSNGIEWNQHQTEQNGIIEWNRRESSNGPEWNHLMDWNGIIHGLECNHHRMESNGIIKWTRME

SEQ ID NO: 923217 - protein, 169 aa, Homo sapiens
MESKRIFERTRMESSNGMEWNNPWTRIQSSSNGIEWNHRMDSNGIIIERNRMESSLDGNEWNHHRMEMKGESSSNELNAIIEWSRMESSSNGMEWNRRIESNGIIIEWNRMVSTSKGKKRNYRMESKRIIEWTRMESSNGMEWNGIIHGLECNHHRMESNGIIEWTRME

SEQ ID NO: 923218 - protein, 418 aa, Homo sapiens
MEWNNPWTRMQSSSNGIEWNHRMDSNGIIIEQSNGIIIEWNRMESTSNGKKRNYRMESKRIIEWTRMESSNGMEWNNPIEWNNHRMDSNGIILQWNRMELSNAIEWNYRMQSNRIIEWTRMESSNGMEWNKSNGIIIEWNRMVSTPNGKKRNYRMESKRIFERTRMESSNGMEWNNPWTRMQSSSNGIEWNHRMGSNGIIIERNRMESSSDGNEWNHHRMEMKGRIIEWTRMESSNGMEWNNPWTRMQSSSNGIEWNHQMDSNGIIIERNRMESSSDGNERIEWNYHRMESNGINIKRKKTELSNGIEENHRMDRMESSNGMEWNNPWTRMQSSSNGIEWNHRMDSNGIIIERNEWNHHRMEMNGIIIEWNRTELWNEIQCDHHRMDPNGIIIQRKLMESTSNESNGNTIELKRMELP

SEQ ID NO: 923219 - protein, 230 aa, Homo sapiens
MEWNNPWTRMQSSSNGIEWNHRMDSNGIIIERNRMESSSDGNEWNHHRMEMKGNRMELSSNGIQWYQHQTEKNGIIEWNRRESSNGPEWNHLMEWNGIIHGLEGNHHRMESNGIIEWTRMESSSNGKEWNHRIESNGIIIEWNRMVSTPNGKKRNYRMESKRIFERTRMESSNGMEWNNPWTRMQSSSNGIEWNHRMDSNGIIIERNRMESSSDGNEWNHHRMEMKGVII

SEQ ID NO: 923220 - protein, 956 aa, Homo sapiens
MESKRIIEWTRMESSNGMEWNNPWTRMQSSSYKIEWNHRMDSNGIIIERNRMESSSDGNEWNHQRMEMKGMEMNGIVIEWNRMDSLNGIRWNHRMDWNGIIEWTRKGSLLNGIEWNHRMNNHRMDPNGIILQWNRMELSNAIEWNYRMQSNRIIEWTRMESSNGMEWNKSNGIIIEWIRKVSTSNGKKRNYRMESKRIFERTRMESSNGMEWNNPWTGRQSSSNGIEWNHRMDSNGIIIERNRMESSSDGNEWNHHRMEMKGRIIERTRMESSNGMEWNNPWTRMQSSSNGIEWNHRMDSNGIIIERNRMESSSDGNEWNHHRMEMKGRIIEWTRMQSSNGMEWNNQWTRMQSSSNGIEWNHRMNSNGIIIERNRMESSSDGNEWNHHRMEMKGRIIEWTRMQSSNGMEWNNPWTRMQSSSNGIEWNHRMDSNGIIIERNRMESSSDGNEWNHHRMEMKGNHRMDSNGIIEWNGMEQSMNSNGIIIEWNRMESSRMESSHRIEWNYHRMESNESTSNGKKRNYRMESKRIIERTRMESSNGMEWNNPRTRMQSSSSGIEWNHRMDSNGIIIERNRMESSSDGNECNHHRMEMKGMEMNGIVIEWNRMDSLNGIRWYHRMDWNGIIEWTRKGSLLNGIEWNHRMVSIGIIIKWNRMESPNRIEWNNHRMDSNGIILKWNRMELSNAIEWNYRMQSNRIIEWTRMESSNGMEWNKSNGIIIEWNRMVSTPNGKKRNYRMESKRIFERTRMESSNGMEWNNPWTRMQSSSNGIEWNHGMDSNGIIIEWNRMESSSDGNEWNHHRMEMKGNHRMDSNGIIEWNGMEQSMNSNGIIIEWNRMESSSGIEWNYDQMESNEWNHRIESNGIIIEWNRMVSTPNGKKRNFRMETKRIFERTRMELSNGMEWNNPWTRMQSSSNGIEWNHRMDSNGIIIERNRMESSSDGNEWNHHRMEMKGVII

SEQ ID NO: 923221 - protein, 204 aa, Homo sapiens
MESKIIIEWTRMESSNGMEWNNPWTRMQSSSNGIEWNHRMDSNGIIIERNRMESSSDGNEWNHHRMEMKGRIIERTRMESSNGMEWNNPWTRMQSSSNGIEWNHRMDPNGIIIERNRMESSSDGNEWNHHRMEMKGNRMELSSNGIEWNQHQTEKNGIIVWNRRESSNGPEWNHLMEWNGIIHGLECNHHRMESNGIIEWTRME

SEQ ID NO: 923222 - protein, 403 aa, Homo sapiens
MEWNNPWTRMQSSSNGIEWNHRMDSNGIIIERNRMQSSSDGNEWNHHRMEMKGRIIEWTRMESSNGMEWNNPWTRMQSSSNGIEWNHRMDSNGIIIERKRMESSSDGNERKSNGIIIEWNRMESTSNGKKRNYRMESKRIIEWTRMESSNGMEWNNPWTRMQSSSNGIEWNHRMDSNGIIIERNRMESSSDGNEWNQSNGTIIEWTQMELSSNGIEWNYRMQSNRIIEWTRMESSNGMEWNKSNGIIIEWNRMVSTPNEKKRNYRMESKRIFERNRMESSNGMEWNNPWTRMQSSSNGIEWNHRMDSNGIIIERNRMESSSDGNEWNHHRMEMKGNRMELSSNGIEWNQHQTEKNGIIEWNRRESSNGPEWNHLMEWNGIIHGLECNHHRMESNGNIEWTRME

SEQ ID NO: 923223 - protein, 248 aa, Homo sapiens
MEWNNPWTRMQSSSNGIEWNHRMDSNGIIIERNRMESSLDGNEWNHHRMEMKGRIIEWTRMESSNGMEWNNPWTRMQSSSNGIEWNHRMDSNGIIIERNRMESSSDGNERKSNGIIIEWNRMESTSNGKKRNYRMESKRIIEWTRMESSNGMEWNNPWTRMQSSSNGIEWNHRMDSNGIIIERNEWNHHQMEMNGMIIEWNRIELWNEIQCDHHRMDPNGIIIQRKLMESTSNESNGNTIELKRMELP

SEQ ID NO: 923224 - protein, 1639 aa, Homo sapiens
MKLKWMDSSSNGFEWNHRIKLIEIIIEWNRMISLNGIEWNHHQMEMNGINHRMDSNGIIEWNGMEQSMNSNGIIIEWNRMESSSGIEWNYDQMESNMEMNGIVTEWNRMDSLNGIRWNHRMDWNGIIEWTRKGSLLNGIEWNHRMVSIGIIIKWNRMESPNRIEWNNHRMDSNGIILQWNRMELSNAIEWNFRMQSNRIIEWTRMESSNGMEWNKSKGIIIEWNRMVSTPNGEKRNYRMESKRIFERTRMESSNGMEWNNPWTGRQSSSNGIEWNHRMDSNGIIIERNRMESSSDGNEWNHHRMEMKGNRMELSSNGIEWNQHQTEKNGIIEWNRRESSNGPEWNHLMEWNGINHGLECNHHRMESNGIIENHRIKLIEIIIEWNRMVSLNGIEWNHHQMEMNGIVIEWNRMDSLNGIRWNHRMDWNGIIEWTRKGSLLNGIEWNHRMVSIGIIIKWNRMESPNRIEWNNHRMDSNGIILQWNRMELSNAIEWNYRMQSNRIIEWTRMESSNGMEWNKSNGIIIEWNRMVSTPNGEKRNYRMESKRIFERTRMESSNGMEWNNPWTGRQSSSNGIEWNHRMDSNGIIIERNRIIIEWTRMESSNGMEWNNPWTRMQSSSNGIEWNHRMDSNGIIIERNRMESSSDGNEWNHHRMEMKGNRMELSSNGIEWNQHQTEKNGIIVWNRRQSSNGPEWNHLMDWNGIIHGLECNHHRMESNGIIEIEWNNHQMDSNGIILKWNRMELSNAIEWNYRMQSNRIIEWTRMESSNGMEWNKSNGIIIEWNRMVSTPNGKKRNYRMESKRIFERTRMESSNGMEWNNPRTRMQSSSNGIEWNHRMDSNGIIIERNRMESSSDGNEWNHHRMEMKGNHRMDSNGIIEWNGMEQSMNSNGIIIEWNRMESTSGIEWNYDQMESNMEINGIVIEWNRMDSLNGIRWNHRMDWNGIIEWTRKGSLLNGIEWNHRMVSIGIIIKWNRMESPNRIEWNNHRMDSNGIILQWNRMELSNAIEWNYRMQSNRIIEWTRMESSNGMEWNKSNGIIIEWNRMVSTPNGKKRNYRMESKRIFERTRMESSNGMEWNNPRTRMQSSSNGIEWNHRMDSNGIIIERNRMESSSDGNERNHHRMEMKGNRMELSSNGIEWNQHQTEKKGIIEWNRRESSNGPEWNHLMEWNGIIHGLECNHHRMESNGIIEWNHRMDWNGIIEWTRKGSLLNGIEWNHRMVSIGIIIKWNRMESPNRIEWNNHRMDSNGIILKWNRMELSNAIEWNYRMQSNRIIEWTRMESSNGMEWNKSKGIIIEWNRMVSTPNGKKRNYRMESKRIFERTRMESSNGMEWNNPWTGRQSSSNGIEWNHRMDSNGIIIERNRMESSSDGNEWNHQRMEMKGNRMELSSNGIEWNQHQTEKNGIIEWNRRESSNGPEWNHLMEWNGINHGLECNHHRMESNGIIEWNHRMDWNGIIEWTRKGSLLNGIEWNHRMVSIGIIIKWNRMESPNRIEWNNHRMDSNGIILQWNRMELSNAIEWNYRMQSNRIIEWTRMESSNGMEWNKSNGIIIEWNRMESTSNGKKRNYRMESKRIFERTRMESSNGMEWNNPWTRMQSSTNGIQWNHRMDSNGIIIERNRMESSSDGNEWNHHRMEMKGIII

SEQ ID NO: 923225 - protein, 272 aa, Homo sapiens
MESKRIFERTRMESSNGMEWNNPWTRMQSSSNGIEWNHRMDSNGIIIERNRMESSLDGNEWNHHRMEMKGRIIEWTRMESSNGMEWNNPWTRMQSSSNGIEWNHRMDSNGIIIERNRMESSSNHRMDSNGIIEWNGMEQSMNSNGIIIEWNRMESSSGIEWNYDQMESNEWNHRIESNGIIIEWNRMVSTPNGKKRNYRMESKRIFERTRMESSNGMEWNNPWTRMQSSSNGIEWNHRMDSNGIIIERNRMESSLDGNEWNHHRMEMKGVII

SEQ ID NO: 923226 - protein, 826 aa, Homo sapiens
MESKRIFERTRMESSNGMEWNNPWTRMQSSSNGIEWNHRMDSNGIIIERNRMESSLDGNEWNHHRMEMKGRIIEWTRMESSNGMEWNNPWTRMQSSSNGIEWNHRMDSNGIIIERNRMESSSDGNEWNHHRMEMKGRIIEWTRMESSNGMEWNNPWTRMQSSSNGIEWNHRMDSNGIIIERNRMESSSDGNEWNHHRMESNRIIIEWNNHRMDSNGIILKWNRMELSNAIEWNYRMQSNRIIEWTRMESSNGMEWNKSNGIIIEWNRMVSTPNGKKRNYRMESKRIFERTRMESSNGVEWNNPWTGRQSSSIGIEWNHRMDSNGIIIEPNRMESSSDGNEWNHHRMEMKGNRMELSSNGIEWNQHQTEKNGIIEWNRRESSNGPEWNHLMEWNGIIHGLECNHHRMESNGIIEWNHRMDWNGIIEWTRKGSLLNGIEWNHRMNRMEQSSNGLKWNYPPMESNGIIEWNGMEQSMNSNGIIIEWNRMESSSGIEWNYDQMESNNRMELSSNGIEWYQHQTEKNGIIEWNRRESSNGPEWNHLMEWNGIIHGLEGNHHRMESNGIIEWTRMESSSNGKEWNHRIESNGIIIEWNRMVSTPNGKKRNYRMESKRIFERTRMESSNGMEWNNPWTRMQSSSNGIEWNHRMDSNGIIIERNRMESSSDGNEWNHHRMEMKGNHRMDSNGIIEWNGMEQSMNSNGIIIEWNRMESSSGIEWNYDQMESNEWNHRIESNGIIIEWNRMVSTPNGKKRNYRMESKRIFERTRMESSNGMEWNNPWTRMQSSSNGIEWNHRMDSNGIIIERNRMESSSDGNEWNHHRMESNRIME

SEQ ID NO: 923227 - protein, 250 aa, Homo sapiens
MKLKWMDSSSNGFEWNHRIKLIEIIFEWNRKVSLNGIEWNHHQMEMNGIVIEWNRMDSLNGIRWNHRMDWNGIIEWTRKGSLLNGIEWNHRMNHRMDSNGIIEWNGMEQSMNSNGIIIEWNRMESSSGIEWNYDQMESNEWNHRIESNGIIIEWNRMVSTPNGKKRNYRMESKRIFERTRMESSNGMEWNNPWTRIQSSSNGIELNHRMDSNGIIIERNQMESSSDGNEWNHHRMEMKGVIIKWNCMESS

SEQ ID NO: 923228 - protein, 138 aa, Homo sapiens
MESKRIFERTRMESSNGMEWNNPWTRMQSSSNGIKWNHRMDSNGIIIERNRMESSSDGNEWNHHRIEMKGNRMELSSNGIEWNQHQTEKNGIIEWNRRESSNGPEWNHLMEWNGIIHGLECNHHRMESNGIIEWTRME

SEQ ID NO: 923229 - protein, 138 aa, Homo sapiens
MESKRIFERTRMESSNGMEWNNPRTRMQSSSNGIEWNHRMDSNGIIIERNRMESSSDGNERNHHRMEMKGNRMELSSNGIEWNQHQTEKNGIIEWNRRESSNGPEWNHLMEWNGIIHGLECNHHRMESNGIIEWTRME

SEQ ID NO: 923230 - protein, 726 aa, Homo sapiens
MESKRIFERTRKESSNGMEWNNPWTRMQSSSNGIKWNHRMDSNGIIIERNRMESSLDGNEWNHHRMEMKGSNGIIIEWNRMESTSNGKKRNYRMESKRIIEWTRMESSNGMEWNNPWTRMQSSSNGIEWNHRMDSNGIIIERNRMESSSDGNERKSNGIIIEWNRMESTSNGKKRNYRMESKRIIEWTRMESSNGMEWNNPWTRMQSSSNGIEWNHRMDSNGIIIERNEWNHHRMEMNGMIIEWNRIELWNEIQWNHRMDWNGIIEWTRKGSLLNGIEWNHRMVSIGIIIKWNRMESPNRIEWNNHRMDSNGIILQWNRMELSNAIEWNYRMQSNRIIEWTRMESSNGMEWNKSNGIIIEWNRMVSTPNGKKRNYRMESKRIFERTRMESSNGMEWNNPWTRMQSSSNGIEWNHRMDSNGIIIERNRMESSSDGNEWNHHRMEMKGRIIEWTRMESSNGLEWNNPWTRMQSSSNGIEWNHQMDSNGIIIERNRMESSSDGNERKSNGIIIEWNRMESTSNGKKRNYRMESKRIIEWTRMESSNGMEWNNPWTRMQSSSNGIEWNHRMDSNGIIIERNRMESSSDGNERKSNGIIIEWNRMESTSNGKKRNYRMESKRIIEWTRMESSNGMEWNNPWTRMQSSSNGIEWNHRMDSNGIIIERNEWNHHRMEMNGMIIEWNRIELWNEIQCDHHRMDPNGIIIQRKLMESTSNESNGNTIELKRMELP

SEQ ID NO: 923231 - protein, 1014 aa, Homo sapiens
MEWNNPWTRMQSSSNGIEWNHRMDSNGIIIERNRMESSLDGNEWNHHRMEMKGNHRMDSNGIIEWNGMEQSMNSNGIIIEWNRMESSSGIEWNYDQMESNEWNHRIESNGIIIEWNRMVSTPNGKKRNYRMESKRIFERTRMESSNGMEWNNPWTRMQSSSNGIKWNHRMDSNGIIIERNRMESSSDGNEWNHHRMEMKGMEMNGIVIECNRMDSLNGIRWNHRMDWNGIIEWTRKGSLLNGIEWNHRMVSIGIIIKWNRMESPNRIEWNNHRMDSNGIILKWNRMELSNAMEWNYRMQSNRIIEWTRMKSSNGMEWNKSNGIIIEWNRMVSTPNGKKRNYRMESKRIFERTRMESSNGMEWNNPWTRMQSSSNGIEWNHRMDSNGIIIERNRMESSSDGNEWNHHRMEMKGMEMNGIVIEWNRMDSLNGIRWNHRMDWNGIIEWTRKGSLLNGIEWNHRMVSIGIIIKWNRMESPNRIEWNNHRMDSNGIILQWNRMELSNAIEWNYRMQSNRIIEWTRMESSNGMEWNKSNGIIIEWNRMVSTPNGKKRNYRMESKRIYKRTRMESSNGMEWNNPWTRMQSSSNGIEWNHRMDSNGIIIERNRMESSSDGNEWNHHRMEMKGMEMNGIVIEWNRMDSLNGIRWNHRMDWNGIIEWTRKGSLLNGIEWNHRMVLIGIIIKWNRMESPNRIEWNNHRMDPNGIILQWNRMELSNAIEWNYRMQSNRIIEWTRMESSNGMEWNKWNRMDSFNGIRWNHRMDWNGIIEWTRKGSLLNGIEWNHRMVSIGIIIKWNRMESPNRIEWNNHRMDSNGIILQWNRMELSNAIEWNYRMQSNRIIEWTRMESSNGMEWNKSNGIIIEWNRMVSTPNGKKRNYRMESKRIFERTRMESSNGMEWNNPWTRMQSSSNGIEWNHRMDSNGIIIERNRMESSLDGNEWNHHRMEMKGNRMELSSNGIEWNQHQTEKNGIIEWNRRESSNGPEWNHLMEWNGIIRGLECNHHRMESNGIIEWTRME

SEQ ID NO: 923232 - protein, 266 aa, Homo sapiens
MESKRIFERTRMESSNGMEWNNPWTRMQSSSNGIEWNHRMDSNGIIIERNRMESSSDGNEWNHHRMEMKGRIIEWTRMESSNGMEWNNPWTRMQSSSNGIEWNHRMDSNGIIIERNEWNHHWMEMNGIIIKGNRIELWNEIQCDHHKMDPNGINIKWNQMESLNGIEWNQSNGIIIEWNRMESTSNGKKRNYRMESKRIIEWTRMESSNGMEWNNPWTRMQSSSNGIEWNHRMDSNGIIIGRNRMESSSDGNERNHHRMESNRIME

SEQ ID NO: 923233 - protein, 272 aa, Homo sapiens
MESKRIFERTRMESSNGMEWNNPWTRMQSSSNGIEWNHRMDSNGIIIERNRMESSLDGNEWNHHRMEMKGRIIEWTRMESSNGMEWNNPWTRMQSSSNGIEWNHRMDSNGIIIERNRMESSSNHRMDSIGIIEWNGMEQSMNSNGIIIEWNRMESSSGIEWNYDQMESNEWNHRIESNGIIIEWNRMVSTPNGKKRNYRMESKRIFERTRMESSNGMEWNNPWTRMQSSSNGIKWNHRMDSNGIIIERNRMESSSDGNEWNHHRMEMKGVII

SEQ ID NO: 923234 - protein, 185 aa, Homo sapiens
MESKRIIEWTRMESSNGMEWNNPWTRMQSSSNGIEWNHRMDSNGIIIERNRMESSSDGNEWNHHRMEMNGIVIEWNRMDSLNGIRWNHRMDWNGIIEWTRKGSLLNGIEWNHRMVSIGIIIKWNRMESPNRIEWNNHRMDSNGIILKWNRMELSNAIEWNYRMQSNRIIEWTRMESSNGMEWNSQ

SEQ ID NO: 923235 - protein, 193 aa, Homo sapiens
MKLKWMDSSSNGFEWNHRIKLIEIIIKWNRMVSLNGIEWNHHQMEMNGIVIEWNRMDSLNGIRWNHRMDWNGIIEWTLKGSLLNGIEWNHRMVSIGIIIKWNRMESPNRIEWNNHRMDSNGIILKWNRMELSNAIEWNYRMQSNRIIEWTGMEKSMNSNGIIIEWNRMESSSGIECNYDQMESNVIIIKWNQK

SEQ ID NO: 923236 - protein, 137 aa, Homo sapiens
MEADRSQDLQASRNDTQSHTADQDLKEPAAPVTIRRPSLHLHLLAPELSRFCCGLHQQNKMLCETNEMPPLSQRDSVPNQYHELTIAFSGCSNKMSNGHHQEILLPISSIIQEKVSNNRLNINLNLYERTSFHHAPC

SEQ ID NO: 923237 - protein, 143 aa, Homo sapiens
MGSISSYFPFCLGPRDTVLHILAVSVPAIAYSGQGIAWAATPKSASHKSWWLILGVKPASVPNVRVKEAWQLPTRFQRIYEKDCCRGGAPTEILYQGSAEKKEAISEEIMAKNFQKTDEKHQSTELLPKKAQGSEVDNVISDS

SEQ ID NO: 923238 - protein, 132 aa, Homo sapiens
MPQIRNTASLKDWGTQKITTLKSPSAQGAKTAASFPRICKEKSVARLKIISISTKLSGEEKTIGSGDTQRREADNVTTVAEIRVMGPQAKDYLEPSEAERCKEVFFPRASWRDHSPADTLISDFQTPELLKL

SEQ ID NO: 923239 - protein, 141 aa, Homo sapiens
MTFIFSMKPVRTSAEVSNLGKLFLKLGSVTQWKICAPFTAGHSWVLLLAFYSDHGLGFPHAQCPPYPWEVSTRSAFRKLYAYPTEAFFPSPVECTCVDSCGFDSCGWSGDCLLPGAQALAAKLLFLESSVIIVKPSPDTPS

SEQ ID NO: 923240 - protein, 157 aa, Homo sapiens
MFSSLCPCILIVQLPLMSLLVFAGGPFQTLFAWVSPAEAAEQQRLLPVPSSGTCQMPARALLYEVSVDPCLEVSPLIEGTGVRNPLEAICPLAELEHCARRSIALFRAGRDALPIEEESRETVWLQWLCGPAVDSAQSKLPGSFVYTVRENRLLRPQ

SEQ ID NO: 923241 - protein, 162 aa, Homo sapiens
MFEIQNKDSSDIGALSCSESAPPQRNTEPLPGGTAAAAMVEGLWAASGFSSLEKCRSASKCSDGGTEAVVKSQCGHASTPSQWALSCEMQCRAAVANAGMPKDPRLPGLHVCLSGSCTQTPRSSLCQSRGPGGEVHRGSAEPGLQRSMAEVWIPRDSHHFPA

SEQ ID NO: 923242 - protein, 173 aa, Homo sapiens
MWVGTDKRIKAGCLSQQWQLAQVPFHTVEAFFTPEASETTNPLGGMNDPRRNTLRAITLTAKVCSFTPEPARPQTHHKEETPNTSKHQKEQTLDMPPLRTVTLTARVRGFILEVSETKNPPILDTEGSRSNICCSAASTGDTQENRVCSGPQQKGHLQQNSICRSPTSKTKGR

SEQ ID NO: 923243 - protein, 179 aa, Homo sapiens
MRQRRREFAGTIMIPSQLILSYSKEIYPGAAWQGTAGTPSAGTTWASWVPWTADKRQQEVTGSRGLGNGLRPGAWATSSVDPSENLRCLFQGCPWPPRDQSAHTPSPLKPIKIPVLSQTRADNSTTCLQRSCPLWVSSKVFCHSIKHLFTLLTLHPPLVRVPHSSWMQDKNSVPAKWHG

SEQ ID NO: 923244 - protein, 182 aa, Homo sapiens
MLRCACFSFPEAFKSCFLLSLQNCPSSARLLQFAGGPLQTLARGQERLSSLNLSLHRPLPIGSLSQGVESSFCKPLTGAAGFPAEMPHPVRRNLEKQSGHTVRGKPPTKATVMAVSPPLTKPVPGWTPDCCADSGNCKPVVPSFLGSMGVGSTEQDHLAPWLSPLSGGVYRSPVSLEYQAPL

SEQ ID NO: 923245 - protein, 150 aa, Homo sapiens
MYPTKSRPTAFSSMYPPLTVTFTPEISIPIMVPPNLLMPPDKNQKRQRSREAAPLISAAASPKVIFQTSAFHQCPHACKQLPLGNNDFILVFQNSFKCLSLTELTQNYTGKRFLEKKFQMIALSRRSEDAAELIRDNPAHGPIFIHSTGS

SEQ ID NO: 923246 - protein, 134 aa, Homo sapiens
MKETQDLTSPHRYKTFLPTRVPTSFSVIPGQAYGKNLSIFPPQVLDNGRKGFTCDHAVGIILLPLGAKGQKPGERLPQTLLGDWWSQMLGFCGMNDKKHQFEGQRKENCQKVEKRKLIIRGVTLSLSSYVILWK

SEQ ID NO: 923247 - protein, 143 aa, Homo sapiens
MSTVTVERIADCTKHPKKWHNATFTEVKEWSRPCNLAYAARHVGIARCLWQVDFTAKELEETFHWHSYIVEKIEVLRDQYNKAAYSTVVNSLDSGTVKLIISGFNFKSFPKVHCIILMPLCSSHKSVRTYNVWFSIPELLHLE

SEQ ID NO: 923248 - protein, 254 aa, Homo sapiens
MGPAVYLVSPNAITWIPQLKVQNSLPVFTPPCDSCRLQLLLIGYLIWHPLRYFAFRYNFQEGGRGQSCEMSEKVEDNEEYRKSEKDSNKSLGGADAAGSWLIILRNGAISRARCWSLLLANWTLSSGHNQAAQPWPRAVSQKESTYLQKMAEPCSKILEASAVIHLWGPAEGSKQHPYLPLTSQAPLDLLGHMAQMAEQLVQQPGPVAEPSPVLEHTQNRQSLNKWAGVTHLNEECVASKIQVHPLGIVPPSWL

SEQ ID NO: 923249 - protein, 154 aa, Homo sapiens
MLQDMLEPGSPQWALKMGTRRWLNLRASIPTMGPPVVRGDLAEKAEPYSNAPSHPQPETNGEHERLCGDLWGKGQRMKRAMECESCHRYFPQERSTGSVLHPLQQPVKGQVINICPGSLYSGLFKGCSPAIMPLAHTNMQTYSGISSLKIFFMP

SEQ ID NO: 923250 - protein, 140 aa, Homo sapiens
MVPRPAASTAPRSLLELQNLKTYPRPAFNKTLRLYKHVGSQDKWKAKLLTPVSQVVKAKEKFLKEIKSAAPVNTQMMRKQNNLITDMKKILVIWIENQTSHNIPLSQSLIQYNALTLFSSMKAEKDEETAKQFIQMICDY

SEQ ID NO: 923251 - protein, 245 aa, Homo sapiens
MVPPEAPPAWVTEYETATSSDSCLLDANVCRLDFFPHLASKVIPTRQDQDSLFRSLEFLEWHLEDPCSWCPPGFRQVSPFDGHFEGPVPYHSVWSPTSGQFKDSGQQAHGRGKGRFHPADLKQIKADLGKFSDDPYNYTDVLQGLGQSSDLAWKDIMLLLDQTLSPIENEAALAAAQQFGHLWYLSQRTKALWARSTQPDDSATGLRVARASASSCHHPHRAPGCLQNTHFIYRNTRRLKDTPCN

SEQ ID NO: 923252 - protein, 284 aa, Homo sapiens
MGGRAPVSRGRDSYGGPPRREPLPSHRDIYLSPRDDVYSTKDSYSSKDYPSSRDTRDYTPPPQDYTYRDYGHSSSRDDYPSRGYGDREGYGRDLDYSDHPNGGSYRDSYESYGNSSSAGHTRGPLPAYGGSSRYDDYSSSRDGYGGSQTCVLNNYGILKKSLANQKGRRRREEEEEEAEAEEGEEEGGGGGEGGEGEGGGEGGEGGGNCFVSRPSLESLSLGPMQWLSRELNAGAGFDLVNIDTIATWGQLILCYGGAVLCIVRCLASSLVCIRDVAGTPPPQL

SEQ ID NO: 923253 - protein, 135 aa, Homo sapiens
MSKPAHNACQPRAEIPTDIRMCKKSTFTTDEQIKTRSGNETTGPGLNLSSDNAYVSQTLGNFGKVPLTKPWLCYSFSQPCPSHTEIKDGGYGYSGIAKYSLKVKMVQKVSTEGSRDLPFLAIFLEWVRRRWNVET

SEQ ID NO: 923254 - protein, 140 aa, Homo sapiens
MTQSSGLLGSAWINLKPGWGLTWSSSPGVEWASCPLFKEKAEMVDGKNSSRALIGAFYNPLASFRALIGAFLQSTDGAFYNPLSSYGVPIGAFYNPSYRVLIGAFYYPLVRQRSSPSPNLIQAHQRVSGLVQGSLVEVVS

SEQ ID NO: 923255 - protein, 141 aa, Homo sapiens [sequence omitted]

SEQ ID NO: 923256 - protein, 141 aa, Homo sapiens
MKDLCTRDPQLLTCGFCGLVSHLGPEPVLRNEAVKSLTPTFQLWPTREEIESPIIEKEQNQHIDRVKETEVTVAASLGILRQAQSHKHSSCLKLNGQSKSQGLSNWRGFPSFRSNVCRYSKRIGVVNYNQFTTSNYMAIYS

SEQ ID NO: 923257 - protein, 164 aa, Homo sapiens
MGRYLEKKAVLSFTKRGFPKCNEERVISRWKNAHTIKAGIKCELGLLKLADKNIKDESQDPQLQVCWSLLEVHSRPCFAWVSAAEAAEERILVNSKCCCLIIHLEVLSQRSTRPCSYSKHFVYPGSHNARSLCASQISLEPGTRQLETAGDCKIVLTIQTTGSL

SEQ ID NO: 923258 - protein, 200 aa, Homo sapiens
MGVFKKIVESEQLENGSHFLVRAEEPHPGATATPVHEEYCQSTNEFFLVAQGLLCQLVVNAAWPGPQPSGQWAVFWLTAGPEMLDKSLVLELGTPRADLVLCSDVAQMISEASTSRDSPKALSGQRALQLTGDECCQDWVLSLKAAVSLLAQDVSRNVIWELGPGTGASCLCLMPYPAMADLISRMQVKVLPTLPFPLLC

SEQ ID NO: 923259 - protein, 137 aa, Homo sapiens
MKKMRKVQGLIIGVGRGKIMYECISGGQNKCDLCESKLKTKISMQSVDNEYDYDNNNDKSCLELAEALTSAGSGETKIKFGTRKGASIESATLAKSNGEESASVGNRKVSEEDLRLAFYLKMTIFIRKYKNICNVIP

SEQ ID NO: 923260 - protein, 187 aa, Homo sapiens
MDIFKHKHKERKKKERKFQIKEVSKDISRLTGRLAISPEMPVRLEKKQQWSQFALISPGIYVLVKGLALGKMDNLKTEKDEDRVKKSVFWKSSLPLKGGGLCLPWKAVVFGRKRLVGVGVVGCKAVLVWWRAGKAQDAMMDERCICYGRDPMDFHTREWLGVFEQNILTAGPIFNKRSQNYIYNIYI

SEQ ID NO: 923261 - protein, 125 aa, Homo sapiens
MGLVNKSDEASIGISKSHEFNRNATSMFGLVLFLCQKKYIRNLEIRCQDPQHKICIFLVSYRIKTPGTITLCSSSLKSYQTLQASLGDDGIILGEAFTFSRGQFLESDAAGGPQLTMASGGMTID

SEQ ID NO: 923262 - protein, 212 aa, Homo sapiens
MTAAHGETRVKFVLEIPTLLFPGSISSRLDLETIRNAFTKEEKPEGLGPEPQILHWQHTGTQQLDWQQQGLKQLDWQQLDWQQQGLQQLDWQQLDWQQQGLEQLDWQQNDPQPEEEQQGLQQLDWEQPQEPHPPLELPQEPQPPLEPPQEPQLEQEQAGTQQHTGLQQQMGTQQLEPQPPQPEPQPPLPEPQPPQPEPQPPEQPQQPMILAD

SEQ ID NO: 923263 - protein, 290 aa, Homo sapiens
MYLVTVLRNLLIILAVSSVSPLHTPMYFFLSNLCWADIGFTSATVPKMIVDMQSHSRAISHAGCLTQMSFLFLFACIEGMLLTVMAYDCFVAICRPLHYPVIVNPHFCVFFVLVSFFLSLLDSQLHSWIVLQFTIFKNVEISNFVCDPSQLLKLACSDGLDLWRRQLSLGLAQDVDLGTPQKGRSGRLTERRRKAHRMLKLYKGLSEGEALGLPAGPDPLDPTDLNGAHFDPEVYLDKLPRECPLAQLIDSETDMVQQIRALDSDMQTLVYENYDKFIPATEIDKQHKTV

SEQ ID NO: 923264 - protein, 144 aa, Homo sapiens
MLSVSTLLLFPHIANLPKPQDKRAPIFSGLIALRVLGQESGLMGTLGTGHRGHSCSPSHSGRLWLYDVHKLQKLPEFLGLVGALQDCQCREVSSLQKRVCAQRPLRARHRVHGGEIAPGHAKPIFSSEFLLICRGPSIIHIAQF

SEQ ID NO: 923265 - protein, 318 aa, Homo sapiens
MSQEDMLQSTLLGGETGDQAAFAGKDWGVELLGRVESCVPQWRRDKPCSREWLRVGPPLQRRMRAPLAPLPCLLLFPSLFLVIFILEGGGGAVSLWFERFDLSISNVPKVVMLLGAAPAETVVDTEAQRERGPCCGSRPLSPLDLPGWQQQSCTLQRCRNGHSVFRFLLLFLCLHLGSLLLSLCLPLGSLLLSLCLRLGSLLLSLCLRLGSLLLSLCLRLGSLLLFLCLHLLFRPGYPVREWGRNLSYHSKDSWWQQRPRALQSSRSLTLTKSIHGNCWNPLTTWIDCIHPGNKIVFSMLISINPSISAKDGLIILEQ

SEQ ID NO: 923266 - protein, 201 aa, Homo sapiens
MGYCSGATWSTCTGIHDLPEPCELFQKWPLRGFSKVPARCDGLDDVDSDDDDNDNDDYDNDYDDNNDNDNDDDNDDCDNDDDGCDNDYDNDDDYDNDDDYDNGDDDDIMMTIMMMTTTMMTTLTVMTIMINDNDDENDNNDNYDDDYDDDGNDDIDDDDNDNDDDDNDDIDDDDDSDNDDDNDNDNNDNNDSDDNDDDGLS

SEQ ID NO: 923267 - protein, 211 aa, Homo sapiens
MVSSFTQGGRVRPTLATETSYKDCDDDDDGDNEGDDNISSISSILSHLLMVPNWWKWILIKFFILVIFMLSGVMVNTECQLDWIEGCKVLILGHPESHHGQLALAVIWYKSQQGDGVTGLFVEILTHQQSGPRATGESRPCAEALFQPLLVSRLLLALSKASHVAKFKFKGVETEDSKATMKSSMHSETEGVWPLCTLPHGFQARLDPGTQ

SEQ ID NO: 923268 - protein, 147 aa, Homo sapiens
MGHFTEEDKATITSLWGKVNVEDAGGETLGRLLVVYPWTQRFFDSFGNLSSASAIMGNPKVKAHGKKVLTSLGDAIKHLDDLKGTFAQLSELHCDKLHVDPENFKLLGNVLVTVLAIHFGKEFTPEVQASWQKMVTGVASALSSRYH

SEQ ID NO: 923269 - protein, 147 aa, Homo sapiens
MGHFTEEDKATITSLWGKVNVEDAGGETLGRLLVVYPWTQRFFDSFGNLSSASAIMGNPKVKAHGKKVLTSLGDAIKHLDDLKGTFAQLSELHCDKLHVDPENFKLLGNVLVTVLAIHFGKEFTPEVQASWQKMVTAVASALSSRYH

SEQ ID NO: 923270 - protein, 285 aa, Homo sapiens
MAIRSGNTIIVTAIWMDSTRHEPMYCFLCVLAAVDIVMASSVVPKMVSIFCSGDSSISFSACFTQMFFVHLATAVETGLLLTMAFDRYVAICKPLHYKRILTPQVMLGMSMAITIRAIIAITPLSWMVSHLPFCGSNVVVHSYCEHIALARLACADPVPSSLYSLIGSSLMVGSDVAFIAASYILILKAVFGLSSKTAQLKALSTCGSHVGVMALYYLPGMASIYAAWLGQDVVPLHTQVLLADLYVIIPATLNPIIYGMRTKQLRERIWSYLMHVLFDHSNLGS

SEQ ID NO: 923271 - protein, 282 aa, Homo sapiens [sequence omitted]

SEQ ID NO: 923272 - protein, 326 aa, Homo sapiens
MSAFSEGEGAYEDQQGEFPRVMSASSITSTHPTSFLLMGIPGLEHLHIWISIPFSAYTLALLGNCTLLLIIQADAALHEPIYLFLAMLAAIDLVLSSSALPKMLAIFWFRDREINFFACLVQMFFLHSFSIMESAVLLAMAFDRYVAICKPLHYTTVLTGSLITKIGMAAVARAVTLMTPLPFLLRCFHYCRGPVIARCYCEHMAVAVLQLSSQEARYKAFGTCVSHIGAILAFYTPSVISSVMHRVARCAAPHVHILLANFYLLFPPMVNPIIYGVKTKQIRDSLGSIPEKGCVNREKMAMYKPRRVASVATNSAWVLDFYLLEL

SEQ ID NO: 923273 - protein, 408 aa, Homo sapiens
MESPCTFRGDKVFLLLFADILAVKAGNKQKTTTCKDRTKHSYQTGSRVLGRRPDKQSQMVNGIRGAMSASNITLTHPTAFLLVGIPGLEHLHIWISIPFCLAYTLALLGNCTLLLIIQADAALHEPMYLFLAMLAAIDLVLSSSALPKMLAIFWFRDREINFFACLAQMFFLHSFSIMESAVLLAMAFDRYVAICKPLHYTKVLTGSLITKIGMAAVARAVTLMTPLPFLLRCFHYCRGPVIAHCYCEHMAVVRLACGDTSFNNIYGIAVAMFIVVLDLLLVILSYIFILQAVLLLASQEAHYKAFGTCVSHIGAILAFYTTVVISSVMHRVARHAAPHVHILLANFYLLFPPMVNPIIYGVKTKQIRESILGVFPRKDMTHGSVSSGSLWIECADCAVFSQCPHPYQ

SEQ ID NO: 923274 - protein, 194 aa, Homo sapiens
MLSSTLRVAVVCVSNVNRSMEAHSILRRKGLSVRSFGTESHVRLPGPRPNRPVVYDFATTYKEMYNDLLRKDRERYTRNGILHILGRNERIKPGPERFQECTDSFDVIFTCEESVYDTVVEDLCSREQQTFQPVHVINMEIQDTLEDATLGAFLICEICQCLQQSDDMEDNLEELLLQMEEKAGKSFLHTVCFY

SEQ ID NO: 923275 - protein, 134 aa, Homo sapiens
MVRVIKNLTTRSKSETALANLTDEESSQGGIFQGILDVHVDHVHRLKGLLFSGTQIFHHCVIDTLLTGEDDIKGISALLKSFWTGLDSLISSQDVNSQNFSPIQKKSHSQKHICLWYFKSYSTQHFLHLILLES

SEQ ID NO: 923276 - protein, 228 aa, Homo sapiens
MLSSTLRVAVVCVSNVNRSMEAHSILRRKGLSVRSFGTESHVRLPGPRPNRPVVYDFATTYKEMYNDLLRKDRERYTRNGILHILGRNERIKPGPERFQECTDFFDVIFTCEESVYDTVVEDLCSREQQTFQPVHVINMDIQDTLEDATLGAFLICEICQCLQQSDDMEDNLEELLLQMEEKAGKSFLHTSGFIVRSICKDLPLSTVCVTFVHITWKETITKKIFYGK

SEQ ID NO: 923277 - protein, 136 aa, Homo sapiens [sequence omitted]

SEQ ID NO: 923278 - protein, 224 aa, Homo sapiens
MYTCSSFGRPGYRWSSPRLRDPAAAEVPVSLWFPVAAIMLSSTLRVAVVCVSNVNRSMEAHSILRRKGLSVRSFGTESHVRLPGPRPNRPVVYDFATTYKEMYNDLLRKDRERYTRNGILHILGRNERIKPGPERFQECTDSFDVIFTCEESVYDTVVEDLCSREQQTFQPVHVINMEIQDTLEDATLGAFLICEISDLSACARDQHGHPRYPGRCHPGSFPHL

SEQ ID NO: 923279 - protein, 346 aa, Homo sapiens
MLSWKFAIQPKTTGKQLFDHVVKIVGLREVWFLGLQYVDSRGYSTWLQLNKKVTQQDVKKEKDPLQFKFRAKFFPEDVSEELIQEITQRLFFLQVKEAILKDEIYCPTETAVLLASYAVQAKYGDYNKEIHNPGYLANDRLLPQPKEAAEWLEKERRAAEEAKSAIAKQAADQKNQEQLAAKLAQFTAKIVLLEEAKKKKEEEATEWQHKAFAAQKTWKRPKKKNEHDEHDEINAKAGAELSNEGVMNHRSKEEHVTETQKNERVKKLLQALSSELAQARDESKETQKDVLQAKNVKTGHGLYCAVYKWHKHRNPFPCSWPVDLSVRHGVAGENNNDNALSGSLFS

SEQ ID NO: 923280 - protein, 176 aa, Homo sapiens
MEAHSILRKKGLSVRSFGTESHVRLPGPRPNRPVVYDFATTYKEMYNDLLRKDRECYTRNGILHILGRNERIKPGPERFQECTDSFDVIFTCEESVYDTVVEDLCSREQQTFQPVHVINMDIQDTLEDATLGAFLICEICQCLQQSDDMEDNLEELLLQMEEKAGKSFLHTMSKPS

SEQ ID NO: 923281 - protein, 170 aa, Homo sapiens [sequence omitted]

SEQ ID NO: 923282 - protein, 142 aa, Homo sapiens
MARYSSETKLPEERSSSNICCSPISAVLQPPPLIPRQTGSRVDLQQTPTDLQLRVLTVRRKTNRKDIHIKTPSVRHHHQRPKNASPPPKECSSSPATEQSWMENDFDELREEGFGRSNYSKLKEEVRTHGKEVKNLEKELDE

SEQ ID NO: 923283 - protein, 316 aa, Homo sapiens
MPQKPYKASISGPWAFSSRSYTSGPGAHISSLSFSQVGSSSSFWSGLGTSMSLGGGYGGAVLDLDPNIQAVHTQEKEQIKTLNKFASFIDKVQFLEQQNKCWRLSGASCSSRRQLGATWTACLRATSTALGSSWTLGQEKLKVEADLGNTQGLLEDFNDKYQDEINERTEMGNEFAFIEKDVDGAYMNKAVLESHLEGLTDKINFPRELCEEEIWKLQSQISDTHSLDVDGIIAEVNAQYEEIAHCGQARLRVCTSSFSRTSSSRTMVGKLVSESSDVLPKRTTMAVPPSLPPLAAAPELVGEAAVQESAGNRRPT

SEQ ID NO: 923284 - protein, 324 aa, Homo sapiens
MQGYLIGSVLRKPYKASISGPWAFSSRSYTSGPGAHISSLSFSQVGSSSSFWSGLGTSMSLGGGYGGAVLDLDPNIQAVHTQEKEQIKTLNKFASFIDKVQFLEQQNKCWRLSGASCSSRRQLGATWTACLRATSTALGSSWTLGQEKLKVEADLGNTQGLLEDFNDKYQDEINEWTEMGNEFAFIEKDVDGAYMNKAVLESHLEGLTDKINFPRELCEEEIWKLQSQISDTHSLDVDGIIAEVNAQYEEIAHCGQARLRVCTSSFSRTSSSRTMVGKLVSESSDVLPKRTTMAVPPSLPPLAAAPELVGEAAVQESAGNRRPT

SEQ ID NO: 923285 - protein, 812 aa, Homo sapiens
MEPPKPEPELQRFYHRLLRPLSLFPTRTTSPEPQKRPPQEGRILQSFPLAKLTVASLCSQVAKLLAGSGIAAGVPPEARLRLIKVILDELKCSWREPPAELSLSHKNNQKLRKRLEAYVLLSSEQLFLRYLHLLVTMSTPRGVFTESATLTRLAASLARDCTLFLTSPNVYRGLLADFQALLRAEQASGDVDKLHPVCPAGTFKLCPIPWPHSTGFAQVQCSNLNLNYLIQLSRPPEFLNEPGRMDPVKELKSIPRLKRKKPFHWLPSIGKKREIDISSSQMVSLPSYPVAPTSRASPSPFCPELRRGQSMPSLREGWRLADELGLPPLPSRPLTPLVLATESKPELTGLIVAEDLKQLIKKMKLEGTRYPPLDSGLPPLLGVVTRHPAAGHRLEELEKMLRNLQEEEASGQWDPQPPKSFPLHPQPVTITLKLRNEVVVQAAAVRVSDRNFLDSFHIEGAGALYNHLAGELDPKAIEKMDIDNFVGSTTREVYKELMSHVSSDHLHFDQGPLVEPAADKDWSTFLSSAFLRQEKQPQIINPELVGLYSQRANTLQSNTKKMPSLPSLQATKSWEKWSNKASLMNSWKTTLSVDDYFKYLTNHETDFLHVIFQMHEEEVPVEIVAPARESLEIQHPPPLLEDEEPDFVPGEWDWNTVLEHRLGAGKTPHLGEPHKILSLQKHLEQLWSVLEVPDKDQLREALLARLEWFEGQASNPNRFFKKTNLSSSHFLEENQVRSHLHRKLNLMESSLVSLLEEIELIFGEPVIFKGRPYLDKMKSDKVEMLYWLQQQRRVRHLVSALKDPHHIPITLH

SEQ ID NO: 923286 - protein, 151 aa, Homo sapiens
MDKGSSAVSLQGKGPAWQPNGRMGPWGSDGMKELHSSFNAQFTHYYLLVPPDRIHCSRWRSRNTFYMFNFSIYSLPHKYLSSTYFMSESFQTAREQQEPRARGPRDPLYTGGKRGLEEPCLHLSAPQASESDEDAAAIFAGVVLATGPALA

SEQ ID NO: 923287 - protein, 514 aa, Homo sapiens
MSKGAATPLCVSLFLSQSPQKSVIELLPGATGRGGNSTARILSTNHTGPEDAFNFNNWVTLLSQLPLLLFTLLNSFLYQCVPETVRILGSLLAILLLFALTAALVKVDMSPGPFFSITMASVCFINCLLVNSPTDQWLHLRRGLNSGCCPRVLRVPREAHTCATLSRVPCVSCRHLLQGASESCLVEQQPPSLSSTAFSAVLQGSLFGQLGTMPSTYSTLFLSGQGLAGIFAALAMLLSMASGVDAETSALGYFITPCVGILMSIVCYLSLPHLKFARYYLANKSSQAQAQELETKAELLQSDENGIPSSPQKVALTLDLDLEKEPESEPDEPQKPGKPSVFTVFQKIWLTALCLVLVFTVTLSVFPAITAMVTSSTSPGKWSQFFNPICCFLLFNIMDWLGRSLTSYFLWPDEDSRLLPLLVCLRFLFVPLFMLCHVPQRSRLPILFPQDAYFITFMLLFAVSNGYLVSLTMCLAPRQVLPHEREVAGALMTFFLALGLSCGASLSFLFKALL

SEQ ID NO: 923288 - protein, 153 aa, Homo sapiens
MARHNGLGQAMWLAAQTERPLDRQTTLHSHGSECGMCKLTVDLGVVCPGLPMSKSSWEAVVAVLMCLCLNLGMTTLVCAYEEQVESSSKIVCGRNPQGRPVGGDHEHPHFPAEETASGEPRPTAHGGTAKQRRKQEWTSEPALLCPLAALGRA

SEQ ID NO: 923289 - protein, 330 aa, Homo sapiens
MMHLAFLVLLCLPVCSAYPLSGAAKEEDSNKDLAQQYLEKYYNLEKDVKQFRRKDSNLIVKKIQGMQKFLGLEVTGKLDTDTLEVMRKPRCGVPDVGHFSSFPGMPKWRKTHLTYRIVNYTPDLPRDAVDSAIEKALKVWEEVTPLTFSRLYEGEADIMISFAVKEHGDFYSFDGPGHSLAHAYPPGPGLYGDIHFDDDEKWTEDASANTEALMYPLYNSFTELAQFRLSQDDVNGIQSLYGNEFWAIRGNEVQAGYPRGIHTLGFPPTIRKIDAAVSDKEKKKTYFFAADKYWRFDENSQSMEQGFPRLIADDFPGVEPKVDAVLQAFG

SEQ ID NO: 923290 - protein, 499 aa, Homo sapiens
MRGLLSWDIGAARGWEAITYLALRKKTKASMHSFPPLLLLLFWGVVSHSFPATLETQEQDVDLVQKYLEKYYNLKNDGRQVEKRRNSGPVVEKLKQMQEFFGLKVTGKPDAETLKVMKQPRCGVPDVAQFVLTEGNPRWEQTHLTYRIENYTPDLPRADVDHAIEKAFQLWSNVTPLTFTKVSEGQADIMISFVRGDHRDNSPFDGPGGNLAHAFQPGPGIGGDAHFDEDERWTNNFREYNLHRVAAHELGHSLGLSHSTDIGALMYPSYTFSGDVQLAQDDIDGIQAIYGRSQNPVQPIGPQTPKACDSKLTFDAITTIRGEVMFFKDRFYMRTNPFYPEVELNFISVFWPQLPNGLEAAYEFADRDEVRFFKGNKYWAVQGQNVLHGYPKDIYSSFGFPRTVKHIDAALSEENTGKTYFFVANKYWRYDEYKRSMDPGYPKMIAHDFPGIGHKVDAVFMKDGFFYFFHGTRQYKFDPKTKRILTLQKANSWFNCRKN

SEQ ID NO: 923291 - protein, 168 aa, Homo sapiens
MWNYESIKSLSFLNYLVSEIFSEDYSQNPSENSILKATQLELLFVFFHGFKAQLEVISPHQVPQCLLLLSSSSALLSTLDEADLIIVDKVFNVLLDLVCQYFIEDFRIDVCWSLLEVHSRPCLPSYHQQRLQNSKDCCLLLPLEASSQRGTCQMPAGALLYEVSVDPC

SEQ ID NO: 923292 - protein, 168 aa, Homo sapiens
MGAAHQHVTCIHMEQNMHIVHIFPSNRQDPQLQVSWSLLEVHSRPVCLDNSSGGCRTVDFCELQMLLSDRSSGTFVSEEYPAESLAECWENDCSLQICQTGTLKSAEVTAVFLFVCALPPEVEPTEEGRSPCAVVVSTQLELPGCFVYLSKPGQWHASLPQPRCCLEV

SEQ ID NO: 923293 - protein, 604 aa, Homo sapiens
MTEHFVQLTSRQGLSLEERRHTEAICEHEALLSRLICRMINLLQSGAASGLELQVPLPSEDSRGDVRYGQRAQLSGQPDPVPQLSDCEAAFVNRDLSIRGIDISVFYQSSFQDYNAYQKDKYHKDKNTLVVWEEVLKAESASHVVMAMAMTLQAGGTAHVKPSRCEGLGVIGKGGPMARGFINLGTSENKLCMDLMTERVRMFWAVLGPTPSRLSPPSVLLSYGRYRVRKGARKPQGLSGSVYSLREEVARFLTYYCRAPTRLDPENVVVLNGCCSVFCALAMVLCDPGEAFLVPAPFYGGFAFSSRLYAKVELIPVHLESEGKKVRGLVLINPQNPLGDIYSPDSLMKYLEFAKRYNLHVIIDEIYMLSVFDESITFHSILSMKSLPDSNRTHVIWGTSKDFGISGFRFGALYTHNKEVASAVSAFGYLHSISGITQHKLCQLLQNTEWIDKVYLPTNCYRLREAHKYITAELKALEIPFHNRSSGLYVWINLKKYLDPCTFEEERLLYCRFLDNKLLLSRGKTYMCKEPGWFRLIFADELPRLKLVSSHVAEEEGDYGEGLRRISNPSVHWENKMEPREAVAMLSGEEPGLFNFCVVAWDSM

SEQ ID NO: 923294 - protein, 187 aa, Homo sapiens [sequence omitted]

SEQ ID NO: 923295 - protein, 153 aa, Homo sapiens
MSGYRNSANGWKCSSLCGIRLLRCRSPEECQGPVNTVKVVGDRPEGTCLSVQLSRIPIYLCRKGQWLEVWGSFTERVASKLAFEEWEGVGQTLEMEDSIPGGGNSMFEGTVGGGLGAGGRVRNLARGGEAENRATTKSFAGKAGRSHLMIGWG

SEQ ID NO: 923296 - protein, 134 aa, Homo sapiens
MGDAAKSQFKEYEFREDGKSVANFVIYHSLLFDHNYSHCSHRKNMLTTIPRPPNTSCNYVIRLEDQDLVVHIRFVCDIMDVVLLNPDTDELKTRSWLFLQFAIPPQRPPSSQSGRPSFPSKFYLYVTYVHIKNI

SEQ ID NO: 923297 - protein, 145 aa, Homo sapiens
MDTIKKQKISVTTDVKKLELSCVAGMYLKEWNDSCTPMVIAALFTIVKRWKQTQMSVKRMAKQNMEYAFNKIFSHKMEQNFDTHYNMDGLESIMLNEISQTQNKYCPSPPCPCPTPPLLLLWCGTKKALVWKSGGLSSSPDCAKV

SEQ ID NO: 923298 - protein, 222 aa, Homo sapiens
MTVNQRCPLPFYDKVLSLHEDSTTPVANPLLAFTLIKRLQSDWRNVVHSLEASENIRALKDGYEKVEQDLPAFEDLEGAARALMRLQDVYMLNVKGLARGVFQRVTGSAITDLYSPKRLFSLTGDDCFQVGKVAYDMGDYYHAIPWLEEAVSLFRGSYGEWKTEDEASLEDALDHLAFAYFRKGEEDVGAPNPCVAAQTDLLSVQQTVLFLSWKFLANGSLL

SEQ ID NO: 923299 - protein, 382 aa, Homo sapiens
MSIRVTQKSYKVSTSEPRAFSSHFYTSGPMGSSSFRGGLGRGYGGASGIGGITTVTVNQSLLSPLNLEVDPNIQAVRTQEKEQIKTLNNKFASFTDKIRFLEQQNKMLETKWSLLQQQKMAQSNMDNMFGSYINNLTQQLETLGQEKLKLEVELGNMQGLVEDFKNKYEDEIHKLTEMENEFVLIKKEVDEAYMNKVELGSRLEGLTDEINFLRQLHICGAVHGQQPSLDMDSIIAEVKVQYEEITNHSQAEAESMYQIKYEELQTLVGKHGNDLRRTKTEISEMNRNISRLQAEAEGLKGQRTSLEAAIADAQQRGELAVKDANAELSELEAAQERAKQDMARPLQQTESRFPFCSTNYPFNSHWCIFAARSAVLFLSTSR

SEQ ID NO: 923300 - protein, 145 aa, Homo sapiens
MQAEGMAVAGTGHCGAVGRKLVSLDQAPKVMAVFVVRLEKQGPEGTGQTVEKIQGEEESEGAQFELPTCACVRVRVHKCVLVVSGGKAGNKRCLCLQEDVVGGGGKWPLEDESGTPGVRRAQASPSSDLREGVQGQKSLQLSSAL

SEQ ID NO: 923301 - protein, 145 aa, Homo sapiens
MDEPQGMRFRKAGTLAAPKPPLFLLPSHHHCSPPATSLGKKVSDQSSRTKAERGTLQGKTVASSTQTPRADTRLAAIQTRQQVCSGAFRSTEWRAAHGDRTEAATELLLLLDQTPALDQTTTALAVQVQLLTQLGAHPETGSPHS

SEQ ID NO: 923302 - protein, 151 aa, Homo sapiens
MEAWEQVDLGHKEPFNNRLLPVTDEMDVCSLQARAAGACGAPSMETVLEEQHRTRKGFSCRLLSEVSRSIQPPAAAQRVACQRVPPTPALQQTFLQPGRLGCTISNKVWVSALGVGVAGRRFQVSSCLRCSASALEVEVFLSGRSPVTVTG

SEQ ID NO: 923303 - protein, 309 aa, Homo sapiens
MKNRTMFGEFILLGLTNQPELQVMIFIFLFLTYMLSILGNLTIITLTLLDPHLQTPMYFFLRNFSFLEISFTSIFIPRFLTSMTTGNKVISFAGCLTQYFFAIFLGATEFYLLASMSYDRYVAICKPLHYLTIMSSRVCIQLVFCSWLGGFLAILPPIILMTQVDFCVSNILNHYYCDYGPLVELACSDTSLLELMVILLAVVTLMVTLVLVTLSYTYIIRTILRIPSAQQRTKAFSTCSSHMIVISLSYGSCMFMYINPSAKEGGAFNKGIAVLITSVTPLLNPFIYTLRNQQVKQAFKDSVKKIVKL

SEQ ID NO: 923304 - protein, 156 aa, Homo sapiens
MTQLVDVSQPSPASPVLIQGITIKMSMAEGMKVRHRLTDNGSPHQGWSGYAMAEFAILRTLGSLWRDSHEEEPKPASNHASQDTVHISKTEDNLMLGGMIDGDYIIDIGLSYNGSRKVLTLKPKRENIVILTKPQTNQAKPTPKGLSGVLVAGENQ

SEQ ID NO: 923305 - protein, 120 aa, Homo sapiens
MISHLVSSGQLFSVYCCLQAAQEQFHKRILIVCPKGQGLAPKSVIHLLDLPQAPVPLTLSLLQSAGQLGGPVAELQRGPLGEHLLPLAFRTSDKWVEAANPKGLYVASQIQITTRGLFLL

SEQ ID NO: 923306 - protein, 145 aa, Homo sapiens
MSHNRGAVMAMKEKSCLAIAADRRFGIQAQMVTTDFQIFPMGDRLYIHLARLVTDIETVVQCLKFRLNLCELKEDFMVSGTCAEQIYEMCESLWECNMDPEQLFETIFQAMLNAVDRDAVSGMGVIVHITEKDKITTRTLKALMD

SEQ ID NO: 923307 - protein, 128 aa, Homo sapiens
MMTMAVLIEFTLSIETQNSASWAKPSIKQQALPELDGFPRTGEQIQQTQNDYRRRKQAKTNVTPSGFKPNKPSNPNQGKGELPFHRTHLTGFSTCFPTSTLETHFNPKMKTMGQARWLMPVIPALVGG

SEQ ID NO: 923308 - protein, 134 aa, Homo sapiens
MLSFFYSCPWTSDSRFLGLWTVELAPAVSRGTSGLRPQTGGFTVGFPGFEAFGLGLRHTTGFSLSPACRRPILGLLVIVVGTQAGEGQLEERKRQVSLVFTVVREWDRDEEGEKLLQKDKSSKQRGLLKTRRKI

SEQ ID NO: 923309 - protein, 192 aa, Homo sapiens
MTLAHSIRKIEAVRRCGIQVILQVDILFGYGLRCIGCKNIHIGIQVILQVDILFGYGLRCIGCKNIHIAPFSIWLSECFIKWNVRILDSKTYSTKQTLLVGCILDVYPGTNYLTKSDSCGQDTKSDTCKVEMKKTWLSNKEKTELQTSHNPRDRYLGKMPVAPLQNCDSQVSPNIVRCLLGGIIIPSGEALI

SEQ ID NO: 923310 - protein, 149 aa, Homo sapiens
MGVYLALGFMGVYLALGSTWPTGVGLVLVSEMTCSKAVSHYNVPEGKQWQLEKPFSKSVSSVKGNSAVVCTNTKSPVQIQDHFNYLLELANSYQQLKHDISFKTSGDHECGGAGKNQPKTQEAPETQEAHNYASHSSPAAEMPLITVYF

SEQ ID NO: 923311 - protein, 124 aa, Homo sapiens
MSLVVTFLSHKIVVGENYAIIPSRKQTLKTSVEELILETGPTDFIVSWFRSCTLDCETMAYICKGINASIQKSQELNAGIKSDLYSQVSTLIDWQWLFGELDCTEKDLKGFGVGKYAINWPHSE

SEQ ID NO: 923312 - protein, 134 aa, Homo sapiens
MLSANSNSLISSLLDSQTCDTALASPKTSILREDAAASLKPQKSTNSAIFYWSTRSRSAQFQRKGIHIPPLTGEECQRNCGQAYSITGPFQKPPLAHCTCLLVTFKLNCKLRSLSQYCDLQSQHSMIDEYLFNG

SEQ ID NO: 923313 - protein, 150 aa, Homo sapiens
MMLAFKEHPWEREYAPRGRSIDGPPVIDLRNEIDSNTIIVGDFNTPPTALHKSSRQKVNKETMDLKYTVEQMDLTDVYRTFHSTSTEYTFYSTAHGTYSKIDHMIGQKANLYKFKKIKIISSTLSDHSGIKLEINSKRKLQNHANTLEIK

SEQ ID NO: 923314 - protein, 181 aa, Homo sapiens
MTPGFSPGPLAIDIHRFHIYTAYDPKRRWCAILQQEQLMDGASHRDRVDPIYNLPRNMQWINETGVKNTSGLPGVKALKSRASGRTFASACFSLTPMSLPRAGCRSDLGENPEQEPSSYAFCLFSSISSSRRKEPIDSALQHLSGTATAQKEGFCYNLKFSPAPCAQEQLQQFPQPLGTIR

SEQ ID NO: 923315 - protein, 137 aa, Homo sapiens
MAKTSYPQPLCQQAVKATWLFSAGAGSTLKAAPWSRPQHALPHRKVLQKAIAILNSGSVLGLLSVTPGARTGICLSRVLTLLCSQTTRGFWVLKGGVLSRRDLEGAVWASKRVVEEEQRAMLRAGSVSSKELQCKWL

SEQ ID NO: 923316 - protein, 361 aa, Homo sapiens
MQALYAGAGGSGSRISVSRSTSFQGGMGLGAWLRGWLGNEKETMQSLNNHLASYLDRVRRLETESRKLESKIWEHLEKKGPQVRDWSHYFKTIEDLRAQIFTNTVDNAHIILQIDNARLAADDFRVKYETELAMHQSVESDIHKLRRVIDDTNVTRLQLETEIEALKEELLFMKKNHEEEVKGLQAQTASSGLTVEPDAPRSQDLTKIMADILAQYDKLAQKNLEELDKYSSQQIEESTTVVTTQSTEVGAAEMTLMELRCTVQSLEIDLDSMRNLKASLENSLREVEAHYALQMEQLNRILLHLESELAQTWAEGQRQAKEYEALLNIKVKLEVEVTTTTTCWKTARTSILVMPWTSATP

SEQ ID NO: 923317 - protein, 149 aa, Homo sapiens
MARESATCFTDKWSKATVRPQEGREGTWRINPLTVPSPTPDLLLVTTISSTHQKPANKVVWVFLSIKVASQTSEQDTEGQRMDLGAKVEEPGHTQESREKGTHHPTPTITNIFPFLFHLSLIFFLEYFKANPRNHIVSPKISLVCIYNK

SEQ ID NO: 923318 - protein, 167 aa, Homo sapiens
MRTENDSQLWFCQMVFLFTEEYTVINEACPGAEWNIMCRECCEYDQIECVCPGKREVVGYTIPCCRNEENECDSCLIHPGCTIFENCKSCRNGSWGGTLDDFYVKGFYCAECRAGWYGGDCMLLVFVADLKLRCHFRWFLVNLIQYLADYVPDAIASAVGNQGRVVK

SEQ ID NO: 923319 - protein, 145 aa, Homo sapiens
MSPAVSGLSRAHLLPSVTLSTHRFVMLSLEFDYMCQYDYVEVRDGDNRDGQIIKRVCGNERPAPIQSIGSSLHVLFHSDGSKNFDGFHAIYEEITACSSSPCFHDGTCVLDKAGSYKCACLAGYTGQRCENHFHGTGDKECKIIS

SEQ ID NO: 923320 - protein, 152 aa, Homo sapiens
MRSLSKHNVLTLKQVRPVAARPSKTQCSTVELAIHNGPIESGSRHFPLWAAQIEELGLDPRDWWTLDFQTQVTCPWPQKNWWQICFLSVALSTAHMATCVQQLVTRPALSWQQHSKYRLLWTSSNAVIWMIEPTLCYAHYLHQLSNFKIQSL

SEQ ID NO: 923321 - protein, 156 aa, Homo sapiens
MKLLPYACCSPRRRHNHKRSESAHFFPCGTVCFGCLARKLGLYLPIILILSWGVIGIELLVWKFLLRTQRIEECLEAELWKDSSLRPLGIWLLFLGAVAGAPGTCLSRKSSTQFCCLHVPDDHRSLLRRVESPVAWGSQESCRGKTFSSKIRTKDG

SEQ ID NO: 923322 - protein, 130 aa, Homo sapiens
MRAHGAGLAGSSTCSPGAGSTRDCKYTNQHPVFSSRFVSAPIDTLYLAALVRTCSRFVSAPIDTLYLAALVRTWRVFMSSSRIVNTPIGTLYLPQGWLVIGLSQSLCTGLSKISKQCNLRQLSGRRYWNL

SEQ ID NO: 923323 - protein, 154 aa, Homo sapiens
MVPLNEKRLRIAAAGLFALLVSPPQTSIEPLAAPVNITVVPRGASTAPSCRLQPSSPQLLLHAGGGAAGSLASCGRVGRSGSLLTCPSLSFVLDLFPLNLAADEDGAPAEALYSIQTNSGSCTDSPPQGWSCQGSEATTTQNSGPHYTRVLASS

SEQ ID NO: 923324 - protein, 150 aa, Homo sapiens
MWASHGILLSLSKLFFPTGMLLIPNCCLPKFKLLLGLQGPDEIIFLANPLPPRQLGATLTSASICTLPGWLPVLCLPTWGCGGSIPHKSADVDLGFCENQHPVPAISPGSFHRREVAGRNAALTLKGTRGILPVRVHTAVGLFTSAPPQV

SEQ ID NO: 923325 - protein, 296 aa, Homo sapiens
MSACWVLEMQQGTRQTRSCLSITFNSKEREVDTVKIKPNRQQIKTGSTSPPSKPEPDLGINVNEHGHAELLRSHSLPSDTHFLSILQYAYNVPGCELSGILEVRECEMMMMGMVVIMIVMIVVVVVVVAMMRVMLMVMVMGDNGDDSDDDGYGGDDADGDDDGYGGDDADGDDGGDSDGEDADRDDDGYGGDDDGYGGNDADSNDDGYGSDDADGNDDGYGSDDADGDDDGGSDGDDADGDDGGDGNDDYIMMIVVMVMMMFIIVMMVVMVVVVMMMMMVVMIMIMVMRVRIAKIY

SEQ ID NO: 923326 - protein, 167 aa, Homo sapiens
MINDRVVAQLHTHGPSGETPLDSRLKASRKSGEAQGHRSNLQSFGLRKVMLEILSCFCNAGSCVKEHLRQQPSHLAAFRSAWKEATASFHSCSPSKRWKAMRLLNAFFQRISGPPLPPPSLAYSKVQDPFPQCYSFSIAIVDFYLKGPIATVNSFRVELFGVLLWKS

SEQ ID NO: 923327 - protein, 145 aa, Homo sapiens
MAKGQQDSARMAADSLVAAPLRNFSTLTLPCLCRSASKCYSLFQDSLDKQERRSLSKKAAKPGRQPSPEPNYAGPLMSDLQPLNDEKQIPVVYKPPSLWYFVIEAQRKEAWIHYSFLEVAPEMQILVNKYTIGTICQLVKYEQTL

SEQ ID NO: 923328 - protein, 171 aa, Homo sapiens
MKMKTFMVIHFHLMNKILPLFPRSLLSKDSKEAFLLESSGATYLCHSAPWGPTWRLKRKQTNKTQQAALQPQYSLLRVYPACSWTGFALDTQNIPPGACLDQSWYLDHFQSRGPICSPVVGHCTLLYTTAASHRTAELNCPHVASPSVFFTVHWLKKIAELSPILHQADST

SEQ ID NO: 923329 - protein, 135 aa, Homo sapiens
MENNHCPASSESHPKPSSPRQESTRVIQLMPSPIMHPLILNPRHSVDFKQSRLSEDGLHREGKPINLSHREDLAYMNHIMVSVSPPEEHAMPIGRIAAFIEHLLSARVIKRCRSKAEGRCVLTGGTKQGFAGERA

SEQ ID NO: 923330 - protein, 182 aa, Homo sapiens
MGKQGGSWAACVSWVEFQVGMMAKSWKWLVVTAAQQCKCANATELWNGKVMVGIGGAILGCATEPVKYCRVKRQRQAGPAIASQRAAKPTWAFVGGRNTLRSAAALDSHSSANPIVNCACEGSRLCAPYENLMSDDLKWNSFIPKLSPPDHPIRRKIVPWKLSLVPKKVGDQQFTVAISLWR

SEQ ID NO: 923331 - protein, 189 aa, Homo sapiens
MIKLRSTGIRPTALFSSLSRPAGMQSARVEAWEPPPRFQKTYSKAWISRQEPAPGEEPSQRTSTRVLQSENLGLEPPHRVSTGALPSGAVRRWSLSSRPQNSRSAGSLNSGSARPVSTQHQCQPMRAAMGAKLYSLRGRATQVFGRPLLTLAYFGEWPKSRTLSTKYWRRCGATGTLMAGENANDTVTL

SEQ ID NO: 923332 - protein, 132 aa, Homo sapiens
MKEASQGKRTYLERTVFNLLTVGIWPCNQATPSLRAERSCWEDTGRVTQFPCWKEELGCLLRTLSSLPRSGSYQFPSLENEDDNISSLIGLSGLISAFNISMSIVNFFTYRFVMGTKRLQTNKALRAVSETW

SEQ ID NO: 923333 - protein, 149 aa, Homo sapiens
MFLSHSSKNGFVLGSGAGHRWIGAEKAACGFTLECHYPGCGATSQAGKLELGSQTSAVVQADTGYHRSATSRCVSLPRLSCSPANRSVGNSQDYGCDKESCYKLSRMWLLVNTCTHFYGAYQEWNSWVTGNCPTIFQSNCTILHPACTV

SEQ ID NO: 923334 - protein, 196 aa, Homo sapiens
MSASSSSTSSRYPSSASATSQIFFGPNAAKGSLCSPWMVGLGNQPPCCKEAQAAAWRGHVALLKRLRRSGLCPAKLWNATLLWNGPMQNTHHPTETPTPGGGQKSVVFSDFLTQASGMVKLLGPTAEDSTREIVNAPRTAGSTLKLSSHFEPNCVCFQKYFFLLKTRGTGLFEGHFSSGFSLPGKSFRQAAGDRGK

SEQ ID NO: 923335 - protein, 191 aa, Homo sapiens
MIIVMIFSITIITITIITITIIITIMITITIIIITITTTIIITITITTIITNTITTIIITITIITTIMTTITIIITSSPSSHHHHHHHHHHHIHHHHHHHHHHTITIITITITIITITIITTIMITITIIITPSPSSHHHHHHHHHHHHNHHYHHDHHHHHHTITINIITPSPSSPLPSPSPSPSSSSLPS

SEQ ID NO: 923336 - protein, 133 aa, Homo sapiens
MCSYHLCRVVPSGSVLGLMEVWVPNRQEASGRQTPPQEEGAPAFHLRTLRAGGAMPIQCQLCTFYSKDTGSGRSCFWGRRAHFHLDTFTNKHPMYPTFLELSNFGLECPDFPFEINCHGTCRGQCSPCTAGII

SEQ ID NO: 923337 - protein, 459 aa, Homo sapiens
MIPAENIENVVKHVVLVHQSVDHYSQQFLQKLRRSNYVTPKNYLDFINTYSKLLDEKTQCNIAQCKRLDGGLDKLKEATIQLDELNQKLAEQKIVLAEKSAACEALLEEIAVNTAVEGGSGWARVSVGRGDERQKEEIAGSRSPLGLKPTFEDCTLLRAGAASASPLSPSFTHPLSYPAAEEKKKLAEEKAMEIEEQNKVIAMEKAEAETTLAEVMPILEAAKLELQKLDKSDVTEIRRRSVFLAPHTGLAAERLRSWVSNGLPFWAPAGAVHVPCASYFSASVLPVKAEQRSLSKSFAKPPKQVQTVCECILIMKGYKELNWKTAKGVMSDPNFLRSLMEIDFDSITQSQVKNIKDGIGWNRQLMVTRGKQQPHDVTQGEWLGMRGGSRLLKTLNTTTEEMEAVSKAGLGMLKFVEAVMGYCDVFREIKPKREKMYMYMTASEYTAFCNLEIQYCRND

SEQ ID NO: 923338 - protein, 173 aa, Homo sapiens
MPCREGRFHTPSASSSLRASRTETVPFKKGSSVSHHIVTLVSEENADQRNVHKDRDSYYSIERDEKMGARCITISPGLAVEVEPPGRMLSDVTGLGYQGAAAPAQNPYRALAARDPGNMVVGFCCSGRRTRKSGRHMQQAQPGVSHSALQRAASMLSLVHCGTPGPTENVFVE

SEQ ID NO: 923339 - protein, 224 aa, Homo sapiens
MGEYKLGLEVASLQIRETRQNKTGTPKWDNCEDFYEEPIQRHVSGTKKNQLGAVWDPEELGEIMVIRAQLDQQDKTTADSTVASSEDCSHCQPTPMRKEMGRHPVLTFLCLLISCQCLPWAESPRNQTAKESMLCSMQAQGRVNQTARQSMLCSMQVSLSGTGQSGEGIWRHKWGVPSRCLWEAAVIPSGDVELSSSLRFLELKEQYPWPQSPSTCKVSQVSVG

SEQ ID NO: 923340 - protein, 336 aa, Homo sapiens
MGGQAETLLTSQMGLSVSVLCKAMWLYLAVFVGLYYLLHWYRERQVLSHLRDKYVFITGCDSGFGKLLARQLDARGLRVLAACLTEKGAEQLRGQTSDRLETVTLDVTKTESVAAAAQWVKECVRDKGLWGLVNNAGISLPTAPNELLTKQDFVTILDVNLLGVIDVTLSLLPLVRRARGRVVNVSSVMGRVSLFGGGYCISKYGVEAFSDSLRRELSYFGVKVAMIEPGYFKTAVTSKERFLKSFLEIWDRSSPEVKEAYGEKFVADSEQMEQKCTQDLSLVTNCMEHALIACHPRTRYSAGWDAKLLYLPMSYMPTFLVDAIMYWVSPSPAKAL

SEQ ID NO: 923341 - protein, 134 aa, Homo sapiens
MVAPMLLPNSYLAHLYCGSMPGPSPQDQRVHLSPLHSKEVDYKPSSAAKSTVSVHMCSNLTFSSVMVDELPSYSVSRQRLLKTCPGKHQWAATEDAATEHESIFSKHHGMPGILDGDQRQFLAKHLSWETPGSG

SEQ ID NO: 923342 - protein, 124 aa, Homo sapiens
MSPLRANGRSKAVFQKESSYLQRMAGDSPKGAYQRLYTHPYLPLTFQTPLDLLNHMAQVAEKLAQQLGPLAKLSFVLGPTQNKQLLRLLGQLIQKREREQGGCHNAFYYLVLPITDCPSATFRS

SEQ ID NO: 923343 - protein, 136 aa, Homo sapiens
MAVATPDRPPLASKNQMHLFRCGNETTRWDRLPRKTPTSQRSRVEPQSFELFAAGRSLALPLAVWNPEFQWLEIIANRRKKWKNPLKAQNEQFLLRILHPDNTTPKIKTELIPCKQTLLEFVASRFTLQEILKELL

SEQ ID NO: 923344 - protein, 139 aa, Homo sapiens
MVVRNLLKGFDQNADSDRDNEVQADVVLDGDEELLGTGEEASLAMSGCPPRILVQGQSPPGEPLLGQCRREMWGRIPPHRSPTGAMPSGADFVIYLGSPEIPYEWMKFCSVPKLECSGAILVHCNLCLPGSSDSPVSAS

SEQ ID NO: 923345 - protein, 173 aa, Homo sapiens
MVPCILAASAPAFARCQSTTQAQSIALEGASPKPLQLTCGLGPAGTQKSRIENGRSTYNLHQAPGKATNTQHQPMKAAKMGLVPCKATGVQLPKAVGTYLLHQHDLDGMVVAGLRQDPVAVLASGLTQHNHSSDDHRGACVTPLSALGGSEWSGRLCHCYTYVDKLYGIPQFS

SEQ ID NO: 923346 - protein, 152 aa, Homo sapiens
MALNMNFLGSTLTNNLLLKGPTSQCYHIRTSAYKFGGNTSIHSMVHPFCLWNQGVGSKCKCMNPYKMAKEAVEGDLTVHNRGEGKVKRDSNMLALKIELCPGKTLSLDQLNYSPLCLSSTELLITARQNSHRLLGRYCKFTMDTCTDFSVAT

SEQ ID NO: 923347 - protein, 176 aa, Homo sapiens
MGVQVVPKSFDREPTCSMQIHREKENQDLKDKYEQKSGESHPAWLLSSEHRYAVVPLLNWVGFLAVVVVRYRLTDLQPLSDTHGHQMWTQVDQSSGPGLCAYMPTVMVVGPSQVLRIRNITFTWVPTVVVAGPKWDSPCSVPLAVLYKEFPISSGLTAIVRSRQSSVSGLIMDWLV

SEQ ID NO: 923348 - protein, 199 aa, Homo sapiens
MELPKALGAHPFHQCDLDGTALCPLVEGMCFTGGKPTSLGCPDSSELPGGKAKSAGPHRLQPPLPLGAQAKGDPGSVPEPLAGVIEVPSGTPHPAVVSPSAGCCPSLKEFKGPRQHAAAAVVLVDTPHDCLEIYPVACNSQGSTTGAQESGVLQGTGDLLGLTKAVSQCAAPHSRSRRERCLISGRKPPPAQAAPLDIL

SEQ ID NO: 923349 - protein, 163 aa, Homo sapiens
MGPCSSPLLLENRQSYPAQPQPHNLVLPPSPASTISRLQLKSYISPKIQWRGVGVLSWQSKQLSNVNLSQVPFISLHGHPPQNGFFLRLVVPCWWGIEKEHFLPFLSPSTVYGPYAHTDPHGNPPTVCTPPFPAAQTDQHAETDAHNDAKLRFQPRIKKDEKF

SEQ ID NO: 923350 - protein, 135 aa, Homo sapiens
MQCTDQEHTGQQMSGVPHGNLGSGLRTEFRGRVTINSWPVKPLSSRPNLPHMTPRYDQVGDHRFPRLVKTFSIPPKPGQPKQNTDSFDPESPGDGKHSLHSHLFTVAHSGSPQSVWARRCPRKPTTANPHPSQGN

SEQ ID NO: 923351 - protein, 168 aa, Homo sapiens
MQMLRRVTDWLFKKKSEIIYQNGNKTEKAWQRPLLAAHSALTSLGYTHMLSRRAQRVQEPTVPGIIAMQRPWLLGLSEKLLKKRTLCWLLGSDGLCQLHYLQRKEKDETNKNKSKGTFSTWLYSQQEKSPLECSPCSSPVTFQEHDHIFPTRLLLFFLASTLISCLYF

SEQ ID NO: 923352 - protein, 133 aa, Homo sapiens
MAAASKKVMILRISTQDQWSVQQERDKGGMGQAPPSPLGTIPQTPSSGMRLAWGCLRGLYNAQLQTRPSFAFGKAVRFKILTLSNPDKMKPGKTMRGAPYAYLPDNENHLRRPPETTALHQGHCNLRHNIDTL

SEQ ID NO: 923353 - protein, 155 aa, Homo sapiens
MSCRQNPSDTRLKKEEALFSREVGRLASQELSSLKKEFLALLKAYNPEGEPRGWQGILHRKLIPEQDAQRGGKFPESHPEDRRPTVLDSPARLQSKGDVSTSHTVKFVELLSCFMNGSGDFKMIHMLEVKPAVLDVAFITEQAHWDWKADSEDET

SEQ ID NO: 923354 - protein, 136 aa, Homo sapiens
MTEQDRISKGEGGRGRGGGGEGEGEEGEGEEKQNKNHFLEQTLLQQDYVKAVETSGQQPSRKTQDEKGTDFCYDNVRVSCGHQGQGISHPSLKDKLEPTLLFLLLSDREKLCFSVHVSANDHQLSQAYIPSFQEES

SEQ ID NO: 923355 - protein, 146 aa, Homo sapiens
MLGFHQIINSQSLLGHQEDLEEDYSKQRAAIAEPCCASISSSIMAPRKNRWTWKVTSDHARDKIKDIGARLDVNSGEHKGIRDNPQDSGLYSGTYGDAIQGDHMGVQTLPADSELRQGAEPDQGLEDLCGLQQKRPGAQPGRFGRA

SEQ ID NO: 923356 - protein, 137 aa, Homo sapiens
MQKRLKPPVRGGQSVKAVSVDICEIGEGWGSIQGKHTKQEDGFSIQSVLSPLSDSILAEKTVIVLDDRVAIVELGVQLVAGMSLSLQPHRADKRAIVSTAAALDVLLSPQQVSIPGALRPWFAMKKRVKFTSYTSIL

SEQ ID NO: 923357 - protein, 134 aa, Homo sapiens
MDSWMADPSCVYYISWVICAGLEFVRITPGPRRDGRVTLNVVLSFVPVSARKTLNECQMEKRLCFPGKDQNCILRFEFLSQVMSSSSLAGLFLGASGVKESRFIKNHQLQIIWMETLPNHRDVCYHPHTKQLGN

SEQ ID NO: 923358 - protein, 173 aa, Homo sapiens [sequence omitted]

SEQ ID NO: 923359 - protein, 142 aa, Homo sapiens
MGSLSRFQLLGKAQSAHASDNRSDSFPLIESLHRAPPPRIPANIMHFTVCLAMLPAGNLHSWCASPGLCLALELATGLALPTRPGGLCLAPVTSLNFTPTVAQCSARGWARCAEICFHLGAGVWRRGKWWHPKTQRCQQLAW

SEQ ID NO: 923360 - protein, 358 aa, Homo sapiens
MPTGEMLRLESPAWHWSNDRVPVEKSLHPHKGAGRHQDVSLQVMRPQQAEAEPSTLGLGGVVVMVVVMVEVMLLLEMVVVVLAIVEVLDDGGGDYSKGADVDGGDGVGDDVAGGASGSDDGGGVMMLLVVLVEVNDVGGGDGDGVGSDSERIDSRGDSGGDNGGVSDNGGGGVVEMMIVEVMVVERMVVVFILEVVMETVKVMMMVVVMIVEVMVMEVVLIVKVVIIVEVTVQVMMVVVVIVEVMIVLEMIVEVMVVVVIVVMMVVILEVMMVVVVIVVMMMVVVIMEVMVVIVEVMMMVVVVIVVMMMVVVIMEVMMVVVVIVVMMAVVIVEVMMVVVVVILKVMMMLEVIIQASLL

SEQ ID NO: 923361 - protein, 165 aa, Homo sapiens
MTWLSPKSNFSAINTMESRLEKIPMQRHILKIDPITRSIHQACFNGVHVSLLLASSTPEKVMNYIPPAARLVTTQFRNLELHTPSVPTAPAVLKGISQPEEKPKQNKHGKAGRKVGGLLRSSGRSWSGKSSSPTNLPSLIPDFTFHYITYLPTLYTQVSYPGVKN

SEQ ID NO: 923362 - protein, 159 aa, Homo sapiens
MPSYQRTLYLACISLESAVSGRITCTTALENLRWEEVKIMTPEQPVQISPTNGVPLMTPFMRKETPSAVLSTQKDRPNLHWLQLCSTLMNTVMEDGCKDKISAPVSCAPAKLASELSLGDTRSKNLSFSHSYYLGQENVWNFVFWQMFLSCLCSDKIVG

SEQ ID NO: 923363 - protein, 148 aa, Homo sapiens
MVITFVLERGDNSSRVFSASRVPSCPCREYDVNMAEIVGAYLFLSNTVLELTSEMTLLPFMGEGLGGDKMAITGVSAKEDEAQVTFIMAELQVTCGAEKVAGSDVQALLQCCVEQTDMAVSLWACALAQSLPRQLPPHGHLASLHFTF

SEQ ID NO: 923364 - protein, 141 aa, Homo sapiens
MAAASKKVMILRISTQDQWSVQQERDKGGMGQAPPSPLGTIPQTPSSGMRLAWGCLRGLYNAQLQTRPSFAFGKAVRFKILTLSNPDKMKPGKTMRGAPYAYLPDNENHLRRPPETTALHQGHCNLRHNACFALQGPAIPD

SEQ ID NO: 923365 - protein, 143 aa, Homo sapiens
MCYYKEDALHSRPQWMRIANVYSQALRNTTNNAIRSKQGYRPGAATDAVVTGGLFCTGGKDKEELDREKPEMTGRAGAPRQAAMCYNLCGPFASSRGAAALHQQGQTTSVTALFGDPNTCPVPKKNEVMQMNRKMVNMENFLE

SEQ ID NO: 923366 - protein, 170 aa, Homo sapiens
MGVTSRGLRDFEIGMYALLYVFFPAILVFLINCVAFSWKYRHKRFAVSQQGNVPHSHNWVWLGNEVGLLENRVDITLPSEECTTMIDRGLQFEERNFLLNGSFQKTFHSQLFRLVDYVYEKEIKNEPMNSSGPKRKRVKFTSYITILPEDGSPYTNSILFDSDNIKCDVY

SEQ ID NO: 923367 - protein, 211 aa, Homo sapiens
MVFPFSHFHALTPQLGYLDAEHPLKQQDCMSLPARHLTVIKICKEQDVEPPLLVQHEHFVVGAAKMTQTQSPPQVTHSLVQYTKAVKAKGQTIGPSRESGRRGSIYLNSCDATSLKKGEETMMPSWRRTLAGSENCFITHPLFTTLVYPKQPMEQRIGQNAQTKQEGMKGFIENESTLHSVGVGLSRGAQRPHCRILGSLNIPKNLNNLCR

SEQ ID NO: 923368 - protein, 144 aa, Homo sapiens
MVEEALRGRLQAEKPGSQSKSQNLKNWEADSAAFSLRPKAREPLANHGSTLAADWMVPIQIEGGSASPSPLTQMSASFGDTLTDTPRNNTLRPSVQSSSHSVFTIRHCGWGLQKSWESGDLGPSSLGSMMRNLHGVIPTAQKEF

SEQ ID NO: 923369 - protein, 143 aa, Homo sapiens
MLEQVLLFQPLNALLSPPNFHHPTPCSPILMLGLLQIQHGSWNREAADITRICGGKCWLPKNTLYLLMAMKLSLANEIIEAHCGSHGAEIKESSGLYSFLEAPGRTRFPFLLQLPEVPEMKMWTSLRRRRDHSTYDKQPTLSR

SEQ ID NO: 923370 - protein, 141 aa, Homo sapiens
MAVLLGSNTRTIARAVEEQAAANTHGPFLCIWETPYCPKGQHQAKTPSSDCTGQPRCQTHCPNPPTFVQCTAAARGLQLGVESGILTDSGADTCKYDSETFFPQIKRGTLKEHSSLSSSFLFWTWLGEKALPGAAAAFLRP

SEQ ID NO: 923371 - protein, 135 aa, Homo sapiens
MGLKEAGRASPDQLEGFTWQQVCAGPQLSEQYCRVDAPWDSPRPVTNRSGRTCALLPHPSGDSSELCPAPSHGRAQRDWVPVAHSSKWLINILYVIVNLCPKWTLDAQGLASASISRGSQPKMLLSKRLIKFPKS

SEQ ID NO: 923372 - protein, 179 aa, Homo sapiens
MTLHLGTEKTFQPTIRFDISVWDGMPSNCLETSILCVLRGFIPLDNCLNYRMRMKAVGSLVDTPLPLAPVDTEVLNTAILTGKPVSVPVKVVRVQEDGSVVYVSESVECKSANEDVIKSVEFSLMSVQEMPSNPQGGYSTDSKDLMELLQEKCGLRKFCGLGYREGRKCEFGKMKTVVI

SEQ ID NO: 923373 - protein, 388 aa, Homo sapiens
MNRHHLQDHFLEIDKKNCCVFRDDFIVKVLPPVLGLEFIFGLLGNGLALWIFCFHLKSWKSSRIFLFNLAVADFLLIICLPFLMDNYVRRWDWKFGDIPCRLMLFMLAMNRQGSIIFLTVVAVDRYFRVVHPHHALNKISNRTAAIISCLLWGITIGLTVHLLKKKMPIQNGGANLCSSFSICHTFQWHEAMFLLEFFLPLGIILFCSARIIWSLRQRQMDRHAKIKRAITFIMVVAIVFVICFLPSVVVRIRIFWLLHTSGTQNCEVYRSVDLAFFITLSFTYMNSMLDPVVYYFSSPSFPNFFSTLINRCLQRKMTGEPDNNRSTSVELTGDPNKTRGAPEALMANSGCILRFGVNIAVGNQNSTDYSEEQCGQHDERGACHIVRL

SEQ ID NO: 923374 - protein, 156 aa, Homo sapiens
MRTSTCCSVCPKYAARFDLTLLLACTITFVVSAQRVGRKSYAQDSLTIHFAKTSPSLGDEQRRERQRWLCGLQPHLPSCPRSTGNWLWENGRTSTCSLRSFFPGSQPAYQQPGCPEEPSEDGKTLSNFTEQMQARKEGPGLSQLSCELITKGKLRN

SEQ ID NO: 923375 - protein, 170 aa, Homo sapiens
MPAPVLVEVAGEENVLCCHGSGEKLAVTGLTKLPHNPKGWFHSHCGPPPTTAPSLFSGSGRTGLRTCPRLPTYQLQNQVGRLFFPGLWSLHTEFISFSKSWPGDFSISSNCYKVQLEVSCSLWPFSSASDCPPPQGPCEAGQKWLARGPSESTGLFPLLPLPCILFGSLN

SEQ ID NO: 923376 - protein, 152 aa, Homo sapiens
MQHNNIQKRMALSFFVSQRMAKPVPKAPSKLSSHKSYVTKRHLSQSLNKVVRKDLNEKVAFQHRAEGGEGADHELSQERAFQAGRTAGAKALRLLQCACPWREQGKGEPGRLFKGATRLEKEEPLKTVESAGAKNLNIYIRVSQCAHSELPV

SEQ ID NO: 923377 - protein, 142 aa, Homo sapiens
MATTYQALSWETYIVSLSSHNNPLASIHPLMFVPVSLVLDRKDALLMLAMLVEPLWSFSDMHRVGKNIESPGIHVQLRLNQQSWNQGTTGNHILTLQMITHTPHGRSGKSSDAPAFQDNMMLLYIPWTMTSISVVEVGGLMA

SEQ ID NO: 923378 - protein, 177 aa, Homo sapiens
MVLCLVPVGAAGSLLEMEALSPACPPLSCTSSPEQGEREESDALAREEGIFCNLLCIPVVVEELKCYVTNSRGAASHHCFKNGNETLKNSGCHNGGNQLSDCRIPAYFTRKRDSTMEYMFNAADSSNTYGICIALKCEPPSLVPTIVNKSNKGKIQEDVNLYYVNIKFQKRWSKKPI

SEQ ID NO: 923379 - protein, 184 aa, Homo sapiens
MGLDKLGRGSSCFRSQENKWFLQVIKLFSLQKVHCNWESDYSKMVEWEFPMLFLSQKHQSEQPFTYKNTFTRAKEFRTVVTADGWNTEIRKDTLKRSAPENPSARLKPVAPGSRPTPIPSQSPQLQALDSPHRPRFQDISNNPGARLASVDPGTRPTCPLTHAPSHSPRIPAACAYGCKDSSTS

SEQ ID NO: 923380 - protein, 134 aa, Homo sapiens [sequence omitted]

SEQ ID NO: 923381 - protein, 167 aa, Homo sapiens
MRSGGSERTAASTSGHCALGWSLLWGKMIACFSFSVAPFPLHLLFGCSIKKSSSSDSNSSDSNSSRNDEIHQRRRQLQEQQGSDSANWGMISVTRRKLFSWKIPLSLLPSAVFSIKGLGVQITLTLNQADPCVRESKRYMQEKRWKGSGGESLEGSTEKPSLEGFST

SEQ ID NO: 923382 - protein, 186 aa, Homo sapiens
MLPGYLLTHNKSDLCSSSHPPHSSNLCSLTSSKVTSTFSEIKAGPQGPNPGQGRKTVDLALRGHTVSRVGSFQQAFGLADFKNEAADLHKKFSKSRLDPEIQLASPLNTLDSSSQCCKNKRLFSNLHKGGALSSSRKGSCIHSSTYGIGTTVFWVKTSRREVDSKPKAGILPGTKVKFIGWQGQCF

SEQ ID NO: 923383 - protein, 269 aa, Homo sapiens
MILIIPFAILHSEREDKSLTGLSNNPQVQALLFVLFLVIYLLTLLGNLLMVLVISTDSHLCTPMYFFLRQLSFLDAFYSSIIVPKLLENLLSKGETISFLECFTQISLVIFSGATEACLLSVMAYDRFQAMCHPLLYVVIINRRVCAGLVGASWAIGMGTGLINTLLLAQQHFCGPNVIHSFACELPPVLLLTCSDPCASIVSILTTMSVLGLGTLVLLLGSYSCIIMTALRINSATGRSKIFSTCSSHFLVVTIFYTSGVLRYVILYP

SEQ ID NO: 923384 - protein, 140 aa, Homo sapiens
MSTSFLATMTLLKKEFINGNPVLLRYQHLSGYRIQGQGWQFLIKPNIHLLCYPAMNGSSDCWNCGLSPLGESELEAPEDPENLDTLPTCGLIVSSMDVLQRKNDINLMRSTECGLKPSPNSILSLLAGILEVSILKIQEG

SEQ ID NO: 923385 - protein, 266 aa, Homo sapiens
MMFSSKYWARRGFSLDSAVPEEHQLLGSSTLMNDMYGKNLITEDSGTLTNILFYYASTFLKLNKPNSGKNDDKGNKGSSKREAATESGKTAVVFSLKNEVGGLMLVFPQEKRVNMVHIESRKSRRRSSEVEIFVDCECGKTEFNELIQLLKFQTTIVTLNPPENIWTEEEGKGGLSLSELEDVPWFPRKISELDKCSHRVLMYGSELDADHPGFKDNVYRQRRKYFVDVAMGYKYTTPASPMSQCFLIKLPREDSDGLSSHFHLRP

SEQ ID NO: 923386 - protein, 244 aa, Homo sapiens
MIFFSNVKFQSPKKMVEYTEEETKTWGVVFRELSKLYPTHACREYLKNFPLLTKYCGYREDNVPQLEDVSMFLKERSGFTVRPVAGYLSPRDFLAGLAYRVFHCTQYIRHGSDPLYTPEPDTCHELLGHVPLLADPKFAQFSQEIGLASLGASDEDVQKLATYLPHVRQDDREQEFNNNNNNNNNNNNNKSQTLFLIPGSSGSGGEDRQEDWQFLCGFVWATLGKGGGPPNLPDGHESDEGARQ

SEQ ID NO: 923387 - protein, 168 aa, Homo sapiens
MLGALHPLSYTHCPTFPNFWYKKFMTTLGVVAGYILKFSSSSRKNRYNFTDLPLSTPAESKTCQDKHSVQRSYHPGGERIPKVYRKGRPQKKENQQKPGFYMSKDALLSLTSQIDPVQGRKCRKRVKRRYTSFPILLKQGKCPVLWAKAGVWGWREAYFLHIVLEPVL

SEQ ID NO: 923388 - protein, 198 aa, Homo sapiens
MSHCWKCLSTVAGAGAVLSISDHSAAPSITVPHFSAWALLGLCHLGVYVQVTGDAMAWLGLRGLTVHPIHDLLASDGKHMAFGFLNNYPSTSWLRTVPSAFSNQWMVALLNSFLKSQRSFTIFGKIQWISDSTLAVKSENEGRLYNIVSWDLKLVMISWKLGIQRTSGDLFFLVLQPKVNSSELCRNPDTVTGKVIHS

SEQ ID NO: 923389 - protein, 154 aa, Homo sapiens
MDFRIVTGQVYCKRLEKYHRLDAIKNISDSWEELKVSTLTAVWKKVIPALMDDFEEFRVLNGERKNCHSHPNLQQPPPCSVNSPTINIKHFSFLLPCEEGRVCFPFCRDCKFPEAFPALWNYEVYIFVADMVFLCPYPNLILNCNANNSHMSWG

SEQ ID NO: 923390 - protein, 202 aa, Homo sapiens
MDLSHGTEVHYQLDTAPCISAAPAPVVAKQTLDMFQVAALEVENHKHLWPPHGVKPVGVQRARRNSWEAPPRFQRTYGSTRISRQKPAAGAEPSWRTSTRAVWRGNMRLEVPHRVPTRILPSGAMRIGLRFSKPQNGRSTDSLHSAPEKAAGTHCKPLRAVMGGEPCRATGVELPVLGAHPLQQCGLDKHVSKGKIFKLNKR

SEQ ID NO: 923391 - protein, 153 aa, Homo sapiens
MGQSTQLLMFHQVGPLLDKKGPQWLTDSRLLKYQVLLLKNLQASNLRAARVCSFAPEGGSSALQGTPEGHDETAQENSLADQKTKEATVPKFTFLGALLPSLPTELPPLQYTQEEIDLDHPTGISKRNQWMVQPGGTFPSAKGLPVEGHPESA

SEQ ID NO: 923392 - protein, 172 aa, Homo sapiens
MAHTWIQRLWLTYVAVLSGTSQMQCLESKSVQVATTKYHRLGGLNLEIYFIADLRTGSPRLRCQQDQYLAKAFSSDCRQPPTLCPQIAERENADISSYKDTIPIRLGPSPFDLINLYHLLTGSISRGENKNFFWKSKTLDGEKQYFTEQIELYVKSTQQTSSVISNISNIKT

SEQ ID NO: 923393 - protein, 216 aa, Homo sapiens
MLCCSVCGGEDVTKVYNTKGRVTMSQELTKEQKVFYKMVQQLLKAIQCTVESEALHKLMLLIWQECPWLHDQGTLDLKLWEQVRCCLKRGLEQGHFANVTVLTTWSWLHSALYPFDMPDCDESHHPFSSPEGNSEDLKGKGTQEPEQQRGAPRPTSLPSVGHKEDTLVKVLVSAAEYTVSGSGSGGQQLISSMLAASHTSMEEDTRGTIPGFLCDG

SEQ ID NO: 923394 - protein, 150 aa, Homo sapiens
MGRNQSRKAENSKNQSASSPPKECSSLPAMEQSWTENDFDKLREDGFRRLVITNFSELKEDVRTHRKEVKNLEQRLDEWLTRITSVEKTLNDLMERKTMARELCDPCTSFSSRFDQVEERVSVIEDQMNEMKKYRECHKDTPREEQLQDT

SEQ ID NO: 923395 - protein, 189 aa, Homo sapiens
MLKQKSAAGIGLSWRISTRAVWRENVGLSPHSVLTVTLPSGTVTLPSGTVRRGSLSCRPQNGRSTDSLHCGLGKVIGTQYQPVKAASTDSNVNLLWQHPHRHTQEQYLAFFKPTKLALNVNHHNVRHGTKGDDFGAFRITAALLNLDLHRAYSPFVLANFSFLEWEPLSNASTPIVSWKDICTRSYASN

SEQ ID NO: 923396 - protein, 134 aa, Homo sapiens
MRSEKTFKQRRTFQRRAEDVRLILAQHPTKIPGIIEGYKGEKQLPVLNKRFLVPDQVNMSEHIKIITKRLHLNATQAFLLLVNGHSMVSVSTPISEAYEKNLKASTNELLELMNENSVNCSTKSTYKNRLCFLH

SEQ ID NO: 923397 - protein, 116 aa, Homo sapiens
MRGRCEGGFGLGRRVAMIYGCSQGIIREADNLVKMSWPNKGTGQGASEAIGQCQSSAAKPRRSGKESAKEHWVWAPGALGAAVMVGEQRLKKSWSLIQPGGERPEEEQSGEKVIER

SEQ ID NO: 923398 - protein, 157 aa, Homo sapiens
MCLTTARSNRATKTPGKIDRHLLLTVFEQALQVFNRFTGIAAGGSLRFQVRGFRGAPGCQNELDISMIKQKLEPKTGTHQQTCQHPQYFHNLLVPGELLTLTKIKGNNPRQLSLPPAGSPKRYWMESLYRLSMFLAHQSIEQNVQIKQKNGKTVQIY

SEQ ID NO: 923399 - protein, 276 aa, Homo sapiens
MVRVGTNYQAIIPECKPESLARYSNKKLKGVLVWSPNHCVSDAKLDKYIVMATEKHGYNIEQTLGMLWNKHHVEKSLADLANFTPFPEEWTVEDKVLLEQAFGFHDNLVKYHYSWKKTHSRTSMTDRQARRLRGCKDKEDSDEFEESRGGLSEGEPDAGHPKRERSSFWLPKPSGGMADFGAIAEVIGNKTLTQVKTFFVSYWHCFNLEEVLQEWEAEQDGARGATVPVEEARRGAPLLAPAQEEDHEVQITSISMSVSRSVPPCTTPVPPPTSLP

SEQ ID NO: 923400 - protein, 165 aa, Homo sapiens
MCAGHGSWEQCLPITRQRLVPDSSLQVYTTLQCTQPNSHRAVPGKGELPSSPFPCLRFIPGTGASEWNRGVIASYLLQSDQAQLEEPRVRAAEALQHAGSFYPQPLPTGDLVRGRSLKLFLNCPLGHWPLTMSVPASNHCFLPLIRTADGNQFEDPNRGTESAVL

SEQ ID NO: 923401 - protein, 240 aa, Homo sapiens
MDLQNPRWEGQMHLFVPLAVLDEGQALSLGLVEGPVRFLAAPTTHPGNQGLIVLAGLMAARVLIAGVFDVLVVYRSSKPTLYLFAVQKLDTTPTGAIPVRQSATPQPVDNNDQKRAFERVNSIVQCHTAFRKQMASSSGLGTGRRSQHGCSRPRHGHYLLGLQLHHPHDVVEDKLRVMVVLVCILSGSIMVLTSVLGGRHGGAAVAAHLGLLSLAPRPLGGYVAPSRPLFPPPRDLNLDP

SEQ ID NO: 923402 - protein, 305 aa, Homo sapiens
MSNCSRSKSLIIKGKTLKKRSKLVPEEWGVAENIPENVEAHLELGNRQRLEQLEGSEEDRKMWESLELPRDLLNGFDQKPDSDMDNKVQAEVVSDGDEELVGNWSKGDSWYLAAEISKQQSIQEVTWVLLKAFSFIREVEHKSSENLQPDNVIEKKNQFSKEKSKSAAEICISKQEPNVNPQDNGENVSRACQRPLWQPLSSQAPRPRRKWFRGLGPGFPCCVQPRDLVPCVPATPAVAERGQCRAQAMASEGANLKLWQLPHSDEPVSAQKSRIGVWEAPLRFQKMYGNAWMPRQKFAAGAGCS

SEQ ID NO: 923403 - protein, 230 aa, Homo sapiens
MFDKKLIVSIVRHSLKAVSTCCSSYTLEMPLRSATWDPLGKCDMCDRGKTVATWLLDICTTTWYLSKYVTPKVLVGGWSFLRGARSGILVKKLLVYCLPRLPKAYVALGNTGKVLDENIERNVLLFPLVKKKSQSPLGNITSGSKSDTLIDVCTDVHTHNKRESYLKRSKVVEQHFQQFPRAQFTVLLPSSQDDKVSNSHENLKCPYLNLLGTVKREADPRYIQNSFHKS

SEQ ID NO: 923404 - protein, 160 aa, Homo sapiens
MTEFPAYPTPIHVLFERTKLSISKLLLNNIASPPQFLSKMLCYLDAYLGPCPDTPSPMHWISSHLIWALTHYSQQQLPPPHPILPRADFLFTTLDSNTVHWASWINFSSFLSSTSHIYPFLLPLPPQQMPSSFSPFGLCYSMLGICCHHYPLRNTCLAWS

SEQ ID NO: 923405 - protein, 161 aa, Homo sapiens
MREEHIKPRVSVRGSWIHRACSASAIPHGWEASGNLQLWQNAKEKQGTSCMAAGKRAAGETAACKPSDLASPPSLSREQHGGNRPHDPPNSPQSPPIRTLPPHVGITIQDEIQAPESAVSPSTHRLQAGKADTSATENATRCPLPKMWGEHGFAMKMSALT

SEQ ID NO: 923406 - protein, 152 aa, Homo sapiens
MDAYTASTGMGTGRGASSQSHPYPKPRRVLPDYCPCSLKAQGLLNQLVVNAAWPVTHPSGQWAPLWPRAGPKMPAKGQVLESGTLRACLVLYPSDVSRNVLHERGPGTGASQLCLVPYPAVAELVSKMQDSLPYSFLSSLQAEEGVSFGAPN

SEQ ID NO: 923407 - protein, 146 aa, Homo sapiens
MGRNQRKNAENSKNQNASSPPKNHNSSRTREQTWMENEFDELTEVGFRRWVITNSSELKEHVITQCKEAKNLEERLEELLTRMTSLEKNINDLMELKNTAQELCEASTSINSRIDQAEERISEIEDQLNERKNMGLCEKTKSMFGL

SEQ ID NO: 923408 - protein, 237 aa, Homo sapiens
MGLRFTNEDHLAVHKHKHEMTLKFGPARTDSVIIAGICCPKSHGSLCHYLTQYTSDWGSSLRMALSLAQGLAFLHEERWQNGQYKPGIAHRDLSSQNVLIREDGSCAIGDLGLALVLPGLTQPPAWTPTQPQGPAAIMEDPDGLRELLEDCWDADPEARLTAECVQQRLAALAHPQESHPFPESCPRGCPPLCPEDCTSIPAPTILPCRPQRSACHFSVQQGPCSRNPQPACTLSPV

SEQ ID NO: 923409 - protein, 413 aa, Homo sapiens
MLTAACSKFGGSSPLRDSTTLGKAGTKKPYSVGSDLSASKTMGDAYPAPFTSTNGLLSPAGSPPAPTSGYANDYPPFSHSFPGPTGTQDPGLLVPKGHSSSDCLPSVYTSLDMTHPYGSWYKAGIHAGISPGPGNTPTPWWDMHPGGNWLGGGQGQGDGLQGTLPTGPAQPPLNPQLPTYPSDFAPLNPAPYPAPHLLQPGPQHVLPQDVYKPKAVGNSGQLEGSGGAKPPRGASTGGSGGYGGSGAGRSSCDCPNCQELERLGAAAAGLRKKPIHSCHIPGCGKVYGKASHLKAHLRWHTGERPFVCNWLFCGKRFTRSDELERHVRTHTREKKFTCLLCSKRFTRSDHLSKHQRTHGEPGPGPPPSGPKELGEGRSTGEEEASQTPRPSASPATPEKAPGGSPEQSNLLEI

SEQ ID NO: 923410 - protein, 135 aa, Homo sapiens
MSMHLCICMCAGERVHMCMCACGVPWGSWKTQLLVLLLWLPLGKLTALGCCAGAPGALGVVWAAAGSPSVILNLGFSPHLTACSPTSSPFIRRAGVLPERFSFPGSFGVGSPQVGKGSWRSWPGASALQVPAPSL

SEQ ID NO: 923411 - protein, 151 aa, Homo sapiens
MKTDEEKHLKYVRNLSLKSGCLGVEMEKKVEMIRAVINVEASRKVTESPGGLFKPPIAGSTPKVSDAVDLGLLSSRESQRIPSSKVCAPGPIEVESLCSLLQACRDSAGFCSRTSTYNGMQSRLTSWRDLSTGPMGMGIAGDIGPLLGLQH

SEQ ID NO: 923412 - protein, 148 aa, Homo sapiens
MTGASAAILQPKGNLTGKCLWLPLLSVSHHTWQESTHFYPFFLQDKDLLPLPLLCFCSQPGSWWQRLGSFSKAKASKPNLFTMRTNPLGLHCNSIMVQASPLNGCWSFLIPPLLNRCSWEFSLVNLLHANLHLRGYVKVTAYNSGLRQ

SEQ ID NO: 923413 - protein, 151 aa, Homo sapiens
MHFNNDQVMLQQAQRTKKQLQQETAELGSEIPALTKKDALLLIKGMKTSGRGSRCVAAPLKILVKYKSLLPFLKQLQQLFSPENERKICDDFSRRSTLRITVGPTYSSGLVLRKAISYTPGPGFVVCPPQMMSPCYCYSSGYLTNVCQVSR

SEQ ID NO: 923414 - protein, 166 aa, Homo sapiens
MHLLRLPGMIKLSVRAGFKPEPDFKAIFHCALLPSPEMMPNTCATYWHLQFIRLLASSQGSSQGVKAAEVISPVKRSRNRKQKSDGGVDSVLLPRGPFLNDRKGLQGCECSSYIRGLPWYPWDLLEADLCILIRTSPFEAIDSSELAVFIIWGCSFFSSVVSLMLV

SEQ ID NO: 923415 - protein, 250 aa, Homo sapiens
MRPINQLLTDNSRCGLAIVPNAWSTLSAESKDCLAERSFVSVLTFLRGTDYLFLTESHGHLDKENKRIVHFTSNIYSLHSCLHGLEVSTCSFSRYKVQAAGGFTILGPGGHQPSSHSFTRQCPIGDSVWGSKPTFSRHMAVVEVERAVLVPLLHSVLTWEQPVGRMVSVQTQEWISVKGSWGPYQFQCSQRKGTRNSAAPEGVEAGSSVTYIMRFLQDFAVHLNANVQFWHILRMKVLKQAATLEISEHC

SEQ ID NO: 923416 - protein, 178 aa, Homo sapiens
MNILNVIFIYSSYTIKGEIGKLEFKPNNFEIDDGDDGKDSDGYDYDDDGNGDDDGHGDEDGDGDNDRDDGDGSDDDGGDDDGDDGGNGDEDGNGNDDDGDDDDSDDVNDDDGGDDSDDAPNLLLVAALTITECFRHLLFRLHTHSSDPQDNEDNSDLIYPPIGQSLNPEAIESTILVE

SEQ ID NO: 923417 - protein, 147 aa, Homo sapiens
MGDDLHSVRPVTVVPDFSRQLRFLRAGSDGLMLGHSSWEGIRLAGGVSRQGGRPIRGPAERNSRGKPRPSEHAPVFVSTLLFQWEVGSRNDPAIEPYTMMEPWVPKKKLGGCYQEEIDADLPRMTSVPSAILSTRLDRLSMAFLVLY

SEQ ID NO: 923418 - protein, 149 aa, Homo sapiens
MAGCRSQALPRGKAAKARREIERSAATGPGAKSLIARGQQGWLAAPSAGPTKPTPTRNSSWPASATRSPGSRSCFFLHTSLQAEGVGSGLGQPRKGLPQCSGGLKGSSNATKVGAQAGEVPRASEGSEDCQHAVTSHKLGFPNLSTMDM

SEQ ID NO: 923419 - protein, 150 aa, Homo sapiens
MHPSIHPSIRASIHPSILPSVCLPIHPFIHHSILLSTHPSIYPSIISSIHSSFHPSAYSFNKCQRPHAFSEHRAQQELFLSVVRTQDSNCLLSTNNAPHTVLGTGKNLPFVGEIGEHVNYTEKHKVSTVGVLWRMGRVSLDADNLAVDLE

SEQ ID NO: 923420 - protein, 115 aa, Homo sapiens
MCRAGVLHPLTRHLTLGISPNATLPTPPTPQQAPVCDVPFPVSMCSHCSVPTYECELQQMKFSVCVRKSSDLKEIPSNDCSAQKRLQQVFQVIRKPLGAGFCDHYDVTLEHFRHC

SEQ ID NO: 923421 - protein, 153 aa, Homo sapiens
MPAALDTVQQVPEGAYVYRVRGEADQQTEGSDSSPNHETSKDTDVTFQRDDGGEFSEGTIVKGGGNMRLVAVKPDATPTPAGSGEPSLQEPRGSTVRCSQPMEALQGRSQWKEYNSLSTPALRLLPECLTGWIPNPTKDNETYECIYKTSPKT

SEQ ID NO: 923422 - protein, 153 aa, Homo sapiens
MEDWALELLFPIYYFSDPKNFTNPPFLLHLGSRGYKNLQPPAKGWELRFIIISLTIITIITTIIIINIVTIIIITIIIITITIFVTITTIITIIITTIVITTITIITIVIAITIFITMTIIITITIIIIIITITIFTIITIITEAEKGENLEA

SEQ ID NO: 923423 - protein, 116 aa, Homo sapiens
MAHCSLNFLGSGDNSKPQNEVGVVFSSEVEVMIFGAADIPGGLFHAWERRVETPCNRLPMRTQGRALQGASCTLFPSFDQPDSGSFRVLPMTAPTCQKRKIQSDQIQFQIEFGFLF

SEQ ID NO: 923424 - protein, 137 aa, Homo sapiens
MTPGMQAFTHSLVHSVPTECLPSTVYCVSTACLLSASCVPTVYYVSSECLLHAYCVPTAYCMPTGCLPSIYCVPTDARDGSHQRTTQPQMLTAWRPRHGESDAGKGAGREGQGSHRGRSEELGFELSPRRGEAASFP

SEQ ID NO: 923425 - protein, 169 aa, Homo sapiens
MGSRRSWAAEACSGELQPRWRSHSPQQLKLQGRDGPHPRPGQEGQGGTRALEAHSLPVLQSPLLPSGGREEERGLEETTGERPTLKPLSDLLSAEDGPPVDARTSSSSVLPPPPSTPTTPNMDRGIQKYPLKLKSPRLWFYFCIPPKYRSFNFFVHLLKQRICSIHDEM

SEQ ID NO: 923426 - protein, 187 aa, Homo sapiens
MDVVFLTFPDSWAIITQKQLQLSIPLAEPQAHFPPQDKIKHQRNAYEEEINSRQIKAECGNLPITRSSQLSSHEIARRGVHSLGPLPVAMAILSPKFMEGGREVIRLHEHAGQHQSYLGGQHSGKAAAMRISPFPSSAPSADALLGSRKTQVTQSSGPDSLKPPAQQKRQDPFPRHRRKSLMAADWF

SEQ ID NO: 923427 - protein, 155 aa, Homo sapiens
MYTHVCICLHMYEFVGVCMSFVCACVYEFERQKYNHPNYEPILCSLKWIKLKDESHFDNSPHHCQTKYPNFVSEFHITALSLAKYNMKMLHVGPAGRGTEDRSSESRPRSRRRESRWCGMSGQISQPVGSTPLPALLEAQAHHQSIWENVSTIGE

SEQ ID NO: 923428 - protein, 146 aa, Homo sapiens
MAFKVPSALISHYLLEGVCFPSLHHLLLQATLFLHPPGTAIQRLYKQLPLPGPCSSSYLCVLSLTAFQCGDDDQRRRHKAPARSNLGATCKAPGTQHSPCDLRCMILHSTDILRFMETKCRGEPHLNSDVADSEGCVEIFEICNKL

SEQ ID NO: 923429 - protein, 185 aa, Homo sapiens
MSGCGRASLAAHEEELETLVPCNSQANPDLSFSPSVYQHASIQESHNRCKRGLMKAMDTGPSHLDSRLDEAAASPRASPLRFLSPPLLSPTLQPSKFSLPESEPRSPPRPQSLPGFRSPSDGCTLCPGSLRPRLNASSQFLNRPDAPAWTSLPLLFPLPGPHPLPSGKNAAALSPPAPAQMLPPQ

SEQ ID NO: 923430 - protein, 174 aa, Homo sapiens
MTITTITSSPLHHHHHHLHHYYYIITIMTITSPSPSPHHHHHHYHHYIITITTITSSSPRPSPPSPHHRFIIIITFITNITSSLSQPLSHHHHQHIITITTITSPSPHHHHRHHLITTTPITSSPPPPSPHHHHRHHLITTTAITSSPRPPSLHHHYHHYNIITMTITPITSSP

SEQ ID NO: 923431 - protein, 134 aa, Homo sapiens
MKGPDFLGAPADMQTDKGPNQRSQAPQKSPPWGESRSDRRVLPAVLSTLAGDSPCVAGPLMINSFFAVAPAVLIGSSRTAGKKNPQPVIPTQDALEAPICDWHLKCGAVLWAESLTCGVWTNSSMWMTTPSLFA

SEQ ID NO: 923432 - protein, 161 aa, Homo sapiens
MWDRPESWGTGARLRWRIQAPRGVPTSDPWGQACPQDDSPGFDLIAAPMRLPVFCRLRPQPAPPRPASHPGHAGCPPLAAYPRARESVPLPRFCAWSCPLHHRILSALFPKGCLDFTHISLPHSHLHFPGPSRHHSWLDVLKGVSARLPGLLPSTPGTEDL

SEQ ID NO: 923433 - protein, 169 aa, Homo sapiens
MSLQPLTLRQPIRIRSCLGLHPPHCAYAIPTQQPQPPHLGSAEGSPAWPFLGPTTNSSHRPASLATPYHTQFRDLLGGVGHNDTANCCHCSVRHPETQREPAKCLLHIPEDAAGYPWLVRREGARAQSGCLLSADCVPRLEGRVPVPSGHEAPTAYLSYRQGTSARSDR

SEQ ID NO: 923434 - protein, 194 aa, Homo sapiens
MEKGTELLVSPSQSGPGGDQPLLVKHREDSAVVLSLIDTIDTVMGHVSSNLHGSTPQVTVEGSSAMAEFSVAKILPKTVNSSHYRFPAHGQSFIQIPHEAFHRHAWSTVVGLLYHSMHYYLNNIWPAHTKIAEAMHHQDCLLFATSHLISLEVSPPPTLSQNLSGSPLITVHLKHRLVSGGAFTLVAAFDLVSH

SEQ ID NO: 923435 - protein, 141 aa, Homo sapiens
MTALLMACFSLKESRCLSVTELSLALPQHWGLCTQCAEWKAEGAGSAGASSASDTVNPAADGTVGGQPRTIFEITIVIVIIIIIINEILSQDIRFWEGLRELQSWQKVEGTRHVLHGQIKRDTSQAEFTVGLHSYENQTPG

SEQ ID NO: 923436 - protein, 157 aa, Homo sapiens [sequence omitted]

SEQ ID NO: 923437 - protein, 137 aa, Homo sapiens
MRRDSSILGDDRKTRPSAEAASFQSLLWLGGGLQAAPQPPQIPPGRGGLRRALEVDLLLCGDSVRETSGGCCVIQTRKQHSEATNSSNRVFVYCAFLDFRYPLHRGEQLASTAHLPNVWGISHHRCDHNSPLDVSPP

SEQ ID NO: 923438 - protein, 214 aa, Homo sapiens
MLRKAVLSRRVHSRPQGSSSRGGSTGGHQELLVNIGILIAVTRVISQISADNYKIHGDPSAFKLTAKAAAVLLPILGTSWVFGVLAVNGCAVVFQYMFATLNSLQGLFIFLFHCLLNSEVRAAFKHKTKVWSLTSSSARTSNAKPFHSDLMNGTRPGMASTKLSPLGQEQPLCPPRRPVSRVSREAANHGRLRSEHTPPNRMKCSTFAHGPSPC

SEQ ID NO: 923439 - protein, 373 aa, Homo sapiens
MLAANPGKTPISLLQEYGTRIGKTPVYDLLKAEGQAHQPNFTFRVTVGDTSCTGQGPSKKAAKHKAAEVALKHLKGGSMLEPALEDSSSCYPSSICSPNQSLDPSWSGMRKSENKQNGIVGNQNLKKSQQLELVVQKGWRLPEYTVTQESGPAHRKEFTMTCRVERFIEIGSGTSKKLAKRNAAAKMLLRVHTVPLDARDGNEVEPDDDHFSIGVGSRLDGLRNRGPGCTWDSLRNSVGEKILSLRSCSLGSLGALGPACCRVLSELSEEQAFHVSYLDIEELSLSGLCQCLVELSTQPATVCHGSATTREAARAPAMLVSLSDSPLGLKQEGLAPARSLHCLEQDFTPKRDNTADADGGNGGQQPPTLIPAR

SEQ ID NO: 923440 - protein, 147 aa, Homo sapiens
MRRKGYIKRRMTKIISGVQEIDPWILGTAIWFGSMEEVMLHLPLRKYKPLISSSLLTYRNITSLEDLLLLHWTELQRLLCLPSPPVLAIAGEVCGPWLQDLSGGPHEAHGPAPGSVFLGHQGLKPLCGPHLERGLLQGTLPHPPCLL

SEQ ID NO: 923441 - protein, 138 aa, Homo sapiens
MGELRLLRQVGSVSLQPLSQEDLGRSQSESLGPEFQGLWEWLPDFQHLKQDTGGGGPEEMPDCCGLGVLKFLCAGDVAGVSLTAAASNCNSSVLLYTLKTRLIKTCVGFKGQNLIFGALFNVGNELRNKMHIENKTAF

SEQ ID NO: 923442 - protein, 147 aa, Homo sapiens
MRTCGIWFSVPVLNWNKTRMSTLITPIHHGTGSATQSSQVKKEMQGIRKEIEVKLYLFIDDMILYLEKPRESAKSLLELINNFSKVSEYRISVQKSVAFLYTNNIQAESQIQNAISFLVATHKTKIPRNTSNQGSERSLQRELKNTA

SEQ ID NO: 923443 - protein, 413 aa, Homo sapiens
MLCAAPNLQNQQVLTGLPGVMPNIQYQVIPQFQTVDGQQLQFAATGAQVQQDGSGQIQIIPGANQQIITNRGSGGNIIAAMPNLLQQAVPLQGLANNVLSGQTQYVTNVPVALNGNITLLPVNSVSAATLTPSSQAVTISSSGSQESGSQPVTSGTTISSASLVSSQASSSSFFTNANSYSTTTTTSNMGIMNFTTSGSSGTNSQGQTPQRVSGLQGSDALNIQQNQTSGGSLQAGQQKEGEQNQQTQQQQILIQPQLVQGGQALQALQAAPLSGQTFTTQAISQETLQNLQLQAVPNSGPIIIRTPTVGPNGQVSWQTLQLQNLQVQNPQAQTITLAPMQGVSLGQTSSSNTTLTPIASAASIPAGTVTVNAAQLSSMPGLQTINLSALGTSGIQVHPIQGLPLAIANAPGK

SEQ ID NO: 923444 - protein, 202 aa, Homo sapiens
MASWKSNGITITIIHQPHSSPCFFPVSAPSGTQSASAFALSYRGQANKNECYVGGIRGVPLYEKLLLPQTIFYCPLLLPHYPPPNIPGFLLWSCNGRDLSTIYPIGNNLGHMCLIFSESGIFSVLVTSVSWAQVQGLLHICSQKILVKGINQSVQAEYKHLFENGCHRFMIRLEGHEGTASFTKPKFFFYYYYCYYYYYYYL

SEQ ID NO: 923445 - protein, 320 aa, Homo sapiens
MLAATKALWPWDPPSQAWEGISWSAGCKDHGKSTWAGGYCSSRYSHSQLPLARKGKSPDPLCFPDGDEKFIGNWSKGHSSYALAKRLAAFCLFPRELWNIELEKDDLGYLAEEISKQKSIEDVTWLFLKVYTYMCEERDGLKLEFIFKREAEYKSLENLQPNHAVEKKNPLSGEKFKLGADICISSEELNVNTQDKGENISRAFQRSSWQPLPSQAQRPRRKKWFCGPGSEPCCSIQARDMAPCISATSALAMATRGQGTVWAIASEGASPNSWWLPCGVGPVGAQKARVEVWGPLPRFQRMYGNAWMSRQTSTAGVEPS

SEQ ID NO: 923446 - protein, 157 aa, Homo sapiens
MVDWVLGGQKSEGVAVSQPWSSSNGKSLCTCLTPSHQQINGGLSRAPFSTKSIDYTTGNNQGVSCSINICKVNAQKLLGTFEGASLTPISDQFVLRGCLLISIFEKITHNKKSVLLLIRCAEVRAIRGELPLKSMWTWTKEKLQRLMASQGIRVNIR

SEQ ID NO: 923447 - protein, 155 aa, Homo sapiens
MIGLLQATEQGSQSESQNLKRRKADIAYFSLWLKAQEPLAKHWCPSTACLLEFAGGLLQILFAWVSPVEAAEQPRLLPIPSLEAFLFGASSNQAINSSRIDSTLGNLLKVATLVFYNRDQEETQEIKKKTQERDRGSSSCFQACKFQYLQDASAS

SEQ ID NO: 923448 - protein, 166 aa, Homo sapiens
MNLAAAHSLGWHCLYELYHSPQRSAASLLSQRDHEPTGRNEHIQTSEGTNSRHAAFKNSNTHREDHPEGTNPAKTLTLAQYKGFQTYSLHKELFGYEHDLSFKKGKSDPKGNSEIIKDTTPKACRASSSLVSKSGVFKSLQFLEGQNAPIQCLRVEMSFQRALGRR

SEQ ID NO: 923449 - protein, 240 aa, Homo sapiens
MSHEKDFHKSYPKLSIRDGLGASQVIGQCQSLAAKPRRSQSDSLGPEFQGLWEWLPEVRHRNNGLEHRDKRLGHRNKGLERRDKRLGHGNKGLGCRDKRLGHGNKGLEHRDKRLGHGNKGLERRDKRLGHGNKGLERRDKRTKAGIPVWSDTFETWVNNQRGTPAMIKHQGKADFPVHDRRQSFGSTDKTCLLCLYQKMKGIEIKRRERLKCGTKIERRKRLRDSVGGWRRESKEAAYWI

SEQ ID NO: 923450 - protein, 158 aa, Homo sapiens
MHELVLVHNLGQDGWGAGRGGWNGNVVFLRSWAAQLPDSSLTAPGRTPLGIQMSLLFFLSLPCRSAVAGLPVCWCLLVCSSASLNLQLLASVPAKALGLYGNRMGGMVGQSSLGKCNIWARKQECLFSLRSVGTGLRVEPSPGTLSFFTQYFPGPHPV

SEQ ID NO: 923451 - protein, 214 aa, Homo sapiens
MPCIPAVAKMGQCTAQAIASEGAKPKPWQLLHGVEPAGARKSRIEVWEPPPRFQRMYGNAWISRQGCASGVIPLWRNSARAMWKGNVGWEPPNRVPTGALPSGAVGRGPPSSRPQNCRSTDSLHCRGRKTTDTQCKPMKAARRGAVHYKATGAELSRAVGSHLLHQHDQDVRHGVQGNHFGTGIFWAHAWKAVPKWTAATALGKSSQKARQDAE

SEQ ID NO: 923452 - protein, 135 aa, Homo sapiens
MGQTDGLATIDHFPVQRLIIFLSLASAGLFPPILISIPSSPHRKPSILQLKVSSPSPFVEVKNNNAHTSHILDFVRTLATCTHSHQQQQGSRVHNPTYVQGWGSSSKARSMHAGKVVRKGDGKVHISRNPSVEAL

SEQ ID NO: 923453 - protein, 131 aa, Homo sapiens
MKAQAPVTPFLFPLCKSYFSVWITATDSNTKHDDDDDDDDDDNEANIYRPHVSGSVLSASHVLTHLLFATTLEGRQYNCPILQPMTAEVVKSDISYIPIRDSRCPRNKTCSSALGTGVSLNLQETFKALNV

SEQ ID NO: 923454 - protein, 144 aa, Homo sapiens
MLSEKTFKQCCTFKQRVDGEKELPVLDKTKFLVPDHVNMSELTKIIKRCLRLNANQAFFLLVNGPSTVSVSTPTSEVYEGEKDEDGFLYTVYASQEISDFSVQLETCLPVASILTLHNFTVRETARVTLSGSLLKKILEHGFNN

SEQ ID NO: 923455 - protein, 135 aa, Homo sapiens
MRTCPTSVDPDTLSCHRVFVKVFVFSARGYRASSPLGLAPLNPEDGLQSLNPEDGLQSFLHRTFGICKSDTSAMEERHPVKPSLVHNGQMTVSFQSQFAVTLLSVFLVSQESHVFGFHVGFVPTDPAVNEVCLHH

SEQ ID NO: 923456 - protein, 143 aa, Homo sapiens
MPQIEVKGAESSHPCINCTHAYHWIWAPLPKVISRGPGITGVCKVELEKASMELSDLQGLGQLVSCRLGLHARPKDAPASLLVHLVPCCLRPRAGEGRVILWLAIILSLFPSSFRKGACPQFGLDSWHGWGKPGRRRCENLGV

SEQ ID NO: 923457 - protein, 152 aa, Homo sapiens
MASSGTFNQIPEKSPCKERIQGPPVSVKIPDTSWVHSSEASPGYQRRWVRGPRWGFSATRESTSYLVAIIIIIIISSSSSSSSSSINIVTCLRTLAKNTFIELQSISIKNKLPNAKAQSLLKENDKFAVYREPTAKRSLHSSFGSFLLPTRF

SEQ ID NO: 923458 - protein, 161 aa, Homo sapiens
MLASVGTHSPCSWTTLLPAPINSLADTLRTKEVHGGALVPVGLLISCHDPLRDWDCGRNQTHCTDGEVEVQKIQPPTQGHTVIRGPLTPGPLHPSIGGWPDLVGEIEVPPLPLKASPLAPYLPLSSCGRRDKSNSYGRFTTGDGQPRPPPAAFPWSGQIKG

SEQ ID NO: 923459 - protein, 188 aa, Homo sapiens
MSLAQSGHLGGSCPELEENRPQCLLLLLERQVPLKWRARLALSASDRARPNNIYYEDEMRRFTVLESTRPPRGQRPHANVQVTSRGRGAEQMALCLQSHVLMTGIPALRMMWGHPTSLHPWPHGLLCNDPHVLACVLHYSPLDGAWLPTAILDPAALGQDNCPRWGCLYWIIIPAGNLWEVSGDLAVS

SEQ ID NO: 923460 - protein, 136 aa, Homo sapiens
MVREGNAPCISLALASIQIEEIEESLMKGKVYQYVCRVWESTVLRATHSKEQDPNMLPSLQSHFGDPLWPNQTGSQRAQWNLQDPFQAISHSTEQHGEGGGLGLTTQIPVSLKLARSAHLPLLTGCDSSSPWSLLV

SEQ ID NO: 923461 - protein, 140 aa, Homo sapiens
MVYLAFREEMEMKGPRGCSAGGPKKTQNKMVRGMDPAARTPGLNSSAPSYYDSCASELTESSNQLFAFRSLALKGPGWAVLRRKLKSSSLEELLLDSADEDPRPLTQAHRQRGKALAGEVLIGVIPDTRQKRSGNGGGCF

SEQ ID NO: 923462 - protein, 134 aa, Homo sapiens
MAHVCDIRAGCDQCHKDTERGGGVWAETQIKIPSLGKVGPSTEALGLGSVRGLGGDEATWGRVPGRGSSTEVLVRYFEDSLNFGFSGVLLTIRMGLWVFGRNTTEAKGPSHHTLLEGMILTSLITDEVNPNSLV

SEQ ID NO: 923463 - protein, 143 aa, Homo sapiens
MEALEDAQWMGIWVIPTSQTPKVTTEGDGIIESQGWEESQRPYQMQNNFSILEKWSMSACHCTPKWKNPCVQSNSRGEKIKQSFPCYHSAGAHLSPHKMLKLFKVAGGAQAPSGVTPGTGQSGILGAIWLSHPLMNPHQSPLH

SEQ ID NO: 923464 - protein, 139 aa, Homo sapiens
MASNPSLPSRSSQGAVAPRCKGAGPGRGRGLADLRGGGALCRQTRERPHSSPRPRPGSWTPLDLSASSPLSWKCACRTRNVQSPTVEGKHKSPPEIITCSGLLSAFFLNIKYTYTYFNTIVALLYVLFCAAFFSLSPSA

SEQ ID NO: 923465 - protein, 400 aa, Homo sapiens
MASQSCHISSGCGVKNFSSRSATVPKPGYHSCVSAMAHHGVSPGGLGSRRLGGFGSQSLCTVGSPRIAVSCRWPLHSRGRFGYWAGGLCRPSPPRITSVTINESLLMPLNLEIDPNAQCVKHEEKEHIRCLNKFAAFIDKVRFLEQQNKLLETKLQFYQNRECCESNLEPLLQGYMATLRREAECVEADSGRLALELNCTQEALEGYKKKYEEELALRATAENEFMMLKKDVGYTYLHETDLEANCEEVKATVTQQGENLRRTKDELNELNCMIQRLTAEVENDKQQRCKLEAAVAQSEQQGEAALSNAHCKLAELEDALQKAKQDMACMLKQYQEVMNSKLGLDVEIATYRKLLEGEEIRLCEGVGSVNIFLTVCQILLERSQLEGVEYVGTSLRFALG

SEQ ID NO: 923466 - protein, 134 aa, Homo sapiens
MGTQLHDAGESLVGVLEGVPWSLCSHPGLSLSPNTKVGRFLGLEQPSVRWGGQSPWNLFADYRAEGHSGSRHVDVHPRNHTHRPQPCAACPAGSCDAPAWSLLLASCPDSPVGLQDSGLPAPPPGSFQSLRTKP

SEQ ID NO: 923467 - protein, 613 aa, Homo sapiens
MAGDFLRVRSTWLLWGGHTLSLGSCKNADQLSCPPMNGKPNPRIKLLTAHPQAPVPSTYKGTCQSSLQPAEPFGILPSSLLHLSFVSTSNMSRQFTCKSGAAAKGGFSGCSAVLSGGSSSSFRAGSKGLSGGFGSRSLYSLGGVRSLNVASGSGKSGGYGFGRGRASGFAGSMFGSVALGPVCPTVCPPGGIHQVTVNESLLAPLNVELDPEIQKVRAQEREQIKALNNKFASFIDKVRFLEQQNQVLETKWELLQQLDLNNCKNNLEPILEGYISNLRKQLETLSGDRVRLDSELRNVRDVVEDYKKRYEEEINKRTAAENEFVLLKKDVDAAYANKVELQAKVESMDQEIKFFRCLFEAEITQIQSHISDMSVILSMDNNRNLDLDSIIDEVRTQYEEIALKSKAEAEALYQTKFQELQLAAGRHGDDLKNTKNEISELTRLIQRIRSEIENVKKQASNLETAIADAEQRGDNALKDARAKLDELEGALHQAKEELARMLREYQELMSLKLALDMEIATYRKLLESEECRMSGEFPSPVSISIISSTSGGSVYGFRPSMVSGGYVANSSNCISGVCSVRGGEGRSRGSANDYKDTLGKGSSLSAPSKKTSR

SEQ ID NO: 923468 - protein, 468 aa, Homo sapiens
MSRQLNIKSSGDKGNFSVHSAVVPRKAVGSLASYCAAGRGAGAGFGSRSLYSLGGNRRISFNVAGGGVRAGGYGFRPGSGYGGGRASGFAGSMFGSVALGPACLSVCPPGGIHQVTVNKSLLAPLNVELDPEIQKVRAQEREQIKVLNDKFASFIDKVRFLEQQNQVLETKWELLQQLDLNNCKKNLEPILEGYISNLRKQLETLSGDRVRLDSELRSMRDLVEDYKKRYEVEINRRTTAENEFVVLKKDADAAYAVKVELQAKVDSLDKEIKFLKCLYDAEIAQIQTHASETSVILSMDNNRDLDLDSIIAEVRMHYEEIALKSKAEAEALYQTKVCPCLITNFLSLGNQIQELQLAASRHGDDLKHTRSEMVELNRLIQRIRCEIGNVKKQRASLETAIADAEQRGDNALKDAQAKLDELEGALHQAKEELARMLREYQELMSLKLALDMEIATYRKLLEGEECRP

SEQ ID NO: 923469 - protein, 218 aa, Homo sapiens
MSRQLTHFPRGERLGFSGCSAVLSGGIGSSSASFRARVKGSASFGSKSLSCLGGSRSLALSAAARRGGGRLGGFVGTAFGSAGLGPKCPSVCPPGGIPQVTVNKSLLAPLNVEMDPEIQRVRAQEREQIKALNNKFASFIDKVRFLEQQNQVLETKWNLLQQLDLNNCRKNLEPIYEGYISNLQKQLEMLSGDGVRLDSELRNMQDLVEDYKKSAYCF

SEQ ID NO: 923470 - protein, 551 aa, Homo sapiens
MSRQISYSQQPCRSSGGAYCQTFSSHLAVVSGHSWISSIMSSFASSSGRAGGGQSLHGLGGKKTIPISVAGGGTWASGFSGAGGFGGPGGGCFGGSGFGGGGRGMGGSFGGRAGGFGGGIGGFRGGARGFCRGAGGFGGSGSFGGPGGFGGLRDLSDLGGFLGGIQEVTVNQSLLQPLQETDLKFGQVKAQKREQIKTLNNVCLLHRQSEEGVVGSPNMSSPLWYLSSSGPAYSSNRYEDEVSKCTAAENDFVVLKKDVDAAHMTKVELEANVERMIGEMNFLKALYDAGSLSSLPFLGTHLPCLLEERAFRSPAGLRGHVCLALWELSQMQSDTSDTSVVLSMDKNRCLDLDSILGEQQTTASRHGDDLRNTKNEIMELNRMTQRLWVEIESIKKQEVALKDTNAKLQDIKSGLRQAKEDLALLLCAYQALMNAKLALDVEIATYRTLLEGEECRVSGRCQSSVILETGHSSTGGGCALGGGVGARARGGSRGRSGWGLGGSSAVLGGLLWLRDSCAVSRGGGGGGSSAARENKAPPRAGVPFALRHAPL

SEQ ID NO: 923471 - protein, 587 aa, Homo sapiens
MHASLCPGSSIIQGTDIEEAAILAFVLVPNLQKKNNGTKNKNEIRRGIGIRRTNIKTMMGTDGTRTRNDPVSPGRGKDFKSRKDGDSKKDEEDEHGDKKPKAQLLSLEELLAKKKAKEEAEVKPKFLSKAEQEAEALKQRQQEVEEQQRMLVEERKKRKQFQDLGRKIGNEDEKGQQKIREEKDKSKELHAIKEHYLGGIKKRHQTRHLNDRKFVFEGDASEDTSIDYNPLYKERHQKKLDEMTDRDWWLFREGYSITTKGGKIPNPIRSWKESSLLPHILEVIDKYPTVAVIGGISREDWGFRLLMGCEIVIATPGHLIDVLENRYLVLSCCTYVVLDEADRMIDVGFEPDVQKILEHMPVSNQKPDTMIMFMATKPPAVECLARSYLRRPAVVYLDPAGKPHERVEQVFLMSESEKRKKLLEILKQGFDPAITIFVNQKKGCDVLAKSLEKMGYNACTLHGGKGQEQREFALSNLKPGAKDVLVTTDVAGHGIDIQDVSMVVNYDMAKNIDDYIHRIGRMGQAGKSGVAITFLTKEDSAVFYELKQAILESPVSSCPPKLANHPDAQHKPGTILTKKRRGETIFA

SEQ ID NO: 923472 - protein, 383 aa, Homo sapiens
MSGLCTELDFMGLGANQRQTAKASANDLQPFLESYIGCLQAYLDKLLMEQSLLDGELGTMQALVEEYKRRYEDEFNKYSEADNDFMVLKKDRIKATVARRQMDRENIQLIHLWSWVHDYQLVLGNVCHSCCKTTARRHDDDLRSTKNEIAELSRMIHRLQAEIENINKQGAMLTLKDAQAKLAELRDALQQAREDQAHLPCDYQELLNIKLGWMWRPPPTRRCWRARKRRPWKGWLLSVGTSSPQVSEALSRERCSSLQLVVLAFLAISREGSSSLQLVLPHLSILCVLSPALAVPWAFMDLRGEEVCADWSMGCPKENRRTGSAAAIWMAAASPGEVPPQLRRGGAPTGSMECAALAVPPCCSRCHHYEVDAVQEAVLCPWC

SEQ ID NO: 923473 - protein, 206 aa, Homo sapiens
MVCALLTLPGAECGEGNSVVDTPGAECGEGNSVVDTPGAECGEGNSVVDTPGAECGEDNSVVDTPGTECGEGNSVVDTPGTECGEGNSVVDTPGAECGEGNSVVDTPGAECGEGNSVVDTPGTECGEGNSVVDTPGAECGEGNSVVDTPGAECGEGNSVVDTPGAECGEGAGLWTSACKWPHSPDPLLSTANSTATSHGPKFDGQT

SEQ ID NO: 923474 - protein, 162 aa, Homo sapiens
MWLQLLADVRRYRQFLAVYSCQHLEKPPAEVHPKHVKTASQHLALWLQKPKASNLMLQSHKGTAFLVQSKGPHAPTAVRMLVDHCEHKFHSPRDGFTHQGMIRSGLPPQQHLQAGVQCLEGALGATTAVSSLHHGEDIQTKQNIGVYHQQTEGTSRKQLQKQ

SEQ ID NO: 923475 - protein, 189 aa, Homo sapiens
MRQQCLQGSWPTAPSQSLPPPSTLCVVEKTVGRKSAIAASVCGALFIRYCIYFYHKRRSDPNFKNRLRERRKKQKLPKERAGFSKLPDLKDADAVQKFFLEETQLGEELLAQGKYEKGVDHLTNAIAVCGQPQQLLQVLQQTLPPPVFQMPLTKLPTIRELKEQHLSNTDISSCSSLTAKGGTSGKGPI

SEQ ID NO: 923476 - protein, 162 aa, Homo sapiens
MSRRILNIPERIILIHSECLILPVFLLPFQALTVCFLPRNAFSAFCSDQPPTTIYYSQINFLVFLAARNGWKPTTFFSFNPSPQKISLMRESGLMRKSGPSTNTAWRVGLGVQLLGSNAFLRSSGWHQSRASKSGIGSDGSCSCSVAQAGVQVIGSYLSSNY

SEQ ID NO: 923477 - protein, 456 aa, Homo sapiens
MSFCPSVRSSRRPPLASVFPPISSQPPRIRAVLMIRPLVASLAPVPFRGTAWVLAKSRQVIRGQCGYWLLRAMKVRKTEEGVRGGPRLSTAAGLGPNLQPSINLTVLPTSAAAQTLHFGILAAICRIGSFCQAHMALGPERPPRGWRNLVSVEQIEKITSLDLEFGRQKPSFLSVKVDTLEWSGAQTMQQGPVRGVCCLPGSGNPNRKPLCGAEGKTEDIRTQDTPKREGWRLHIATLRGLPYPGFSSSGHEPRLREVKRLEEQGSPGDEKEEEKEMTQDRLFWGPPPSRLQGEAFVPKKLYPKDSQEAVGREQGLNARLGVRAWVTGPAALGRGWGPRDESDLAFVQDEVTVWWGDRGAGREVTLRGTVGGTLLGSQAPGNSKKARAPAPPWALGFQSHPFQAILASSQESPAAMPTNCMSLAAPLCLSLALSGLFYNPVLFSSPSTLCCLLVKG

SEQ ID NO: 923478 - protein, 167 aa, Homo sapiens [sequence omitted]

SEQ ID NO: 923479 - protein, 226 aa, Homo sapiens [sequence omitted]

SEQ ID NO: 923480 - protein, 217 aa, Homo sapiens
MTAQPGSWGSWMSSFVGGYRILGGTHRLWFTEWASQHVGRLARFPVLRLCVHGLEIRGRSESDTTAQNRKLGAPSVPMSDRDGGVGPRAPHYSDPLLPTERHRPVSTRPVVFLRPCEWWTSKTFGQQSKAPEYAEGARENSDLWPDCSRKAWSSLPASWPLDLPLCTASSEGLPARRPQQLLEPDDGPAWQFLAIRPRGPVPRQTLLPPCQFPPPVS

SEQ ID NO: 923481 - protein, 276 aa, Homo sapiens
MGNALILVAVVAEPSLHKPMYFFLINLSTLDILFTTTTVPKMLSLFLLGDRFLSFSSCLLQMYLFQSFTCSEAFILVVMAYDRYVAICHPLHYPVLMNPQTNATLAASAWLTALLLPIPAVVRTSQMAYNSIAYIYHCFCDHLAVVQASCSDTTPQTLMGFCIAMVVSFLPLLLVLLSYVHILASVLRISSLEGRAKAFSTCSSHLLVVGTYYSSIAIAYVAYRADLPLDFHIMGNVVYAILTPILNPLIYTLRNRDVKAAITKIMSQDPGCDRSI

SEQ ID NO: 923482 - protein, 382 aa, Homo sapiens
MAPRAGQPGLQGLLLVAAALSQPAAPCPFQCYCFGGPKLLLRCASGAELRQPPRDVPPDARNLTIVGANLTVLRAAAFAGGDGDGDQAAGVRLPLLSALRLTHNHIEVVEDGAFDGLPSLAALDLSHNPLRALGGGAFRGLPALRSLQLNHALVRGGPALLAALDAALAPLAELRLLGLAGNALSRLPPAALRLARLEQLDVRLNALAGLDPDELRALERDGGLPGPRLLLADNPLRCGCAARPLLAWLRNATERVPDSRRLRCAAPRALLDRPLLDLDGARLRCADSGADARGEEAEAAGPELEASYVFFGLVLALIGLIFLMVLYLNRRGIQRWMRNLREACRDQMEGYHYRYEQDADPRRAPAPAAPAGSRATSPGSGL

SEQ ID NO: 923483 - protein, 152 aa, Homo sapiens [sequence omitted]

SEQ ID NO: 923484 - protein, 168 aa, Homo sapiens
MACSFYSGQLHLDRGSMVAPGSLELQSPKEGVTALAWEAPMSGFPEGCSSSLLLVTRNVSRHLVGPKFLSCVRKNEACGQLEGRSSRQVSSSQQRRDQQWVARFHRQVILTNGGDLKWVCSSLLGVHSGPCLHWYPQWRLQNSKDCCLLPPPEASCKRVPLRTSVSLS

SEQ ID NO: 923485 - protein, 153 aa, Homo sapiens
MRKSLIGLLLRPLPLPIPSLLVFIRAESGSLLCSESTWYTFPCRQLWDWGLLDDEGRFSSDCPIPGYPMFAQIQRHQKRQRAFGATGSKGRGCACHWEKWAGFSEASAYRELQEGRASLPTPHTGPAYMDAVEGFVGSRSPGVWSLIQFSGPV

SEQ ID NO: 923486 - protein, 241 aa, Homo sapiens
MLRYCQSARAYHLAEACMAGSSLEGRGREQQCDSGGTAWPLAALPSGSGRQWSGGCAGQRRSSKEGRKGSEIAQGQQQQCGAGAAGATPLWPLTHGRFSRRKWGEIGEQEAGGGCGGKSLGILAPGSSFLTLTPVQSPEPGFLPREPAGHCFTHSENNSFPGSQPQVGGACLELRHLESSACYRVCQVWRRQQKRRKTPSPHSLSSGALEEVLHCSEFLHPEGRGEHPPALDSGSNHKTRS

SEQ ID NO: 923487 - protein, 168 aa, Homo sapiens
MPDSPSTRLCSVKIPPDCVEVLDSIHSSRPDLRDQPWPSGDWELYVDGSSFFNPQGERGAGYAVITLDTVVEATSLPQATSGQKAELIAFIGALELSEGETVNIYTDSRWQLCIAGDTSELPSCWVWGIPALTQRLQKQHLPPSGHQCSLKHLILDLLLLKKKRTFCR

SEQ ID NO: 923488 - protein, 153 aa, Homo sapiens
MPEGPRKKREEPLTLILRRKKVTFEDVAIDFTQEEWAMMDTSKRKLYRDVMLENISHLVSLGYQISKSYIILQLEQGKELWQEGREFLQDQNPEDMRKLTQERDHISVINVGKPLFNPLTFEDMRELTLEKSGMNVITVGKPLVKALALEETK

SEQ ID NO: 923489 - protein, 168 aa, Homo sapiens
MRVLAFAQERIQGQAGGIEEDSFIEEAALQPCDFSYVEVRVRILQCLVKGFRLPQFGGSHQIPDGPVELLNHQLPVLCLWPESMSHVIWLSVAQSHNVKVFLGEPVHDGIDVLPPLCLVAVWLQSMPGSRCIGSTRGSRGGMWLWPGQRTEDAACHGYSNRFSFGLMS

SEQ ID NO: 923490 - protein, 289 aa, Homo sapiens
MSSSSSLDIRNNITRGDISLGYYKYYHRLYTHCDNTVIHPKDTTKNITGLYNHYDIRKDPELQPVLTLLSLSLSMYLVTVLRNLLSILAVRSDSPHHTPMYFFLSNLCWADMGFTSATVPKMIVDMQSHSRVISHAGCLTQMYFLVLFACIEGMLLTVMAYDGFVAICRPLHYPVIVNPHLCVFFVLVSFFLSLLDSQLHSWIVLQFTIIKNVEFSHFVCDPSQLLKLACSDSVINSIFIYFDSTFGFLPISGILLSYYKVVPSILRMSSSDGKYKAFSTCGSHLAVVC

SEQ ID NO: 923491 - protein, 127 aa, Homo sapiens
MVRTIPVLSFFRLGGESDSADKHFMFHSLNVEDIFSLIPPIFSIFPGRFQKASVHADFGGSKQETIDPVQEMTLFEGNEGVPRNLEEWRCGLGCGSVVSFVNGNNISPPRRFSVNPKRPSVNENIVI

SEQ ID NO: 923492 - protein, 150 aa, Homo sapiens
MLIAATDDSSTFLLWAFIAVNFPLNTALAVSQRFCFPSNSQAPLLQVCWSLLEVYSKPCLPGYHQWRLQNSKDFCLFLCLEAAASLSEMPCPERRNLERQSGYRSFAELWWAPPSSNSLAALFTLTENHLTYSNQVYPTLTFAVLDRKEH

SEQ ID NO: 923493 - protein, 138 aa, Homo sapiens
MAHVYISKEFKVVLETLVVVMEVVLVGMTTLVMEETSVVMVGLVAAVVVVVDMVAVEMAIMDLVMMETILEVVEATVILAETSEAEVLVPMVMEANTLPNHETKMVIVVLVAAVAMAVAENFNYCQETKLSSRVEPET

SEQ ID NO: 923494 - protein, 143 aa, Homo sapiens
MRGRAGHRLSGSGSIILGALSLNAAPVLSVSAGANLKAPVVPASDSSQGSQPRSPAGQFLLHYPGCSREVKKEERSLGPGDLRNLDIILNTQEISYGSKMNSEPHYVTDWILLLRHCYGKPELQLKTALTERNFSDGPGESGS

SEQ ID NO: 923495 - protein, 134 aa, Homo sapiens
MFKSAISSLASAPLSRGVKGSVSLAFQVLLGYGKKKKELLQLVWYLPNWLPSSVLETQGPGGVDTRRNLLVCGLQRPQDKCNICARAPQAQTLTASLGIPFTRLAVFIFTLTKSIQSQYFTTSHFIPDLLPTYS

SEQ ID NO: 923496 - protein, 157 aa, Homo sapiens
MIRNELSSRCLKSLNTQALRRSDFLISHSDPQAFGVCCPSSTWEKMKWSIEDQQLNTSTENDICHFVQVHWPNKLAMVAGRDTDEGGNHHPQQTNTGTENQTPHVLTHKWELNTENTWTQGGEHHTPGPVGGSGVRVGNLEHRSVGAANHHGTGIPM

SEQ ID NO: 923497 - protein, 184 aa, Homo sapiens
MQVFVKEKVERHQLAVKHTASLDVNASRQQPQGRFTENENLSRCILTSTRSSKTEVKMKGSLAPTAEKSFWNRTTILLLQLRVIQMASSQQRNGVVLEWQHRAPAENSDGIAACGMKGMWGHSLAWSWQWPMGSKAFPVGYMAAENPGWGEEWVLLWMLCWCQEQSGTVGAETQENWKKMIPRS

SEQ ID NO: 923498 - protein, 146 aa, Homo sapiens
MVLTLNVNMELYKAPLSRFKQFTERGSPIESSADYGSYIEPTYKTKTKKGKRDKEKEVVVVTTFLTQLGYIKPEALYNVESGVAFITSGAALDFQGIQHHIRGMLCCALSLQFSEFIQSCVHRFFNILLKNNRKERKHRLIMNTNV

SEQ ID NO: 923499 - protein, 173 aa, Homo sapiens
MRWYCIVVLICISLMISDVEHVSICFGSYKLVLLPICHFHSITPRCLYNIKMQGETASANEEAAAGYPEDLIKIIDEGGYTKQDFQWVNAAGDLMLKPALTYHSENSRALKYLGKSTLPVLYKWNSKAWMTAHLIVARFIKYLKPTVETYCSEKKIPLKCYCSLTIHLVTQEL

SEQ ID NO: 923500 - protein, 160 aa, Homo sapiens
MVQAPSLGSFPHAVESVGVQKSRIKVWESPPGFQRLYGDTWMSKQKFAAGEGPSWRTSARAVWKGNVGLKPPHRVSTGALPSGAVRKGPPSSKPQNGRSTNGLHGVPGKAADTQCQPVKAGGRLYPAKPQGWSYPRPWKPTSCISVTWMDNFRFLKNLQR

SEQ ID NO: 923501 - protein, 150 aa, Homo sapiens
MGIRDSLEEAVCCLTDLQLCAGRSTALFRADRQEHLLKLHLQPPLPPGAVSQGGESFIYMPLTGAAAFLSEMPCPERRNLKKQCGYSGFAACWDIHLLRHQSCRLSGFRSLGLKLPLSQFSDLWPWTESYTIGFPASQAFGLRLNYNTSS

SEQ ID NO: 923502 - protein, 188 aa, Homo sapiens
MWVGPDKRIKAGCRSQQWQLAVTLIAKVCRFTPEASETTNPPGGTNNSRPAALRAVTLTVKVCSFTLKPARPRTHQKEKTLNTSEYQKEQTPDTPPLRTVTLTARVRGFILEVTVDSTVGSPGNKIPFDIQNEACLEQCPVHGNTSNIVGRQQAPDIHLCGGKCITKAFPGPESKPLNLIRLVTDKRE

SEQ ID NO: 923503 - protein, 135 aa, Homo sapiens
MGVVGDESGEELSAQQTSPGITGSQLLPQQRGPVLLPETEYHWQVASGVFTVILINFWKHGVETDSEGKVSKNSNTLLQHLFLKILYQCVLFGRQFKVTESRTDILGAGKSKIQTPSDPMNGHTHLTNTRFQAGT

SEQ ID NO: 923504 - protein, 134 aa, Homo sapiens
MEQHILLLTASASCKAAESPLLAWTSLTSDDMGNGGQKLAQDTGHKDPADKTGCSKEVDQNPPKPTWRKTLPMIIFTAHYTLTVMDSHTKRHSDQHHDGLQMPWQHLEVTLYSLKRGGTLSSGKSMPLSQKTHE

SEQ ID NO: 923505 - protein, 262 aa, Homo sapiens
MRVIWLSELSKVSQVLGKLGLERKKSPDLGEYDPLTQADSDESEDDLVLNLQKNGGVKNGKSPLGEAPEPDSDAEVAEAAKPHLSEVTTEGYPSEPLGGLEQKAASSLVSYVRTSVFLLTLGISMILVLLCAFLIPCPPRDLHSTWSRHLGSQGGVSRPAANLVCLSGMNGSTLWSSLLPEEARDITCLELMPGSLAETICLVTGTHKMLSAFNATSGKAIWTLNPNYLSNGTLAAPVVVLPDLDEDGVRDLVVLAIGELQV

SEQ ID NO: 923506 - protein, 145 aa, Homo sapiens
MLSAKYLSTGAPKKKTTQHSAGDPALIPLSPPNHKGHAANPEADQTWADHPQACACPFPGSLMPENLGPSEGQAPGHRDCVQKQAYSHGIVRKLKVDKSRKKLLVDQAEAHWPKTKEVCKLHDECLQAKKEEIIKMLSKEEETER

SEQ ID NO: 923507 - protein, 206 aa, Homo sapiens
MKGVSKYGTFNQNIQREGKAATFGVLQLSLVILRVTGKFKVTRDWSGPPAYHSSPMAKWPDCYVGACSHISSPGRSSRFRPLASPHQSYEASSNLPPPGQSLQGQLKAFLPLPLQWNCPCYPWTNKGTKTLSVLSISSTSCSRPKERRPVYLLWVPHTVHCLSPERKLLALAHSTDTSSWANCTEQLLTHISLGRRPQETSKVVEQ

SEQ ID NO: 923508 - protein, 143 aa, Homo sapiens
MAEHNLGWTKEYRAKFLLLVQRLQIKLTLPAGVPGGYSKWRDLTWSPTVKCPVQRGRIQRGSLATAALPSCSRLCPVQTSQELCLHYAYIWHSVYLGNYGSNMHKGRRQLSWCGLDVNHLSLVSNPCWRGYAVIWRKEDILAF

SEQ ID NO: 923509 - protein, 144 aa, Homo sapiens
MIKHQGKPAFPVHDRRRSFGEEHEYRGLISQGRSPDQSHGTKFHVRPCEETTKQALCEQHGCLFHLGAGGLSPKESQQREIRVGPFYRIWVVTSGHLGIYVQVTGDVMAWLGLRGLTMFMACADRSGQSHQGLAVALASSSKID

SEQ ID NO: 923510 - protein, 248 aa, Homo sapiens
MMLTKSKRVIFLFNFKMGHKAVKTTHNINAFGPGTTNKHTVQWWFKKFCKGDERLEDEKHSGWPSEVDNGQLRAIIEADPLTTTISDNAQLSGWMEKKLQSKHFTKPNLHQKMVMVTVWWSAATLIHYGFLNPSKTVTSEKYAQQINEMHQKLQYWQPALKQSRLTEPNSYKNQTLTAIKEYKSKKPYPKEATSKIEGTSARQMRNNQCNNSVNSKNQRVFLPPNPHQGNPIRLTSELLAETVQARTD

SEQ ID NO: 923511 - protein, 151 aa, Homo sapiens
MILAVGGGKLPSLQTGPEVLSRSKGLRSKTLEVYLVFYCTAAELTLKPQDAVLPTLPYTFQRQRSLPRGHCHHKPTGSELPSGPKQVQKYHPRAKCWDWGPQKPTWCSTPLWPELVPKVQDKVTCTFLSTFLKQKDPCPTATTAENVLSLT

SEQ ID NO: 923512 - protein, 158 aa, Homo sapiens
MKELVVEPTYLIFHFLLMLLVSYPFQNPRHEDISFIFSSESFIVLAVTCIFLIHLGLIITYGVSTMCNRNAEIGYACLVPVLKGVLSKHARYLQDPLVSIDLSEQLGIVVSLGKFLIQTGFGVVTETGLGPGTDLIRELTGLDPVRGLLHLTGSERNW

SEQ ID NO: 923513 - protein, 685 aa, Homo sapiens
MELERVDEEEKEYTCKSLSDNGQPGTPDPADSGGTSAKESECITKPVSFLPQNKEEIERTIKNIQGTITGDILPRLHKCLASTVINLFGVQQTKREEEHKLVKSKVVNDEEVVRVPLAFAMVKLMQSLPQEVMEANLPSILLKVCALLKNRAQEIRDIARSTLAKIIEDLGVHFLLYVLKELQTTLVRGYQVHVLTFTVHMLLQGLTNKLQIFNHELFGAVAEEKEVKQILSKVMEARRSKSYDSYEILGKFVGKDQVTKLILPLKEILQNTTSLKLARKVHETLRRITVGLIVNQEMTAESILLLSYGLISENLPLLTEKEKNPVAPAPDPRLPPQSCLLLPPTPVRGGQKAVVSRKTNMHIFIESGLRLLHLSLKTSKIKSSGECVLEMLDPFVSLLIDCLGSMDVKPRSFRLPSSLFCVLIQPTEEFSAARAARVLLDGAELADPGAFKETKAEQLTKHLFLLLKDYAKLGAARGQNFHLVVNCFKCVTILVKKVKSYQITEKQLQVLLAYAEEDIYDTSRQATAFGLLKAILSRKLLVPEIDEVMRKVSKLAVSAQSEPARVQCRQGLLHENCGMFFIPLCLMTINDDSATCKKMASMTIKSLLGKISLEKKDWLFDMVTTWFGAKKRLNRQLAALICGLFVESEGVDFEKRLGTVLPVIEKEIDPENFKDGPGLALPVIA

SEQ ID NO: 923514 - protein, 145 aa, Homo sapiens
MLLIYNLTPKPLLSETRAVSTQGFPWHLHLLVFAVHCSLLSSWDENTLFFRYPKLGGGGCWRGSHSKGLCHIVEQFCDLTIVLSFPDNMYAGIGKDFRLLLPILPESFFPNIYFISGSQLPLSAIWFSHTSHIPLDIVYTFELQV

SEQ ID NO: 923515 - protein, 137 aa, Homo sapiens
MNTVARFFCSKRATLPDKSYGRTTVEEEDDRTVLQESGHEGNGVTFRKYTISHRPSLEKAQITDFSCGLLTSYPHLKAGCCSELFGCSAAASCCAPGSWPVAPADCEVLEPHDSNSSKGKRCVDKLSNLPKSLGMEL

SEQ ID NO: 923516 - protein, 133 aa, Homo sapiens
MKLKPEEFKGSTVVELMKKEGTTLGLTVSGGIDKDGKPRVSNLRQGGIAARSDQLDVGDYIKAVNGINLAKFRHDEIISLLKNVGERVVLEVEYELPPVSVQGSSVIFRTVEVTLHKEGNTFGFVIREKSSLL

SEQ ID NO: 923517 - protein, 137 aa, Homo sapiens
MALMVDGKARIEQKGRKRATSHSAGAGISVFSCPWTAVFWVLEPLDSDQNLHIVPPDSQPADMGPNYTTGFMVLQFARGISWDLLSSIIMGALGMAFYLGNFNLKSLLCTGKSVSKERSDLGQVVNAPWIPPSSSVK

SEQ ID NO: 923518 - protein, 145 aa, Homo sapiens
MEKWYREEYNLLYGKWKGQTSLQRCGIQVHYQFYTRKADLENGGLASYIPAETCLYWDTEAPSFLVISFQKDGSQVFEKDVPFLGYRMLISQGKLIFCPKHLNIKPHLSAMPWYCTIMRERERSEDNTMTIGREKSHSQGNKERT

SEQ ID NO: 923519 - protein, 143 aa, Homo sapiens
MTPVALIPGDTTLIELIYLAWAQQLNQRESVIKFTKHLLSTDCSMFLAFDSASREEKRLDVGKRQLDFRGKRTALPVPFQLPSLLRNAFTTLQFIHTTSFSLSSRQEFGIYQVQVPKKAVTLALCPHWQRAAAPCDNGKGPLS

SEQ ID NO: 923520 - protein, 132 aa, Homo sapiens
MIQGRDLTVWTSHDVNSILTAKGDLWLSDNHLLKYQVLLLEGPVLQLRTCATLNPATFLPDNEEKIEHNCQQVIAQTYATRGDLLEVPLTDPDLNLYTDGSSFVQKGLQKAGYAVNNPPLNTIWLTLFTPMI

SEQ ID NO: 923521 - protein, 164 aa, Homo sapiens
MINIISYLLSPNDKGCSNTQDWQKNTGVVCHTLDLESATPGPWTGSSPRPVGSWATQQEVCYKLNIHQTTGNFILMFGTEVHLLITVDDLFESFATFRFVSGRNGVEVSNPHFYDASQQNVDLITKKECEEINPEIETQIQEIPGHEVTYDENRTVPRSLVGVV

SEQ ID NO: 923522 - protein, 148 aa, Homo sapiens
MAPGRLLSIHSEKFVITDLLKPTSVNSSNSFSIQFCFLAGEELCSFRGEETQASQLQVCWSLLEVHSRSCLPGYHQQSLQDRKYCCLILPLEASSQRGIHVYEVSVGSYWEVSPGQATQGSGTHLRRQSVHYQSLNAMLGEPLLSSEL

SEQ ID NO: 923523 - protein, 164 aa, Homo sapiens
MAGYPFEMKLPEERSGSNICCSAIFTVLQPPLLIPRQTGSGVDLQQTPTDLQLRVLTVRRKTNKQKGHPHQNPICMSSSSKTKAMEQSWTEDDFDELTEEGFRQSNFSELKEEVRTHHKEAKNLEKRLDEWLIRITSVEKSLNDLMELKTMARELCDECTSFSS

SEQ ID NO: 923524 - protein, 171 aa, Homo sapiens
MPLIPSHFAGLILKLTNPGFHETLTEGSFLSYVLTAFTPSTPLICTQEERGNCFAHFLGPNCQVSSLKPKSAPEGSTHCDPLEQLFAVDDIKQGELLSSGTQHVLFDHFFHCKLFHSRAWAFFSATFPPVWGKAVPVPVSVLNILQPEHVELSFMCLFQDNRADWASGHFR

SEQ ID NO: 923525 - protein, 146 aa, Homo sapiens
MALHLGPHCLVEMKLSTDWMMPALIAHEEDPKRTLALTKLPTFSWSRWFMNVVPSGELTTPDVFTLLVFQCQPLGPKIQESKPLMSEGRKGWLSQLKTRKGIHPSFAFFVYPGTQQIKQCAPTLVRTICFTQSTDSSVDLFQKHPH

SEQ ID NO: 923526 - protein, 140 aa, Homo sapiens
MWRTFVTNSGIVKVPIAPCQNRPLGSTNQQDVAVTLTAKVCSFTLEASETTNPLGGTNNSRRAALRAVTLTAKVPSFTPELARPRTHQKEDTPNTSEHQKEQTPDTLPLRTVTLTVRVRSFILEVSETKNPPIPDTLGSH

SEQ ID NO: 923527 - protein, 256 aa, Homo sapiens
MANSGLQLLGFSMAMLGWVGLIASTAIPQWQMSSYAGDNIITAQAMYKGLWMECVTQSTGMMSCKMYDSVLALPGALQATRALMVVSLVLGFLAMFVATMGMKCTRCGGDDKAKKARIAMTGGIVFIVAGLAALVACSWIGHQIVTDFYNPLTPMNVKYEFGPAIFIGWAGSALVLLGDLPEDFEEKSLVINSETSGNSWLEFNMFIDCSISRLMSGSLVFTTLGRSTNINNGRTIIITIGFIRKSVQPHDSLLIK

SEQ ID NO: 923528 - protein, 175 aa, Homo sapiens
MDPENLPVINNYLDANEPVSLEARLSRMHFHDSQRKVDYVLAYHYRKRGVHLAQGFPGHSLAIVSNGETGKEPHAGGPGDIELGPLDALEEERKEQREEFEHNLMEAGLELEKDLEKLALKFSVAWHRQQVYGLFLEGTAYHQGSLGAHSCFREVEPYSVSVSGRGRGDFQKFCL

SEQ ID NO: 923529 - protein, 135 aa, Homo sapiens
MKHPVQDPLPPPGGLEDSLLSPWLHGKFFQGPGEDDKASHGQSPFLYYGSCLEVLAASLPTHWHIQVNAECASNLSHWSTLDNGTDPCLKPFGTLSEEIPRFLAEGWQRGSQGTGRFCKDHGEARAQQNAPISCS

SEQ ID NO: 923530 - protein, 278 aa, Homo sapiens
MWPALLLSHLLPLWPLLLLPLPPPAQGSSSSPRTPPAPARPPCARGGPSAPRHVCVWERAPPPSRSPRVPRSRRQVLPGTAPPATPSGFEEGPPSSQYPWAIVWGPTVSREDGGDPNSANPGFLDYGFAAPHGLATPHPNSDSMRGDGDGLILGEAPATLRPFLFGGRGEGVDPQLYVTITISIIIVLVATGIIFKFCWDRSQKRRRPSGQQGALRQEESQQPLTDLSPAGVTVLGAFGDSPTPTPDHEEPRGGPRPGMPHPKGAPAFQLNRIPLVNL

SEQ ID NO: 923531 - protein, 118 aa, Homo sapiens
MTPLMTSSPATFLWHGLKHCFSSTRSTKALEARQEQPRWKAPGRGGAPAACLFPFRGRICHLVNTLQVPDTLLAACEHCVTSSSSDYSHRMKSYMWSTGSATVHIFSEAFDNKAKWPP

SEQ ID NO: 923532 - protein, 785 aa, Homo sapiens
MACIHCLRENREKFEAIIGGSFEGYLKRLENPQEWVGQMEISALSLMYRKDFITNLEPNVSPSQVTENNFPEKVLLCFSNGNHYDIVYPVKYKESSAMCQSLLYELLYEKVFKTDVSKIVMELDTLEVADEDNSEISDSEDDSCKSKTAVAAADVNGFKPLSGNEQLKNNGNSTSLPLARKVLKSLNPAVYRNVEYEIWLESKQAQQKRDYSIAAGLQYEVGDKCQVRLDHNGKFLNADVQGVHSENGPVLVEELGKYTSKNLKAPPPESWNTVSGKKMKKPSTSGQNFHSDMDYRGPKNPSKPIKAPLALPPRLQHPSGVRQQQKPAEHVSLSNPAPLLVSPEVHLTPAVPSLPATVPAWPSEPTTFGPTGVPAPIPGRSVTQTLTPGPDSAVSQTHLTPSPVPVSIQAVNQPLMPLPQTLSLYQDPLYPGFPCNEKGDRAIVPPSSLCQTGEDLPKDKNILRFFFNLGVKAYSCPVWAPHSYLYPLHQAYLAACRMYPKVPTEASVNGQMLQPVIGPPTFSSPLVIPPSQVSESHGQLSYQADLESETPGQLLHADYEESLSGKNMFPQPSFGPNPFLGPVPIAPPFFPHVWHGYPFQGFIENPVMRQNIVLPSDEKGELDLSLENLDLSKDCGSVSTVDEFPAARSEHVHSLPEASVSNSKQREREIVPVELEPKRTIQSLKEKTEKVKDPKTAADVVSPGANSVDSRVQRPKEESSENENEVSYFEKWGGYQHVRSEESWKGQPSRSRDEGYQYHRNVRGRPFRGDRRRSGMGDGHRGQHA

SEQ ID NO: 923533 - protein, 138 aa, Homo sapiens
MLIRATLGCHCGPEAARGNFWLCVIHIVVMALSKSLNQDPHSSIDWNFRCVPHRVILVLDEGLMLPSVLSCQTKNLITTQCPSCFAPSVTAPTELKPTSAKWNCNTIGGFQGHIYTLTKNCRGGKPLTPRNESLVIGY

SEQ ID NO: 923534 - protein, 188 aa, Homo sapiens
MPNEAVRNTLLFAAGEIGDEEAFPAKVTDLGCQLQASVFCGALDGESKPHGPGSLTPAAWGSSKLHAGFQPHARSITGHARNRQEGIIVLFGWFRRAIKGDCGDKWREYGSKELGPLFTPFDTPLLLVHVPTLADFGVFLDSHTTAQIELQRGQQIYTVHKYSPSVCYKLEPPGPKKCIRTQPLNAEC

SEQ ID NO: 923535 - protein, 166 aa, Homo sapiens
MLTMKGKWASVGNKPLLATISGSHISHKALVQQVSREERSRAFVRRGQNTKLIVMFVLLFRRHVNIFLKIIQTRHKWEQDSFLDGKHLKAQSDTSVEQSDLRRNPQQEGTALRGTGQHNVSRMSSNLMTQNPAELQAPSHGCRSLPFSTPKTQSTTSPCDPFIPYS

SEQ ID NO: 923536 - protein, 136 aa, Homo sapiens
MAMKGDEQPHHCPIHLLRKTLPTTHWDMRLAPGSWEPGLQNSTTILKNTGNEKDQFTCGRCAYSYSSYNPIDFQFGALERPQMNAEAKWKSPVGFFLLWYEETHANDLFMRKPIENSFPPTVKVHRVQPPGWRTDL

SEQ ID NO: 923537 - protein, 160 aa, Homo sapiens
MKLPEEESGSNICCSAILPVLQLLLVIPRQTGSGVDLQKTPTDLQLRDLTDRSSSPAMEQSWTENDFDELTEVGFRRSVITKFSELKEHVLTHRKDAKNLEKRLDEWLTRINSVEKTLNHSMELKTMARELRDACTSFNSQFDQVEERISVFEDQINEIK

SEQ ID NO: 923538 - protein, 165 aa, Homo sapiens
MEATGFRTSLTDGPAGLMGPGAQTLASVAQTAIIAQEPRLILEIKGRKVDLLLNIRASLSLFSSLIQASPLPIKGYTRQQFCQESTLNKGDRVIYNLTRPPYCCVQFPIAGMGPHILYLSRLASNLELFKRGKGRGEQKKEEVTCGMLGKEVARKNRHPTPPDSS

SEQ ID NO: 923539 - protein, 143 aa, Homo sapiens
MLAGHICRECAEVWGPAPPEPLAATLELLAVGPQPLAGCWLEAAFSSLLWGPSHYGCLLPQHQQGRESFPAREVTVLCKVITEVMTRHPGCILLVKNMSRSCPLKGRELHWDEYLEVGIMGTTLGTVSHNEETGVEVAGGFIS

SEQ ID NO: 923540 - protein, 162 aa, Homo sapiens [sequence omitted]

SEQ ID NO: 923541 - protein, 148 aa, Homo sapiens
MFVVVKVRGGDGFNRVVNPGGRITQANIMYFKKFLTHIAVSSSSLDIYQRLSIFSHCDHECECILNKQLNTRINISLAPKIPKTCKTACDGLNVFAPCSTKFISALSEKPQELSFPFYHMRTQREGSIYKPGNKLSPDNICWHLDLGL

SEQ ID NO: 923542 - protein, 140 aa, Homo sapiens
MKLKIWSMNFLFSSFPLFIEVILPCDSVTSSLDVGSVSTHRTLSPCRKPTLQGNQHGFACQWREVEKNASRQRAWTPQRWLKGTDIKETQLDSRFLSTWCLIKLSSRFIGLYVPSGPGDAFGIDLIYDIKIPYILSEMKQ

SEQ ID NO: 923543 - protein, 162 aa, Homo sapiens
MGTHLLHQCDLGGSIWDRRLCCCMIGLGLRRLAFPPSKLGISIHYYEEDKDGYSIAPAPSVENRFSFPFNFLDTFIKNQLTENERGYFWAFNYIPLTNTSVLMLVPYSLYYLIFVICKELPNPSCPKVLHYPHSTQLGSTFQPETWCDPISFPVLGPSSHFF

SEQ ID NO: 923544 - protein, 140 aa, Homo sapiens
MATSPTALNVKTFSHFRFTPNLKIFSHVWSNSLVFASPNNRSQQGAPKSGRPGRPGLAAAYLKIDGEAMGAAVDAGLAHHKQALKQKEQKHPPAAILQEEVKEVQKQEHLKVQDGFLRKSDVFLHHHHGATLLFTYSQLH

SEQ ID NO: 923545 - protein, 143 aa, Homo sapiens
MKLGPGRPGQREFTAESSREETAAQTANSRDLQRDSDGNQHMHICNEASSPNPDPNGQDRNKNRAMDQRRYPIMTTNTCCSQTVSRILSRAHSGAFTSAPNGWIPGMFSQHLHGCFPAFQPQPATRASVNSSAIGGPIAVLLQ

SEQ ID NO: 923546 - protein, 262 aa, Homo sapiens
MGRAIVVCSGFTPDPICLGLSHPCRCHQERLQNSKDGCLLLPLRALSQRGTNLLPLGGTGSGTHLTKHSGCPLADGVHCTGVNPNPTCPDCQDSSEPGGKKTKSADPQRLASQPPLPGALCQGNQSSVHKPLAGVAEIPAGWTQLMKRDGSCSSLKKQSGHSLPQTLCCTLENYSWVQTSQTPKYQQGKMADWSCSDGCCLRPCELHRLRQQAPTVMVATLPPGNSGVLGSLQLGSHRESAQLCAWDPRPLWCGLTRGSPHL

SEQ ID NO: 923547 - protein, 130 aa, Homo sapiens
MGPHSRSSVTPNVNFTYEGSRLHAPYENLMPNDLRWNSFIPKPPPPLSLEKLSSTKPVPGAKKPHKNRERLQDPTDNIRSLRKKTNKEILDLKLTVDELDLVDIYGIHYRVHVPLICTRNILQDQPHAQP

SEQ ID NO: 923548 - protein, 150 aa, Homo sapiens
MTCARVMGGLPLSPSAAWCCGSSGLNQGSVPHALEAELGGRRESDSKELPGYTLPGAGIQLQPRTFIHLIDLFSKHLHQALGLSASLAPVNTSDKLPAFMELTVYNKKYASGENGVLSTEKGDMSNARLPSSVGVVQVAYQERLQSRRAG

SEQ ID NO: 923549 - protein, 135 aa, Homo sapiens
MKHMVSRSLAARTRLGSTKSETVKVTEAAVRIDSLESLRQLSGPSCKGDKIEIITLVPQQTGLEGCESQVKNILLKYFIKFDPGDTDETRSHHSHQTDTGTENQTPHVPTHKWELNNENTWTQGGEHHTLGPVGG

SEQ ID NO: 923550 - protein, 169 aa, Homo sapiens
MGIHDNEMSLITVQQGCVKEIFERKRIWGQLWPALDLSNSPVRFLVPALSPAPTAHIRARDPFKDKPYHIALLFRTPNLVRDTYCCHRAFAYAVLPPPYPKTPIHTQPSPPHHSTGKPDLLDHLGPLNICFLGAMSPFMTPCQAEFPVGRLKSSSFPVNMHSFFAPLMS

SEQ ID NO: 923551 - protein, 116 aa, Homo sapiens
MVRKTQRRWCEGKSLGNGERRGSLFVVEDGFSKAGWKREEWSRPEEGRMLEEGIGLFYQHCTINKILTYSMLFHKTYLKKVRGKNENPPSMKMEMGIQLGLEKAKQYTIQNASGCK

SEQ ID NO: 923552 - protein, 164 aa, Homo sapiens
MECVHVVEFEEPKVAFPISSCFISAEFEKLVTSSFEAFSPHCWFHVTTLIVFFSKFPICLDLNIMTKSPKLSFLPWPHRLVLFLVYTFKDGIPSRVRWGTFCALPLVSSLLPPFMPNSIHLQQADDSQSLLGSRLMPMTTGSLISSTPKTKSVSSHCNPSILYF

SEQ ID NO: 923553 - protein, 143 aa, Homo sapiens
MGGADQERSHWESCRRPPGSHGLPTVPSSSSASSGSSDCWTLQTQTPTPLQQEPTPLCPRNPLLRAQHEDCVQPLLRPSLTRYLQISSRTYMHVVAERGTQQWLDEEFPKLLPQLLPTFLMVYSQLQKKLCAPETGPHPHPDI

SEQ ID NO: 923554 - protein, 354 aa, Homo sapiens
MILGSSANPETAARGEGGLLQRKLRSLYGYFYHGLNLDDGKEDPCIPQRDMFYNGLYYTPVSNYGDGDIYNIVRRHGCGTSSVSSSANLSFLIPDTITQWEASGFCVNGDVGFGISSTTTLEVSQPFFIEIASPFSVVQNEQFDLIVNAFSYLNTCVEISVQVEESQNYEANINTWKINGSEVIQAGGRKTNIWTIIPKKLGKVNITVVAESKQSSACPNEGMEQQKLNWKDTVVKSFLVEPEGIEKERTQSFLICTEGAKASKQGVLDLPNDVVEGSARGFFTVVGDILGLAMQNLVVLQMPYGGGEQNAALLASDTYVLDYLKSTEQLTEEVQSKAFFLLSNGIHISPEVQP

SEQ ID NO: 923555 - protein, 243 aa, Homo sapiens
MYTYIKLLNPDNSPIPNEVVQLHLKDKIVGNYTTDVNGIAQFFLDTYTFTYPNITLKAAYKANENCQAHGWVLPQYPQPEYFAYRFYSKMNSFLKIVQEMEELRCNQQKRVLVHCILNMEDFEDKTYTADFNYLVNLNFSKEKSLPGSNVDLQVSAASNSLYALWAVDQRVLLLRNYGQLPAQTVYSQLHSSELHGYYFRGLNLEDGLKVPCLEDGHILYNGIYYTPAWADFGKDGYDLVKNS

SEQ ID NO: 923556 - protein, 152 aa, Homo sapiens
MTLSIQELQKISHGGSAGGKDDPGLSPDGGAWQKQRSSCHQGSSAEPSELDKTPEAAEGEWEGAQSRYSLQGRHLLRSLHSISPFQSDLCGKHPPPDPRPGQEASKLDPPLNIYWSWRSWSSTVCLASGTVRSDVSRGRKNNPKTLRQTGCQ

SEQ ID NO: 923557 - protein, 197 aa, Homo sapiens
MSSQRRARQATPQRPQPTPPAASAPPNCAPRAIEGGLGPSSRAAAGREGPGLLPTGTERQALLLTLTPSSSDGQAVRTASPQVPGTRELTTDSQGQLVSPWFPAREPVSTVEPQDSTIRAGFSKAVPLSSVTSRPFAAHCWHLAWALRLPNSSLQRKQETNGAFAALLSQTHARPAHGKGAREGESGGAEAWLLLLL

SEQ ID NO: 923558 - protein, 150 aa, Homo sapiens
MDPLRLSSTFLSAKFFVFQHLQGRDKEGEEEGDKQGAEWGSALGRTLLQSKRGVRQPASCCLQCMGMLSLSLVSWGGKARIFGSSSLPSHGQPSEDEALCKAYSTGRLGLTGTLLDATLDFSDLTIQPSITGIILFPPSLRDGSSAYSAL

SEQ ID NO: 923559 - protein, 136 aa, Homo sapiens
MATILNSKDIQNLPTIVESSTGQCYNICGIEEKVSLVANKQVSNTDFLHPVRQLNDERPQEKESFHVKKWPPTLTSRSKRDATLDVLAPHGPPAGFSLEDGEHLKPIHVSSIFLSDGFWKHADWLQVLPRVPEQPY

SEQ ID NO: 923560 - protein, 162 aa, Homo sapiens
MALLGALSPAIPGCLYLLCCPGAGPPALLVPRAGRGSQCCRSSLSCWPVVARGHLPRLSESPGSRATLTFSGYYRGTHGVIVVYDVTSAESFVNVKRWLHEINQNCDDVAALTLPSFEVGNKNDDPERKVVETEDAYKFAGQMGIQLFETSAKENVNVEEGN

SEQ ID NO: 923561 - protein, 121 aa, Homo sapiens
MRRLQEEAEEAARPVGCWCWAQRREGPNPGLGLSLSSAGSLTAEQGGSGPEHEPCRPRLSSVCLPRRASPWPVFRKGIWEQLVLHKDEGKGQGSSGRDVLGVGKSSLLLRFADNTFSGKKG

SEQ ID NO: 923562 - protein, 2154 aa, Homo sapiens
MGSLGRDHRVLERPGKAFRGALCTVLHLTERLFLDHPHRLTGNKVQQYHRALVAVLLSRTWHVRRQAQQTVRKLLSSLGGFKLAHGLLEELKTVLSSHKVLPLEALVTDAGEVTEAGKAYVPPRVLQEALCVISGVPGLKGDVTDTEQLAQEMLIISHHPSLVAVQSGLWPALLARMKIDPEAFITRHLDQIIPRMTTQSPLNQSSMNAMGSLSVLSPDRVLPQLISTITASVQNPALRLVTREEFAIMQTPAGELYDKSIIQSAQQDSIKKANMKRENKAYSFKEQIIELELKEEIKKKKGIKEEVQLTSKQKEMLQAQLDREAQVRRRLQELDGELEAALGLLDIILAKNPSGLTQYIPVLVDSFLPLLKSPLAAPRIKNPFLSLAACVMPSRLKALGTLVSHVTLRLLKPECVLDKSWCQEELSVAVKRAVMLLHTHTITSRVGKGEPGAAPLSAPAFSLVFPFLKMVLTEMPHHSEEEEEWMAQILQILTVQAQLRASPNTPPGRVDENGPELLPRVAMLRLLTWVIGTGSPRLQVLASDTLTTLCASSSGDDGCAFAEQEEVDVLLCALQSPCASVRETVLRGLMELHMVLPAPDTDEKNGLNLLRRLWVVKFDKEEEIRKLAERLWSMMGLDLQPDLCSLLIDDVIYHEAAVRQAGAEALSQAVARYQRQAAEVMGRLMEIYQEKLYRPPPVLDALGRVISESPPDQWEARCGLALALNKLSQYLDSSQVKPLFQFFVPDALNDRHPDVRKCMLDAALATLNTHGKENVNSLLPVFEEFLKNAPNDASYDAVRQSVVVLMGSLAKHLDKSDPKVKPIVAKLIAALSTPSQQVQESVASCLPPLVPAIKEDAGGMIQRLMQQLLESDKYAERKGAAYGLAGLVKGLGILSLKQQEMMAALTDAIQDKKNFRRREGALFAFEMLCTMLGKLFEPYVVHVLPHLLLCFGDGNQYVREAADDCAKAVMSNLSAHGVKLVLPSLLAALEEESWRTKAGSVELLGAMAYCAPKQLSSCLPNIVPKLTEVLTDSHVKVQKAGQQALRQIGSVIRNPEILAIAPVLLDALTDPSRKTQKCLQTLLDTKFVHFIDAPSLALIMPIVQRAFQDRSTDTRKMAAQIIGNMYSLTDQKDLAPYLPSVTPGLKASLLDPVPEVRTVSAKALGAMVKGMGESCFEDLLPWLMETLTYEQSSVDRSGAAQGLAEVMAGLGVEKLEKLMPEIVATASKVDIAPHVRDGYIMMFNYLPITFGDKFTPYVGPIIPCILKALADENEFVRDTALRAGQRVISMYAETAIALLLPQLEQGLFDDLWRIRFSSVQLLGDLLFHISGVTGKMTTETASEDDNFGTAQSNKAIITALGVERRNRVLAGLYMGRSDTQLVVRQASLHVWKIVVSNTPRTLREILPTLFGLLLGFLASTCADKRTIAARTLGDLVRKLGEKILPEIIPILEEGLRSQKSDERQGVCIGLSEIMKSTSRDAVLYFSESLVPTARKALCDPLEEVREAAAKTFEQLHSTIGHQALEDILPFLLKQLDDEEVSEFALDGLKQVMAIKSRVVLPYLVPKLTTPPVNTRVLAFLSSVAGDALTRHLGVILPAVMLALKEKLGTPDEQLEMANCQAVILSVEDDTGHRIIIEDLLEATRSPEVGMRQAAAIILNIYCSRSKADYTSHLRSLVSGLIRLFNDSSPVVLEESWDALNAITKKLDAGNQLALIEELHKEIRLIGNESKGEHVPGFCLPKKGVTSILPVLREGVLTGSPEQKEEAAKALGLVIRLTSADALRPSVVSITGPLIRILGDRFSWNVKAALLETLSLLLAKVGIALKPFLPQLQTTFTKALQDSNRGVRLKAADALGKLISIHIKVDPLFTELLNGIRAMEDPGVRDTMLQALRFVIQGAGAKVDAVIRKNIVSLLLSMLGHDEDNTRISSAGCLGELCAFLTEEELSAVLQQCLLADVSGIDWMVRHGRSLALSVAVNVAPGRLCAGRYSSDVQEMILSSATADRIPIAVSGVRGMGFLMRHHIETGGGQLPAKLSSLFVKCLQNPSSDIRLVAEKMIWWANKDPLPPLDPQAIKPILKALLDNTKDKNTVVRAYSDQAIVNLLKMRQGEEVFQSLSKILDVASLEVLNEVNRRSLKKLASQADSTEQVDDTILT

SEQ ID NO: 923563 - protein, 399 aa, Homo sapiens
MLSDRKRELEHRLSATLEENDLLQGTVEELQDRVLILERQGHDKDLQGHLTALSHTQLGILQMSAGPSPSDWVDSISRAQALLTVGQPRKQGYSRSLVPLANHFEVLTVKEVRLSCRQLQVKVEELTEERSLQSSAATSTSLLSEIEQSMEAEELEQEREQLRLQLWEAYCQVRYLCSHLRGNDSADSAVSTDSSMDESSETSSAKDVPAGSLRTALNELKRLIQSIVDGMEPTGSRRLDDDSLEEQIRQTSEDSRALRELMEGERGKLRQSLEELQRLHSQLLPYFKTCILSHPGYGHHFPIYLPSPSPPTLTRFGLIFLKRDLKVGRPLQVLAGAQGPEKVVVPFAEAWATEKVTLLSVEMTALKEERDRLRVTSEDKEPKEQLQKAIRDRDEAIAK

SEQ ID NO: 923564 - protein, 164 aa, Homo sapiens
MPLAQGVHVHPGLSVLRKNAVELELAKCRMDMMSLNSQLLDAIQQKLNLSQQLEAWQHSYIGFSVDFTEHVMEGPSQPNFMPSSRQWLLGTKEVICPGHREPALNTGLTCPDDMHRVIDRQLMDTHLKERSQPAAALCRGHSAGRGDEPSIAEGKRLFSFFRKI

SEQ ID NO: 923565 - protein, 211 aa, Homo sapiens
MDLDSNPCSLLLLFEGLWTCYLTSLNLSFLICKIETVTPRRVVVRSLDYGKYQEEDEEEGGGDVDISAGRFVRYQFTPAFLRLRTVGATVEFTVGDKPVSNFRMIERHYFREHLLKNFDFDFGFCIPSSRNTCEHIYEFPQLSEDVIRLMIENPYETRSDSFYFVDNKLIMHNKADYAYNGGQPLVDRLHKPSDETIDVARVQLASVEGCH

SEQ ID NO: 923566 - protein, 221 aa, Homo sapiens
MSLLLASRSPQMKPGNCVPGQMIKRDVGQDRAEDEARAHPFKVVRLERGSLVRQSNWCRDPGAGSLVFRHLVECSDHRAVPLRLCPVDTHFLSPIPHKRRPAAHCLAASPLPVSQVLLPLPNWFPFLSSLDLEIYRTLKCSSVSAAVRIFTASLQDVCIKHLLTTGSVRDTGSPAQASAIYSKAQSYGEKAVDSTLERTVASLRDLVWEWLPHPLPTSQAC

SEQ ID NO: 923567 - protein, 158 aa, Homo sapiens
MKKRMVLSLPRASKADLSLNTSRCLLVTETQGIHAPLITLLLGSDSKVLERGQEVAFLTNPQVMLMLWPMDHTSCSIAEIDSFPMSVPFMNSCSETLLFLFQNNKSLWQGMYYSMTPALSHRQLDHRRRPDPSWTNRIFSLGNLEFRFSNASQSLLVS

SEQ ID NO: 923568 - protein, 251 aa, Homo sapiens [sequence omitted]

SEQ ID NO: 923569 - protein, 207 aa, Homo sapiens
MAHVDQFQVPKLALAVHLLTKEKLAVSTLLLHQTCDRVEHNSSSYSLGAFHTCSGCGGSYSAPEQAWENAYNFVWCPSLSVSPSFSPSWRQGFGGTKCSPLAWLHGSPVERRPHYKAVCDQHYGNDPAKSYRSSLKKEIPGSCGKYGMRKFLGGEIGFTVSKKKIGVVTQSSGKVQLHPASHVLDSTQEDEKAIHVDFYQLRYLQAQ

SEQ ID NO: 923570 - protein, 147 aa, Homo sapiens
MTIYIYENLCYNFILRYVPMTQPEEVLTNMCPRWTGYSLVLHVLGRQETSVNICKKYTGSLQKVRDNSKQGGGFQVTGRVLGPSPHHCCSIAGGLGRKTKRKREEEEEEEEEEEEEDEEEEGRKKEEKEGGERKRKEKQNTEISPSL

SEQ ID NO: 923571 - protein, 134 aa, Homo sapiens
MCKAFEYGEYLWNVQEKAWNPPYVWSRVNKGESNQRCGQKDKTGLLYYIWNWTTTLVQFRQMDRVHSTKPGRSQATDCLSLLRDKWPLSSLCLFVLYFDQMIPLAFDLPGICCLNWLAFIGIQDLWVEIGCWYF

SEQ ID NO: 923572 - protein, 197 aa, Homo sapiens
MEGALSTKILGPRERLYSYKRHTQNNNHTAFGEEANAGTTRYNGRKKPGSAKARLSKKNKSGGITLPDLKLHYKATVTETAWYWNKNRHIDQRNRIENPEINPNTYSQRLLDKANKNTKWGKDTLFNKWCWDNWLATYRRMKLAPHLSPCTKINSRWIKDLNLRPETIKILEDNVGKTLLYIGLGKDFMTKPQKQMQ

SEQ ID NO: 923573 - protein, 138 aa, Homo sapiens
MSLCSFFAFCHNCETYLCKGRNKTMLQVLSKKQEFSGSCKLPWNSPLPDQNSQKYRELRPGYLKSITVHLTVRVREWRCLEQNSDRTGLRMAKRRRSHEWKNTEKCRSVGEETQVKLLRADHKYFRPYNALSIVPRAS

SEQ ID NO: 923574 - protein, 173 aa, Homo sapiens
MIDILWEWQDLERLSAKKKYYRIIIFLSKVSNILEEDHQKTAWYNTPKTADFEFHFELASLLKNLISLKGTRSPVFVPHRGICAGNKEVTGKRQSGNKIKHEQMKVVHVEKDGHEQMKVVHVEKDGHERMKVVHVEKDGHEQMKVVHVEKDGYEQMKVVHVEKDGRENSRAGC

SEQ ID NO: 923575 - protein, 147 aa, Homo sapiens
MEQGKLRGRVELSALHLSASGTIHFRRKFPDTHSLVVKYLNYSNVVWCMQQESLKSMLTAPTMETIQCHYRHYPPYSGPSKQARPMCVELVLLIHLHVVKDFQELDEIAADLLYHQSELCPSPYFASESSPHFQHQQYIPGFFHLTA

SEQ ID NO: 923576 - protein, 141 aa, Homo sapiens
MPFFNQMLPFLILPTASLGMPICTLRGTGQSCQESAPYAGEESSFFSSCVEVLGLHWEDEHPWALAQWQLPGVGVCDSQSPSGHVLWCALLALPSTDGLSIRQLSGPSAFLQGQRASVTALYIPGSCPASRKSLITHGLEG

SEQ ID NO: 923577 - protein, 126 aa, Homo sapiens
MVCVTRLSRFATWCLSGGETNFLHLYDRGSCASWGKGLQMLCPYLHTERKSYLPNDLVCDLKIEKGPKALLTLGLSLHIKLPGILSEFGLLELADPVCISDQPSIFQGQEFGDRVTISQTDSSWRQ

SEQ ID NO: 923578 - protein, 186 aa, Homo sapiens
MASSGRPESAALRDNFSICPYRLMVLQAENSKGMALASGKGFHVGSQHGEEGQKPKDLVPFVQAAPAMAERDQRRAWAVALEGASPKPWQLPHDVESVSAQKSRIGVWEPLPRFQKMYGNAWMLRQKFAAGAGHSWRTSAMAAQKGNVGSEPPQRVPTEKTASEGFLECGKCFWRNETGEKRVLVV

SEQ ID NO: 923579 - protein, 158 aa, Homo sapiens
MRQMTLEATFCKTIQQNASSSLKDPVPGPSIAFHVSSHLKTKNTVDSYLSIKTQHGRDGKPAVVCCCLTAETVAQTVVQKESGLQHTRKMLHVGDPSVKKTAISLLRNLSRNLSLQNEIDLAATQGPPGFNICLLPLPPTPDPTTTTTRFIPMLSTGS

SEQ ID NO: 923580 - protein, 144 aa, Homo sapiens
MGKKQSRKTRNSKKQSASPPPKERSSSLATEQSWMENDFDELRGEGFRRSNYSELQEEIQTNGKEVRNFERKIDEWLTRITNAEKSLKKLMEPERKVGLPTKGSTSDKQRISQQKLYKPEESGGQYSTFLKKRIYNPESHIQPN

SEQ ID NO: 923581 - protein, 204 aa, Homo sapiens [sequence omitted]

SEQ ID NO: 923582 - protein, 265 aa, Homo sapiens
MQTYVEERVVGKPFQALLIAISLRAADFTPEASKTTNPPGGTNNSGRTIFMNCNTYREARPRIHQKEETPDTSEHLKEQTLDTSSLRTVTVTASVRGFILGVSETKNPPEGTNSGHNAIHFCLLHFLLTVRPLCCRSAGVCWRFTPVPVCLGVSPVEAAEQQRLLPVPSSGSFIPKGHLPDASRSSPVCGVCQPLLGGVSQSGGRGVREPLDEAVCPLAELNCCALETHCCLQSCQAGTAATLNQFWQLGHLYSCLSHYFGLVLG

SEQ ID NO: 923583 - protein, 141 aa, Homo sapiens
MCSNHLQEEEHLDGQLQEPGQVILGSSPTVTSKDSLGVNQLSALLVPRSLSSVQEESGHTDKLKDDKCRGFYCQMEVTVSGKDGELERRWSGKMIVPWSSAIPRLISSLTTPSRTPLDIQTLLLLSPSVPHCCSAPLLFCS

SEQ ID NO: 923584 - protein, 132 aa, Homo sapiens
MYSHCSTHTYEGALPGEEESTEAVWLQQLCLAVVGSTQFKLPDNFVYTVREKLPTQASVMADTPLPTKLQHPRSTSDCCAGSKNFKPMEMQKSSAFCTDITGSYRPELFLFGHILPATSFSLKSILSNANNS

SEQ ID NO: 923585 - protein, 128 aa, Homo sapiens
MNVHIMLSIPPQAPSTRLILDLDFILTSETFSSFFLIKLCLYPIPFFMRLVFDFDENSFWLIYEFRKQLSWCSPESSYPDFHVLSSIFYTSEEIKNSILCAKIQHNMGRRRHDSGNETTQQQLTQNDK

SEQ ID NO: 923586 - protein, 184 aa, Homo sapiens
MSHAHIWDLPFIKPSDVMRIIRYHENSTEKTHPSDSITSPGSVPQQVGIMGTRIQDEIGVGTKPNHIRDLLNGFDQNADSDMDNRVRAGVVSDGDEELVGNWSKDVPVYALAKRLVAFCHHPKAMWNFELERDDLGYLAEDAPEGISWFTGCKDHGKSVVSGPDSIVPHGTVPQGSPWLEEGVP

SEQ ID NO: 923587 - protein, 142 aa, Homo sapiens
MVSLAEMPSRPDGWLDPEERQQSMHFSLQEATPIGKGGVHYVKGTPRGTKESEQQSSALDLSSDRGYSNEKEPENQPWFSKVKTKERILRCETEALAKNFVSTKTKHHTGRKDTVIFRQTNADRIHHYQTSTVKTAKRSSKS

SEQ ID NO: 923588 - protein, 166 aa, Homo sapiens
MIGKHVLSITIITTITITIIAIAIINIIITITITAIITIAITIIITITIITTTIITITITTITINIIPPSPSSPSLSPPSSPSPVITITITTIITITITTIIITIIITIITITVTTSSYQHHHQHNHHHHHHRNHQHHHHHPSPSPPSLSPPPPSSPSPSSSSSPC

SEQ ID NO: 923589 - protein, 141 aa, Homo sapiens
MGDDVHPQQTTNTGEEPLDVIGLSLDENDRELQGRSHAYDQHLNMILGDEEETATTIEIDEETYEEIYKSRKQNIPMLFVLGDGRAGCPSIDSWMKQFVLYGKYETSYSSLSKCTRHSKEKPAYILILRNNSGDSPTPEMN

SEQ ID NO: 923590 - protein, 180 aa, Homo sapiens
MGSRCHGSFPGLTASEMLLGFGKQQLSVLLALGEATCHTASHSTLWRGPHGKETEAFCQQLCEWGILEVDCAAPVKPSDEHSPDWHLNCKSEYLPYVKQCWAQGCTNKQDLVLFPEGSLRADKLGSAHGLKLVILPPLLLKLNGRESWIWWDVRPTFPNQRQKDVQQGLAGKKDCAQVRM

SEQ ID NO: 923591 - protein, 158 aa, Homo sapiens
MDLIKMKTNSADLGWGWRLHISKELPGNGDAVGSSTTLQMLKQLRRCQWKTAQDETAAKETQIKKLNSEYTSPETSKKFGFQILLYNLSVEKYIYLYNEDANEDYKVVDGEHNETIKAFSKVVVPFYTPTNNMEIAFSIPKSQFTSKCWEHKFKLKHS

SEQ ID NO: 923592 - protein, 140 aa, Homo sapiens
MDLITFPLFPHIRQAAYGTDLKKQLYLQLPHQTKDTNCCGLSGTFCFSADNTLALGAASRITGPTWRKSKIKALADSVSAESCEGPVLSLGDPGLNPSCSTSTISKTTALGIVSPPVFFHPHTVFSPPDLSSFPFFISNI

SEQ ID NO: 923593 - protein, 142 aa, Homo sapiens
MYVEEYFMFNNVINFRYFASILLRFIVFTFLSDIGLQVFVVVVVVVVVVSLFWNQGNAGLTEWVRENSFSSIIFKSLSRIDINFSLNFWFNLAVKPSGLGLFFNGKPFIISISFSLLVCSGFLFLHDSILVGCISLGIFHFF

SEQ ID NO: 923594 - protein, 141 aa, Homo sapiens
MPLLEHQCLLHNSRLSPVCVDTWSPVINRAKPKIRALEFHCKSVGCVRLLALCLCYTVVLLQACQQECYLKSAVQALHRARERISALYQHARFRDFLFDSIYSKGVKLLTKKLKAPKWKVPKAPSLNCKPCLIIFAIFSQS

SEQ ID NO: 923595 - protein, 179 aa, Homo sapiens
MDPKTQWPTTTGTHSSTQLMCSASGYSSGSEPNDEPSHGYMAVITNRVIHLRSKLTEKGKFQIAKANWRFVAGPEPEDFTGEEFKLGLNRWNWDFSTRLKEQSGKRALQLYSSSCIDEFPKELLCQLENPPLSEKDLRESSAKIQQSSNTPPWEGVSEDVNRPGSCCHNVQSKSQETLT

SEQ ID NO: 923596 - protein, 186 aa, Homo sapiens
MKGYTIGSEPGQPWLRSVLVCFHAADEDIPETRKKIGLTGVTVPHGWGDFRIMAGGERHFLHGGGKRREEDAKVETPDKTVRSCTLFENINVYNTIKTLSKPTEIAKPTEKGTGTKGGSFCDKKLHYYLMANGLESRRYVTDLFQGLQWCIWSQLISSLKKMSTLVNQTQEFRRIFENQGLIEPVA

SEQ ID NO: 923597 - protein, 149 aa, Homo sapiens
MGETIPMIQFSPTGSLPQHMEIMEATIQDDIWVGTQPNHFNGLPQNGSLGPKRIPHTEYFIISKDLLAMVLEAGKSKIKGPVSSKDDLAMLSHGGRTKRSLPEKETEISLGRPTGWSIFGTEYHKGDGYTKRNQHRLEERDFLKSLVVC

SEQ ID NO: 923598 - protein, 145 aa, Homo sapiens
MNGATHISGKKWNSSEVPIGRERVEATRAQWYAAGRDGMTPFEQKCHADLAEKMPGCKLCKWYLAAAIKRTESIYNQSDLKPPITHHCLQGHEAPAFSVCNTVLLCSSNKKYLGILVSVGVKEYYRGRNQNPKTKKLFRCGYYIP

SEQ ID NO: 923599 - protein, 126 aa, Homo sapiens
MSPIPMATSCSPHVNEVVAHNQSDWLQKAANQRLNIFISFDPEILLPGIYPKAIDELRNKGLPAVLVTIGQPHLLNKFNFVKAYFFLSVAATINCVPENKFKTVITNKSKPNLPNLEDNKHAGNKL

SEQ ID NO: 923600 - protein, 134 aa, Homo sapiens
MTPLKQEIWSPSFSRKAWALKIEILPLSHSLSLHDSEQGSVAQGSAEVRKPPSLPAWKLKRRLCASHLPMKTGREAECSPSTLFFCKNSGVSANCCAGLREGQYGLSEIKVAPLNLYVLLFSVLWSMEVSQPHS

SEQ ID NO: 923601 - protein, 175 aa, Homo sapiens
MGKKHSRKAENSKNQSGSLPPKECSSSPAVEQSWTENDFDEEEVKTHRKEAKNLEKRLDKWLTRITSVEKSLNDLMELKTMTRELLMNAQPSVVDLINWIEVDSINKIWDYVKRPNLHLIGVPESDGENGTRLENTLQDIIRENFPNLARQASIQIQGYRERHKDTPQEEQLQDT

SEQ ID NO: 923602 - protein, 173 aa, Homo sapiens
MGLSRAGFCCLLKGVQENTQCRAWRTMDMKGPEAQVRGESSTCLKNTLEKLAACTGLVLTQCGAKICQRDLWNLELERDDLGYLVEEISKHQNIQEVTEHKTLENLQPDNAVEKKNPFSGEKFKLPAEICVLVSQLGKIQHADTLKGEEDGIYVVKGKLSTERGGETNGVNFW

SEQ ID NO: 923603 - protein, 140 aa, Homo sapiens
MLSPLNMRVYKSNSVPILVSFLPLQLYILNSIFFVVVHTFLLILLTRLTLTLLKLLKTVLEVARSPINDHGFSGLHILIYKMIRLNKISPRVFSISKMLRYGIQNVARNGSQSRAQEGSWTSHKKEFENSSSNKILNFQQ

SEQ ID NO: 923604 - protein, 384 aa, Homo sapiens
MAHVYPIEDKGEFSVPSCYGNIKNDNGGSSLTFEHPLDDVNVVDLKWIHDFVLKSLEVLYQVEKWETLVSLAIQFNTVSHERYTEQVTPLLVYAQRQLLLRIQKFKGPDITQQPCARYEAEYGEKGDLEDFLEMMAFDERGQPYSDLGKEHCSPREKEWPMPCSGTERRPVWLKCSKQGAWEKEEAAPSEDFLLLLLLPSVPIPANCDSSLLVLLHDVCSNAAAEVPGPHSLFRDLEATLSHYLPFLGTFQDKYSRAKALVCVPVDVTDTLRCFRETLEKSKYHNRSIRHSRKLLSLFLAQTQGEKGEINDSKCTSGKVEFCLGTEEMHMSIPPDLSQEHFRVFSSVEKSKLPYSQLGLVISSYHQTIDVQPRFGVPNGIYWEL

SEQ ID NO: 923605 - protein, 204 aa, Homo sapiens
MALGENPSLPLPASGICWRSLAFLGFAAIVFSTLTLLQDSKLFEKKVVQDDTENPVSPGTSVTENKDDSEFLDPISLNAREYFNIHLWLRCRLALVTAFVAQIHGIGIVKGHTVAKQVYYKNKRKDPSKWLPALHLFDVALKLCRTTAVEEHEVEAEILFQKGKIERQILMEEKSPSFQLESLYEAIQLSLKNDQNSGSEIVGK

SEQ ID NO: 923606 - protein, 140 aa, Homo sapiens
MQVTGDRSTPDPVFLGISSGSCRTVDIGEPQMLLPDRSSGSFVSEEYLAVSFVIHYQQNSTKPYNLSNMSSVKLVLHFRSLRFQFVTLELHNCFAVFHLPGVSDVYCFAMTGNVRQVNKEWQPGSDGPNALQTIEGLGAP

SEQ ID NO: 923607 - protein, 164 aa, Homo sapiens
MKNEAPKKDKVSQAISPSCPQKNRQKLCVGLVMTFSLFSSLVLNLSWLFNEIPRKGASRLLVIAIHEKLSNLAQIAELSLPAAPEITSNENIYEVEVEEESVDNEMEAMNSLWALCVLFISYSSFVAYRRNLIDVEWINGERILFCKRGLWESRAGSWGLGQGS

SEQ ID NO: 923608 - protein, 157 aa, Homo sapiens
MMNLILCIYCERDEKYMHSLINQVWPHSGYNCTFLKFSHFVYVHSSSGNVMADSPQLSTLSSNFFQLKDMNSFWREAHIQLLVDVGVQRPNPTTTTIQDHSEGPPQPQNSPMGIYKVNSKLIVAINVEDKTIKLEEIIRDYLHDLGVSKAFINRMHF

SEQ ID NO: 923609 - protein, 195 aa, Homo sapiens
MRWYKPVQLVTVLNTVCNCNTTSDLSSAGLLEFAGGPLQTLFAWLSPAEAVEQQRLLLTPSSESFVPEGQSQPDLSCMRCLLTPAGTCLPVRRHRCQGPTLGGSLPGDPLLSSEPVGRERLSLLKMRPQPPLPPGAQSQGERSFIYKPLAGPAAFLSETPCSERRNLERQSGYSSFAELWWALPSLNFPAALFKL

SEQ ID NO: 923610 - protein, 169 aa, Homo sapiens
MCFIAPEDLPEGQDVEVEDSDIDDPLELNPIKNHLNFEADISPVVPSDETPALTIPLIAVLGETMKQRTQISHAQISLTNRNWDRISTYEFWGDTSLQSIPPTVSEGAFWRSLYGFPDNDIEAFEDRKSLGQGLIRSSALVTIRDSTAQRLQAQAMELGFKSQYHFSGV

SEQ ID NO: 923611 - protein, 140 aa, Homo sapiens
MALVSVVIQTCWEESLCIGAGLAWFDHSHLVTKKGVTAFLWACPTMGLESYFRRSKDESRKTDKVIAIILGKKDGGYDQGEKLLLMSNDHKDINNWTWSLSAAVGYTSFTKAAFFTTATDLANSSDKENDATTEWFQTTF

SEQ ID NO: 923612 - protein, 200 aa, Homo sapiens
MRNAGQTRDQTCGRGLVENSGLVRNQRNKVWRNPEYQRSKHRDTELTLGCPTYLCVPAPSINSPAPWRVVSRLLHNCEPTLALGTQQTSRPFMFSNAAQCQRALIKCPRSQSKSIVESGVEPAVVNLEPTSLFRVSDCLSEPQEILLSMLFGGCPVYCSRYCQMKSSNARSMLSDSLHLYELQRYKQQQHRHSQEIYSHS

SEQ ID NO: 923613 - protein, 161 aa, Homo sapiens
MITVLDSASREEKQLLCQRLQLELREKLLDVRGFRGPGHPLQDAATESAWSFLLLVPKSAHPSFRTNSSLCSLPGGVKCKVGPSHRGPTGALPTGVMRRGPLSYRPQNGRGTDSLHHVPEKLQALKVIPGEQPWGLNPGKPQWQNCPRPSEPIPYTTVPFI

SEQ ID NO: 923614 - protein, 145 aa, Homo sapiens
MIKTQPMIQLPPTGFFPLHMRIVGVTIQGSSSPVVLQGIAPLLAAFRTGVECLQLFQMHSVSCLLVDLPFWDYREENREAAPMVAVASSVVLIAGIAWGRGAILRRQLAGVLQQQGHILELLGRVASEEDANALNEGQQDAPHHR

SEQ ID NO: 923615 - protein, 170 aa, Homo sapiens
MRKLIVGLIFLKIWTCTIRTSTDLPQTEDCSQCIHQVTEVGQEVKTVFLFYSYYEFTGTQKGTCLYNATQYKKAQTSNFWVLKSSIIGQYCIAREGKNFTAPVGKLSCLGQELYNSTAKIVTWWGLNHTEKNPFNHHTGVEWALNTLISMLSLQKWETWTQTHTHRETAV

SEQ ID NO: 923616 - protein, 145 aa, Homo sapiens
MTHKLCLHQAFVIKSVLNKCERLWLMRAAAATAALLLVVLSSSPLAALSALALASHHDRSEKPNFSNGLQGPSQSSSPCCSYAGVLGLPPICPCHEDTQVALWRDPHDKNLRPINSQQEIQDCTVVSHFVSKSFCSCKAFRQLQP

SEQ ID NO: 923617 - protein, 148 aa, Homo sapiens
MSKPNPGLNFLSVVFCYSSINALKTVIDRKWKCYYKKYLKMWEQLWNWVMGRGWKSWRGRLEKAKITINEAIPENVQENWSCGYLKEPQFGQFLVMPLEIEVIRDSIIGSFEDRIIVYWMQIPNPRLNSYGGALLVDSFSWSCCSLYS

SEQ ID NO: 923618 - protein, 172 aa, Homo sapiens
MNFPLYNLFSGVLLLSCSTTAVKLGYLTLDEIVKVAEALIPQQKLECRGTGTSQPLWRWQGRIPLTQTLCASPLSGWGVCSIQEEQGHTNELKTVNVGDFIADESGPQREGKLKRGQSGWEEHGPFTCIYMKMKPLEEEIVRPLSPSQAIASPVTCMYTSRWPEVTEDPQKK

SEQ ID NO: 923619 - protein, 163 aa, Homo sapiens
MSSPGIAGRKGIASSSYSLDPVFWLFSSDRPLFFICRNSDVHVEELWFYPLWKPEPGGHSSWLLQAGLGAAWEPRVGEIKLKGDLVGTDLPSTVIVTRSSASVMGYRASEAIGQHQSSAAKPRRSQSESLGPEFQGLWEWLPVLFNVGSRLGNKMYIENKTAF

SEQ ID NO: 923620 - protein, 150 aa, Homo sapiens
MYDQEICLLKDSRAVMLTPLGEDGEPELKVVPGQETALKCGPPSYICKEMNSANTSDLERCPQFQMRTAALANTLISVQEENHKTRCWRWSTGERTHAVAVQLLKNTDERAVKDDSLSDGRWISQSMTSLINWPWLPKELSKGGCTEKQL

SEQ ID NO: 923621 - protein, 153 aa, Homo sapiens
MKQERLADARPQGPSKDIWMPYLGQRKGEKKKKEKEKGKGKRKGKGKGKTRRKEEEEEEEEEEEEEEEEEEEEEEEEEEEEEEKEEEEEEEEEEEEEEQEEEKEEEEEVEWKKKRKKKKRKKKNRKKKRKNKRKKKKNCYTNTQKCGTGFETG

SEQ ID NO: 923622 - protein, 130 aa, Homo sapiens
MISFDSMSHIQGMLMQEVGSHELGKLCLCGLAGYSSRPGCFHGLALSVCSFSRPMVQAVSGPTILGSGRPWPSSHSSTRQCTSGDSVWGLPLYISLPTALAEILHEGSALAFLINHSDSSIKDGFEENKP

SEQ ID NO: 923623 - protein, 163 aa, Homo sapiens
MALISIAQKINTDWLMGCMGRLAAGVLGQVGLVPRTTGTGLVPEFMGVGMEPGSTGAGLESGSTWVGLVTGSVRMVPEPRCRGGLGASNHGCRPGAWGSGGQIGTVAGLSPDSMEAGLVLWFTRAGLVLGCAAKLNVHSLSSMWRVPLFMLCFLGLVESHKKE

SEQ ID NO: 923624 - protein, 149 aa, Homo sapiens
MIKNIHVLSLPCHAISDRSNLPSHVRLTGGPVLLCKTSELDHIHLVQVMCLKTQPRTQGCEAQCSILPPCPSDICPRKKHVLAGDGSGTMKGLDSMPNPAPSILQNLSKHGPFQHPIRVAYSPELLSYLVSSGSVPLPPPVCSVVPVSQ

SEQ ID NO: 923625 - protein, 142 aa, Homo sapiens
METPSLGSFHVLLSLWVHRGQELRFGNLHLGFRRCMETPGCPGRSLLQGQSPLGQPLLGQCGTEMWDQSTHTEFLMGHCLLELALGSHLKGIEQGSHMILFSVERLLCQLHELQMRQGREKITAIVARYSHFVDEEPGALRN

SEQ ID NO: 923626 - protein, 142 aa, Homo sapiens
MTLGVSGVEAEVDWRSDIGGQGTGQPRLKGWKDPGPTSQHCTKHFTCSIAVSVISYRFVPSNVRGTSMNFLTLFNGFGCFTGALLVKLVYLISDGKNRIHAPRRINVMLILKLHILCANSSYTSQRNMVIKRYNRMTCKVLM

SEQ ID NO: 923627 - protein, 210 aa, Homo sapiens
MDNEVQAEVVSDGDEELVGNWSKGHSCYALAKRLAGFCPYSRDLWNLDLERDDLSNKEPNVNQQDYGENVSRAPSQQPLPSQAQRRRKEKWFPGLCPGPPCSVQLQDMVSCVPVDSAPAMAKRGQGTARAIASEGARPKPWQLPRCVEPVGEQKSRTEKFAAGAEPSWRTSAGAAWKGNVELEPATKSSHWSTTKWSHEKRATVLQTPEW

SEQ ID NO: 923628 - protein, 167 aa, Homo sapiens
MGLGAVEQGAVLIREARAAHEPMERVGGSGMAGCRSRALPREKAAKARRETEGSAGGLALLGNPVHPPGPGAKPLIARGRQDRPAAPSAGPAKPPPTRNSSWPASAARSPGSRSRLSLHSSLQAEGAGSGLGQPRKRLPQCGGGLKGSSSATKVGAQAEEAPRASQG

SEQ ID NO: 923629 - protein, 166 aa, Homo sapiens
MVMQAPLWPQPLKLCSVRLEASTALGLAPHTLIGITGILGATVQDEIWVGTQPNHITMNQGLRIKDLNIKPKSIKTLEENLGNTTLDIELDKDFLMKMPKTIATKPKIDKRDLIKLKSFCTAKKQNKNKNKKKNKKKTINRVNRQPTEWEKIFAKYASDKGLIPNL

SEQ ID NO: 923630 - protein, 144 aa, Homo sapiens
MGHYHPKRKEILWYAVTGSRSKSKTKKFPHVFNAEPAFRPLLQAGPTNLWQPCFFSVPWQAAPREGFCKAESYFYPWIKRGSAGQEIVDKHKIVKAGSRMVTAFLSSGAVNALDIPAFIMKFSEGRGAMWNPVLAKANFKEVKH

SEQ ID NO: 923631 - protein, 213 aa, Homo sapiens
MVKNIGSGIRLPSGKHYDWHHVLSITITIIIIHHHHYHHHHHHHHRHLHHHHHITITTTAIAITTIITITIITIAIINIIITITTTIITITIITITITTIITITIIMTITTITITITTIIIITIITLTITIIPPSPSAPSSSSPSSPSLSHHHTITIITITIIISTITFTHHHHHHLHHHHHHHTITIFITTTIITIAIIITTMLRKHFAYIN

SEQ ID NO: 923632 - protein, 148 aa, Homo sapiens
MPGGSSGQNPHSVCASEELQPGAVCVLIYGTEPFRVVMALSAQGDFLSHFWAGLENPLFFHSPHFNAGPCWQQQASAPHQRKQSVTPLIRFCQSPVWSSAKIVTGSQIWKPQSYFWPSLLLLIHHATFCSPARTQQSEMRKAQKLVLI

SEQ ID NO: 923633 - protein, 154 aa, Homo sapiens
MAGYSSETKLPEEKSGSNICGSPISTVLQSLLLIPRKAGSGMDLQQTPTDLKLRVLTVRRKTNKQKGHSLQKPICTSPSLKTKAMEQSWMENDFDELREEVFRRSNYSEVKEEVQTSGKEVKNVEKKLDEWLTRVTNAEKSLKDLMELKTKAQN

SEQ ID NO: 923634 - protein, 141 aa, Homo sapiens
MSACRSSCSPVRQYFGSLGGDHRCTVPPLLEQNKKGKEKAIFPPNTPPTHRHPPTPVSWPPGAGTFFFLCTSELQVCLSLDSRTYTNITHYLGFSGLWPQTENYTISFPSPEAFGLGLSHDTAYPRASSLQMACHGTSQPL

SEQ ID NO: 923635 - protein, 126 aa, Homo sapiens
MFLVGIRYYKTTSLQIATFFFIRFRNPNGATSASTGVKFCQTHGLVSKLSMQNGAFENEVKLMDKSVLGALCGTSRHRSRSNARESNACRLLPRPWPGISLPSCKLSSWLVISKIDSQPTWNWHRK

SEQ ID NO: 923636 - protein, 136 aa, Homo sapiens
MGASKSGGVKGMRKDRLRVHKLGPGGQCWYGSCKGLELWEPTLFIGDQTKKQVVRTGHEGLYVMSPGFHQSHERFYALGLDLWCGRAAFHPLAQSLAFQRPRGVLDPGPWTFSKTLLYYDRQASSALVLLPTSIYT

SEQ ID NO: 923637 - protein, 148 aa, Homo sapiens
MTFNSEFKGTSFLLESLAGLAWCLELESSEAGLELESMWLISVELGTTGASLVPKALGSAWSLGPWGLAWHWGSLKPGQHGAWGHGDLEPWFKDKAGAGTGLYPGSMSRGRSLSDRVHEGRPGAGVHGKDECSLHSPSPTQKVSPFTL

SEQ ID NO: 923638 - protein, 148 aa, Homo sapiens
MWCVYICNGILFSSKKEGNPVICSNIMNLENIILSEIGQTQKDKYCMISFIHGTILKCRDLVHNIVLVRMNVILRIMNKPKHTSIWLTKHLPCMIVPSNTTWIEACLYYLTIRLVQNYGFAVKSNGLCSSSSVGDNNTFLRGSAVRFK

SEQ ID NO: 923639 - protein, 145 aa, Homo sapiens
MAYPHKCSSPQPFENVKEDVRDSQGFMQGSRGLKEGAGDMKMSKVDKRDARQETQEGRAAAHNPLGRVGTAREFEMDIQNHRLKLDRNEFQLPDVNLYPLSLYLHNPSDTSGLLIALLCLSSGHRGGHVVKPWPNMTPHLLVYNN

SEQ ID NO: 923640 - protein, 148 aa, Homo sapiens
MLISCVEADHLTAPCLSFFLYQMAIILGLTPPVQKPGPLPHICVLSSCRYIVGYGDGVAIVGLNHLAYTAVHSTSALYVFRASGSCCLHAGYGGRGRLAVYTHRILISLDFASGQKLIQYRLQELAFEYVPQRLLLKNIHSEKHRRIM

SEQ ID NO: 923641 - protein, 154 aa, Homo sapiens
MKQQKHLLPKNPQRSLDPADRNRQNSKRKGSNGAHHLAIVNSPFVVAKMCLELVPSGGFLVSLTSRMKPRNLTVRGLTDFRNEAADPLARHRALIGAFSQSADWCVYKPLSRQKSSPSPHSTQEVQLASPLIPPSENQLLDIHQHITVLITIDN

SEQ ID NO: 923642 - protein, 169 aa, Homo sapiens
MTLPMNCCKCFHSPSFKTKDYNFIKAVCFALGRLLRIITSTVCNVSWKCGLSRGCKALQLLLEGGFSGHAILHMVSETFKSERELKDHEIIPVNFTGEERKAQRHCGEPLKDFKQGWANGALCKSLLFNSMIKSMGDTKQELKRLLERKIGGEETNHNSRNSSVFVDKF

SEQ ID NO: 923643 - protein, 157 aa, Homo sapiens
MYYGNRMWRPQALVADEEILFIDEQRKWFLEMKSVSGEDAMNITEMTTKNLEYYINLVDKVTAGFDRIDSHFESYTVGPSAKWEVQCSEGPNNSTGGNAQSWGELSLGPCWYLSSKFSQFLQGSESSLRPDVRCQIIVSERAKLCKLFEEIYSEPNE

SEQ ID NO: 923644 - protein, 128 aa, Homo sapiens
MCEQTVEQKPESLVAALGPDPNAPDGCCSMHGQQRAVEFDFLPGIRSFLRPESEKGAAWRAQADPFMEGAREVGQNWHAVSFVLKEYCLSVSQEKSCQLILVRGHPRPKGRNMVAIKRMEKVARLNQL

SEQ ID NO: 923645 - protein, 157 aa, Homo sapiens
MGFRDLKSPASLQVLNDYLVDKSYIEVYEAVSGPPPADLCHALCWYNQIKSYEKEKASLPGVKKAVGRYGPAKVEDTTGSGATNSKDDDEIDLLGSDEEESEEAKRSIQADGLVWGSSKLVPVGYRFKKLQIQCVVEDDKFGTDMLEEQIAAFQDYV

SEQ ID NO: 923646 - protein, 142 aa, Homo sapiens
MHVIITYIFFPETCSHSSVPAVTALSDDDDDDDNDDGYDDSKPFCASLEKLQAVLYQLEKNSLSTPLLNTVKTGLEVAVGESVSEWQVNGKVLDITAHSFMFVYPSTLTSTWDIVNAQSMLIEQIDMDWCAWDYRFIFETSS

SEQ ID NO: 923647 - protein, 140 aa, Homo sapiens
MRVSVCPELSCLLLGATLPNLKVFTNLEAPPSSYKATNPVGLGLHSDDLLKPELPPKGPASKYSPSLEVPRCPCYYILLVKAVTGPAQRRGGHVPPLDVRMACTYRVKGNCWGPSLEDSNHRSFLEVAIGHPCLPPISQN

SEQ ID NO: 923648 - protein, 141 aa, Homo sapiens
MAHVYICNKPAQEDRKMRETLELLRDWLNGCDQNTDRNIDNEGQADKVSDEKVTGNWSKGHPCYALTKSSAVLCLGPRDLWNFELRSDDLGYLAEEISKQQSVQDVTWLLLTAYNQSWEKPSNSFPKMDFYTPFYTPISNV

SEQ ID NO: 923649 - protein, 137 aa, Homo sapiens
MLSAGQLRSETCKMLRSKRRIRAVELLQAAKPTLGRKGCGSLALLCKPPRVAANTQEQYLLEKVYAEEMSEPQDSPENQVPLRGNCHPLPEEGTVVQRPGREQLQPMKTIPASVAVALLPAVLVLPLDLFLELVGAG

SEQ ID NO: 923650 - protein, 331 aa, Homo sapiens
MDPHKVNELWAFVKMCKQDPSILHTEEMHFLREWVESTVGKVPPATQKAKSEENTKEEKPDSKRVEEDLKADEQSSEKSDLEIDKEEIMEEMMDQANDKKVAAIETLNDGELQKATDLFTDAIKLNPRLAILYAKRASVFVKLQKPNAAIRDCDRAIEINPDSAQPYKWRGKAHRLLGHWEEAAHDLALACKLDYDEDVSAMLKEVQPRAQKIEEHRRKYERKREEREIKERIERYGSFLGGFPGGMPANFPRGMPGMGGGMPGMAGMPGLNEILSDPEVLAAMQDPEVLVAFQDVAQNPANMSKYQSNPKVMNLISKLSVKFGGQVNYKL

SEQ ID NO: 923651 - protein, 147 aa, Homo sapiens
MHGDECAKRPISQNVSPSLNNTTVYSARQATDAARGLQEPRLNPLTIKVTSSNLHSAMVEECSVWTSERRISGASNQAQMSVSPTPAVGWDRTQRKSPQWGFLGAEQPYCWLPAGRGCTCVSPSVRASAEAAEAQQGLLSPTPSKSS

SEQ ID NO: 923652 - protein, 193 aa, Homo sapiens
MAMHCDTSTFWARATSFLPEGWALLILYLYNQKGPLKTPSKNRTISWNMTCYLPSLKTDTVGNQIATTLAKKKIVKFCTLMYMQNAKHYYYMTGHKSGPYGLNMVDRAMPWFGQLGSIQGKGKFWKLKPEPEDLACHLLRAQFMAPENNYNSNINDHGSLITITDVIVKKFAVFQEFPKCGIETQSESILLEK

SEQ ID NO: 923653 - protein, 135 aa, Homo sapiens
MFNLDIAGKRASSVGQPNALEFPYPFDMRLLLVPGALCARGLHLEDAILISKWLEVQTYMSQHFQGFIVVGISIPTAAKLGSEFPVSGVVKTAGTWLFVEDNGKEVKHPVNIGGPFRISVQNSQGTSDAVVPVLC

SEQ ID NO: 923654 - protein, 128 aa, Homo sapiens
MDLLVHVSLMLKHLCAAFLGGLFPLQNKRPLLLHYFGICLEFYLFSTRFNCSTRICNKLAYFVSQFKGNEGELEEKKKSGKCHDVIYSSGKPGLQGPKEAAERPVKRLPRSSQMLEIMVLDVRREGED

SEQ ID NO: 923655 - protein, 402 aa, Homo sapiens
MARGERAEIVEKQTQLSPDTLIMQVTDLQQKVHAQLRQVSTIKVRTLIGKEWDPATWNGDVWDDPDEGEDTEFVNADESFLPEGTASPFPVVATSPPRPMLPSAIPPLSEEISAGDLQPFTTVTLHWGKRNGRRFQGLLDTDSEPMLTPGDPKHHCHPPVKIGAYGGQRELDRILLPQDIVLVHYIDDIMLIGTSGQEVANTLDLLEPADPMVPDMSVEDRGAVWSLWQDPIGESQQRPIGVWSKALPSSADNYSLFERQLLACYWALVEIERLTMGHQPAPMASWGVPYNQLTEEEKTRAWFTDGSAQYAVTTGMWTAAALQPLSRTFLKDSSEGKSSHQQAKKGVTVLAVVTDLDYQDEISLLFHSGGKEEYAWNTGDPLVGNYNSPIQAGLQMAQTLQE

SEQ ID NO: 923656 - protein, 167 aa, Homo sapiens
MKSHVIHKTQTSGQCLSLNVNDLEPSSAPQILTYMEIPGNPVTTTYYVPSTVVSAKIQNQIRQIAGHSHESDVLMGRDRQKAREEGDHVTSYFALKQIKQDCVKALWVRGESASDCVVMETLNNGRDKAGKGGKEYSRAEEEIRLGGLKSEGQKPGQRNSHELREGA

SEQ ID NO: 923657 - protein, 147 aa, Homo sapiens
MGNEVPAVVVSDGGEELLGNWSKGDSCYALAKRLAAFCPCSRDLWNFELERNYLKLELMFKRKADHSSLENLQPDDAIEKKNPFSGEKFKPSAEICINNKEPHVNHQDNGENVSRVCQRFWQQLLPQAQRPRSQKWFHGPAGSCVQS

SEQ ID NO: 923658 - protein, 142 aa, Homo sapiens
MCVSVPVIQMKKLKCGEAKSLMSLSSQELNLGLPKALLAGDGGLGANATVILKAHSCWLSVNCTLGQCSLKRRAEQCTCMRTTWTKPMLWTQKDLTYQPRVHSDPYRGCYLGGVFLNTEANALDAITGSSIGANGYVVGIEQ

SEQ ID NO: 923659 - protein, 162 aa, Homo sapiens
MGKIAPMIQLSPPGPRLDMWGLLQFKVRFGELVDSLPFLTLKTVYDYEPQSEVLDEAMGQTNKLKMGIYWHGQLLIDTLQLCLDLKDLDGKECAVFFITATSMGCTQQLDVTLTEIEMTLSEVHYFSLHQLMLPHLDSNEAPILGTRDSASRLDVEGPDDPP

SEQ ID NO: 923660 - protein, 156 aa, Homo sapiens
MWESLELLRNLLNGFNQNADNEVDDEIQAEVVSDGHEELHGNWSKSHFYYALAKNLVPCVPGASPPAMARRGQGTTWAVASEAASPKPWQLPCGVGPAGAQKLIIEMKIKIETIRERNAAFEVIKCKLLSSSVHENMQSLPLDIGFRRSLLLNCGL

SEQ ID NO: 923661 - protein, 260 aa, Homo sapiens
MTLPLSAHKRSASYMNLNYPFYPTGTVSVCFSPFCSVLEEKFINTFGKKKQEGPSSKFDLDVKTDDATHPPHIGRLSHRVIGSQQKGGPGEGGLSLPAGHPVTSAALSREGSSSVHLVTSYPAISRDSSSSLQNGHAIISLFSALLWLSLGFLWTSEGRKCTATGPWATMDGPEKAPQVPTLVRGSGSPALSLWDLPGLKVEPYGGPISFCPGICLPPAAVHGCLDSAPTLFQDWSQHQQQGKTRQQDRFFGACKGRGPS

SEQ ID NO: 923662 - protein, 146 aa, Homo sapiens
MAFVNCHDAGGIFRRINVQFKSSLRKRRRGQSLPLFSTRRIKPLIFNRYLSFQGQWTGSWENSPCYKYILNCTWYFNLNADSQALTQDGVALVRALLKISHLNVYQSMLSKYFSSTSCTPGAGDKVVEETKWRPPGTHILKQSCPM

SEQ ID NO: 923663 - protein, 193 aa, Homo sapiens
MSLRKGIACTDLPLLKTEIGVCYTKVPKETSSRSYNTHDWHGSCGKDLGVPRRESVRGWKKPPGDTGCKRYGYISSLLHKPLILVGQGEGIETELPSPPLQHLNKAFFPDNTHGLSDCLSVQQTQLPPNTGSPSVLSVALDSSLWLQLRSESHWPIRAPYLPEHGDWFRDGHVTKAEPKRFHPGMFAKTVGGD

SEQ ID NO: 923664 - protein, 167 aa, Homo sapiens
MWPTLWALISPEVSIREKANAFPEYRPPTPEVLTPRRSLGLQGEKPEGAELKGSAQMALVIWGKCPVHDKVLISIPGLCPPAASSTPCPSVTINNKCLQTLPLGKVESKITSSDLLNRDKGDGECVPLELAGSSVLAWVAQGSSGRHWEPHQCSLDTKGLEDKPSFK

SEQ ID NO: 923665 - protein, 135 aa, Homo sapiens
MGVSRDEQFEVGFGARTWFTADLDSGVTPQPGCGAGIDVTDVLGVGGGCTCDPLGGTECPRRSMETPLKHVGAKDMDEAGNHHSQQTNKSTENQTLHVLTHKWELNNENKWTQGGEHHTHRGLSGSGRDSIRRNT

SEQ ID NO: 923666 - protein, 144 aa, Homo sapiens
MFAQGPGALQSAGGKVSQVGALPFRVVSFLRIWVGPEVLSGSQGLDSKTLEVYLVFYCIVAKMALKPLDAVLPPLPSPFQMQRSLTLGPPPPQAYRVLPDYCQCSLKDIAAGFSGPKDSSATAPAGISVGHVPPGPLALGPVQH

SEQ ID NO: 923667 - protein, 155 aa, Homo sapiens
MRIKIVRISLSLFYFEFAELLDVQINVFNKIWDTFAINYSNIVSSFFSASFSSGTAIVLMLAAKSQTVAWQVSLGKELSILGELRVKPNTDNLASGFFQGTIRQDTEVLNTAILTGKPVSVPVKVVGVQEDGSVVDVSESVECKSADEDVIKQSK

SEQ ID NO: 923668 - protein, 142 aa, Homo sapiens
MAGVQGTKQVSSCLPALCNMSPRATCGWVNGSFYEILQVDFGIDNSSDLAGAQQITWQVEYPIEDSMSELVVSEIFVSQTTFVGIVPLAMQVMERSVAINAGLPLHEALRFPGIPDFPECEQIKAPSCSPSQRSAQPVTPGT

SEQ ID NO: 923669 - protein, 147 aa, Homo sapiens
MMFTASADNAACVPLAYSIQITSARAENPLPTFTVSDMASCTPENPLWSGIFCYDLPLAHVSLIELGPLVKYGPTHWLDGSIGVCLFDSTQPCTLARAENSIKGITGKGENLIKEDQYCLCGVKVAHVMGIWVSGEGISQESSCGQP

SEQ ID NO: 923670 - protein, 215 aa, Homo sapiens
MHTGRTSHEEGRGRDASTNQGTSKIASNHQKQRETHRTGSPSQLSEWGDLANTFILDFQAPELQGNKFLWLKPLNWWYFVTAAPRGQSTCLHLFWSTSLEHRTMAELFIVKWLAWFQPIFSKSQKHLPRIRKSLLPPASVLSGCQVTFDPQARSSLEHSGCTILHSYQRCKRVSISPHAHMDKEKRSVSIYWDVIQPRKGMKQQHRLQHGRTLKT

SEQ ID NO: 923671 - protein, 186 aa, Homo sapiens
MNEEAPEDEGTCVLVLGQNKRRNKNLTEEPSVGGKGVGFGVRGSGFESWLCQNQLCDLQPVVRYRVGASDLFIWMLRTTVAGLATRLLGERTLWESEKSYYGSKIKAAAGVKITAVRVSSEDQWAVQEEIDNGSTQTSATLTCMGHRPDTQSRIQPSLNQVFTTVISASSVLCFSSADVYQVPPTF

SEQ ID NO: 923672 - protein, 168 aa, Homo sapiens
MLRDVFPVERGRNKDTHFALVRIDIGDTLHKVFEILIGLEVERQLGGKKSPFLLQMCSGLDCDRRPQGLMGMKVGFNPIPSEKREIHVKTQEDDHLQAKERSRKKPAMQTPSSWTSGLQNCEKVNFCCLRRPQSTTHSERLAESGASSLRFPSAAAMQVCKLLSVHCL

SEQ ID NO: 923673 - protein, 313 aa, Homo sapiens
MSNCKVTESRGIVDSLQKFSSLPAYLPTNLHISNAEESFFLKEANQDLTRNSSLQARVEPFFIYRARTPPIINASYGPFSVEKIIPQELLLTSTAFGNMDKFPFNWKLKSHILDSSIYSNRPKVQTLFYVTGMGWDDSDLTEDLPCVKMFAFPEAREVAASCRLQGAPGLCVAELELLPEWFSSGLDLEPEEEIPALLGGTTMELFFTLYPADKAGQCPLEEEGKWENNIHSGLESPQQAFPARERIGSVVVYPTQDDLKWSLVSLDENVVISVPLNLVREGDTATFLVSLTSSSVADQFTLRYVTHLAPEGI

SEQ ID NO: 923674 - protein, 115 aa, Homo sapiens [sequence omitted]

SEQ ID NO: 923675 - protein, 306 aa, Homo sapiens
MIEGHGVTDNIQRFSSLPPYLPVSYHILRAETSFFLKEANQDLLRNSSLQARVESFFTYKTRQPPVLNASYGPFSVEKVVPLDLMLTSNFLGPTNKFSFDWKLKAHILRDKVYLSRPKVQVLFHIMGRDWDDHGAGEKLPCLRVFAFRETREVRGSCRLKGDLGLCVAELELLSSWFSAPTVGAGRKKSMDQPEGTPVELYYTVHPGNERGDCAGGDFRKGNAIRPGKDGLEETTSHLQRIGTVGLYRAQDSAQLSELRLDGNVVIWLPSRPVKQGEVVTAYVTISSNSSVDLFILSDVMNSYIFL

SEQ ID NO: 923676 - protein, 135 aa, Homo sapiens
MEQTAPTSLVYDSHLRLRQIRAADQMMLKWIFNVSCIKQSHDFIHTADKAHGLRSLIAALTSVENGNILGAKGNVIIMCHVSGSALCEDSAFMSRIFAMILSGSVRGLGVYVLNLYNDPIRLCARTRRLCLKYLQ

SEQ ID NO: 923677 - protein, 116 aa, Homo sapiens [sequence omitted]

SEQ ID NO: 923678 - protein, 144 aa, Homo sapiens
MRRGPPAQSPCGTGIQERCSALCAPSSRLCAPCPQLPIHSFGTVGLVLQEGRPGSLHPLSATARVSVRALEERSLIAQLTRDPSLAETRGSLRVLSNESFAVGERGWGGGCVPRDGNYLTSGPVRGSFTSVSSSLQWESVLATE

SEQ ID NO: 923679 - protein, 135 aa, Homo sapiens
MGAVPPGVAPSGLMTPPSKSSFREVVGRRESQRVHGEGERKKNLPRSPPPTHQRFTPCVLPLELPNVHIVTGEQVTYMEPKVNGSGALNAELYVMGQLEPLPDCRESLRYLEIDILSRGALEPLMGLAESPDPLP

SEQ ID NO: 923680 - protein, 244 aa, Homo sapiens
MKAVLTLHVLHIQLRVLTSAKASLMWLVDQSLQCLSLCPGNKCETEGCTVGFPTFEVLGHGLASLLLSLQTVYCETSPCDHGTPSTFSLTSRWSDAGHMPTPKPNTGGARDTMIGLEYSGLTPDLDIDETSSVSQTHIVELRFTHQKAPVHWGNSNGPCECLKVGSFRSSRPDTPWMNTPRHKPIYSAPHLQKQLKKEFQQEYLNVSFDRCAETGVIASEMESFANNYITINSEEHYHFFISTF

SEQ ID NO: 923681 - protein, 318 aa, Homo sapiens
MTVVLVVMLEICSYGRNGGDDRGSKNYVGGDGNDDGGGNKGDDGGGNGRSVGGDNDGDNEEVVEVMMVKVIEVMMVEVAVELLLAMVEVMKVVLELVEVMEVMMVEVMELMMMEVSVVLVVMVEVIEVMLEIVEVMKVMMMEMMEVMEVMMMKVAVELVISDGSDCGGGDGDDDGGSSGIASDGRGNGGDTGDGRSDGGGDGDYGGDDVGDSNALVSDGRGEGSGGGGDGGDDNRGSSGIVGGDRGDGDDGIGEGDGDDDGGSNRVVISDGRGNAGEGIGGDDGDDDGGGSSGVGDGRGGGCRGVSSDGNGGMVVGCH

SEQ ID NO: 923682 - protein, 143 aa, Homo sapiens
MRVGLLSLAEPDSKVCDCLIHRQIPLALPWHHHHWAALPLTRYEKSGKAKQKLKVKKGVNILSAQTREPRQWGVKQEVGSGGKHVTATVACQRLGPSPRNRGAIEPTTWKSGGIDIHAGPSASAAGRGGALALQRCGVSFGAG

SEQ ID NO: 923683 - protein, 176 aa, Homo sapiens
MSIIEATTLPPSTTSQQAELIALTWVLTLAKGLHINIYTDSKYTFHILHYHAVIWAERGFLTIQVSSIINASLIKTLLKAALLPKKGGVIHCKGHQKASDPIALGNAYVNKVAKEVASIPTSVPHGQFFSFSSVTPTYSPTETSTYQSLPTQGKYLRPRKISPSSLTGPFYSVMIS

SEQ ID NO: 923684 - protein, 208 aa, Homo sapiens
MILQIWKSVRNCGRHTSAPSPSCPSPEPNIIPRICEYVSFNGKTDLAEDSEEDRKMWESLELPRDLLSGFDQNANSDMDSEVQAEVISDGDEELVGNWSKGHSCYTKRLVAFCSCPRDLWNFELERDDLGPRNGRSMDSLHHAPGNATEPQHWLVKAARRETVSCKAKEVELPKTVGTHLLDQHELDDKIGDTGYFTKVLTGMAHFQI

SEQ ID NO: 923685 - protein, 184 aa, Homo sapiens
MSTPDPVFLGISSSSCRTADIGEPQMLLADRSSGSFVSEEYPAVYQAACWENRYSLQSCQRGTFKSADVTAVFLFVCALPPEVEPTEITHLLRCSRWELALRFPKPLGGPEVLPGSQGPQSKTLEVYLVFYCAAVELALKPQDPFYSSLLFPKAEEPHFIPTTNPGHKEYCQTTSDVPLRPKVP

SEQ ID NO: 923686 - protein, 156 aa, Homo sapiens
MENFYEGKGPVGPRTHPVVISPVPQCIIGIDILSSWQDPHFGCLTGRVRAIIMVGKAKWKPLEPPLPRKIINQKQYGIPGEIAEINTTIKDLKDAGVVIPTTSLFNSPIWPVQKKDASWRMTMDYHKLNQVVTAIAAAVPDVVSLPAKASNIPLLS

SEQ ID NO: 923687 - protein, 223 aa, Homo sapiens
MGNDHSLPQAQPSISPDAVAMLDLIPLLDKINMTTGLMALKSTKIGAASLLFAKLSHSTLWALESPNQLRVEGIPQHSTAVLPKHGQTASLTFTGDTSRYWKTQGDWDQAASKPQQPYRKVIKLLKQKQKPSKGQQPQRLKIDNPIKMRKNQHKNAENSKRQNALFPPNDCITSPARVWNQAKAVMAEMTEVEFRIWIGTNFTELKEDIVTQWKEAKNHDKTS

SEQ ID NO: 923688 - protein, 318 aa, Homo sapiens
MLSRQLPGYPQEYQRNGGESIAIDWDKTMRFTFNERSNPDDDSMGIQIVKDLHRTGCSSYCGQEAEQDRVVLKRVLLAYARWNKTVGYCQGFNILAALILEVMEGNEGDALKIMIYLIDKVLPESYFVNNLRALSVDMAVFRDLLRMKLPELSQHLDTLQRTANKESGGGYEPPLTNVFTMQWFLTLFATCLPNQTVLKIWDSVFFEGSEIILRVSLAIWAKLGEQIECCETADEFYSTMGRLTQEMLENDLLQSHELMQSGLSAACLLEFVGGPLQTLFSWVSPVKATEQQRLLPVPSSGSFVPEGHLPDASQSSPL

SEQ ID NO: 923689 - protein, 166 aa, Homo sapiens
MHKPGSDHEVAAQETLSLEFNLYSPDWRSKPEKALVAEKDEHPYSSSLEGESRELLEAYRFMGPELHLLSFCTWFIPMDVHSKIEGEMQRFPISHLSHTCTTFPIINIPHQSESFITIDESTLTHHCHTKSILYIRVHSWYFLIDKKYSQGVNSMITHSGGKRYTV

SEQ ID NO: 923690 - protein, 124 aa, Homo sapiens
MAGYTLLTLRMGEKYIFTFYYGPENTETTEAETLFPGTNTLPVVTEFGKWQRWDVSPSSRDPESAYFTTALYCLNPILCRVVKEDFPDMETSEQRPEGSKGKRHVGNSIPGRRKVKLMSVGIEQ

SEQ ID NO: 923691 - protein, 139 aa, Homo sapiens [sequence omitted]

SEQ ID NO: 923692 - protein, 140 aa, Homo sapiens
MIQASKSMPNDRLAICINTGKWALGRKHKHFHNCASRQEEQKCGLHSSLPLSDFHSGVHVRVCYMGKLHITEVWYTNDIITQVKSKSFPISSPTPTPSRLPLTPHWAELGPMTFIKFNLRSLPVNVSKKGQQDFNVWSVL

SEQ ID NO: 923693 - protein, 155 aa, Homo sapiens
MRWPGSHLATSQQRTNPSPAHDHGMTHEPLTARQKSTFMKPCQIMEWGPDKGYGVGETSSLLQAFFKNRRLSATELRIWGYSRVSLRIFCCKEQLSHTAVLHGGCRQESKHGLEFSEDVIHKGTVNQTQTSLQNLTVQAKLIANRRKVPDQRSPF

SEQ ID NO: 923694 - protein, 144 aa, Homo sapiens
MGGCQAKYFIRAVAVGYMLACTCQQPQQCDEVHAHWLEMATGHAFSPTLGYWNSRLFSLWTLRFVPTASHGSWAFDLKLRVIPLASLVSGFTTWTEPHYWLLRFSSLQKVIWDFSASIIIINRIPRSDLVLNDLEVKRKSPFLQ

SEQ ID NO: 923695 - protein, 124 aa, Homo sapiens
MGETDPMIQLSPPGPALDKWGLLQFKVRFGRGHSQTISVIQQNFYLPWFWVLSISGNHAFYHFIKATDENTEKKKIEDRALMQVMTLIKQLACFRNANGHRQKLQLATGYTLSGPDLQSMSDID

SEQ ID NO: 923696 - protein, 150 aa, Homo sapiens
MRTPRHRKGKITHRGLLWVLPTSDTPQNDVKKFESISINFSYQDLQLKKCLRKESLYWNQYTVTSTWRLILPFNSSISLNTVSSGKVKLLKLFFNIPYLKVKILNACRHFLHSHNHAHFNSLHNGFDLLMCFNMPLLTELTQVKHLASTW

SEQ ID NO: 923697 - protein, 154 aa, Homo sapiens
MKLPEERSGSNICCSPIFTVLQPPLLIPRQRGAGVDLQQTPTDLQLGVLTVRRKTNKQKGHPHQNLICTSPSSKTKAKEQSWTEHDVDKLRKEGYRRSNFSELKEEVRTQRKEDLMELKTMARELHDECTTFSSQFDRLEERVSVMEDQMNEMK

SEQ ID NO: 923698 - protein, 123 aa, Homo sapiens
MAERSEHRHTREVDGTAMESVLLVYKPLPLETGTVKGQPRTAGYFTRHLGTATPFLQKKKKNGANQVRPQFNPLRPFSFASPHSHRTRLRLECISINPGQYGKCKRDQGRDGAAKDSWRRHLS

SEQ ID NO: 923699 - protein, 152 aa, Homo sapiens
MRSLRQPCGNVPVEELRPPANSHEDIDQVEGIRRRAGHMNGGLQEVSPGHLEGGADLLRDVVTYSATALVLRRHIKKALADAGPSTLDFSASRAARNKSLFFINYPVSEIKCDSYYIRARIHTIRARIHTINTISRLLTLITCEVTCTATSH

SEQ ID NO: 923700 - protein, 136 aa, Homo sapiens
MKSTLSGCPASGLGWQRFLEDRPSLHPRNASLCRAAPALECWRYRGKETNEGTVTLTEEWVDLISSNNRVPYKSSSSVHSAPPTCQAMRQLLISPLYGRENKAQRGLKSFFDFQETVIKMTIPLTVVILNLHQLQA

SEQ ID NO: 923701 - protein, 124 aa, Homo sapiens
MWLPSSDINQRNRDITLLQEPPDYRDFKASVLRDQSLIRAGDTVCWGLPETVPETFSLAHSHLTPVGPVLSRLVWLAQLGATGLYNGVSALPSGPISQNVENTIGSFRTKCNSPLKCEIIPFRW

SEQ ID NO: 923702 - protein, 190 aa, Homo sapiens
MGLGESHGRGKRGRTLGHRNEPAMHFDIPAGLMLLKVVEDTDDAQCFLEQCSGPSFLCRIIFHLHSRLPTLETQSVMSNNNVGNVTTINNFIIQDDIKPKGKDETIWEYQRQKIPNVRPKAGFLNICTIDILAGQFLAVGACPACGRTFGSIPALPALDAGSRPSPKCGMTNRNVSRHFQESPGDKVNPC

SEQ ID NO: 923703 - protein, 147 aa, Homo sapiens
MIILVVLKEPSLVSQTSQFQLSLPSAGSTFFPYGISATVESLKTQVNFDLYAKCLHLNFRLYPEFTVRNSCNAHKEAHKRMFTATLLAAAENWRQPEYPPVGDWLNKSWHAHAMEAGSAVLSNEDDLQKGLQDILISEKNCRTIAFM

SEQ ID NO: 923704 - protein, 115 aa, Homo sapiens
MQAQGARFSDFARRAGYFNVKFPTSKGGLADRLRWESLITSNYPLVNCSEAIKTTKETGEDPVILSKVFRTCVNNLVAKSILPYHTKNINRMHFYLFLRNFFMLGLCLALYLDLG

SEQ ID NO: 923705 - protein, 142 aa, Homo sapiens
MQLRRGRYDYYLHFTAEETDLKPIPEPPGPYTVPLFQKKLSDERAEGEYVQHLSLIVFHLAAPSSSAASVNNGLCSSHFPYQSLTAGMAFRGDGRCDNSCARAEEGGRKGGVRSNFDPVSYSGVCGPALILRLPGNMTLAFL

SEQ ID NO: 923706 - protein, 154 aa, Homo sapiens
MSFLLWRYSVVDGHVSASMGLSASLCNGWAKDSNYIFPERGLKLATTDWLSEERLWSPLHGFLVQTQISFPLAAFLKLIKSWLKKASSCQQDEKTECREAQGQKQGCQLHEVGDLACCIHFYLLEQRLAQSLSNSNGCKEKEEEVEKRNAVSSA

SEQ ID NO: 923707 - protein, 149 aa, Homo sapiens
MSICYLVGTGNLTRTSLIASFNRMTPDTELSLGFSCQRLQTRCSRCSRRQPSLSPRPSEAGAQAKRHFARGGTVHCNLCCEIPSREIDSKRTDLQGSFMRNLKESVHNNFWSIYFVLPAVLGTVVSLVTRTELLSPRSYVLIGGWEDTD

SEQ ID NO: 923708 - protein, 158 aa, Homo sapiens
MSHWKGDNSSFDGHRVTHSLLSGPGLGKTRSVNQRFKSSFPELKILISWLCTQEIKPRSSKWTGRSMKLRLSWVAGEGLNEKLAPGPRTEGGEGVSKKNIQAEGTTVQRPRGECVRVHLRHLMEATVARREWPGMGRVVGVGVRKIAGSRFLRACTTL

SEQ ID NO: 923709 - protein, 168 aa, Homo sapiens
MPWGLCTGHFYSLEPPPQQCPSPQMGVTGRITTLQRCPQLNPTLSFSITLISTEHATFWAPPKAYLQTRIWVQTVDFGSSPRKHETVATWGRWCEILGDLGPCRQCPAWELEPLFTNSHPALAEGCSWGMNSQHSPPVLWTEPAQFSSQSDPQADTQEALVCAKAVCS

SEQ ID NO: 923710 - protein, 135 aa, Homo sapiens
MEKKLPRPRDARDGGGGGACGRERTFQAKRENPAQRLWKEKVRSFQEGGAVIPAFQRPPKLLVGTEGPPALAACTPILGLQMKAAMTPAKDEGSNRTGDEEVSEKESAQSIFTGLLRNPCVQGVLVPLHLAPNVY

SEQ ID NO: 923711 - protein, 151 aa, Homo sapiens
MCRRAKLDPYISPYKPTQALAFLRCRKPWMAHFRLIIQENPTPWLKALMVRCLSAAEHFLTVRTIPNLLFPYLKTEGRADTQGEFPNVLLIDLGVKPPRNWRPESWPSHLPLATILLAGPSGSKHGRQEPTLSEHLPSVCQVPSEEGWSSG

SEQ ID NO: 923712 - protein, 178 aa, Homo sapiens
MAMVQQMPERCCDAVLVELAGNPPPGCWEKLLLGGVLLEALCYKTAGRWVGEGDCWGRLLDATCCHALPEPGLGKPPELQERGITGALKKPSELPSAAESKTLSSRNVSPTPSIGKLNIVPSGSRKAYQSSCLLFGFWWCEMQQLVFHLGGEILTFFIALSPRHFTEEYLVWGKPYHF

SEQ ID NO: 923713 - protein, 161 aa, Homo sapiens [sequence omitted]

SEQ ID NO: 923714 - protein, 134 aa, Homo sapiens
MAVCALIQHPIYGTVSSIARIHGSRNQGVEVEVAPLTINPNDPLAKFLLPVTATLCSAGLEVLVPEGGTLPPGDNNGSIKLGVNGKVQQPNPGRTTNDSDHSGMKEVDDWRDGSMERTWPDVAGFEDEGSRTMS

SEQ ID NO: 923715 - protein, 156 aa, Homo sapiens
MGFPAFPLFRLSNCVFSPSTFGVFSSQICSNYVGVVKILVSLCKFIAIPGNELDKVVIDGNASPSFKGGRAGIAFKFQRDNLVLSIAQDALEGSLGACLTTFLMSEETCLAGFSRQEVSSTTDTVVLGTQKTMPVSFPLSLGMTLPSHCPFTWQHQ

SEQ ID NO: 923716 - protein, 180 aa, Homo sapiens
MERLREALTEHPSLSPDSVEGQLILKDKFIRQAAANIKRKLHKQAIGPDSTLENFLKVATLVFCNRNQEEAQKKETMVRRTETLAAALQACKVQDPGGASASCYQCGRPEHVKKECPYSKTKPPQPSPACGRDNRRWNCPQRWRSLGSEPVLLMIQQNWIPGLKLQLQRLKLPLQHRSSE

SEQ ID NO: 923717 - protein, 149 aa, Homo sapiens
MSRCWNPVYPDDPWFHGQVSARTYFLAAGRADSHCGFNLIKFFKGLQYHPIVSGPLDNDLLLWEYFSLLALGAFTNSFLSSRYSWKINWRSKCSRSKNFPKSYYSHSRLPPFLKSQKKQWHFSFQYKFSTCAFNPISFSHLQGLIRVNF

SEQ ID NO: 923718 - protein, 148 aa, Homo sapiens
MDPAVLHDQMKMVDLEFGPRGPEGMNKLHEQVAQNSVSLTKVYVNISVPDPPLNLQESHVIRRRKMKELDLGMEASYIIGHWKSLWKEKLKHHFRANTVNESKNQPLKSNITAITVTFNGLLEEILLPVPTTTAPHKRHIIVKTYSLT

SEQ ID NO: 923719 - protein, 148 aa, Homo sapiens
MRMNTFMVIHFHMIKLPSPWDRAPGERGCCGLSFSRLKHSCLPALKREVDLPAQWLSSAMGQTACSSGSLTPVPPDWETHPSQGRQTPPTGELWLASGGCPSGTKLSEEEEGSDLCCSAAPAGDTQAKRVCNGCPANSNRPAQEKPDC

SEQ ID NO: 923720 - protein, 157 aa, Homo sapiens
MAYTSPQSHKSPLSVLQQPLKHFPSYSTCSCYATCKGLIHSSHILQHKKSGRQQKEKWVPKPKAGASPECFRVEKGPVQLEISPGGPPALMMPSLPSSFLMFLTFFGELHRLSLWWCPLDTSDPQGNRGSCVHAVFVALGLLSIPRQKLSNHAGAGE

SEQ ID NO: 923721 - protein, 135 aa, Homo sapiens
MRDVLASGHLSQLKDWNRSPQPLGYGPVLVRGWLGTGPHSRRQVMGKRAKLHLYLQLLPMARITTQALPPVRSVAALDSHGSTNPTVNCTCEGSRLHAPCENLMPDDLLLSPSPPDGTISLQENKLRAPTPSTLW

SEQ ID NO: 923722 - protein, 144 aa, Homo sapiens
MGLPAGHNKAECYAAGLGTASRLPTVRSEEAKVKDALTQRDCSVKCTTGGELWPLDKGHSQPTVTLQRIIAYSITVLCLDQGYYHKKLTDVYSALSVHPFTNRTQETITGRGIQGQALDANFQPGVSRKKTHPSVGAPKPILSQ

SEQ ID NO: 923723 - protein, 139 aa, Homo sapiens
MCRDTGSTSHLRHQGKAGKSRHCTVGDVQEKESIPAANPLSIPGQSPQVGDQIPGQSPQLGDQMEGGCGYKFHVEPVPLSHCEKSKESLPAPLNTLKSTLKIKLIHSQWDSRAFVPAVPSPWNSLCLYPFFIGVHIPSM

SEQ ID NO: 923724 - protein, 138 aa, Homo sapiens
MHESQRNYSRRKTKGVKALFNCSHCLIQTLLTVCFYRHGKTTLGSHLRKYSWYHRAKDSRHVAQTHLKLLDPDNPHTLASQNAEITAYLKLTSDDMIATPYPELISTYDVGIFHMEINTGKQLIILSGFIRNKWISET

SEQ ID NO: 923725 - protein, 133 aa, Homo sapiens
MCREVKSLSHSNQETVYGLCLSPKMILKASIFKREKWDGEERGGCGDPYVARKRSRATKTARVDGAEYQIGENCTQREKRLSNSKSTDLQRAPREYTAEYLAGHECEDTAPGWGQNHLKDVYPGSTLFTCQRE

SEQ ID NO: 923726 - protein, 447 aa, Homo sapiens
MRGFSFLFQCKTCSEPKKITSSSAIYDNPNLIKPIPVKPSENQQQRIPQPNQTLDPEPQHLSLTALFGKQDKATCQETVEPPQTLHQQQQQQQQQQEKLPIRQGVVRSLSYEEPRRHSPPIEKQLCPAIQKLMVRSADLHPLSELPENRPCENGSTHSAGEFFTGPVQPGSPHNIGTSRGVQNASRTQNLFEKLQSTPGAANKCDPSTPAPASSAALNRSRAPTSVTPVAPGKGLAQPPQAYFNGSLPPQTVGHQAHGREQSTLPRQTLPISGSQTGSSGVISPQELLKKLQIVQQEQQLHASNRPALAAKFPVLAQSSGTGKPLESWINKTPNTEQQTPLFQRIPATAAPSLLMSPMVFAQPTSVPPKERESGLLPVGGQEPPAAATSLLLPIQSPEPSVITSSPLTKLQLQEALLYLIQNDDNFLNIIYEAYLFSMTQAAMKKTM

SEQ ID NO: 923727 - protein, 142 aa, Homo sapiens
MAARPRPSRPLTCAFDYYNSVLINERDEKGNFVELGAEFLLESNAHFSNLPVNTSISSVQLPTNVYNKDPDILNGVYMSEALNAVFVENFQRDPTLTWQYFGSATGFFRIYPGLYVPIGKMRRTRQECSTAIWKMAQATLCG

SEQ ID NO: 923728 - protein, 320 aa, Homo sapiens
MKGLRMTIAKHTITTILDTLGENDFINIIAADRDNREHFKLLVEELMVKGVGVVDQALREAFQILKQFQEAKQGSLCNQAIMLISDGAVEDYEPVFEKYNWPDCKVRVFTYLIGREVSFADRMKWIACNNKVSREYSAMSHLQLGRVQALARGSQGSPAFHTHAAFPTAGYYTQISTLADTQENVMEYLHVLSRPMVINHDHDIIWTEAYMDSKLLSSQAQSLTLLTTVAMPVFSKKNETRSHGILLGVVGSDVALRELMKLAPRYKSGLERTPQSMMEAWHWLSYVPIENTHCCELPSLTVLWPPNPCPTPDAQHKQQA

SEQ ID NO: 923729 - protein, 117 aa, Homo sapiens
MFVTGMAVMSLFLMITDLEKSGWGGGLALGCSRGHRVTDTTWDRVSATYNQKHPQNMSPHGRFRELLATPFCVTKILQREKCFLWMNDICMKSQPAGRFLSFEDACQRVLRFSLQQF

SEQ ID NO: 923730 - protein, 396 aa, Homo sapiens
MPRYAQLVMGPAGSGKSTYCATMVQHCEALNRSVQVVNLDPAAEHFNYSVMAVWDIPYSFGPDSFVEPGINAHIWSSHLLHGKFLNLFECLRGTLLEAHSIDVLVNVDGVFSGYHFVDGRMALFLLATLLCRSHSAGSKLENIRELIEVDDVMEDDSLRFGPNGGLVFCMEYFANNFDWLENCLGHVEDDYILFDCPGQIELYTHLPVMKQLVQQLEQWEFRVCGVFLVDSQFMVESFKFISGILAALSAMISLEIPQVNIMTKMDLLSKKAKKEIEKFLDPDMYSLLEDSTSDLRSKKFKKLTKAICGLIDDYSMVRFLPYDQSDEESMNIVLQHIDFAIQYGEDLEFKEPKLLESMVCACGEKVKDPIPVPSPLDTGVSKMNLTIPVLEDFTVS

SEQ ID NO: 923731 - protein, 211 aa, Homo sapiens
MSESSSKSSQPLASKQEKEGTEKRGRGRPRKQPPMSPGTALVGSQKEPSEVPTPKRPRGQPKGSKNKGAAKTRKTTITPGRKPRGRPKKLEKVLGGGAVNRACRLLLTGGAAAFWDWTALLRSHRPRPFRRPTITTASGRHPHLPPVPTPPHYAAHQPLQGSHGLSGEQFSPGLSSQLPPPTHAYTHALLDKASISLSRTLHLLRPHSSLH

SEQ ID NO: 923732 - protein, 169 aa, Homo sapiens
MGKKQSRKYENSKNKSASPPPKEQLHDECTSFSSQVNQLEERVSVIEDQMNEMKQEEKFREKRVKRNEQSLQEIWDYVKRPNLCLIGVHENDGENGTKLENTLQDVIQEDVLNLARQANIQIQEIQRTPQRYSARRATLRYIIVRLAKVEMKEKMLKAAREKEFHIQPN

SEQ ID NO: 923733 - protein, 233 aa, Homo sapiens
MTDDTRRSYKTGLIAMKGNPTNGQSCSQCALSYMLCGKEKWAAAYGLVSWQTADCKKFEGSENLQRKRYVDILRGMGMKCKYICIINALQRAFNTGKTIQQPNRISQPAGISQSLSLVSPVLNYGCINVVAIVEEDYEGPNRMPPTHQEAACINDRSTWLYNRLAHSPQHKISARHPPRPLACVENASQPNHSFLHNPSSFSSTAGVNPESTLQSTSCLQISISEFCCLGDLA

SEQ ID NO: 923734 - protein, 196 aa, Homo sapiens [sequence omitted]

SEQ ID NO: 923735 - protein, 180 aa, Homo sapiens
MFSNVWSHFWLLQLGEGHLVDNAERVIIWEGQSERVAEDAMTENLPPASPCSAVPRSPQWSPIAGCSWLVSRTAVPCSELLYGVAYVAGTEDNLQCQPAKNGGPQCPALSCSMEWPMWQELKIIFNASQQKTEVLSPTSHKEMNSANNRVNETAVLVRNAIAAFRRDSGIEDPTNGCLDS

SEQ ID NO: 923736 - protein, 180 aa, Homo sapiens
MLVREARAAQEPMEWVGGSGMAGCRSRALPRGKAAKARREIEHSAGGPALLGDSVHPPQPLARVLSPPLPGASRAGRLLRVRGLLSPRPPGTPGGPQAPHAAPVPAHASPSTPHCKLKEWAPALASPEKGSHSAVGGLKGSSNATKVGAQAEEMPRASEGSEDCQHAVTSHDDNNVQCYP

SEQ ID NO: 923737 - protein, 434 aa, Homo sapiens
MWPVAENSAYAVRECNEPCICEVHEQRQLQVWMHPEATGVLRITIIISTIITIAIITITITITIITIITITITIITISITITIITISITITITIITITIITIITITVTIIIITITIITIIISIITIITISITIITIIITIITITIITITTITITIITIIITTTITIITITVTIITIITITIIITISITIITIITTITITTITITVTITITIITTITIITITVTIITIITITIIIITISITIITIIIIIITTIITTTTISITITIITIITVTIIITVTITISITIIISTITTVTIITIITITITTVTIIITIITTITIIITIIIISIAIITSVTIILCSGTPVTGDTCDLGRLCLETPVPGTPVPGDICDQGHLCLGTPVTWDTCDWGHLCLETPVTGTPVPGLPMIRNTLCLGSPITRNTVTSDIRSGDTWTQS

SEQ ID NO: 923738 - protein, 135 aa, Homo sapiens
MAGLALPLLAIIVSHRVGWLPSAGKGHSVTTFFVPEFGVEVAEDQTTVNPAAPLSLATQWSCHTWAGPGACLQGNGWAVELPNVPVFCVMLPGQQILGHVRGRQKSVPFPSSILAYPSPGNLGRHDHECQSDLHP

SEQ ID NO: 923739 - protein, 228 aa, Homo sapiens
MHIKVWVIKAICDKPTANIILKGKKLKAFPLRMGTTKGCPLLPLLFNAVLEVLAREIRQEKEIKGIQISKEEVKLSLSIVDPHLSPYTKMNPRWIKALSLRPETIKILKDTIGKTLLDMGLGKDFITKNPKSNETKTKINRWELSELKIFCKAKGKSVNRQPTEWEKIFAYYASDKGLISRIYNELRLTSGIILFLTSSYFSLKAQISDISLYHPSHTAFILGIHIRV

SEQ ID NO: 923740 - protein, 148 aa, Homo sapiens
MELSGRFHRAAYKAVNYDKLKETTQGKDENPAQFMARLAATLRRFTALDPEGPEGGLILNMHFITQSTPDIGKKLQKLESRPQTPQQELTSPSRCTIMERRMCPVCAGPHWRSDCLTHIAATPKAPGAQTQRSLADSFPDLLGFVAED

SEQ ID NO: 923741 - protein, 141 aa, Homo sapiens
MGSEPPHRVPTGAPPGAAVRRGPPSFRPQNSRSIDSLHPMPEEAADTQHQPMKTAGREAVPCKATRVELPKSMSTQLFHQCDMNAGFKKDMDSIKIILKLQDLTALLDFRLAWGLLYLRCSGQFLPYGKTVFTQYLYPHCI

SEQ ID NO: 923742 - protein, 528 aa, Homo sapiens
MEGPAEAMAEECRLLGPFGKSCSNPISAFTIPYLVVRGGPFSDAYAQLNFDALTTEQVTKVCMRAWDKLCAPGQTPVSFTTVKQGHPELYPDFLAKLQDAVKKSVSDECAQGILLPMLAFENANHECKMAMRSVQRQNLPDHEVLPAYIKACEGIGSDAHKTILWAWAMKDTNHTGPINSSLGACYDCEQLDQIAILIGQAQCRILQISGFDPNLIVIPLNRLEVQAAFQHSVPWQIHLADFIGVIDNHYPKNKLFDFIKMMSWVVPLLTKDQPIPEAVTVFNDGSSNGNASYVGPTDKLISTSYTSAQNVELIAVITAIQDFPKPLNIVSASAYVVHATKNIETATIKHIDNSELASLFSRLQQAVHQHRHPFYITHTRFHTTLPGPMSASNHKVDSLVYFATQEAQEFHNLAHVNAAGLKDKFALTWKQAKFIVHSCPQCQVFVLPNQESGINPRGLTPNALWQMDVTHVSSFGRLSYVHVSVDTFSGFIWATCQRGEGTAHVKKKSIFLLCSYEASISNKDRQCP

SEQ ID NO: 923743 - protein, 168 aa, Homo sapiens
MEPGYLVRFAPYRPPDISLKPLLFEVPSITTESVFVGRDWVFHEIDAQLQSSNASVNQGVVIVGNIGFGKTAIISRLVALSCHGTRMRQIASDSPHASPKHVDANRELPLTQPPSAHSSITSGSCPGTPEMRRRQEEAMRRLASQSRTEDKSVNKTDTIPAVIQSTFS

SEQ ID NO: 923744 - protein, 480 aa, Homo sapiens
MSACQFNELVSPHLRKSLANNLINNFPNLMASGRLKSPSTGSRVDLWLQPWCPVRKLVSGAEQVPGQMQRAEPASLPHQEEADAPEALFLENPVPEMSIVNVIMVIAIIMMVVVMMMMVRVMMVMSDDDGDNDGGGDDGDGDDGDGDDDGNGDDDGDGDDGDGDGGGDGDDDGDDGDSSSDYGGDDGANDDAGDDGGGDDSFGNDAGDDGGGGDDSFGNDDGGGDVGDDYHDSEDDDSGGDDGDDGGGDGNDGGDGDHGGDGDHGDGDDGDGGDDADGGDVGDDYHDRMMIVVMMVMVVVTMVMMVVVMVMVVTMVMVVMMVMVMVMMVVVVAMMMVVMVMMVMMLMVDDDSGGDGNGGGDNGDDGGGDGNGGDNGDDGGGDGNGGDNGDDDGGDGDDGDDGGDGGDDGDGDGDDGGGGGDDDGSDGDDGNGGGGGDVGDGDHDSEDDDGGGDNGDYDGGDVGDGDDDGDGDDVVEEDDR

SEQ ID NO: 923745 - protein, 128 aa, Homo sapiens [sequence omitted]

SEQ ID NO: 923746 - protein, 161 aa, Homo sapiens
MRLRESPGQLALRVWTFNHEFSTTVRKSSGISPNVGAIGRGGDCGAERVQSQGEQRLHPQMLQQGEPRASCPGCWIRSGIRLALSQEELPRTAVHQSRTQATPPCTWLPAAHRALSSTHQTQPLLTVIRAPGLPCGKGQWKWQHGRRHPWPCDAWLCQWLI

SEQ ID NO: 923747 - protein, 162 aa, Homo sapiens
MATVQGLNLWFISISYLPGRGPPNTIQPLLSRRSKEDSIPGTRSSRDHPFRESSVRLYTTWTRMSKSSYVEQRQGSRPCNDPGWCVLKTGERRPHIVGSCKDLTISNAWMRGLIYVAHLCLGKKKNLGRNLITLKANTSPLLSFGGWGTGIDFMYVYVMWGI

SEQ ID NO: 923748 - protein, 166 aa, Homo sapiens [sequence omitted]

SEQ ID NO: 923749 - protein, 302 aa, Homo sapiens
MESKRIFERTRTESSNGMECNNPWTGRQSSSNGIEWNHRMDSNGIIIERNRMESSSDGNEWNHHRMEMKGNRMELSSNGIEWYQHQTEKNGIFEWNRRESSNGREWNHLMEWNGIIHGLEGNHHRMESNGIIEWTRMESTSTCNHRMDWNGIIEWTRKGSLLNGIEWNHRMVSIGIIIKWNRMESPNRIEWNNHRMDSNGIILKWNRMELSNAIEWNYRMQSNRIIEWTRMESSNGMEWNKSNGIIIEWNRMESTSNGKKRNYRMESKRIIERTRMESSNGMEWNNPWTRMESSSNGIEKNH

SEQ ID NO: 923750 - protein, 258 aa, Homo sapiens
MKLKWMDSSSNGFEWNLRKKLIEIIIEWNRMVSLNGIEWNHHQMEMNGIVIEWNRMDSLNGIRWYHRMDWNGIIEWTRKGSLLNGIEWNHRMVSIGIIIKWNRMESPNRIEWNNHRMDSNGIILKWNGMELSNAIEWNYRMQSNRIIEWTRMESSNGMEWNKSNGIIIEWNRMESTSNGKKRNYRMESKRIIEWTRRESSDGMEWNNPWTRMQSSSNGIEWNHRMDSNGIIIERNRMESSSDGNEWNHHRMESNRIME

SEQ ID NO: 923751 - protein, 270 aa, Homo sapiens
MEWNGIKTWTRMQSSSNGIEWNHRMDPNGIIIERNRMESSSDGNEWNHHRMEMKGNHRMDSNGIIEWNGMEQSMNSNGIIIEWNRMESSSGIEWNYDQMESNEWNHRIESNGIIIEWNRMASTPNGKKRNYRMESKRIFERTRMESSNGMERNNPWTRMQSSSNGIEWNHRMDSNGINIERNRMESSSDGNEWNHHRMEMKGNRMELSSNGIEWNQHQTEKNGIIEWNRRESSNGPEWNHLMEWNGIIRGLECNHHRMESNGIIEWTRME

SEQ ID NO: 923752 - protein, 150 aa, Homo sapiens
MESKRIFERTRMKSSNGMEWNNPWTGRQASSNGIEWNHRMDSNGIIIERNRMESSSDGNEWNHHRMEMKGGKKRNYRMESKRIIEWTRMESSNGMEWNNPWTRMQSSSNGIEWNHRMDSNGIIIERNRMESSSDGNEWNHHRMASNRIME

SEQ ID NO: 923753 - protein, 688 aa, Homo sapiens
MESSSNELNGIIEWSRMESSSNGMEWNHRIESNGIIFEWNRMVSTSNRKKRNYRMESKRIIERTRMESSNGMEWNNPWTRMQSSSNGIEWNLRMDSNGIIIEQNRMESSSDGNEWNHHRMEMKGNRMELSSNGIEWNQHQTEKNGIIEWNRRESSNGPEWNHLMEWNGIIHGLECNHHRMESNGIIEWSRMESSSNGKEWNHRIESNGIIIEWNRMVSTPNGKKRNYRMESKRIFERTRMESSNGMEWNNPWSGRQASSNGIEWNHRMDSNGIIIERKRMESSSDGNEWNHHQMEMKGMEMNGIIIEWNRMDSLNGIRWNHRMDWNGIIEWTRKGSSLNGIEWNHRMVSIGIIIKWNRMESPNRIEWNNHRMDSNGIILKWNRMELSNAIAWNYRMQSNRIIEWTRMESSNGMEWNKSNGIIIEWNRMESTSNGKKRNYRMESKRIIERTRMESANGMEWNNPWTRMQSSSNGIEWNHRMDSNGIIIERNRMESSDGNEWNHHRMEMKGNRMQLSSNGIEWYQHQTEKNGIIEWNRRESSNGPEWNHLMEWNGIIHGLECNHQSSSNELNAIIEWSRMESTSNGMEWNHRIESNGIIIEWNRVESTSNGKKRNYRTESKRIIEWTRMESSNGMEWNNPWTRMQSSSNGIEWNHRMDSNGIIIERNRMESSSDGNEWNHHRMESNRIME

SEQ ID NO: 923754 - protein, 145 aa, Homo sapiens
MEWNNPRTRMQSSSNGIEWKSSSNELNAIIEWSRMESTSNGMEWNHRIESNGIIIEWNRVESTSNGKKRNYRTESKRIIEWTRMESSNGMEWNNPWTRMQSSSNGIEWNHRMDSNGIIIERNRMESSSDGNEWNHHRMESNRIME

SEQ ID NO: 923755 - protein, 173 aa, Homo sapiens
MEWNNPWTGRQSSSNGIEWNHRMDSNGIIIERNRMESSSDGNEWNHHRMEMKGMEMNGIVIEWNRMDSLNGIRWYHRMDWNGIIEWTRKGSLLNGIEWNHRMVSIGIIIKWNRMESPNRIEWNNHRMDSNGIILKWNGMELSNAIEWNYRMQSNRIIEWTRMESSNGMEWNSQ

SEQ ID NO: 923756 - protein, 450 aa, Homo sapiens
MKLKWMDSSSDGFEWNHRIKLIEIIIKWNRMVSLNGIEWNHHQMEMNGIVIEWNRMDSLNGIRWYHRMDWNGIIEWTRKGSLLNGIEWNHRMNHRMDSNGIIEWNGMEQSMNSNGTIIEWNRMESSSGIERNYDQMESNGITMKLKWMESSSNGFEWNHRIKLIEIIIEWNRMVSLNGIEWNHRQMEMNGIVIEWNRMDSLNGIRWNHRMDWNGIIEWTRKGSLLNGIEWNHRMNHRMDSNGIIEWNGMEQSMNSNGIIIEWNRMESSSGIEWNYDQMESNEWNHRIESNGIIIEWNRMVSTPNGKKRNFRMESKRIFERTRMESSNGMEWNNPWTRMQSSSNGIEWKHRMDSKGIIIERNRMESSSDGNEWNHQRMEMKGRIIERTRMESSNGMEWNNPWTRMQSSSNGIEWNHRMDSNGIIIERNRMESSSDGNEWNHHRMESNRIME

SEQ ID NO: 923757 - protein, 1059 aa, Homo sapiens
MKLKWMDSSSNGFEWNHRIKLLEIIIEWNRTVSLNGIEWNHHQMEMNGIVIEWNRMDSLNGIRWNHRMDWNGIIEWTRKGSLLNGIEWNHRMVSIGIIIKWNRMESPNRIEWNNHRMDSSGIILKWNRMELLKAIEWNYRMQSNRIIEWTRMESSNGMEWNRMESSHRIEWNYHRMESNGINIKRKKTELSNGIEENLERTRMESSNGMEWNNPWTGRQSSSNGIEWNHRMDSNGIIIERNRMESSSDGNEWNHHRMEMKGEWNHRIESSVINIEWTRMESTSNGIKRNYRMESKRIIEWTRMESSNGMEWNNPCTRMQSSSYTIEWNHRMDPNGIIIERNRMESSSDGNEWNHHRMEMKGRIIERTRMESSNGMEWNNPWTRMQSSSNGIEWNHRMDSNGIIIERNRMESSSDGNEWNHHRKEMKGCDHHRMDPNGIIIQRKLMESTSNESNGVNQRPVTASSSSNGIERNHREWNHRIESNGIIIEWNRMVSTPNGKKRNYRMESKRIFERTRMESSNRMEWNNPWTRMQSSSSGIKWNHRMDSNGIIIERNRMESSSDGNEWNHHRMEMKGMEMNGIVIEWNRMDSLNGIRWNHRMDWNGIIEWTRKGSLLNGIEWNHRMVSIGIIIKWNRMESPNRIEWNNHRMDSNGIILQWNRMELSNAIAWNYRMQSNRIIEWTRMESSNGMEWNKSNGIIIEWNRMVSTPNGKKRNFRMESKRIFERTRMESSNGMEWNNPWTRMQSSSNGIEWNHRMDSNGIIIERNRMESSSDGNEWNHHRMEMKGMEMNGIVIEWNRMDSLNGIRWNHRMDWNGIIEWTRKGSLLNGIEWNHRMNHRMDSNGIIEWNGMEQSMNSNGIIIEWNRMESSSGIEWNYDQMESNGSSSNGIAWNHHQMESNGIIIKWNLIESLKRIEWNQSNGSIVEWNRMVSTPNGKKRNYRMESKRIFERTRMESSNGMEWINPWTQMQSSSNGIEWNHRKDSNGIIIERNRMESSSDGNEWNHHRMEMKGQMESNGIIEWNRMESSSDGNEWNRHRMESNGFIEWNQMESSNGLKWNH

SEQ ID NO: 923758 - protein, 170 aa, Homo sapiens
MVSNGIIFKWNGMESSHRIEWNYHRMESNGINIKRKKTELSNGIEENHRTDSNGIIIERNRMESSSDGNEWNHQSNGIIIEWNRMESTSNGKKRNYRMESKRIIEWTRMESSNGMEWNNPWTRMQSSSNGIEWNHRMDSNGIIIERNRMESSSDGNEWNHHRMESNRIME

SEQ ID NO: 923759 - protein, 529 aa, Homo sapiens
MEWNNPWTGRQASSNGIEWNHRMDSNGIIIERNQMESSSDGNEWNHHRMEMKGMEMNGIVIEWNRMDSLNGIRWNHRMDWNGIIEWTRKGSLLNGIEWNHRMVSIGIIIKWNRMESPNRIEWNNHRMDSNGIILKWNRMELSNAIEWNYRMQSNRIIEWTRMESSNGMEWNKSNGIIIEWNRMVSTPNGKKRNFRMESKRIFERTRMESSNGMEWNNPWTRMQSSSNGIEWNHRMDSNGIIIERNRMESKKRNYRMESKRIIERTRMESSNGMEWNNPWTRMQSSSNGIEWNLRMDSNGIIIEQNRMESSSDGNEWNHHRMEMKGRIIEWTRMESSNGMEWNNPWTRMQSSSNGIEWNHRMDSNGIIIERNRMESSSDGNEWNHHRMEMKGNRMELSSNGIEWNQHQTEKNGIIEWNRRESSNGPEWNHLMEWNGIIHGLECNHHRMESNGIIEWTRMEESLNGIKWNHHRMEMNGIIIEWNRIELWNEIQCDHHRMDPNGIIIQRKLMESTLNESNGNTIELKRMELS

SEQ ID NO: 923760 - protein, 1114 aa, Homo sapiens
MESKRIFERTRMESSNGMEWNNPWTRMQSSSNGIEWKHRMDSKGIIIERNRMESSSDGNEWNHQRMEMKGEWNHRIESSVINIEWTRMESTSNGIKRNYRMESKRIIEWTRMESSNGMEWNNPCTRMQSSSYKIEWNHRMDSNGIIIERNRMESSSDENEWNHHRMEMKGMEMNGIVIEWNRMDSLNGIRWYHRMDWNGIIEWTRKGSLLNGIEWNHRMVSIGIIIKWNRMESPNRIEWNNHRMDSNGIILKWNRMELSNAIEWNYRMQSNRIIEWTRMESSNGMEWNKSNGIIIEWNRMVSTPNGKKRNFRMESKRIFERTRMESSNGKEWNNPWTRMQSSSNGIEWNHRMDSNGIIIEWNRMESSSDGNEWNHHRMEMKGMEMNGIVIEWNRMDSLNGIRWNHRMDWNGIIEWTQNGSLLNGIEWNHRMVSIGIIIKWNRMESPNRIEWNNHRMDSNGIILKWNRMELSNAIAWNYRMQSNRIIEWTRMESSNGMEWNKSNGIIIEWNRMVSTPNGKKRNFRMESKRIFERTRMESSNGMEWNNPWTRMQSSSNGIEWNHRMDSNGIIIERNRMESSSDGNEWNHHRMEMKGMEMNGIVIEWNRMDSLNGIRWNHRMDWNGIIEWTRKGSLLNGIEWNHRMVSIGIIIKWNRMESPNRIEWNNHRMDSNGIILQWNRMELSNAIEWNYRMQSNRIIEWTRMESSNGMEWNRMESSHRIEWNYHRMESNGINTKPKKTELSNGIEENLRTDRMESSNGMEWNNPWTRMQSSSNGIEWYHRMDSNGIIIERNRMESSSDGNEWNHHRMEMKGMEMNGIVIEWNRMDSLNGIRWYHRMDWNGIIEWTRKGSLLNGIEWNHRMVSIGIIIKWNRMESPNRIEWNNHRMDSNGIILKWNGMELSNAIEWNYRMQSNRIMECTRMELSNGMEWNKSNGIIIEWNRMVSTSNGKKRNYRMESKRIFERTRMESSNGMEWNNPWTGRQSSSNGIEWNHRMDSNGIIIERNRMESSSDGNEWNHQSNGIIIEWNRMESTSNGKKPNYRMESKRIIEWTRMESSNGMEWNNPWTRMQSSSNGIEWNHRMDSNGIIIERNRMESSSDGNEWNHHRMESNRIME

SEQ ID NO: 923761 - protein, 546 aa, Homo sapiens
MESKRIFERTRMESSNGMEWNNPWTRMQSSSNGIEWNHRMDSNGIIIERNRMESSSDGNEWNHHRMEMKGMEMNGIVIEWNRMDSLNGIRWNHRMDWNGIIEWTRKGSLLNGIEWNHRMNHRMDSNGIIEWNGMEQSMNSNGIIIEWNRMESSSAIEWNYDQMESNMEMNGIVIEWNRMDSLNGIRWNHRMDWNGIIEWTRKGSLLNGIEWNHRMVSIGIIIKWNRMESPNRIEWNNHRMDSNGIILQWNRMELSNAIEWNYRMQSNRIIEWTRMESSNGMEWNKSSGINIEWTRMESTSNGIKRNYRMESKRIIEWTRMESSNGMEWNNPWTRMQSSSYKIEWNHRMDSNGIIIERNRMESSSDGTEWNHHRMEMKGEWNHRIESSVINIEWTRMESTSNGIKRNYRMESKRIIEWTRMESSNGMEWNNPCTRMQSSSWYHRMDWNGIIEWTRKGSLLNGIEWNHRRSRLESLSNGIEWNHRIESNGTIIKWTQMELSSNGIEWNYRMQSNGIIECNRIESSNGLEWNHRMEWNGTVNELEWNHH

SEQ ID NO: 923762 - protein, 649 aa, Homo sapiens
MESKRIFERTRMESSNGMEWNNPWTRMQSSSNGIEWNHRMDSNGIIIEWNRMESSSNGNEWNHHRMEMKGNHRMDSNGIIEWNGMEQSMNSNGIIIEWNRMESSSGIEWNYDQMESNNRMELSSNGIEWYQHQTEKNGIIEWNGRESSNGPEWNHLMEWNGIIHGLEFEWNHRIKLIEIIIEWNRMVSLNGIEWNHHQMEMNGIVIEWNRMDSLNGIRCNHRMDWNGIIEWTRKGSLLNGIEWNHRMVSIGIIIKWNRMESPNRIEWNNHRMDSNGIILKWNRMELSNAIEWNYRMQSNRIMECTRNGIIEWNGMEQSMNSNGIIIEWNRMESSSGIEWNYDQMESNEWNHRIESNGIIIEWNRMVSTPNRKKRNYRMESKRIFERTRMESSNGMEWNNPWTRMQSSSNGIEWYHRMDSNGIIIERNRMESSSDGNEWNHHRMESNRIMMNEIQWNHRMDWNGIIEWTRKGSLLNGIEWNHRMVSIGIIIKWNRMESPNRIEWNNHRMDSNGIILKWNGMELSNAIEWNYRMQSNRIIEWTRMESSNGMEWNKSNGIIIEWNRMVSTSNGKIRNYRMESKRIIERTRMESSNGMEWNNPWTRMQSSSNGIEWNHRMDSNGIIIERNRMESSSDGNEWNHHRMESNRIME

SEQ ID NO: 923763 - protein, 628 aa, Homo sapiens
MESKRIIERTRMESSNGLEWNNPWTRMQSSSNGIEWNHRMDSNGIIIERNRMESSSDGNEWNHHRMEMKGMEMNGIVIEWNRMDSLNGIRWNHRMDWNGIIEWTRKGSLLNGIEWNHRMVSIGIIIKWNRMESPNRIEWNNHRMDSNGIILKWNRMELSNAIAWNYRMQSNRIIEWTRMESSNGMEWNKSNGIIIEWNRMVSTPNGKKRNFRMESKRIFERTRMESSNGMEWNNPGTRMQSSSNGIEWNNRMDSNGIIIERNRMESSSDGNEWNHHRMEMKGRIIERTRMESSNGMEWNNPWTRMQSSSNGIEWNHRKDSNGVIIERNRMESSSDGNEWNHHRMEMKGMEMNGIVIEWNRMDSLNGIRWNHRMDWNGIIEWTRKGSLLNGIEWNHRMVSIGIIIKWNRMESPNRIEWNNHRMDSNGIILKWNGMELSNAIEWNYRMQSNRIIEWTRMESSNGMEWNKSNGIIIEWNRMESTPNGKKRNYRMESKRIIERTRMESSNGMEWNNPWTRMQSSSNGIEWNHRMDSNGIIIERNRMESSSDGNEWNHHRMEMKGNRMELSSNGIEWNQHQTEKNGIIEWNRRESSNGPEWNHLMDWNGIIHGLECNHHRMESNGIIEWTRME

SEQ ID NO: 923764 - protein, 162 aa, Homo sapiens
MESKRIIERTRMESSNGMEWNNPRTRMQSSSNGIEWKSSSNELNAIIEWSRMESTSNGMEWNHRIESNGIIIEWNRVESTSNGKKRNYRTESKRIIEWTRMESSNGMEWNNPWTRMQSSLNGIEWNHRMDSNGIIIERNRMESSSDGNEWNHHRMESNRIME

SEQ ID NO: 923765 - protein, 162 aa, Homo sapiens
MESKRIFERTRMESSNGMEWNNPWTGRQSSSNGIEWNHRMDSNGIIIERNRMESSSDGNEWNHHRMELKGNRMELSSNGIEWYQHQTEKNGIFEWNRRESSNGREWNHLMEWNGIIHGLEGNHHRMESNGIIEWTRMESTSNGIKRNYQMESKRIIEWTRME

SEQ ID NO: 923766 - protein, 570 aa, Homo sapiens
MERNNPWTRMQSSSNGIEWNHRMDSNGINIERNRMESSSDGNEWNHHRMEMKGRIIERTRMESANGMEWNNPWTRMQSSSNGIEWNHRMDSNGIIIERNRMESSDGNEWNHHRMEMKGMEMNGIVIEWNRMDSLNGIRWNHRMDWNGIIEWTRKGSLLNGIEWNHRMVSIGIIIKWNRMESPNRIEWNNHRMDSNGIILKWNGMELSNAIEWNYRMQSNRIIEWTRMESSNGMEWNKSNGIIIEWNRKAIIIEWNRMESSNGLEWNNHLTESNGIIIGWKRMESSSNGNERSHHLMELHGIIIKWNRMESTSNGIKWNHLTELNGIMEMNGIIIEWNRMDSLNGIRWNHRMDWNGIIESTRKGSLLNGIEWNHRMVSIGIIIKWNRMESPNRIEWNNHRMDSNGIILKWNRMELSNAIAWNYRMQSNRIIEWTRMESSNGMEWNKSSSNELNAIIEWSRMESTSNGMEWNHRIESNGIIIEWNRVESTSNGKKRDYRMESKRIIEWTRMESSNGMEWNNPWTRMQSSLNGIEWNHRMDSNGIIIERNRMESSSDGNEWNHHRMESNRIME

SEQ ID NO: 923767 - protein, 212 aa, Homo sapiens
MPPGLQGQSVSSGSSEIKSDDEGDENLQDTKSSEDKKLDDDKKDIKSITRSRSRKPNILCIVNCQSHLNQSQGQVDIKILPKTWHKMEKFPENSGRKQSNVDTFFFPTPLENVASLLSHSNNDDEDLTPEQKAEREKERRMANNARERLRVRDINEAFKELGRMVQLHLKSDKPQTKLLILHQAVAVILSLEQQVRETERQSFHTVEQCICA

SEQ ID NO: 923768 - protein, 249 aa, Homo sapiens
MDRTQGDYVLKTKDQVFKDCPSRPPHYPPPGAWGVFSILCCALEYSDTDHKVNEHEQDGNELQTTPEFRAHVAKKLGALLDSFITISEAAKEPAKAKVQKVALEDDGFRLFFTSVPGGREKEESPQPRRKRQPSSSSSEDSDEEWRRCREAAVSASDILQESAIHSPGTVEKEAKKKRKLKKKAKKVASVDSAVAATTPTSMATVQKQKSGELNGDQVSLGTKKKKKAKKASETSPFPPAKSATAIPAN

SEQ ID NO: 923769 - protein, 300 aa, Homo sapiens
MRQLSLSSLSLSSSLSSSSSLFPLSSSSFIVTILITIVIVTIIIIIITITTITIITIIITITTIIIIATITTIISTIITITTTTIIITTIIITITTIIIIITIIATIIITTTIIITTTIINIIIIITITIITVIITIIITIIAIIITTIITIIITTIIITITTIINITIITIFIITIITIIITIIATIIIIITTIIITITTIINIIIIIITIITIIITIIITIIATIITIITTIIITITTIIITISTIIITIITIIITIIIITVIITIIIIIIIILTIITIIIVIIIIQSRSHADAISSY

SEQ ID NO: 923770 - protein, 280 aa, Homo sapiens
MGSGLDDDDDDYDGNDGEDDDDDDNDGDDDSNDDDGDDDGDDGDDDGADGDDDGGDGDDDGGNDGDNGSNDGDDDGDDNGDDGDDDDDDVDDGGDGDDDSGNDDDDGSDDGDDDGDDGDDEDGDDGDVDDGGDGDDDGGNDDGDDGGDDDSDDGDDDGDDNGDDGDGDDDDDVDDGGGDDDGSSDDDGSDDGDDDDDGGDGDDDGGNDDGGGGDGDDGADDGGDGGDDDDGGDGDDDSDDGDGSNDTGCLGSSLPFTWLCLFRQVTLLSLLQFLICELSL

SEQ ID NO: 923771 - protein, 134 aa, Homo sapiens
MGRTSRWGRDGRGSPLLPVSEGQISPTQGLKTRLGKTTTFFSFSDWGYPHDFLCLSHQSCLLKAWHQEQGFDLCTSGSNLVLLLASCVTLGQLLHLSEAWSSSVQNGNHSNTYSPEFKLHILYPPDRLKLKTVW

SEQ ID NO: 923772 - protein, 137 aa, Homo sapiens
MYGGPMSACSLMYPWCLEEDLEYGGIPEESIVIIGDDSSMHVIPPEDLPVGHDMGVENNDVENPDPPEVTTPVLLDVLQLPVAHPCPLMRNSSPTTLLMGPHPLTEGPGRSLSQRDPSHELARACDLGGMSQSDYSS

SEQ ID NO: 923773 - protein, 156 aa, Homo sapiens
MLALFMQAIIKSAQLPPEEKLQSCRAGWKRGGDLQKRKRKGLKVENNRDVCITNTQAQMHREMHSRARPEKGKRCQSQAKRDRAETAAHKNNLRKRRNERDVERQHFRDINQRDDTSIQRQTRETENMCAHERQTKEGTNTESDRNTKTQNKRYTE

SEQ ID NO: 923774 - protein, 128 aa, Homo sapiens
MKSYWIRVGPKFNYWSPNKKVQRHTERRQPFEDRGGDWNDVATSPGVIGFVSSHEKLERSKPRFFPRASEGTWWELNNENSWTQDVEHHTPGPVVGSGEGGGIALGDIPNVNDKLIGAAHQHVTCIHM

SEQ ID NO: 923775 - protein, 233 aa, Homo sapiens
MCAQLFHLLPAGREQADADKSLRNIAITNSHKYCLQWLPSPSLSVFLLKEVMGERRGVEIFVLCAQQVYCKDEVTQWMFKHIQKWNLASEILKPEIPLFLEPGSPEVEDCPSHKAPPSSDDITQSRTNHCNFLKVPPTGKFINTQIAEPRQSNSLRTYYKLPPTLCPTSSYSGPYEETEKWEFRENLMKLANSQGLSRAFCEDHPYSYLDSAGCSPSTKNLIFGFLFVLEKQG

SEQ ID NO: 923776 - protein, 379 aa, Homo sapiens [sequence omitted]

SEQ ID NO: 923777 - protein, 316 aa, Homo sapiens
MQPPQRANAEFGDGDVDGDGDGGDGDGVDGGGGDDGDGNGDGGGDGNGGGGDGNGGGGDGDGGSDGDNDGDGGGDGGGGGGDGGGGGDGDGDGGGGDGGGDDDGGGDGGGGDGDGGGDVVVMVMVMVAVMVIVMVMVMAVVMVMVVVMVVVVVMVMVAVMVMVMVVVMVVVMVVVVVMVMVMVAVMVMVVVMVVVMVVVVVMVMVMVVVVAVMVMVVVAVMVMVVVAVLVIVVMVMVVMVVVMVMVMMVMVVMLVVVVMVMVVVMVMVVVVVMVVVMVMMVMVVVMVVVVVVMVMVVVMVMVMVTGYSNICICFCI

SEQ ID NO: 923778 - protein, 139 aa, Homo sapiens
MNTLIVSPHRSRDRAFLRPQQAVLRPLSVGITPRDLNPGLADPRAHADASGKPQCENELRSEVLARIRYWEYFSAPEEKTSDHRVPSGFVLYHQDYVKYIVPFGKPSSSPRKVDQVGIPFIFTEQETGSEKCGDFTRLT

SEQ ID NO: 923779 - protein, 147 aa, Homo sapiens
MWFCVITAVPFSVWQAASWGPSTVVQMGHIQIRFHLPWVAFLNLGGLAHHESSASVVPCCLSWSKNKPFFLFAWLLRFPCIQGDLNDEKQQVTYRSGGIMFQAEGTASVEPEMGMSLGMRSHMEDGKNPGICSPYKGTNSIMRTPLS

SEQ ID NO: 923780 - protein, 121 aa, Homo sapiens
MIFPGKPCLSCLCVSKTPKSLVMFGSTSCVLGALFSMHFSKAHGSEIQQEQIMEDSNPDYARKVIWAEENLLAIPRSIPSASGQRQEEPQTSPPASSSTEGVLDLKLSGDWNHCCGLYSRA

SEQ ID NO: 923781 - protein, 218 aa, Homo sapiens
MRLKVKDLRQYLILRNIPIDTCREKEDLVDLVLCHHGLGSEDDMDTSRRAYGWRPNIQIWSAGTANTEDDDDDDDEDDDDEEENAEDRNPGLSKERVRASLSDLSSLDDVEGMSVRQLKEILARNFVNYSGCCEKWELVEKVNRLYKENEENQKSYGERLQLQDEEDDSLCRICMDAVIDCVLLECGHMVTCTKCGKRMSECPICRQYVVRAVHVFKS

SEQ ID NO: 923782 - protein, 118 aa, Homo sapiens
MYWLKMETGKSKIEGLAWHLVGTFLLCHPMVEGGRAREGGDQVKKDEAEEPAMGQIMQRLLNFIKDIRLHFQDNRGSLNCFNKGNDSITLALKDNGSDGSHYETPDNAEPIPESVPVV

SEQ ID NO: 923783 - protein, 233 aa, Homo sapiens
MEDAKTITNTIIIITIILITIITITIIIIITITIIITIIITSIIIITIILTTIIITIILTTTIITTIIITIILTIIIITIIITIIITTIVTIILTTIITTIILTTIITVIITITIIITTIITTILTITIIITIIITTIITIITITIIITIIITSIIIITIILTTIIIITIILTTIIIITIIIITIIIITLCWTHPYPSLIFQSLMSPIPLHPIPLSPYLSLIGIMIIIFQLAA

SEQ ID NO: 923784 - protein, 141 aa, Homo sapiens
MRVTNRKPSRRGSTLSLSRASGGSSPQSSMISVNPGSDEPPSVNTQVTSSKDIEDNESSSTKPDEEPLYMNLQKLLEMVREDARRTVTIENGMQRKAPSRTNCDINIHYKSGVCNTMRAKFYSVAQEAGFCLQDKMEILMK

SEQ ID NO: 923785 - protein, 162 aa, Homo sapiens
MAAADSGISPRAVWQFRKMIKCVIPGSDPFLEYNNYGCYCGLGGSGTPVDELDKCCQTHDNCYDQAKKLDSCKFLLDNPYTHTYSYSCSGSAITCSSKNKECEAFICNCDRNAAICFSKAPYNKAHKNLDTKKYSCCYPTGFLQQKVRERTQNWTDWPSFLA

SEQ ID NO: 923786 - protein, 154 aa, Homo sapiens [sequence omitted]

SEQ ID NO: 923787 - protein, 140 aa, Homo sapiens
MEAAEITDEDNSISAMYQAVGELPQANRDTLVFLMIHLQRVAQSPYTKMNVANLAEVFGSTIVAHAVPNPEPVTMLQDIKCQPKVVERLPSLPLEYWSQFSIVEQRTLTPYMSLKTQMPFQHQILKMFDFILTLICKTPI

SEQ ID NO: 923788 - protein, 136 aa, Homo sapiens
MKSLQGSGLVPASSIPISTKHLNLPLNTLELATEHLNSSLPNLPGLVKFSRLLHKLLLTNSKFPEEKDPNVRNDKYYWRKHKREDWNFRYQKKIIIGGQKTRLINSLATGDRTQSLTPLEVGLREGLKAPNLESYG

SEQ ID NO: 923789 - protein, 141 aa, Homo sapiens
MIKVTRRKRRKKEKERKRERKKEGRKERGREGRKEEEEERKKNGKKKERKKEGRREGEKEGRKKKKKERRTERRKKERKKERKKERKKEERKERKKEKERKKERKKERKKERKKERKKEGKKWLKIGYLITIFQAWVPRRN

SEQ ID NO: 923790 - protein, 141 aa, Homo sapiens
MAGCRSRALPRRKAAKACTPSAAAGPGAKPLIAQGGRASPLLRVRTGQAHAHPELQLARKHPRSPCSRWRLSLHTSLQAEGAGSGLGQPRKGLPRCSSGLKGSSSAAKVGAQAEEALRVSEGCEDCQHAVTSQYDCIPRKP

SEQ ID NO: 923791 - protein, 180 aa, Homo sapiens
MTMVVFQFVSVTLEELVTEKDFLVLQIKLLKVCSLPVWMMRVRGPSPSSPNSSQVVAAALFHGPCKLGKQKPREKQMGHLGIKHIISYPFCGTAALLKSESITVARMVTPFLVSWNEKTKMTRQQLEFNGTLPVSASGNIFSLVAKISNLRRKKNGCHWLVLPGKFMNQVPQVGSISFQL

SEQ ID NO: 923792 - protein, 255 aa, Homo sapiens
MCSSMVKATSSSYYRSLALTRLQMVRCRCGFHFVLWVPVVLVGSGVSLSSPSSHPAFLLNISLAEKSQAHYQMLKQQPSIDFFTNFHNWRTQTHNWYQEWSEDEGSRMGWGLDNSLVARSTPPHDTWGLTPARTPGDGANLLLGSLLEIWAGASDPAGWSEDWGKGWTLFLKDTTSILVAAQLQRVTSILEGPVELAKCLICRCGIPYSIASDHGTHFTGAQCQDQPSVLRTLFLNLLPLASQGPQRFQPPLSES

SEQ ID NO: 923793 - protein, 165 aa, Homo sapiens
MEQYVCDGRTGDGPTISAIYGGGNNEPPGPCSAPPCNERVLLTKNIDCKGLRLQRQSHSHRILETAKGTLETTFRHDRKFSEDPPEADAAGPGQGPYCPAQPWDIFPGILAAPAPALAQRAPDAAQNAAPEGKNHKPWGLPCGVKPVGARVQELSLGSLCPDFRG

SEQ ID NO: 923794 - protein, 136 aa, Homo sapiens
MKSCRPCSRQPEMQEAVLGCTCKEQESNTPQWQRQLNMFKSTHFLAVFVLTTTFPDSMNQYEQVGCLVLKGWTFLSLLEDETPCGAEKPSQPSPTDQTGFLVARSSIPSGAASLLESQLSQPMPEELSADPENDEK

SEQ ID NO: 923795 - protein, 135 aa, Homo sapiens
MTACLRVLKPYVRSQSLTEPIPKSTGSFLRQHHGATKWTAFEQLNSLWEAIVTMPAEEAKCLKDYNSHPQCDSLPTAVCCELKVCEERRGVLTHTITRSHKVCKLRSKEASLNPKAEKLGVRCSMAGSIQHGRKM

SEQ ID NO: 923796 - protein, 147 aa, Homo sapiens
MRLSYMAFIMLRLIPMTCASTGLDESPGAFLSPLEKCPVKEQSNHCCNDVPAQEVRGGPHAKNLLYRPKPYLSGKSSCARSCEGEKPNSGTHGWSSRYTLSEVSFNFSVEFSFSFLDKSSLCESLHDSLLLPNWPGHKIYFQRMPPT

SEQ ID NO: 923797 - protein, 134 aa, Homo sapiens
MLNFPRPPWPTMPPSCAYKNPETLAGMSTSSWTSRGTHQWKNTQAAGRQEDNERGTPAEEHTGRHQQMLAGQLERVVHVASRNETNLKKSKNLGHEQVGNVYDYSFWIPNRNLRNHKYFHEKLSLQEIATDILP

SEQ ID NO: 923798 - protein, 129 aa, Homo sapiens
MTGVPGHSPRADRGRDGATSSICGPPAASRRLHQPIPSLGTPAPFTHHSRLRGCPGVLPMAPGVCRSQRTAETPNPVQRAREAGLCQKQQRSPAPAAKKIDTPTRTSLLNAWKNWSYMTAIFNKGTKGE

SEQ ID NO: 923799 - protein, 156 aa, Homo sapiens
MRPEKENQPLTSRNGSDDQKQAIIIVALLEIKDDGEKRRMDKGEGTAWCSSLLIHVVGMEAERKNGQSQKSQDLVLVGCGAQLPTCGPEQWRMPWLCPGTQPSTSLASEHWGLWQWAPVTPTGPHDVCSHPTYEEIVSQGDDVTCSGLHSKYLDRV

SEQ ID NO: 923800 - protein, 156 aa, Homo sapiens
MTVQPLCWQGGVTASWKLMGLSYLGKGFQQGGLCQRENPGLKCCCSDFVPQGAPFRHAFPLPIGMGLPESQSAVIVFSLLGLATTWSYWALGWYRGGGRGVCKESCDVTHLQVSQLWMPASAPVENAFNDEEKDLYTYLQNFKKLNSEDLSKSPIA

SEQ ID NO: 923801 - protein, 155 aa, Homo sapiens
MAHVSVSNGNIGLQASWPLGFQVGCIGTGGPGGLLLGSPGGTLDISSEDVYKALHGLGCQQHSHILRSSRTHNAAVLWVNVGDFDGALGYGDTEDNELSDRLPMVVSNIHWGPSPGSVFLRKFLSIKSTIETWVMRACSLVMVANLYRGNLTRMQ

SEQ ID NO: 923802 - protein, 135 aa, Homo sapiens
MVDPLTACTGKAADTQHQPTKIAGRKAVLCKATDVELLKTIGTHLLHQCDLVAEKADDGLLIAELQPIKMLHRTLSYFCKDICCQKRILIKQKHISVLSVARRLVKAFLSQMHAKSGEMEALRSNLHKKHNMVFS

SEQ ID NO: 923803 - protein, 140 aa, Homo sapiens
MGTDILSSWQNLHIGSLTGRVRAIMMGMAKWKPLELPLPRKRNRRRLCNRSRLLCKLLCHLGHMTQQIQWCLWCQWQIRMLFGSFGRNPIGESQQRLLGFWSKALLSSADNYSPFERQLLACYWALVKTEHLTMGHQVTM

SEQ ID NO: 923804 - protein, 165 aa, Homo sapiens
MYIPLPFDDGMLLCVTHFMARWLKANCFWWALWTGMEKKAFAKSMAAYWVPDVLICSSNETTSGTAAVIGVEAAQMASHHNSPHPTSQGASVGVLPAAKYVYANYAFWHWGNDHRKIFGTTLLEMFWGFKIEVFVFVRFFPQWSTRGNNYTVKGVVCKEDPFTVL

SEQ ID NO: 923805 - protein, 204 aa, Homo sapiens
MWAAEHCLDKPGAMCIIEGPVDSWDSPVMPKGLVESGQSTYLDGPGRSCSEILTGQRIPEHCYKALSVCSSHRIPEHCCHCLNVCPPHRIPEVCCWGLNVCLPSRIPEHCCEGLNSHRIPEHCYKGVNIFPSPSIPEHCCKGLHVGPSYRIPEHCCCGLNVCPSHKILEHCYKGLNVCPSHTIPEHCCRGLNVCPSHRIPEHCY

SEQ ID NO: 923806 - protein, 1070 aa, Homo sapiens
MYSHLLQGTDKQVAGLFPVVYCSDGFCDLTGFSRAEVMQRGCACSFLYGPDTSELVRQQIRKALDEHKEFKAELILYRKSASACIQFQPRVSRIQQKNIRISAGQIYHTTGLPFWCLLDVIPIKNEKGEVALFLVSHKDISETKNRGGPDRWKETGGGRRRYGRARSKGFNANRRRSRAVLYHLSGHLQKQPKGKHKLNKGVFGEKPNLPEYKVAAIRKSPFILLHCGALRATWDGFILLATLYVAVTVPYSVCVSTAREPSAARGPPSVCDLAVEVLFILDIVLNFRTTFVSKSGQVVFAPKSICLHYVTTWFLLDVIAALPFDLLHAFKVNVYFGAHLLKTVRLLRLLRLLPRLDRYSQYSAVVLTLLMAVFALLAHWVACVWFYIGQREIESSESELPEIGTGGSLCMWWGGSCVRGVLAVKGQSGGKPWGWVCVCVSPPPGPGILAHSLPACSGPAVPPSGWLQELARRLETPYYLVGRRPAGGNSSGQSDNCSSSSEANGTGLELLGGPSLRSAYITSLYFALSSLTSVGFGNVSANTDTEKIFSICTMLIGGEPGRARLPGATPRLLPAGGAVPLPGGPEAGGSSALALMHAVVFGNVTAIIQRMYARRFLYHSRTRDLRDYIRIHRIPKPLKQRMLEYFQATWAVNNGIDTTELLQSLPDELRADIAMHLHKEVLQLPLFEAASRGCLRALSLALRPAFCTPGEYLIHQGDALQALYFVCSGSMEVLKGGTVLAILVKDLYMWGGGDLTTADDIESSGSQGTCRFTVGTAEALGLRFLIHLAIHNQDEKQERARKASATEAQPSSEGNLSNLQPPLLSSWLKLSGLADLYFLSPGKGDLIGCELPRREQVVKANADVKGLTYCVLQCLQLAGLHDSLALYPEFAPRFSRGLRGELSYNLGAGGGSAEVDTSSLSGDNTLMSTLEEKETDGEQGPTVSPAPADEPSSPLLSPGCTSSSSAAKLLSPRRTAPRPRLGGRGRPGRAGALKAEAGPSAPPRALEGLRLPPMPWNVPPDLSPRVVDGIEDGCGSDQPKFSFRVGQSGPECSSSPSPGPGVRSYQVNVL

SEQ ID NO: 923807 - protein, 373 aa, Homo sapiens
MIMMMMMVVVMMVITMMVMIMVVIMMTTTVMIVIMMMMMMVMMMMMVMVVMMIMMMVMVVMMMMVMVVMMIMMMVMIIMMIMMVVVMMIMMVMMVMTLMMMVMIIMIMIVTMVVVMVMVMMVVERAQLCPRDTQAFTPNSGSCGTHSTGALGHWALGLRGFPSLAGIPCFAANSFMRGKPEEKAQGKWPLSPPWYQVAKVYAMPPERLRAHLISEAKQGTLLEATWVTGLHRTQHFGEGNGDPDWPPRALPEPDAEGEGALPGASRGTLSTAPIAHAVIDKRRRDTFVGPRLALPTWGALPASLRPHAPSARRGSSADASSQLRVPARRTLIRVCPRSSHRASTGGFRMHEVHAPARDPESGPGPRVPPPLGP

SEQ ID NO: 923808 - protein, 364 aa, Homo sapiens
MEKSRANLALVLGSGAAVSTCSPHVLVVFSGESPDLSEGATCPSILLRPPPRFLHLRSRAQSFSLQTRIINAQVLEELKRKPIACQNMPQKGTGATETLLTPLVCPLTAPGEGPTGIQHPDCAGKHLLTGKEISISTNGHSMQVTLKIHGGRAVGPDRGAGSGCTGALTCWVTVHRVTLLGALTCWVTVHRVTLLGALLGWVTVHRVTLLGALLGWVAVHRVTLLGALMGWVTVHRVTLLGALLGWVTVHRVTLLGALMGWVTVHRVTLLGALLGWVTVHRVTLLGALMGWVTVHRVTLLGALLGWVTVHRVTLLGALMGWVTVHRVTLLSALLGWVTVHRVTLLGALMGWVTVHRVTLLYPKT

SEQ ID NO: 923809 - protein, 149 aa, Homo sapiens
MRSSPTFVDLKCGGPRGPLFRATLTASQLQRGQVDSTPSSTARCLPLSAAQISGAPAAETWTLLYAKQRAVGFPRVTVRFAGDCEPASVASALPGAHPVSDPPARRILDPHLPHPWISASSVSWRSLSQAQFLMDVTTCSLTGASSIPE

SEQ ID NO: 923810 - protein, 138 aa, Homo sapiens [sequence omitted]

SEQ ID NO: 923811 - protein, 145 aa, Homo sapiens
MTPRQRGGCLALVISEPASPLGGVAAPREKEEDHRPPQELVACGAQAPYQSSPRLCVSRSPVGWRGQASLLAAFCGGALHEARCTEGETDARKARGSLGHRQPWCLEKGSGLRSRDLKYADQKSPLKAASTDGRPVILALENLPD

SEQ ID NO: 923812 - protein, 197 aa, Homo sapiens
MPGPHYPQMSHGSSSSPPPPPLRLLFLLLFFLLFLFLLLLLLFLLFSSSSPLPPLLLFLLLFLLLLPSSSSSPPPPPVPGAVVMDTKGQVHFWSQTCIQLLSAAKWKQLHLLKPQGPVVAGPGTVPDTDASWDVRASLPQGAEESRQSTVSFAAGSEGSLPIELLRLRTVTSPEDVPCYALSTYKKGILCPQFIPVL

SEQ ID NO: 923813 - protein, 122 aa, Homo sapiens
MAIKMMFSPSVSGMRHVRTSEKYSSFTMNVNRLLQMNSPQTTLSSPGDTFKSPSVSSVWSVVNSDWSMHHSDKSMLYFNISVPWGICSQLELPTGLERAGKFSPPHHLSVVYPQSLYISRQV

SEQ ID NO: 923814 - protein, 147 aa, Homo sapiens
MAGMFGRAVHSGSDEEPEGLRHRKLLDPPARMRLRESPGQLALRVWTFNHEFSTTVRKSSGISPNVGAIGRGGDCGAERVQSQGEQRLHPQMLQQGEPRASCPGCWIRSGIRLARGPTKGVCTQAGSLFPEHLSPAPTAVPSSARVR

SEQ ID NO: 923815 - protein, 143 aa, Homo sapiens
MDVYSSVAGLNPGCPHAPQVLVSITVTMETTSSKGNVLKRQKHQYPWAHSHSTQNGDVCDFPGSYWTHVQTMWTSKKGLRVYANGTLSTCDMRRKVSHAYGDPDVNLVMGSQQDWTQHYDNGALDEFNIQGWPYLWMRSPCTS

SEQ ID NO: 923816 - protein, 144 aa, Homo sapiens
MHGLQSKHKTQTIQTWDQIGFLNENEAPTVAADFLRSYQNQKLNGNTLEIGPARMFQFEGKKGKNFCGKRRGLKMFKIYFMSDKEMKRTIYLCVSKDTSFFSTIDYYVKTGFLYNLQSYPKDSKEIFCVPRPVLGIINIIENRT

SEQ ID NO: 923817 - protein, 301 aa, Homo sapiens
MRAIMMGKAKWKPLEVPLPREIVNKKQYLIPGGIAEISVTIKDLKDAGVVIPITSLFNSPIWLVQKTNGSWRMIVDYRKLNQVVTPIAAAVPEVVLANSFFSILSIRPTRSNLSSAGKASKEKKALQQAQSAVQVALPPGPHDLADPMVLEVSVADRDAIWSLWQAPRQLLACYWASVETERLTMGHQVTMRCKPPIMNQLLSDPSSHKVGHAQQHSIIKWKWHICDQAWAGPEGMKWGMLPPGDTTIIPLNWKLRLPWTTLGSSFPLSQQLTRGVTVLAVVIDPNYQDEISLLLHNAGGN

SEQ ID NO: 923818 - protein, 139 aa, Homo sapiens
MDCTWRILLLVAAATGTHAEVQLVQSGAEVKKPGATVKISCKVSGYTFTDYYMHWVQQAPGKGLEWMGLVDPEDGETIYAEKFQGRVTITADTSTDTAYMELSSLRSEDTAVYYCATDTVNIHRVGKAAINGVDANIPL

SEQ ID NO: 923819 - protein, 170 aa, Homo sapiens
MLYFNYLFLKFLSHLTGIALAGAGWQDSPSDEVSNIEGHFLNGGVVEDLDVSKSPLVFFCHHVNSHTFTAKPSTSTDSMDMVFPVGGKNWRIPSKVNTSFVTRIRMRSLMNFLVTSSTSEGIAADSKTTWVHVIKAVNNLIPVTLNDTFGLHPIGAVVSGSGILARRHDP

SEQ ID NO: 923820 - protein, 156 aa, Homo sapiens
MLLYDLKGESLFQSSKENFDVNSPHLTKSVKNTMRCWCSADTVLVFPTHGGNLGICLTLVLAGSRRANLAEVPRGILTSRRSMNVHGLNARLYIRRKPDPDLHWMATWHFSMFLPLSPPCPLESQGAQWPSDQGLGASLQKTVTQWRKTNHKALKS

SEQ ID NO: 923821 - protein, 172 aa, Homo sapiens
MEELYNQRAISGEDSQRPSAHLAVKKIFVGGIKEDTEEHHQRDYFEQHGKIEVIETMTDQGSGKKKRFAFVTFDGHDFVDKTVIQKYHIGNGHNCEVRKALSKQEVASASSRQRSQNCSGNFGGGHGGSFGGIDNFGHGENFSGHGGFGGSCDSSGYGGSEDDYNGFGFKPV

SEQ ID NO: 923822 - protein, 155 aa, Homo sapiens
MGLAFLWSKSGSGFVSWGPCLFPLAMPSPTSPPGPTVRPQALPLLSGMGYLHAKGILHKDLKSKNVFYDNGKVVITDFGLFSISGVLQAGRREDKLRIQNGWLCHLAPEIIRQLSPDTEEDKLPFSKHSDVFALGTSWVHRLQSLSCSLVPRDRI

SEQ ID NO: 923823 - protein, 193 aa, Homo sapiens
MILDQILELGKQRDVCLHKLQMHVEMCPDLRMCTGPSRTMREAGAVADTILTSLPLRPQNEEVHDEAEESEDDFEEMNLSLLSARSFPRKASQTSIFLQEWDIPFEQLEIGELIGKGRFGQVYHGRWHGEVAIRLIDIERDNEDQLKAFKREVMAYRQTRHENVVLFMGACMSPPHLAIITSKLEIDKLSSHP

SEQ ID NO: 923824 - protein, 250 aa, Homo sapiens
MATGILPEGDEPPFSFQALPEPTPVSDPLCNRLFSSLCRHTVSATLVPADPSQRSRQLHQAQSCCCLISLGEESTLAISRGDVPRELIECTSAPVGLSLYTGDLQTAQVCSKWMGLESEAIFVEQMNDPYESSRFSTKYWMSQTCTVCGKGMLFGLKCKNCKLLNDNDNDNKKQAYDCFTGGHDTSFKKTAELLVKETICPPQHLSMKEERKGRFPTAQGFPNISLAMSWSSENFSGFTAPADSNADPLP

SEQ ID NO: 923825 - protein, 145 aa, Homo sapiens
MIFTNCQPPEKIMAMYHHKISISLINEKGPPELQYGLEPGQLPTLYLQESFLLLFIQSETFFECSPAVMGNEETDELMSKISILIEHPGCWEHRYKRADYDNVKSCKVEVQNATEIYNRGAAMVLLNRAVSILLFKGNFCYLTDE

SEQ ID NO: 923826 - protein, 135 aa, Homo sapiens
MFKGASELPAVTASLPSKTALWFTRTASNCCYYYCIDPYIHSGLEPEPGFQIARQRSDLVIYPIRLKCIYYMLKHIPVSSENDPQRKTEPDPNPISICVRQNIPRLLSITSVPPNLYLEFRRDCREVIFRGSKVT

SEQ ID NO: 923827 - protein, 151 aa, Homo sapiens
MLTVDVKKQVKPENKMKKNQRRGGEKEEKVMSLKLWEDSDAQCGRIGPRTAEEWLESSGIQDVSIVNLSRAFQRTYHKIQLYGICQRTKVRINAKCIDANYALKDSENDHKRVHGPYISKDHAANSTYIVWALSLFYQISMGLLGDELGKF

SEQ ID NO: 923828 - protein, 141 aa, Homo sapiens
MAQGWCGRFKTVFSPLFSASFNDMKLKPGPLLQVCWSLLEIHYRPCLPGYHQQSLQNSKDCCLFLPLEALSQRAPARYQPECSYMSCLPLLGDVSQSRGTGVRDPFEEAVWPLAELEHCAGRSAALFRAGMQEHLSLLKLG

SEQ ID NO: 923829 - protein, 181 aa, Homo sapiens
MHSCKQFLCKYVSERVQEGYWLSVVSVLSGYALVYTNKECWGDQTQHQVVGVTKLGRVKGLRKREKKDASTCKHVHCTMSPPLVCTNTVTLISWCSWHMQSTFGDTRYGPVSPLPKIHSNVNFCPCIHTVVGEAYIAEREREHYILQGSSSVVLSFQLITSYPKSEFILSVSLCFTLSALN

SEQ ID NO: 923830 - protein, 176 aa, Homo sapiens
MRAIPKPLGQDRPRKLGCEVCGILKGKEELGVRVQGNTEEGILEVQNRITRKAREKSKVSQLQLRRWEKYLVTGCPRIPWMVIDLEDSCPGQEINTEKTTPVSRRKSISWPSIVKHTWGSPGTGAGLVPATPWANLKLKHAQKYESSFKKSKMKKIFDQTFYQRRHMDGKKRMKRW

SEQ ID NO: 923831 - protein, 134 aa, Homo sapiens
MTLNKDIREIHKRGHYHKIQCEVDSDRRQTNSQADRDRSLVKLDLQAKDSMKPENQTTSSEWSPCTGDKNLELAELWEQKELREATGHHSLLLSNRREEVKPLDATPGDVLLQLRPSGHGCSGERATLQLKHKG

SEQ ID NO: 923832 - protein, 137 aa, Homo sapiens
MEIAGELELEVEPEYVTELLQSHEKIVTDQESLLMDEQIKQFLEMKSTPGEVALTARLSQSSGCCCPGSLGPAHALIAYPDFSLCGEGVLLECKGNLEAARIVLLFTFVEIDARGMMEYKCVLLHLYYEENIMKSLT

SEQ ID NO: 923833 - protein, 345 aa, Homo sapiens
MVPGQAPAHVINLTEPRVCLIIEGQEIDFLLDTGAAFSVLISCPGRLSSRSITIRGILGQPVTRRTNEAVIPLYPVVPNPYTLLSQIPEEAEWFMVLDLKDAFFCIPLHSDSQFLFAFEDPTEHTSQLMWTVLPQGFRDSPHLFDIKTVEGVPWNYWLLPTWIPRYSKIARPLYTLIKETQRANTHLVKCEPEAETAFKTLKQALVQAPALSLPTGQNFSVYITERAGIALGVLTQTQGTTPQPVAYISKETDVVAKGWHHCLRVVAAVAILVSESIKIIQGKDLTVWTTHDVNDIVGAKGILWLSDNHLLRYQALLLEDGASNMNVHGPQPCHFSPRGWGTHRA

SEQ ID NO: 923834 - protein, 140 aa, Homo sapiens
MLHAQENGILYLVDDVYHSICGCVVPIDNGGPFNCDILDSYTQRLPCEHEDAIYNPRREAKDRPFPQSLRRNQSCPHLDLGLLAFRTMKVSMLKRARSVSSFTYAGMGGSERPHTEATGSCPGVGADQAWTIWHVSILRG

SEQ ID NO: 923835 - protein, 203 aa, Homo sapiens
MTVALKTKSDQTKVKHFRNPYLIAVEDFPRLSSQGVEHVCVIHIFDVHLTSNYVEFHKVLSSFIIHQKLIYLREKSQFYYYLKKKMSFVTHAVPYLLSKTSKPGHPNLGLGFCKYKCMKALTIILAIHYHQCNQPGPGLPGSRNLESWRQCTIYSQTRGGCFSIETDMGKAQHRNGPRRNKEQGIYLEHGKQMGIKFEVSWKE

SEQ ID NO: 923836 - protein, 141 aa, Homo sapiens
MNQASPDPETTGTLILDFPASRTNLRQGYIHKYGGDNAGLSAPAMNSHFWPYPPYPGNGLRPWKLVWSCLGRKLQASEYPECGLVGGPGSWGACPFGRSDSLPWSSQQRARMGASNMQCPGEGLLLPRSKGQTAGNTSGSG

SEQ ID NO: 923837 - protein, 129 aa, Homo sapiens
MLFPVVFRSQPGGKKVIPIPECAALLCPENSRCSPSTEDENKLECKCLPNYRGDGKYCDPINPCLRKICHPHAHCTYLGPNRHSCTCQEGYRGDGQVCLPVDPCQINFGNCPTKSTVCKYDGPGQEQGL

SEQ ID NO: 923838 - protein, 137 aa, Homo sapiens
MSGGTHPGGWGILAGCVAPYPGVTCANGLISRDPTAPYEPAGPLWLPKSEYILRYICGGCGDVVTQGLRFLEEGSGPPWVHNQYGICCLSEDRKLPLTALPRPARAKRLPDILAVSSLSQSPTENSEEGPIPLMWAC

SEQ ID NO: 923839 - protein, 153 aa, Homo sapiens
MSMMAVMKMATLELRNVHSLDNLTALSLSKNRWEEATGKYDMGKGNRVLALTGTGSSELIAHRPTGMIQEALPSHNLVTLSTSRTCHLCSTSDMHNHSHILDHKANFGIAASLKCDYDDTFSAGLSENSSCRNGNRVDKGHFQVFLVCKAAPL

SEQ ID NO: 923840 - protein, 414 aa, Homo sapiens
MEAITNGMMNLNRQRHQHLVALRIIFAHGENGGEEVFIRDKLMERRNRRTGRTEKARIWEVTDRTVRTWIGEAVAAAAADGVTFSVPVTPHTFRHSYAMHMLYAGIPLKVLQSLMGHKSISSTEVYTKVFALDVAARHRVQFAMPESDACDNLKTCHTSHGSVMAETAVINHKKRKNSPRIVQSNDLTEAAYSLSRDQKRMLYLFVDQIRKSDGTLQEHDGICEIHVAKYAEIFGLTSAEASKDIRQALKSFAGKEVVFYRPEEDAGDEKGYESFPWFIKRAHSPSRGLYSVHINPYLIPFFIGLQNRFTQFRLSETKEITNPYAMRLYESLCQYRKPDGSGIVSLKIDWIIERYQLPQSYQRMPDFRRRFLQVCVNEINSRTPMRLSYIEKKKGRQTTHIVFSFRDITSMTTG

SEQ ID NO: 923841 - protein, 179 aa, Homo sapiens
MRMMGMAVCQYRPAQKTDSLGDSGSHSGLHSTPEQTMAVQSQHHQQYIDVSHVFPEFPAPDLGSFLLQDGVTLHDVKALQLVYRRHCEATVDVVMNLQFHYIEKLWLSFWNSKASSSDGPTSLPASDEDPEGAVLPKDKLISLCQCDPILRWMRSCDHILYQALVEILIPDVLRPVPSK

SEQ ID NO: 923842 - protein, 156 aa, Homo sapiens
MIKKEKVSFALHGFLKENCHIKLYMSMMAVMKMATLELRNVHSLDNLTALSLSKNRWEEATGKYDMGKGNRVLALTGTGSSELIAHRPTGMIQEALPSHNLVTLSTSRTCHLCSTSDMHNHSHILDHKANFGIAASLKCDYDDTFSAGLSHGYFDS

SEQ ID NO: 923843 - protein, 139 aa, Homo sapiens
MVRQILWQCLPGASLQDLSKASYKVHSFSKACSQKLKVCCRGGALMENLYQGNTEGKCGVVQPPHRVPTGAPPSGAVRRGPPSSRPQNGRSIDSLHCAPVNAADVVKAGCQWPTDKEGYSRESLEGPARRSRDRLDHPI

SEQ ID NO: 923844 - protein, 135 aa, Homo sapiens
MDTNNRGDTFPKTKSPGCFYSRWDSGQLKVINGIEKEKEKWLLSKEKAREGENSSTQRRQGILQRKRMMDLPSCLQGPCSLPPSGLIPYLIPFVHPAPDSLVSLSSPILPVSNCPSFGNSALLFINEITYPTFSS

SEQ ID NO: 923845 - protein, 142 aa, Homo sapiens
MVGSNVSMPDSLLFSHSLVLVSPDAATERLLGSNCPALLGVLLARINSGCPLETQSVSPRPLPTTCNPSWKAGNKRVGLLVVGILLGKLLDLIEERGATTCRFLASLPIGPRTNPQPSADNCHQVAPAAVDLDSLDSCNPGC

SEQ ID NO: 923846 - protein, 379 aa, Homo sapiens
MMFLSLCPCVLIVQLPLMSVNMRLPGAVFDLQLAEVESTQVRITWKKPRQPNGIINQYRVKVLVPETGIILENTLLTGNNELSENLMQQMEMPHRQKLAPPNPFDLLPGESSTLESLAKLHRQSVITVAKAVTTRNQYITDIAAEQLSYVIRRLVPFTEHMISVSAFTIMGEGPPTVLSVRTRQQEYPNGKITHYTIYAMELDTNRAFQITTIDNSFLITGLKKYTKYKMRVAASTHVGESSLSEENDIFVRTSEDEPESSPQDVEVIDVTADEIRLKWSPPEKPNGIIIAYEVLYKNIDTLYMKNTSTTDIILRNLRPHTLYNISVRSYTRFGHGNQVSPCFNLYQSILARAVCVAPVSKWAASVEFLLATYEFTFRA

SEQ ID NO: 923847 - protein, 231 aa, Homo sapiens
MDRLLPQVGGCPSGTKLPEEGSGSNICCSAASAGDTQANRVWSGTPANSNRPAAEDPVRRKTNKQKETTSININKKVIYTKTPFVGHQHQRPKVEKTAKMERNQRRKAENSKNQSASSPPKDRSSSPAMEQSWMENEFDKLTEVVFRRSIITNFSELKENVRTHCKKATNLEKRLDEWLTRINSVEKTLNYLMELKTLAQKLHDTCTSFNSRFDQVEERVLVIEDQMNERK

SEQ ID NO: 923848 - protein, 142 aa, Homo sapiens
MGAKKRHLLDHRLTVNTLGIKRKYPNKIKGIYEKLTSNMILNAERIKLFSLRSGKREKFHFVLLFNIVLILMDIIFSPYFSGGRLSCRGGWPKAELPFGLKKELLSLNSLAKTGYLVSLNQKAIREYNCTMSSEYLMKSVND

SEQ ID NO: 923849 - protein, 148 aa, Homo sapiens
MDAELQVTLTVEDTSTPSLATDHAPLTISLKPNHPYPTQHQYPIPQHALKRLKPVITHLLQHGLLKPINSPYNSPILPVLKPDKPSKLAQDLRLIDQIVLPIHPVVPNPYTLLSSIPSSTTHYSVLDLKDAFFTIPLHPSSQPLFAFT

SEQ ID NO: 923850 - protein, 136 aa, Homo sapiens
MQIQETKEDVKEKYAYRPLNSFCCKADFVLSQWKNAHGLALTLRQTSLALGLARYMTMEMDTTFAFNKAFAEEIELSLKVLLVTERRLMSNFKESYLDMFRGNDHYTQSGMFQKLEFAINVHFQGQARVSPMCLCL

SEQ ID NO: 923851 - protein, 148 aa, Homo sapiens
MTWEMQHYVVLGNATFGQENKNACPHLGPWAQAWGWNPRQGPHPSLPSTSLPRFGGLSSFQRVNITLRFFKENSYLSYMFKTLHLRDKSEGEKKCYKIPKWSETLREEKRKQTQRYKEEEHVNEEADFGIVLSQTMEYLESPKPAEGK

SEQ ID NO: 923852 - protein, 144 aa, Homo sapiens
MVFISYGVWKKRMLMEATMVKKPGESNCVHPPQKTSLLTGLTWALTHSLPHLHPQKSAWQTHVEKSPLTLLFEACDIWSQRVETLHTLQSDACTVDFVISKSVTVYPQPELGKHPSYVFPCTGHSHVVIEGKIPNDSIKCCWCQ

SEQ ID NO: 923853 - protein, 152 aa, Homo sapiens
MMKSSRDCDERRRRYIALVILCFRVNLRVHLLWPFFLLPQPGLHLQDYYYCCCSVEQALMKTFLLRMSKQFYQRKNPALRGYKPLYSSPPSNATRRAECLHLPLSAFNKSQTRGQQSMTEISCYCCVWHVSILVKTPSQSSLLLKPNICGKV

SEQ ID NO: 923854 - protein, 134 aa, Homo sapiens
MLGFTWFIKDKRHLKRTQVQPELVSKPYELDELNPSQRAKTGYSFKCGSIGKALFLGEKKTTWKGRTLYHLSAYCLPALNPPFPMQLCNTEARPYRRFSFASWHTRLYQQRACEDKGAFPSSLFLCCHFPSAQK

SEQ ID NO: 923855 - protein, 124 aa, Homo sapiens
MSIIDFKCDKFLKKLKQNVMKENDRGGTVWTGLLGPRAESSMTEKDKSSEEDQEERNVHGHSRQMRVEILETPENHRTKEKAKPRLKVVSEVGAGDGDWEGRRGFIEPVDWSPTLTAVAAAARD

SEQ ID NO: 923856 - protein, 128 aa, Homo sapiens
MKRSLIGSLFCRLYRLLLLGRPQEAYDHGRRQRESRHIFIWLAGNREWGGELGERCYTPLNKQNLGEVYHKNNKREVLLHDPTTSHKPFPPTLRINYKIWLMISYHTSLRNGNDWRRTPFSPNHLVYT

SEQ ID NO: 923857 - protein, 139 aa, Homo sapiens
MKPEDFVQFTHLERCQCQHSSPKSLLVLQQRPDAIEDRKEDHTPKPTDLSAGELLAKAFHFPVCKVGKYNTVKCHNGKWEPMKGLEQHSGQADQADSQLFPLHSGLGGAAGSAEFDISSGDFQCYTEYKCKSGHPCLIP

SEQ ID NO: 923858 - protein, 154 aa, Homo sapiens
MGSNQLGVFSAMARCTWTSFVIGPSLSMKAGYLFPARKSGFLICQWETLIPFSRIMLPCTSGLLEVRQGMDTPCSGQWHMSRSELCLQTSFSYGGACANDVPANMMWMDVYGGFHHELHIQANFTAIEISKISIEAVDHSSMLISEAINCVCEI

SEQ ID NO: 923859 - protein, 189 aa, Homo sapiens
MPHREVENADESGKLLKYRLVKRCFMVINGMRADNRKIELGYRNNMYKGPVEGWRLGIFRDLKEGPPAHLLSSALFPEEEAELSLFHHPLATPVTKASPLKRPAPPALYHQPYASLREHNVSPWSPASRDVLCDSRCKENEQAAEKAGDKKSTLSRALKGLPERGHMHLKKIPQGWGQNPTWKVIVSYP

SEQ ID NO: 923860 - protein, 514 aa, Homo sapiens
MSKGPAVGIDPCTSYYVASTDTERMTGDAAKNQVAMNPTNMVFDAKRLIAHRFDDAVVQSEMKHWPFMVVNDAGRPKVQVEYKGESKSFYPEKVSSMVLTNMKEIAEAYLGKTVTHAVVAVPAYFNDSQRQATKDAGTIVGLNVLRIINEPTAAAYGLDKSQPGVLVQVYEGHIEIDCLYEGINFCTSITHARFEELNADLFRGTLDPVEKALRDAKFDKSQIHDIVLAGGSTRIPKIQKLLQDFFNGKELNKGINADEAVAYGIAVQAAILSGDNHMTVLIKYNTTILTKQTQILTTYSDSQPGVLIQAYEGKHAMTKDNNLLGKFELMGIPPAPRGVPQTEVTFDSDANGILNVSAVDKSTGKENKITITNDKGCLSKEDIERMVQEAEKYKAEDEKQRDKVSSKNSLESYAFNMKATVEDEKLQGKINDEDKEKILDKCNEIIIWLNENETAKKEEFEHQQKELEKVCNPIITKLYQSAGGMPGRMPGGFPGGGAPPSGGASSGPTIEEVD

SEQ ID NO: 923861 - protein, 154 aa, Homo sapiens
MPPPSRQLLLPVPETREIHDQSEAPECLCQDNGDTDGHRARGHQKHRSKCLMPVEGAVNPRDTEKDRPCAGEAVVYGQRGDYKGIFGNEGKETALGNPEMNTQCIRAKPAITQERMILEASSPPWKLIERLSTEKMVSPKGEQFHSDVHSWLVG

SEQ ID NO: 923862 - protein, 137 aa, Homo sapiens
MTTVSAALKGTHVSRSSRKVTVYKGYIRNCPVTWLAVWTPGPSVNSALSSQVSHARVLAVQLNSSGCYHSPWKLGRQNSLARDSRACYISGSIFLTIVAFVRTLRSREGAAGREDGKARDLHWSCFTGRPGYQEIDS

SEQ ID NO: 923863 - protein, 142 aa, Homo sapiens
MGPGGQQTRGTILRAPGLPGTGSMAVAPNENIVSIVTMILQVVSEFPTLAKFLWELQGFQSSRVFGLNASTSWKNGTCPHTLRVMGQGEDGVGGEAQKGKGKWLYLSPSHFSNCAGFAGKNHTMSVSDFYFYSPICPLFLSI

SEQ ID NO: 923864 - protein, 119 aa, Homo sapiens
MKGLARSLLWVLMQQTFCDSLSIVDVHEREHTSARHKVGTQYTRVKWRNRQGGHGFEIIHAHAFICLLKPNGHICGKGGEIVNDTHGPGVFSMMLQHLGQLWLQINLCCKRSLGPGNVK

SEQ ID NO: 923865 - protein, 141 aa, Homo sapiens [sequence omitted]

SEQ ID NO: 923866 - protein, 219 aa, Homo sapiens
MQMLELQGPRECIKKGKWEPEPQPVLALVLELRLGPLPGLGLAWLEEHLLVPPVWPSCGERKPGRTMAVMFTPLTVKYVYCDTERIGVDLIVKTCFSPNRVIGLSGDLQQVGGASARIRDALSRVLQYAEDVLSGKVSVGRFLVNLVNQVPKIVPDDFEIMLNGLKGIRIHNRVEEKVINIISDLGASCRNQEMVEQKDQENPMNKSKTWYKNSEFIPK

SEQ ID NO: 923867 - protein, 135 aa, Homo sapiens
MLGWKKPNVSIIPDLTIGFSVSVSIPFPPHKTVNAMGWEPHLFKIILNLYVIKCLLFAKRKAWNTYRVEETARISKNQASPCPCSLHQHFSDSWQMLMSEKRVIQSQGWVPRTSEGHDLGDPESFLEKFFIETNA

SEQ ID NO: 923868 - protein, 156 aa, Homo sapiens
MEHKERDNMAALAQDNMASMLQGLFKRKNAQSCLISFMGRQIKPPLGTLHCIVMQVSPVFLSISIDKAGLVPSSSFSPSSASSRELTSPFSATDNLHQRESHFLCLSLINSLINRDILMVHMCRAVAPCSAHPTGQRLFPIISHGQRVQPYPVRKA

SEQ ID NO: 923869 - protein, 144 aa, Homo sapiens [sequence omitted]

SEQ ID NO: 923870 - protein, 161 aa, Homo sapiens
MTVLQSEHPLGLVEQMLRPPGSRLHLNKMLAVLHKEFETRQPSSSSKLLRVTVPLGQGPQSWSPRASPGSLCTWKPCCHVTSHEPGGVGSSGGLAGSRGPQGLSSPALHEKLPREPGPPPLTPPFWALAHPALCVHQQTPGAAGNAQDTLSTPLPPMGSSS

SEQ ID NO: 923871 - protein, 157 aa, Homo sapiens
MKYLRSGQEGLFTDTGFPPHPVRLVLILPISYSRWSCSGSHASNNVATGSENLSVYVLVVMVLLCVCVSQNRDIVFNFFVFPKCAKQALDKGPVTDAEFLTQGPPRVDKTVHIKPGQTHLDIDRRRINSGQGLSGQSSMDDSLSLEECQVQKDALGL

SEQ ID NO: 923872 - protein, 143 aa, Homo sapiens
MHAQLRPCTHAQPRPCTPSQLSLRWLFSWDVIVEGPAWGMAAWESEPRTFNATFQLLPCVSSPKGILQIKWIMFVLDTYECIHTCGFGHAVLANVLFLGGLKADVLSRACESSWAPLPSQDGCRRIFMRIPAASLPGVLKVTV

SEQ ID NO: 923873 - protein, 155 aa, Homo sapiens
MCAQCGGTVNVRSGGLGFIFSFVDDEFLIGKPSISLMPTTLKIKHPQGTARLVHPLGREAVKGRHRAHESLDRGSSAPLRAPAGSPQGPIFPMFTELDWKPKLVQPARAVRGWKLGGPPTFLLDAGAQSTALPCQSTCCDKGNIGGASITSGGEA

SEQ ID NO: 923874 - protein, 232 aa, Homo sapiens
MTVGLLDHPERPPTPASWPSSHQHGAFAMWVHRFRISKDPGRDISKQVWARTSARQNGVITKQGPGVFHQLQRPGWTLPSDIATPSTPEEKPVPSFLESPSSFGSRQESTKEVLENPLLQRKKGGCHCLEVKTMAAEFQGYMEVRVKGKSNVSEGMEGEEFKPAKEALINERVSRTTSSASPRRNPQEHKDLQPPKGGPAPSVGLDPKCSEKERLKCLVPKLNVASEGAILA

SEQ ID NO: 923875 - protein, 149 aa, Homo sapiens
MPSAHTEHQTLQQLRGLASNAQHIPRSLGRSRSMFPVFPDSLQHHSQGSLAVISSCNAASELTAGIFEKSQLFAPAPDYRFDIRATLKPIMLQQLDGALSSLINRKPFYELINKLEKSANSARSVLELLIKHIFSGTRQMMREDGVEGM

SEQ ID NO: 923876 - protein, 141 aa, Homo sapiens
MSAGPRLENTLQAFRLQRRQGLPSSPDSRLFVSILIQDENPTAEALSRQIFTGKREQERSLQGLLCNRSSGRQRPQVLNTEHMASPHHWTCNWEDEPGLGAKESGRRWGALFQCVTAPRRGVGCENDPCSGAMLFDAIFLL

SEQ ID NO: 923877 - protein, 207 aa, Homo sapiens
MTKGGKQPDKNQRSPKQPLQHFGGSQPVIWDAAESTATKREMRTLSTGMHSGAPGNHVLLLGEEHGAGVAMLKSNLLLVIDGAHGGSRGSFSEDSFEAPSSGLQHLPDSHFPSTYLWAIPCSQIHNKNMKNSDCGAVLVGEAAVQCLSLQNTAHLQDRIGCHVSCPRRREQGSRGENKVSLSLLVWQFALFRAGKKAWGRSHFGFSD

SEQ ID NO: 923878 - protein, 265 aa, Homo sapiens
MLASLQTRCSGPALKRLRSDMAVFQNQSQTAITLLLQLWVDQPPLRETETGFPEVMRHILWDLEKDIYPHSGEGTENLQRARLAQALASPVATPALHHCLLKGQVPRDSVAGMVPVEVREKARTQPTSLRMPKQLLSRVAPEPKPGVWHVPKHLMHFTLVAVWVSSGALCRDLRAPPREAAQGVPCHTEATVCDTVESHMETFIVHTGEEQGDYIPVPTCGPLQVSQELPGSTRGPQETRSQAAGAQQQGLRGKSCALSLLPGEA

SEQ ID NO: 923879 - protein, 121 aa, Homo sapiens
MVTTKMNDSCSLRVHTYTLASQSLLLSTRSLTPGFLGASGRARELLGHLESVLGGDPAKTIAREPDSLTANALSSTALAATSEHHFLTSSLFDALVACCALLLCHLNFTLFQGPAEISHPR

SEQ ID NO: 923880 - protein, 167 aa, Homo sapiens
MPTAPRLESLPLISCSFPGIFDTEDVKKSLLSAPESLCCMKVGGVHPPWAALRRWRVRVMDTDIRLFHVTSQFLWQNGYGLSEGPHGLRHQLLMVRPLGCPLWVDVLPLLLCALHPLIPASWEQIPHKRELALPTVNKIILGKPEGCHASLQRTLIPYSLRADCAEN

SEQ ID NO: 923881 - protein, 157 aa, Homo sapiens
MSPRGNPDPPVQAPLSTWGARGEGVGESWGSVGSAWGSRWGLGESVESRGEGVAELSGSRGGARGQHLGSALRAVGSTEGGCGGHGCVAPPGHGQETLGRRRCRKQRHPCYGRVPPIGSGLGGGHWIYSSGNKKRNHQPIYNSGMDEMAVTTGSSCA

SEQ ID NO: 923882 - protein, 202 aa, Homo sapiens
MGMTAEVLALSSYRCGLRPAGSREGSFYTSAVYLPQMLGAPLVTCPIPAGADLEIVCQWGQNEGGALKLSCYKLAFFPIDGLDYDQGIIQLWNRKESSSCGQMSHFLGEKPREPVTLDGTSSLESITSQSFRPKTYYSSVLARDCSCVNVAYFIQNRNIKTIRLLQDILIVCERKNSYFQNSVPVTAQAVYAFINIVTYFMH

SEQ ID NO: 923883 - protein, 140 aa, Homo sapiens
MVIFPTCHKSLSVSHGPYEIVTVLTSPDYCDDGTRWGARSSLHWGSDTMTQPCGPPPSPTNAQLGLLQTSPNPILAHYVPLWSLPSTLPHRAIAGSPMASFLLFLFTHWVAGDDPPRQGKAVVSALTPGWSGPLVSSFRA

SEQ ID NO: 923884 - protein, 135 aa, Homo sapiens
MDQLQVTHPFPFSGADGLRSSVSVGLLSGTALLSNTEKGPSIFRGSRENKWVQWEVGSRSSEAIRAADVHGAEVPGRAGFYSKGGHLWSQTSEKAIKVHLFKVDGSHAGWKAVPASVRLLGRLLQSQYGNWLPPE

SEQ ID NO: 923885 - protein, 263 aa, Homo sapiens
MSCIVIGQFRVVFQTLNVRGCKDNISRSTSLLPYVGLVSVAIVTSSLFYDMLVITEPMIVKKISGYKGRCHCKTSCVTNIQFPSRECGFCHSGRWGGETSRHKQHRAVVITLERAWESPGVLVEPQIAQLRPFRVSDSVGLGLDLNTCIPNKFLSCANAAIQGLDVENHFTMHHRKEELSTIAESVDLFYNAHDLSTEALSYHCPRHSKNWQRHLVFLPWFPLLSLVHLLAYSTSFEARRNILKENDTASSVLFAESSYSPHI

SEQ ID NO: 923886 - protein, 172 aa, Homo sapiens
MDPNQEEISGLPEKEFRSKWYWDNWLATCRRMKLNPRLSPHTKINSRWIKDLNLRGETTKILEDNIGQPLLDIGLGKDFMTNNPKANAIKTNITSWDLIKLKSFCTAKGTVSRVFVPKGGMLSSKPTFTGSIKWEGGCGQVDKACTIWVIYHQLCQAGNFGPQNPFPRMALH

SEQ ID NO: 923887 - protein, 153 aa, Homo sapiens
MAAGRERACAGKLLFIKPSDLMRLIHYHENSTGKTCPQEEQIMSYMVGSRQRERACAGKFPLIKPSNLPATPGCCKVAADLHSGVFFSKSADFLPAAPFCGSKGPQTLAQSSQQLQRTAAEEKYMGKTCPLDSITSHWVLPTTHRNYESYNSR

SEQ ID NO: 923888 - protein, 136 aa, Homo sapiens
MKDCGPLSSLHRNRRLSGTASAAPPWSVHTPTKPQLRSPKETSRQVAVSIHPLTSPVIRSHSTGSALSPPPYLQTWALSRLVHQLVVLPHPKHLESLCRFLQLNEVFSLQLQLNLPQLLSSIFNVSLAIGICSPPG

SEQ ID NO: 923889 - protein, 160 aa, Homo sapiens
MIVDPTSENVVINHLFQSKLSQTGSLVSAYPSFKFRGHKSALLSKKMTASSIIGENKNYLELSKLLKKKGTSTFLQRLERGDPVTIASQLRKSLMDIIGKLQKCTPHFIHCIRPNNSKLPDTFDNFYVSAQLQYIGVLEMVKIFRYGYPVRLSFSDFLSR

SEQ ID NO: 923890 - protein, 140 aa, Homo sapiens
MRLPSGAFLLSLQGERDGSSFHEREEAGPQGEMGRDDGTSLELKMPKSKIMSKDMTASLTEISAVLGVCFWLCLCWTQGSGMSSGCGQPLNRCPGPSVQDTATLSVSTPRLSQLDVSKKQIIGHTIIHYVTINKLVKWMS

SEQ ID NO: 923891 - protein, 135 aa, Homo sapiens
MPGHLFEMTLDLNGMSSSHFVAVLKMDGYSNMKGRKQYLLNGPRMLLTYLTPSPHYSSRGVGLPDASGEVSPDLSEILKIIEMGTTMAEARIHQTQLTYWETYLATHAYGSCDLAVAQQEKQLTELTKYVGERYG

SEQ ID NO: 923892 - protein, 141 aa, Homo sapiens
MLQLVLHATACLSCYCLSCMLQLVLHATACLACYSLSCMLQFVLHATTCPACYSLSCMLQFVLHATTCPACYSLGKTQENVGPPKTVAPRVSSLHTSLHSASGKSTHCHLNIPTSIGLLCFRSRPSSSPQILELIGFFLQT

SEQ ID NO: 923893 - protein, 133 aa, Homo sapiens
MKSKNKYVQDNTTVNMILQCDMVAEKRDDILGILCGVSDIINASSVDGVLSGEKDVIMVPKSSMTEKSDQCARYDNAFIAEILIDRGVNVNHQDEDFWTPMHIACACDNPDIVLLLVLSLLSLDRGISHDTHN

SEQ ID NO: 923894 - protein, 141 aa, Homo sapiens
MWDAQKGKPGRAAPLDHVEQRPTASQQASRVHLRGMCWVETRQEHTEQEHGPALKEQQGGRCQQSRAQRESDWRSCNGCGLGLETDHGVAISRTLAFTYERRKAVGAFQIQKSRSTENNREENGVTESPSSTCGTKCVGFR

SEQ ID NO: 923895 - protein, 131 aa, Homo sapiens
MIRPHHRPAKSETGGLWHSAKQKNACPIPNASIISVEKHDEYDLIGTLPFLEYSGSFSAYCEQCNVRDNKRPRQSWLWEDPTPGRSGAALMSIPVILSRVGWEQLVMCGQCVIRTAAGAWATQTFCYRRFK

SEQ ID NO: 923896 - protein, 145 aa, Homo sapiens
MAKFLEHASWARSEVAGSTPGQLQWLPVVMVKSLEHPSWAWGEAAGSTPGRPQWLPVVMVTFLEPPSWARGEAAGSTPGRPRWLPVVMVTFLERPSWARGKAAGSTPGWPQWLPVVMVTFLETPSWAQGEAAEVLLLGGRSGCQW

SEQ ID NO: 923897 - protein, 147 aa, Homo sapiens
MLTLANTLQRLAVDSAALEGDLCVAVIQSGDWELPYWIERVWTLSPSQKLLVDSAALEGDLCVAVIQSGDWEPPYWIERVWTLSPSQKLLVDSAALEGDLCVAVIQSGDWEPPYWIERVWTLSPSQKLLVDSAALEGDLNKVTTGKL

SEQ ID NO: 923898 - protein, 149 aa, Homo sapiens [sequence omitted]

SEQ ID NO: 923899 - protein, 125 aa, Homo sapiens
MNGWVEEWMTENEWKGDSIPQRYEKPEAECDLPKVTHGLLTTHLPFTTMSDLTEPDMMGAKLSQQCRCRVSAVGLDRNRLCPHVEPTDGLVGSWAGLTSLFQRLSWKNVTLNGSGHCIDPNPRQA

SEQ ID NO: 923900 - protein, 147 aa, Homo sapiens
MLERPCGLLWPTHRATKPVAPRFFKKEHTNTFEEGNAKKALAIDGARGRGISSEEHSAEWHCGAWHGPGEHCLGGTLTGPAVGRSKPMGMLSHFLLFLEVPVQIPPIVLRYGVPGCYLLQAYCVCSVHRSGSVPTPEVHLRVKLLII

SEQ ID NO: 923901 - protein, 122 aa, Homo sapiens
MKIVPYVGLTFQLPSSQDLILNEVQENMLDSLSQVTWLSVVVASCKISGIGEAMHTSGIEHGRKVKALVAKHCPLDFLSPCLLPVPVSSPLHISPCHGTQRTSPRPWQPFAVICTVGGDGGH

SEQ ID NO: 923902 - protein, 159 aa, Homo sapiens
MPRGSHIDGSPGDTKGLQRHLAVGGGGGADLISPQKPATGVRTCGLNLRPPGREEALGLSPVSHAFGMKLCMETLERQGWRAPGCLECHHSSKRGPSVFQGAPPVSLFESPPHSGTLQSALVRLMQTPVGKQEVLNECWLVIERASWMATDLLIRTPPS

SEQ ID NO: 923903 - protein, 145 aa, Homo sapiens
MPPTQRLTCPLLLEQRGSISWLWGWEKGLGALNGVSLEFDDSVSSTPLTSCLKRHRCPWFLSCSVALGVSAGFSGLLSSGGTHFLELCLRQWLVPVCPHHPGLLNRGRRATSVEAESHWAWGPPRPLDHFLFVTFERKFVGNIGE

SEQ ID NO: 923904 - protein, 127 aa, Homo sapiens
MLKTAQNELCPRVPGRTYSPAGTVILALWALGWTWDCRTVSPRAALRMQATGAHTSTLCIDGACQIWPTAYFCRRRFMGTQTPPSKDNKMRREESFQQRELGMLEAHMQKKAVDFNTLSPKLTQNGP

SEQ ID NO: 923905 - protein, 119 aa, Homo sapiens
MPAGSGHLVVDIGSEKFTHVFLTLTPDRDLPTCCSAGVVCRSTHEPTLARTGFYRTLIASPELLLERRFANRRGDNLTQIFRDLCNDSPIRTCQMGPYSFSDNAGQCKRLGLVLNKVIV

SEQ ID NO: 923906 - protein, 315 aa, Homo sapiens [sequence omitted]

SEQ ID NO: 923907 - protein, 240 aa, Homo sapiens
MAAVGPRTGPGTGAEALALAAELQGEATCSICLELFREPVSVECGHSFCRACIGRCWERPGAGSVGAATRAPSFPLPCPQCREPARPSQLRPNRQLAAVATLLRRFSLPAAAPGEHGSQAAAARAAAARCGQHGEPFKLYCQDDGRAICVVCDRAREHREHAVLPLDEAVQEAKILGRLRDVPHGLGDVLPVCSEPLAWSASPQLSARGKSPAQPRSRCPHSYLFPRSGLCSKSPPRGTE

SEQ ID NO: 923908 - protein, 271 aa, Homo sapiens
MLGVEGHKHPCGYHYYDCTGLNLKSALHLVSPKAYTRGELPQALSWSRSAFQESEEAVDSPLAQGRSKNAIQPSSPGIRDPKSLFGSLTPVAVLEPKDWQWAPRWIRSTADTLLDLEGWKSAEGLRQRPTALVDGYNAIMHTKKFIFNVHGVIDREQSMQGNVQYSGFRYTQREKSSYRETNGNHYQGAFNNPLTFRKAKSEGRSETFTAALPITGPEVRREKFCPGPGSGPSCFVQNSVPCVPATAAPDMAKRGQGTAPDIASEDAIPKP

SEQ ID NO: 923909 - protein, 160 aa, Homo sapiens
MGQAGKRNLRIMNMKESDKNQAHAGLKSRGFKSSKMISFDSRSHIQVTLMQEVSSHGLGQLRHVALQGRVSLPDAFTGWHLVSAAFPGAWCKLLVDLPFWGLEDGGPLITAPLGGAPIGTLCGGSDPTFPFHTTLAEVLHECPIPKVNFCLGIQAFLYIF

SEQ ID NO: 923910 - protein, 161 aa, Homo sapiens
MGGLLAHCHLSSSHGLPSFTVSVQISSFHKDTNHIELGSTLNLMLISSGSCPQGDPSETSQKWLSGGPTGLLQLPPLPRISLGSPNCLTSSLALTVFGCLLGPAGTICFLQRVCGFSCLSWFISAVVLGAEVHNVSLHILLCLSQWELRFSPASYLPFFCY

SEQ ID NO: 923911 - protein, 156 aa, Homo sapiens
MALSKSLGPQGFILVEQLSYIGKVLGTAVSGKGYALKCVLTAKAQTYSSSYCWVSWTSMSETITSRSPSNVIAKSETYREMGIKSSHHSRCYKAFPSRCYRFYSPGHLQVEEQGSQSWLSPSPKTSKAGKPIAQPPVCGQRPESPWQITGACVTPL

SEQ ID NO: 923912 - protein, 178 aa, Homo sapiens
MAESNSPRHRFHTVESLSVDLDVMIINTVITESQRLREQKITFGKQSDDTVDPMAMISFKEISKLSSDSDVLAGRIASSKAKWPVATVARARATSTAIASSITTAIPTAVASSIATARARAIATAVARAIATAIAGAIATAITRAIATAIAGAIATAITRAIATAIAGAIATGVATFI

SEQ ID NO: 923913 - protein, 141 aa, Homo sapiens [sequence omitted]

SEQ ID NO: 923914 - protein, 139 aa, Homo sapiens
MGQDTARALASEAASPKPWQLPHGVEPVGAQKSRIEGIDAEVRKGERGIEGGGAACSQLNTDGLLLRIMSPGERDSEIKKYLKVRKMASVIQLPSENKVEIHPEVKTQLVRCLKIKKQTKLTVEQQTQRDFGDLETGSL

SEQ ID NO: 923915 - protein, 149 aa, Homo sapiens
MVTKNNFNAQTFVKIIEVSHCDSKKTTTAPAVVSMPACGAADTTTDLKKFSFHCNHHLHGWSVGMGGDAVDNRNARGTGPGNPDWFPWIQELPCLEGLSHQMCLNLFSLKKDECSLKNMRGSIFRKMSIHMLVYKTYMIRFYPVLVILQ

SEQ ID NO: 923916 - protein, 156 aa, Homo sapiens
MTQCPLLKFLCPALNNCSSCCLLDQERVGPVHIQVPKTGHSTIALGLRCILNHKLPWLLVPPITAYLDFLAGAAHSIGFIALPEWFVGQPGSSSLPHQRGLPEWPESCLYNPIKVRTCTQPNPIYSCHLGGRTPGNNIEPHSPSIARDTLILPPIN

SEQ ID NO: 923917 - protein, 143 aa, Homo sapiens
MQVIKNLLTKQVAFSEGVGCSPIGVSSIDLHSTLLSLWMQPRGARTCQWFILQMLRLCSGCGGGSKGLSDCRTALRWSRLHSWAVKIALCTCSYGVAWQGPEEGLAGKGTCRTNVSQSCGEVDPAISPVFSWDLSLSERNRQP

SEQ ID NO: 923918 - protein, 153 aa, Homo sapiens
MDNEIQGEVVSDGDEGLVDNWSKSDSCCVLAKRLVAFCPGARDLWNFKLEGDDLGYLAEEISKQQSIQEETWVPLRTFSFKRVTEHKSSKNLQPDNVIENGSVEGKCWVEAPTRVPTVALPSGAVRKGPPSSRPQNARSTTSLHCVPGKAADT

SEQ ID NO: 923919 - protein, 151 aa, Homo sapiens
MNQVPQLGMQKSPFDLRKSIYAIHHINRIKIKNHMIISIDAEKASHKIQHHFMLKTLSKVGIQGTYLNVIKAIYDKPTINIILNGEKLTAFPLRTGTRQGCPLSPLLFNIVLWVMGLYREAALQYLNLHPKLILAGSSSTLIWKIPGSYKI

SEQ ID NO: 923920 - protein, 171 aa, Homo sapiens
MTFQGSWPPHPNILIMQMQSLLGWSHVARSLLYVWLAKRREDGAAILDMASSRDEADLIVVDKLFDMLLDSVCQYFIEDFHIDLPCIGLEHAPLARRRELEHCSGRSTALFSAGRRECLNLLKLCPPPPLPPGALSQGNGSFIYKPLSGAAAFLSEMPCPERRNPERRFRV

SEQ ID NO: 923921 - protein, 139 aa, Homo sapiens
MLPDHSSSPAMEQSWIENDFDKLTEVGFRKSIITNFSELKEDVRTHCKEAKNLEKRLDECLTRINSVEKTLNDLMELKTMARELCDACTSFNSRFDQVEERVSVIEDQINEIKKRSLEKKEKCKEHHQDTPREKQPQDI

SEQ ID NO: 923922 - protein, 139 aa, Homo sapiens
MCSLNTSCSHPGAQRGVSTPAVKSKERGQRSGGMGERYPSLQEVEARLEVAPNSMDSGGRKCGKKGSKLVAAKFDAGPAPSGHITRSTPHSPFNTLRRDKEKAVPGKAVITFIDEPRASIHGTLRIYLFYFSNRFPNIE

SEQ ID NO: 923923 - protein, 162 aa, Homo sapiens
MRNPRTQRYAKPGNGNAKTIPKQGQDLGTECAQMHGEELTQFSRAKRNPRKAMGIFHRHLPQEINHMKCEEVMIQDTGNLQGTWKEEFNRAGELEAIKTKRLEYGKWRGSLSSPRSQQASGDSVTSIPSCCRTVRLNPLAFRGHRGSSERAFDLTCKGIPTG

SEQ ID NO: 923924 - protein, 147 aa, Homo sapiens
MLNKSGNPCLVSVLRGKTKSFIFSPVHGDRGHQVGQLSVLGGVHARNGSSAGCESGTASGPGSVPAGFPALGEASLLCCTACSLRYRALCGLRCWGYSCTTGSSCGCGIAAYCMSVMGRGKCSREVEMQRLLGPREGCTVAVTLFSK

SEQ ID NO: 923925 - protein, 152 aa, Homo sapiens
MELTGIAEVVPSAAAVVVTTSDVTPVVMKVTVEQEATLNKSSQCQFMSSKLASPHKVFQWTPSMMSDEAPSPGSFGSSLMPFSRVFITGRSSVWLQTPYSQGLLTANPGLFPGLSQLSVRSGDPELICTDDSGKQANSCRGLYLSVGMFPLF

SEQ ID NO: 923926 - protein, 134 aa, Homo sapiens
MPSLLYMVHFDGRVELNFMIHYFTRKNEEAGRARAERAAGKAAEKSSEMQEMVVGAMDKADESSCVPDTLDIDGSLGEPMWRVRKGAKTNRWSMKLRGWSLNRGEIKELCPCLLKHLQFIAMKGKQQRRLKRNS

SEQ ID NO: 923927 - protein, 148 aa, Homo sapiens
MVLSLRQNVSLGLHSRSQQDHEPTGRGKHLLKSCNTHREVRGFILEVGEAKKKLRTHLKKPSPDTMGSKKSVTIFKLESSERSTCSKPDCKAVNAEKKGRASKLLRAESPESSSLLEVRPENRKEMTELSMPSSFSQLLRQILGQFVT

SEQ ID NO: 923928 - protein, 137 aa, Homo sapiens
MHFYFMTFFSLGGINFTLAWDNKPWKFNRIYFRNTVLNVYRGRDMVPTTRHILLDLLLLKTNNKLILQSVFEGFFLLNERLLCTPLMQVKATTMGQCWISEKCDVGVYGNAGNNHDSSSKTDLLCGVEEKSGLESET

SEQ ID NO: 923929 - protein, 143 aa, Homo sapiens
MFRQPLLMSLLIAHQSADIVGCNEQQGRRDHQGNDGCRRAPGVSTLKAELAKYECGPCPEGWRTRQVPKQSCVNSHDLGGFSLHVASHESTGACLWNPGKLPPVNTAFTQAQLYCASRTVVSNQPEIPGPLPGAAFTQQVYEG

SEQ ID NO: 923930 - protein, 140 aa, Homo sapiens
MGGPRRVTTNSHSRQRKWQHSPQPSGAPWPEGEALLGTLPPSAQDSIFLLLPFMVLGLGSNPAPRSEWVWGVERGQAVRADTPEPAGTGAAGAAAAATPGRADPTCSQLSQEYREARIHCCILGGCSPAQEGGASACSVE

SEQ ID NO: 923931 - protein, 150 aa, Homo sapiens
MRFERGQISKLCQLVMFQSLCVELNAVCKAGWEVVEEKMVIIRDKSAPTFFPTLDPEKVESLSLEISRDSLIMLRIKFHLVHAEKLGIIEESRAIRHETLGRLSSLKSLASLNITVPLACLFHFPEDCGFCGSKPAGPVKASRRGERTRE

SEQ ID NO: 923932 - protein, 208 aa, Homo sapiens
MSKKLPEASQEEKQMPVASFYSLQICFGFLHSSILDGEFSQAPGRSRDAVWEPGIAVKTLQEVYLVSYSTVTRLAPKPQDKILHTLPSPFHKQRGLSLWPLPPLTHGEFCQTTTSVHLRPKGSSVSCDKCCQAWNSPLRVVKSPLAQCRSRNAIQEPGPGDPKSPLVLYTMAKLIPEAGMSESHSRSTAYCLCIAVGYSGPMGSLVSR

SEQ ID NO: 923933 - protein, 140 aa, Homo sapiens
MECNGMEWIQLERNQMERNGMEWNGMEWNGMEWNGVEWNGINGMEWNGMDRNGMERNGMEWNGREWNGINPSGKEWNGKEWNGMEKNGMQWNAMVWNGVNPSGMECNGIDCNGMEWNGMEWNGMEWNGIKTGGNEWNGME

SEQ ID NO: 923934 - protein, 231 aa, Homo sapiens
MEWNETTWNGMEWSEINPSGMQWNGMECNGMEWNGMEWNGIKPSRMERNAMEWKGMQWNGMEWNGINRIGMEWNGMDWNKHEWNGMEWNGMEWNRMESTRVERNGMERNGIERKGMECNGMQWYGMESTRVEGNGMEWNKMEWNGMQRNGVEWNKHQWNGMQWNAVEWNKHQWNGMEWKGMEWNGMDRNGMKWNGMEWNGMEWTGMEWNGMKWNGMQWNGMEWNGQECNVM

SEQ ID NO: 923935 - protein, 226 aa, Homo sapiens
MDWNRVEWKGTAWNAMESIRMEWNGMEWTGMEWKGMEWNGMEWNGMESTRLDWNGMQWNGMESTRKETNGTEWNGMEWNRIEWNQLEWKGKERNGMEWKGKAWNAMEFNGMEWSQPEWNVLEWNGIKWNGMEFNGMEWNGINTSGMECNLMDWNGMEWNGMDRNGMEWKEINLIGMEWKAMEWNGINWKGMKWNGMEWNGMEWNGMEWNGINSSGMQWNEMEWNGM

SEQ ID NO: 923936 - protein, 142 aa, Homo sapiens
MGKKQNRKTGNSKKQSASPPPKECSSSTATEQSWMENDFDELREEGFRRSNYSELPQSSKASQHSDSGNTENATKILLEDSNSKTHNSKLSFISEGEIKYFTDKQMLSDFVTTRPALKELLKEALNMERQNRYQPLQKHAKL

SEQ ID NO: 923937 - protein, 1716 aa, Homo sapiens
MERMECNGMGWSQPEWNGMELNGMKWNGMECNGMERNGINTSGMEWNAMECNGMEWSQPEWNGMEWNGMKWNGMAWNGLEWNGINTSGMEWNGMEWKGMEENGMESTRVERNGMERNGMEWKGMEYNGMQWYGMESTRVEWNAMESNAMEWNGTEWNKHQWNGMEWNGINPSAMEWKGMEWNEMNTSGMEWNGMEWNGREWNGINPSGKEWNGKEWNGIEWNGQEWNGMEWNGMKWNEHEWNGMEWNGMEWKWNGMEWKGMEWNGMESTRAECNGMEWNRMEWNGINPSGMDWNGVEWNGMAWNAMESTRMEWNGMDWNGIERYQPEWNGMNGMDWYGMDSNGMEWNGMEWNGMEWNGLEWNGINSSGKQWNGKEWNGMEWNGLEWNGMEWNGIEWNGLERNGMEGNQPDWNGIESNGREWNQLERNEMEWNGMEWNGMELTRGEWNGMEWNGMEWNGMEWNGINPSGMQWNGMEWNGINPRLECNGMDWNQPDYNPTEWNGMEWNVKEWNGMERNGKNWNGMEFNGMEWNQPEWSGMEWKGNEWNGMEWNGTERNGIGMEWNGMEWNRVEWNQLEWKGMEWKGMEWKGKEWNAMECNGMEWSQPEWNGMEWNRMKWNGMECNGMQWYGMESTRVECNEWNGMEWNGMEWNEQEWNGMEWNGVEWTRMEWNGMNSTRLELNGMQWNGMEWNQLERNQMERNGMESYGMEWNGMEWNGMEWNGREWNGINPSGMEWNGMDYNGMEWNHTGWNGIELKGVEWNGMEFNVMETNRNVMDWNEINPIGMEWNAMECNGINWKGIKSNGMEWNGMEWNGMESTPVEWNGMEWIIMEWNGINPGGMEWNGMDYNGMEWNQSGWNGMEWNGMEFNVMETNRVECNGRERTGMKWNGLESTLFQCNGMQWNGMEWKGMEWNGMQRNGMNWNEMEWNGIMQWNGVESTRVEWNGMDCNDMEWNGIEWNQTEWNGMEWNGNEWNGINPSGMDWNGMEWNQPEWNGMEWNGINPSAMEWNGKEWNGMEWNRMEWNQSEWKRMKWKGMEWNGKNGMQWYGMESTRVEWNGIEWNEMEWNGMQWNGVEWNKHQWNGMECNGMEWYGMESTRVEWNGMEWNEMEWNGMEWIGVEWNKHQWNGMEWNGMERNGREWNGINPSGKEWNGKEWNGMERNGIQWNAMNAMEWNGTEWNKHQWNGMKWNGINPSAMEWKGMEWNEMNTSGMEWNGMEWNGMEENGMESTRWNGTEGNGMERNGKQWIGMNRMEWNGMERNGMEWNGINSSGMKCNGMEWNGMEWNGMEWNGINRSRMEWNGMERNGMEWNGMEWNQPEWNGMEWNGMEWNGIEWNQFECNCNGMEWNGMNGMEWNGMETTGMEWKGNNPSGMEGNGMEWNGMELNGMEWNGMEWKEPDSNGMEGNGVKWNGREWSEMEWTEWNGMEWNAMERNGMECNGMESTRVEWNGREWNGKEWKAMDWNEPNGMEWNGNESNGMESTRSGMEWNGMEWNELEWNGMEWNGMEWNRMESTRVERNGMERNGIEWKGMECNGMQWYGMESTRVEGNGMEWNKMEWNGMQRNGVEWNKHQWNGMQWNAVEWNKHQWNGMEWKGMEWNGMEWNGMDRNGMKWNGMEWNGMEWTGMEWNGMKWNGMQWNGMEWNGQECNNGMEWNEINTIEMEWNAMEWNGINRKGMKCNGMVWNGMEWNGINPSGMERKGMEWKGMESNGLESTE

SEQ ID NO: 923938 - protein, 136 aa, Homo sapiens
MPRASQVIGVICKEARTEVAVNPYGFAAGNSDTFHWDSWNQVTCGQDSFPSCLHPRVDFTISDSFPPEYGVWDTQRQQFSSLHYSSFITFHGCNLKNWEKSSSRLSSCEVSFFGPITSYSIVKLQELGFSGPSQCA

SEQ ID NO: 923939 - protein, 243 aa, Homo sapiens
MVSTRISGRLRRLLSTPGVPWDHHRKQKSWNWFQANRPTNAPKPEGSGVVTEPFSGQPDTCVFSPVAVLIAFKWPTDEKDEPIEIPSEDDGTVLLSMVTAQFPGVCGLRYRNPVSQCMRGVRLVEGILHAPDAGWEIWYELRQFFCQYGEVVDVVILKPFRTFAFVTFADDQVAQSFCGEDLIIKGISIHISNAEPKHNSNRQKEVEDLVVIQVALGIRVNVVIVEGVELFWETIKVVIWVVG

SEQ ID NO: 923940 - protein, 170 aa, Homo sapiens
MINLSSIVNDTFPALYLYSLSVLHLLPSEGFCISKNHTAPPGPANQELTQPVLFGYNSSLGKRDSRCKGQTTRKLRWHLTERFCVLGHLPNPPVKVIGGERKRGVKWEEGMKTLLCKSELVPLAKGKGCSVLGPLQCLPASSPYRVRHPFLFETNLEEKKMHYSELQAVI

SEQ ID NO: 923941 - protein, 165 aa, Homo sapiens
MKTMGMKTFKIHFNATNKESAGPVVQRLLYAGLLWWCPSNKAGSQTGKMSTLSAASRTQCAAQGSTEGRHQVPTDHLWIRRLGLPKQLLGVVKPITLSGDLAELMKTTEKSVEVTKASLENENYRYFDILLFYKVISTSNSSTSYSTFKTDFKSVDFVAANTAQS

SEQ ID NO: 923942 - protein, 179 aa, Homo sapiens
MGKSPGSTSGFYSYLMAGGGGLLITAGWGWEFQLFTRSPTLPSQLGGIRVPHYCSPHGVYVPLLLGESGPSSGGLLEFSGGPLQTLFAWVSAVVAAEQWILVNRKCCCLIIPLEVSYQRSTRPFEVSVHPYCFFAGGERLDQGQASTPTPPQDAQCIVSKAKNEIDVLFHKMPFLFFTP

SEQ ID NO: 923943 - protein, 175 aa, Homo sapiens
MGATIQDEIWVDSANWLHFQKILECQCSAHNSWTECSNYGGLVTGSDFVLWLPEVRNTLYCWCQGPLLATVHPVLLLVVLVQSWGAGGFRSVCAFCVPQIPPHQTLWAPYQLACCPYHFSKQLSLPSQVSMVIERSPPAVVPEACGKSGRASHKDRGHEQRSVTGEKTCFGLHEF

SEQ ID NO: 923944 - protein, 184 aa, Homo sapiens
MTADSGPSKSIRGTQVMAPPGPILEITLVGKIPQSPGEEYKEAVKQPFGGEICVTKRELSANRQDNGTKALKAFQKHFRLPFPSQEGSEENRKMWESLELPRDLLNGFNQNTDNDMDNEIQAEVASDGDEELVGNWSKDDSCYVLVKRLVAFCPCPRDLRKFELERDHLGYLAEDISKQHKFKR

SEQ ID NO: 923945 - protein, 213 aa, Homo sapiens
MGFAAGVPGHFRYNTDVRLCLARRESELKPKKLDSVVLAFVQIFCALKAAEIGINKKKPSDNIKDNGQKALKPLQRPSQQPLPHSPRGQGGKNGFMGWTKGPATLCNLRKVLLHPGCSSSSHDSKGPRLQNGRFTGSLHLSPGKAPGIQRQPMRAAVATVPCKATGAKLPKVIGTHCLPKCALNKGPLTRKQIKEEERDAEKMEDVMGVYKAY

SEQ ID NO: 923946 - protein, 144 aa, Homo sapiens
MAWINIFLVNPEGTVLKRPLTQGNRLQHQLADFGKVVGYPSKEWDWEQLQPPSHGSGPRHLCVLGDPGSPCPLRLKSACSHSLASPSSWHPLWGKAKLWLSLATVVIQLGVCALRMVLTCQPPAALVFSRLWILTNTGGRLRRG

SEQ ID NO: 923947 - protein, 313 aa, Homo sapiens
MNNKVQAEMVSDRDEELVGNWSKGDSCYALAKRLVVFCPCPRDLWNFELQRDDLGYLVEEISKEQSIQEVTWVLLIKVFSFIKEAEHKSLDNLKPDNVIEKKSPFSGEKFKPAPEICISSKKPNVNPQDHEETVSRPYQRPSLQPLPSQAWRPWRKKWFHGQGPGSPCCVQPRNLVPCIPAAPAMAERGQCTAQAVASEDGSPKPWQLPYGVEPVGAQNSRIEVWEPPPRLQRVFGNSWMPRQKFAAGMGPSWQTSARAVQKGNVGVPTRAPPQHHLVELWAVGHGPPDPRMVDPPTACAVQLEKPQTLNASA

SEQ ID NO: 923948 - protein, 142 aa, Homo sapiens [sequence omitted]

SEQ ID NO: 923949 - protein, 143 aa, Homo sapiens
MVGAEGPSHPSDRATACPRRPQRRSRESWESLVSLPEGRKWGFVRGMVQQPPHLLLRVAGEVWSGSPGPGGAPHTCVLKDPHQDNGHRRAPAAALASSETGREPSQIARFLPPPACPHREGCMQVSSKQGGFGGAGGCFERHP

SEQ ID NO: 923950 - protein, 133 aa, Homo sapiens
MNNFPGPKIVHLLLFHRWAENVATNKPGVGGGISNRDKCVIEMEDSWREENRNRQDVHGQQEVAVIPAKHVFSFVKRGLERTRTPDVIKSHPLTSVGIPCAYFWVLWRNGRFNIRDKFGTSCHISQQRNCQRR

SEQ ID NO: 923951 - protein, 1407 aa, Homo sapiens
MEWNGLKWIRNEKNVMESNGMELNVLESSRTELNGMASNGMETKGMELNGLKCYGIKGNGLKENGLKRNGLEWNLFEYNLIEWNAIVWNGMESNRSERNRMQWNRIDSNVMDSYVIDSNGMESNGMQSNGMECNAMEWNRMECSGREWSGMKWNGMEWNGIERNGMESNGMDWNGMDSNGIEWNNMECGMESNGMESNGVKWNGMDAKGMDWNKMKSNEWKAMEWNALDSSAMESIGMESNGMIWHGMDSNGMDWNKMQWNRDSNGMQWNGNGMDLNGIESNGMESNGMNGMQWNGIEWNAMECNGVEMSGMESNGMESNGMDWNGMDSNGMDGMEWNGMELKGMEWNRMEWTGMEWIRMESNGTIWNGTEWNGMEWNGMEWNGTEWNGTERNGTEWNGMERNGMEWNGMDSNGMKPSGMESNGMELNGNEKSNGMASNGMDSNGMCSNGMESNGLISNGMEWKGMEWKGIVPNVIDLNGMESYRMDSKAIELNRTECNEMERCGIEWNGIEWSEMEWNGRERNGLEQNNGMDRYGKTSNGMELTRMEWTGREWTRMEWTGMEWIERNGLERNGLEWKGNEWNGMEWNGLKWIRNEKNHGMESNGMESNGLERNRMERNRIDSNVMDCYVIDSNGMESNGMQSKGMECNAMEWNRMKCSGREWSGIKWNGMEWNGIERNGMESNGMDWNGWIQMESNGTIWNDIEWNGMERNGMEWNGMERNGMEWNGMEGNGMEQNGMELKGMERNGMEWNGMEWNGMDSNGMKPSGMESNGMELNGNESNRMEWSGMECSGHKWNGLEWNGHEWNGLEMECNEMERSGIEWNGIEWNGIEWSEMEWNGRERNGLEQNEIERIECNGIEWNGMESNRMDLNGIEWNGMAPNGMEWNGMEWKGMECSQIYWTQMEWSQIEWTRKEWSRLEFIRKQWNRMECNNGIQWNVQEWNGNKGNGIEWNRPELNGLEQKYGMESNGMESNGLERNRMEQNRIDSNGMVPNGMEWNRMEWNGMEQNGMELKGMERNGMEWNGMEWNGMDSNGMKPSGMESNGMELNGNEKSNGMASNGMDSNGMCSNGMESNGLISNGMEWKGMEWKGIVPNVKDLNGMESYRMDSKNGMDRYGKTSNGMELTRMEWTGREWTRMEWTGMEWIERNGLERNGLEWKGNEWNGMEWNGLKWIRNEKNHGMESNGMESNGLERNRMERNRIDSNVMDCYVTDSNGMESNGMQSKGMECNAMEWNRMKCSGREWSGIKWNGMEWNGIERNGMESNGMDWNGWIQMESNGTIWNVTEWNGMEWNGTEWNGMERNGMEQNGMEMKGMEWNGMEWNGLEWNGHEWNGLDGMESNGMESNGVKWNGMDAKGMDWNKMKSNEWNGLEWNGLNGMHWRGMDSNGKDWSGLYSNGMETNGMEWK

SEQ ID NO: 923952 - protein, 142 aa, Homo sapiens
MQKVPPSLSPLFFHCTSFPHHIPLPRKKNSNVQGTAGAQTVAILASSRRLLCPLARIPEHGLDSSVGPLVLPDSHTEKEQQEYTDKYSTYKVGPGLNSQLSDGINLCFDPVSWKHYFCRIYDGTLQIPLRTVVKKLISHDKN

SEQ ID NO: 923953 - protein, 134 aa, Homo sapiens
MAVGAQDQAVGSSSIQGPQRGPSKWNTQRRHGKRPRREARRNAVPFIRGCSIQGTILGAETRPLPDTKPASTLILDFPAPRTIRNKFLFFKIIQSLLFCYSSTKETTTKKKGKKSWVGEVLKFGSVAGQAALRR

SEQ ID NO: 923954 - protein, 195 aa, Homo sapiens
MTIPLASTPGAAFHMTVPLASTAGAVSTLPYRQPPLLEHFLHYPTASLHTWSSFYSTLPPASTPGAVSTLPYRQPPHLEQFLLYPTASLHTWSSFYSTLPPASTPGAVSTLPYCQPPHLEQFPLYPTTSLHTWSSFYTPLLPASTPGAVSTLPYCQPPHLEQFPLYPTASLHTWSTFYTTLRPASTPLTYLTICL

SEQ ID NO: 923955 - protein, 167 aa, Homo sapiens
MERSAGGLALLGDPVHPPQPLAWVLSPSLLGASRSGWLLRVRGPPSPRPPGTPAGPQAPPAAPVPARASPSTPPCKLKEWAPALARKWLPQCSGGLKGSSNAAKVGAQAGEVPRASEGSEDCQHAVTSHYENALKCNRRRCEDTKNKCVVTHGYQNTLKNPHCFPSI

SEQ ID NO: 923956 - protein, 137 aa, Homo sapiens
MLTDSFPGNCVPIPILNIVNTPADTGHWRSRPPFALVKGNFPEREGFSHRFQDIYPPPAPCLPMPTVVGASDNQNAPTRFQILPKKVRALPLWLTQSQIKGFTGCLRAYVTWNLITLRSQLQQRLENLVLSFPASSC

SEQ ID NO: 923957 - protein, 160 aa, Homo sapiens
MFGECAKEWTGLSLPPVQPAFIPLSGPTHILLIGPFYRELIGPFYRELIGSELFPRRKAAETGENLRAARAGGSAGGPGTPFTAAGPGAKALTARRSAALRAGPAEPVPTRNFRWPASAMDSPSSCLCLFLHTSRKQGEPAPALASPERGSHSAFLWVPP

SEQ ID NO: 923958 - protein, 169 aa, Homo sapiens
MKSGFYMTTGDDQLSGWTEKFQSPSHSQICTKKKVMFTFWWSAAGLIYHNCLNPGETIIPEKYAQQIIGTGQHKGPGSSPQQCLTTCCTTNASKVERIGLQSFAFSAIFTLPPSNQLPLLQACRQLFAGKILPQPAGCRKCFPRVCRIPKHIFLCYRNKQTNFLLAKMC

SEQ ID NO: 923959 - protein, 135 aa, Homo sapiens
MVQQVKESAGMDWESERHPMLKATQGSKYSQTQSVHSVSSVNHQDSVLGIMLSGGLRGEILHKPFMFPCPCNQARFVKPIRPVQDPWKWRLTDFLQQLNGVNHPTSFCSATTAHSIFILCNSSQLKDHTQLTQLK

SEQ ID NO: 923960 - protein, 175 aa, Homo sapiens
MERKSPTAFWYSLARKASSPSSKRWAIGFPQQQPGHWGGGGTGSVLIPAGLRPCGPGAKARSRGDELLLGTGRRERRHSLRLQNQKNGFKNLFFFFNYTLSFRVHVHIVQVSYICIHVPCGCAAPTNSSSSIRYISQCYPSPLPPPHHIPQSVIFPFLCPCDLIVQFPPMSENMR

SEQ ID NO: 923961 - protein, 190 aa, Homo sapiens
MPSAQSPWLHSSQCPRPRTLGAGKGRACSSHLHRVRAAALEATPDHAPTPARRIPGPDAAQRLIQVVRPQLQEGGNRPLSHFLGAALYPVPAHPALGSGKKELTLGCSGNLHKARSSSCGKLRPCQCHQQCGPLGQKPPQRLSQGVGPQLQEGRNWHSAPPQRLHGAQSQGPALLAQVVEGPGATQAGGQ

SEQ ID NO: 923962 - protein, 150 aa, Homo sapiens
MSGFHFSLVPTSSISLGSLHVALGLQVHRNQELRYENLHIDFREFVEMSGCPGRGVLQGQSPHGKLLLAQSGRELWSQAPSGALPGGAVRRGPPSSRLQNGRSTDNMHHAPGKAADTQCQLMKAARKGAVPCKDTEAELPKVMGAYLLHQ

SEQ ID NO: 923963 - protein, 1676 aa, Homo sapiens
MRHFWVTLLKTDTESIEEKNSSQDKHSDPRSSVPESYVRDKNSEPSSSVLEFCVSDKHSELRSSVLEFYVRDKHSKPRSSVLESNVRYKHSEPSSSVLESYVREKQSELSSRSSVLEPYVRDKHSEPSSSVLESYVMDKHPEPIHCLLESYLRDKHSDTRRSVLESYVRDKHSATRRSALKSFVRDKQTESSSRVPESFLREKHSDPLSSVLESYVRDIQTLIAVFWKPMDKHSEMSYSVLEFYVRNKPSVPSGSVLESYVRDKHSEQSSSVLESSVKDKHSDPSSSVLIPYVRDKHSEPSHCALKSYLKDKHSEPRRIVLESYVRDKHSETYSSVLESFVMDKQTEPSSSVLESYLTDKHSELRSSVLESFVRDKHSEPSSSVLELYVRDKHSEPSSCVLESYCSGILCEGQTLRSSSSVLKSFVMDKNSDRRSRFLESKVRDKHSEPSSSVLESYVRDKHSEPSSSVLEYSVREKHSDPRSNVLESYMRGKHSEPSNSVLESFVREKLSDPRSSVLESYVRDKHSEPSSSVLESCVSVKHSEPSSIVLESCLSDKHSELRTCVLECYVRDKHRTEQQCSGILCEGETLGTQQQCSGILWTNIQTLSSVLESYVREKHSDRRSIVVEFYIWDKHSEPSSSALESYVREKHPEPSRIVLECYVWDKHSEPSSSALESYVREKHPEPSRIVLECYVWDKHSEPSSREPSSSVLESFEREKHSDPWSSVLESYVMDKHSEPSSNILDSFVMDKHSDPSSSVLQSYVGDKHSEPSSCVLESHVRDKLSEPSSSVLSVLESYVREKLSETCSSALESLVRDKQTQLSSSVLESFERQKYSDPRSSVLESYVRDKHSEPSSSILESYVGDKHNPATDSSVLESYVWDKHSEPSSNVLESFVRVKHSDSQSSVLESYVRDKHSDPHSTILECSVRNKYSDPHSSVLESYVRDKHSDNHSSVPETNVRAKHSEPSSSVLEYLVRDEHSDNLSSVLESKVMEKHSETSCSVLEFYVRDKHSEPSSSVLESLVNDKRSDPRSSVLDWFVRYKHSDPQSSVVESYLRDKHSSHSHCVLESYLKDKHSEPLRSVLESYVRDKHSETSSSALESFVRDKQTEPSSCVLESDLMDKHSEPSSSVLESFVRDKHSEPSSSVLESYVKDKHSEPSSSVLQSFVRVKHSDAQNNPDSPVLQCSVRVKHSEPRSSVLKYYVRYKASELSSSVLESYVSDKHSETSSNVLESFVRDKHLDSQSSVLLSYVRDTQIQQHCSRIFCDGQTLRDKQTETSSSVLEAFVREEHSDPRSSVLESYVRDNHSEASSTVLESYVKDKYSEPRINGFLKSRSSTLESYMRYKHEKPSSSVLESYVRDKHSEPSNSDLESYMRDKHSDPRSSVLESFVRDKQSGPSSFVLESYGIDEHSEPSISVLESFVRDKQSGHSSSVLESYVRDKRSDPRISVLESYGRDLQTEPSDSVLQSFVREKHSDPQPSSSVLESFGRDKHSDPLSSVLESYVRDKHSEPSSSVLESYLKENIRNLLEVFWNPMSSVLESYVKDQQSEPSSSVLESYVRDKNSDTRSSDTECFLKEKHADPHSSVLKSYVRDKHSEASSSVLESFVDNPSDPSSSFLETYVRNKHSEPSSSVLESNVRDKHSETSSSVLESYVRDKHSEPSRIFLKSFVRDKLS

SEQ ID NO: 923964 - protein, 376 aa, Homo sapiens
MQPDLVTCLEQRKKPWSMKHPGLTIPERIHTKERPYKCEECDKAFKQSSRLNKHKKIYTGDTTYKFEESGKAFYYSSGLTQHNIVHTGDKPYKCKDCGKIFKWSSKLTIHQRIHSGEKPYKCEECGKAFKQSSKLNEHMKAHTGEKFYKCEECGKAFKQPSGLTLHKRIHTGENPYKFEECGKAFYWFLSFTKHMIIHRGEKPYKCQECGKAFKWSSNLTIHKRIHTGEKPCKCEECGKACKQSLGLTIQKRIHTEEKPYKCEECEKHYKCQECGKAFKKSLDLNVHKIIHSGEKPYRYEECGKFILKRLYKCEECGKAFKWSSELTIHQRIRTEEKPYKCEECVRVFKHSSKLNEHKRNHTGEKPYKCEACGKAF

SEQ ID NO: 923965 - protein, 164 aa, Homo sapiens
MAVEETPRVSRRPGPLRIVTGALTPRQVSPPGRASADDPLGTSSSPSCGAGSALPGPNFTGLCRGPGVPDFTGLCSGPGVPDFTGLCRGPGALVASDSHGLFMATPALGKLHHEGRSWRPKVNLSELSANDLRQVVLRSVPLPDLSAEMKQVPGQGVSWRTRHT

SEQ ID NO: 923966 - protein, 221 aa, Homo sapiens
MRFEHPNINGLPAAGNRRRVGHRAGRGWVQSRNPVGQSPGPRGSYALETLNGGLLSRLDVVLPVRKLCHTCMSCGWKRWTRALRQSLSAVLQRCARAVRLWVETLDQSAQAEPLHGAALRPQALGYGPRHAGRTIVSSHCVTPEEMLDQEPMEGAAQDFLLYHERHTVPHRAAVRPMGANVCEDAGAVLGSQQVLGKRAIAADFLRDENDGCKTTATKHTS

SEQ ID NO: 923967 - protein, 141 aa, Homo sapiens
MPQLVDASPQSLPAPSKGRFCTLKTLRSLELAEKLSITDRPNHLLSGTDQNPVMIAWRVDAGDRHRPCWSQRSRLHAVSPRMTQTSPSHLRQGPGTPPSRSYGAYHPWCLRLCLSCVEPGVACMGVWVLLPEAVLVTSNPC

SEQ ID NO: 923968 - protein, 144 aa, Homo sapiens
MEAVGLMASVETTQGPLRSGYLDLRKEPSVWGGWSQSLGIHWLRFPPHFDGNFNGGSHHPFGQHGTCPAPPSTASTTHGGIRLPFTNPTLSTRYPRTCGPYSPLGPSVPRAHNARETFGGGGASPYWLKEKERDNGPLPRLLRV

SEQ ID NO: 923969 - protein, 169 aa, Homo sapiens
MLVFGVEDRPYSCLGSHIFLMTCESPWIPDLGCAVPDVSSPTMRALGTVAALSALGASTVYTVGAQSMPMKWTQVTASNTATQNGTGDLKCCLCLVASVRGVITKEMERGSVLDPRKSCEHNSLTSWELWEVQVSEPCLIWRYKRERLLGPRGVDGLMGEKRKWGEFEK

SEQ ID NO: 923970 - protein, 164 aa, Homo sapiens
MAPLLLQDLANHSKGLAYPSGNPAPPTAAVLARADHDKGWHIPVATRAPPLLPSLPGLITTRVGTSQRQPGAPPPRPTAAVLARANHDKRLAYPSGNPGPPTAAVPAWANHSKGLMSLECTLMFMLIYLSKWSAIVIIGFLSWWTWTPWKPELPGASLGQHCFA

SEQ ID NO: 923971 - protein, 217 aa, Homo sapiens
MSKRSSRTLSAGCVCAQKPPVGPDSGQHPLPPGEGLLAQGGLGMGAGVWGNSWLHDASQFSGNVDGRAFLTPAAAGTSVHWIKKTRNPRKISTRCSQSTPAFKEEASSGVSGTDSRHLQQHRTCGQRDSQLRHTPAAIGLLCGDSSTCREKTEGSESQKEGSESRGKRQRKKSLKAWCTRRLCVPACGGFRSRILLMPSSCVCMSYPHGLSFGAQVH

SEQ ID NO: 923972 - protein, 124 aa, Homo sapiens
MVLFDGSLRSPLLLVVHLGPTSTKTILIKNKFGVQEPNLHICAFHNCEEEGYDYCRIRYFKNESLTLTLPSKVGKSLKWIMMEGGKREWTLVVMRMGAWLTKNPSCCTLEFISHICTEDKFLTD

SEQ ID NO: 923973 - protein, 159 aa, Homo sapiens
MIGDARNPQRAPKRVSQSWLGEPLGLGSPKGHSSSLLLVACNVVNGGYIVALFVLQLFQSCIWWVLTSCPTFGKNEVCRQLEGVPGKRTIQLAKWSSMKFSLLAADFTWNWQPSPQPSGRPWPEGGVSLGTHHFPPRSLSAFYMPSIDPRLSVLRGTHG

SEQ ID NO: 923974 - protein, 143 aa, Homo sapiens
MVKSTGNLKDVPGGGSTEEWQCENGLIQGLLDAGSKLTLIFNDLKSNIGHESERQLVQRRLLAAHYVLLEKEALTVPELVSLPTLLFCVPRVMEAMTHTFCMAAKASLIPDGPNLYLPVYPFYGKWLASPQFSILSDSMVLKE

SEQ ID NO: 923975 - protein, 348 aa, Homo sapiens
MNPREGTKKFRCAAFKSLEKKNPFSEEKFMAAAEICMSNKEPNVNSQDNGKMYPGHFRDLHGSPSHHRPRRIGGKNDFEDEGVWNFLETLNGFDQNAENDVDDKVLVEVVTDGDEKLLGNWSKGHSCYALTNSLVAFCPCPRDLWNFELERNGSRSSVYPPDLVPCIPAVSAPAMAKMGQGTAQAVASEGANPKPWWLPCGVGPVDVQKSRIERMYGNAPMSRPKSAARAEPSWRASARAVQKGNVGLETPHSVPSGALPSEIVRRGPLSSIPQNNRSINSLNGSSGKATGTHGQPMKELPTALGAHPLHQCALHVRHGVKGDNFEALRFNDCSTGFWTCMGPVATLF

SEQ ID NO: 923976 - protein, 138 aa, Homo sapiens
MCIFWQEFLRVKLKGWGVREIFEGWIANTKKALSKKKEEEEEEEEEEEEEEEEEEEEEEEEEEEEEEEERWKALRVDRGKIQKLGEGGGSREPWTGLLCTGTHCWLPIIPGELAKNNLLTPLHSGTLEGGDPLTTRDN

SEQ ID NO: 923977 - protein, 152 aa, Homo sapiens
MLITEKMGTMSPGYVRGLHSSPSYHRPRGLGEKNGFVCQAQGLTPLSSPGDIVPCVPAMAKRGQQLRLLLQRVQAPNLDSLHMVFGQNEKSNLLKANHGLIASPFLLAELNDVTKTLVPLLSDVLCAGLMLNQDTLNAEPFSPSQSFPCRRR

SEQ ID NO: 923978 - protein, 172 aa, Homo sapiens
MSIFFEKDLEFIENSENFSDQILLGNYYTFPSNLSYIKLLEPESEIILLVEWLGVIHLPIMGRFHVFRHSSELLKEFKASISTFLSSGKLALLDTPLIFSVFITSTIQSIYHLTFLKSFLCYRIKCHTSRQILSSYTPIIDLDFHYKLLQKYLPITVIPLYHYSKMTFSLSA

SEQ ID NO: 923979 - protein, 185 aa, Homo sapiens
MITSFPVLYFHVRAYSKRQQHPRGQGAFCILGFLRWCTGKIRSHVGLENECKVSLNDGSSPQQIDGEPEGVWSGKVVFYWSLTPQWPDSPATTPAKFPLASMLFCWLMACWLLPVPVGLLFRSSAPLDIQLPVCSSASVFLSTPGHLCVCHLGSWLINTSRLQMIQLKGHTVTCPLWLGVICLHC

SEQ ID NO: 923980 - protein, 151 aa, Homo sapiens
MGTSPNSQCFSNKLCNIYQDSREDPPAPRYLQRGSGVTETAEPGKQVLRMPGDLLGHVAERALLHQDLSTGRVSSAPNAGGLPEHRAERAPPTRSLQRRAGVTQVVVPGKQVLQMPGDLPGCGAETVWLYQSMSRKGWAAQAAESAILAAD

SEQ ID NO: 923981 - protein, 330 aa, Homo sapiens
MTSVSSTQFNKGPSYRLLADVQNRFLSKYDSQKENWYQLESLSNLLKAMVSYSMNPVDLFETNDLFESGNVRQVQVSLLALARKAKTKGLQSEVDIGEEYSEKQEGNFDDATMKAGQCVIRLQIINKRASQSGTTPPDGYKQVCQPGGHGGSWDPVAHLRHEAGNHKYDNSSTTLKMGYTLGTNQSSQVFSLGRQIYDPKYCLGAQWPTGLPQVQATARGQRRPLNISLTTKRRPATEAPSTLSPHMVSLSGCLGLSHRAVGEGIKAISRCVSGEGPRWRVQAVGLAVLGRRDLGMEGTGPRRFPVASPLPPFVSRSVCGFCTRKSFKKY

SEQ ID NO: 923982 - protein, 676 aa, Homo sapiens
MAARETVKARTKDLRTAVYNAARDGKGAAAPEAAQQPEPGGTGRADWLGGRRGDAAAHRRLLRPPGRGGVPGGPVRRERGGRWLGALRWRDHGGCAAAVGADHLDVVRSLLRRGASVNCTTRTNSTPLRAACFEGLLEVVRYLVGEHQANLEVANRHGHMCLMISCYKGHREIARYLLEQGAQVNWRSAKGNTALHNCAETSSLEILQLLLGCKASMERDSYGMTPLLPASVTGHTNIVEYLIQEQPGQEQLIGVEAQLRLPQEGSSTSQGCAQPQGAPCCIFSPEVLNGESYQSCCPTSREAAMEALELLGSTYVDKKRDLLGALKHWRRAMELRHQGGEYLPKLEPPQLVLAYDYSREVNTTEELEALITDADEMRMQALLIRERILSPSHPDTSYCIRYRGAVYADSGNIECYIRLWKYALDMQQSNLEPLTPMSASSFLSFAELFSYVLQDPAAKGSLGTQIGFADLMGVLTKRVREVEWALQLLREPRDSAQFNKALAIILHLLYLLEKVECTPSQEHLKHQTIYRLLKCAPRGKNGFTPLHMAVDKDTTNVGRYPVGRFPSLHVVKVLFDCGPDRDSRDFDNNTPLHIAAQNKLPAIVNALTEAGAHMDATNAFKKTAYELLEEKLLARGTMQPFNYVTLQCLAAQALDKNKIPYKGFIPEDLEAFIELH

SEQ ID NO: 923983 - protein, 174 aa, Homo sapiens
MNYITQLRGCRKMKGDTHRQFCHESIPNKGDRVIYNLMHPPYCCVWFPLAGMGPHILYVSQLFSNLEFFKRVKGRGEQRKEEVTCGMLRKESQILVNSMGQPTLLYVLLPIALLLIDGVESVSPVIGATDPPIQTFLVQAPIGPYLSLSLFCPSKSLLVFIFSYLSLDCPYGSL

SEQ ID NO: 923984 - protein, 137 aa, Homo sapiens
MVYCHLSSELQLTHTVVDVTCYNPLFGALQFLVSPNFGAPPCSPCPDPGSHSGGNLRYVWSSHSLSQSWCLCQHLELPILLQLACLAVHSGRTLHLLTHMPLTAPRFLQIKSKQSKPNQTKKAYSNAEFGLFLLQSQ

SEQ ID NO: 923985 - protein, 328 aa, Homo sapiens
MLSPALPFLPLLLFSLLLPIYVNTSKGSPEMSDTKPPTASEGWNKFRLKNIKIGEAASANEEVAAPFPEAEEGSEEDRKIWKSLELPRDLEGSEDRRMWESLELPRDFLNAIGQNADNDMENKVQAEVVLDGDEELVGNWSKSHFCYAKRLVAFYPCPRELQNFELERDDLRYLAEEIYNQQRIQEEAEHKHLENLQADNVIEKKTNPIFWGEIQASCTNLHQKKPLDVTDTWTEVRSYQALEVMVMDNSMINEKILECFKEVYFCLEGPYDKFYSIRCEQKFHIASYRYQYECWYYVIQKSLFSSVMATSNVYDSSYDTDVNCEVLQ

SEQ ID NO: 923986 - protein, 152 aa, Homo sapiens
MWVGPDKGIKAGCPNQQWQPCGNFVHSLFAINLAAACSLGPHCLYELGSRHKSLESLQPDDDIEKKNPFSEEKVKLIADICIINKEPNVNHQDNGENVSRTYQRSWWQPLPSQVQRPRMKHGYMGEHAGDHGGWEAELDCSSGQSSGWGLTL

SEQ ID NO: 923987 - protein, 152 aa, Homo sapiens
MCIIQKEIKGENLMPNITEIDVKYTNHSENNIVPHGIEQNKAPDQLQEQTSNPKRTHRPSEKSGLLLQDLGDTPNTVNAPTVEVGKGDPSLRTHTSTGEAEAEAEGLFAGEGKFSNLSRPPPGNRLRAVAGGPVGVRPALQFVWKLGEACDC

SEQ ID NO: 923988 - protein, 204 aa, Homo sapiens
MAYEARQGETVPCDPATPAIAKRGQGTARPTVSEGASPNPWQLPRIVEPAGTQKSRIEVWEPSSRFQKMFGNAWMPRQKFAAGSGPSWRTSARAVQKGTLGLEPPYRVPTRAPPRGALTRRPLSSRPQNGGSTDSLHHAPGKATETQCQPVKTARRGAMLCKSTGAKLPKTMGTYLLHQGDLDVRHGIKRDHFGALEFYCPAGF

SEQ ID NO: 923989 - protein, 139 aa, Homo sapiens
MNLIERAVSSPFLRVHADMEGPLKAMNISRFWYDALADKMNSCDLRRHLNLKAESGSHSKIGEWSHALRASKMLLCSQKGVVKVTQDCLFYNYREEISSLEKSGVVRHEAPWEEVRQLADVKYSAELAAKAQASTAGWS

SEQ ID NO: 923990 - protein, 168 aa, Homo sapiens
MSAPTKVTGTQGCKYGRRKRGCSSLSPSCTPEEFSVKSYLLVTPAIIFDMGLLCPHLNLILNLTPTIHTCCGRNAVGGNSIIGVSFSHAFLMTVLPVLPEPNVTPMIWLETGTRVCRKALNFVHSNVKVFFLRRTYYHQMKRLIGVKGEIKEALQSRPGEQEQHKKMC

SEQ ID NO: 923991 - protein, 140 aa, Homo sapiens
MCERSADLVLEYSGAFQNGYSSAPPDRSMRRFFSDIHCENLATFLEQKQAVFSLIFIGTIGNDARLMYFKTHETTKGHCHQKVYENKVNQRQTEQKCLVEFTSEGIRSQAFTCLETLHYGLHLVTCYWSTQALDFFIVQP

SEQ ID NO: 923992 - protein, 143 aa, Homo sapiens
MAKHMTPDWKNNIDSSLLPVAGQVFHFELSDSFTSFCCYFANNAIMLSCPKKTFTKQHINIGFKKKGPEENAVQQTLCQGSEFGICCFLNWKKPELRVSPASVTQQASARRGAAGYLQRAFSLSFRVQRFLSPPLKMQLVIYL

SEQ ID NO: 923993 - protein, 136 aa, Homo sapiens
MIVKPSQPCGTRSGALLKRYLKMWKRLWNWVTGKGWNRLEGSEDRKMWESLELPRDLLNDFDKNADSDMNNKVQAKVVSDGDEELLGTEAKMTLVMFQQRLVAFCPCPRDLWNFELKRDDLGYLLEEILSRKAFKI

SEQ ID NO: 923994 - protein, 150 aa, Homo sapiens
MQSPSQLGLGILSRPRKSSYGDFCGGLLDPFVPMLSSGPAYLLIFCLDDLSNTVSKVLKSSTMIVLEYAGRRLVPPEFKGNGMADSVNFLFASAPLVLQGYSFIAMLNGLTQIIGTKEWGIVIKIPGNVEEVLQLGNGQRLEESGEKTER

SEQ ID NO: 923995 - protein, 141 aa, Homo sapiens
MRNTGNLSTNKFKIVKGPFYSLRQCEENKIKEGPLNNVGNSEDDDDDDDEDDDAVSAATKDDNNKRREEFQYEDAREIIDNCQSKVYEKDEVCNIQSRTVGSGNTKSIGIAKCKNLLFLILSYGQYLDAEGTLYFPVVSVI

SEQ ID NO: 923996 - protein, 185 aa, Homo sapiens
MNCGNSLKDVNMGVTHLDVFPEWMTQSTKGYSVVSGVSSFWWDRGLTDFRSEATDLHSPIHLIHSCAWRCHSRRLENSKDECLLLLLGPVTLRVTNLIPVLSCIGCLKTPFGSSHPVGRHKEQDPFNRALCPLVELMCFPGGNPTHLSCLDSSELPGGEVKSIGPQTVATPPPRGSGPGRTGLCP

SEQ ID NO: 923997 - protein, 143 aa, Homo sapiens [sequence omitted]

SEQ ID NO: 923998 - protein, 144 aa, Homo sapiens
MTLSFTIFGVFYPNPNGHRCIHWKGGQGTAPCSFPFQLWNMIFLATCTCSIQRLHTAGMNHSHCHCPEPRMALGTHAPRGSKGATPLAAGCSLMRDTWDLMSPCTLEAVLLSQTQFQAQVEALRKKTGSEGSRGGQQQKLKDSR

SEQ ID NO: 923999 - protein, 253 aa, Homo sapiens
MLAKLVGRPVVVLTKCQVNISIFMMWKVTEMFDTSLADGQQVQRKGSDLAWRLLLMDHFVGTGDLQTVTRVTVHCGKGNDQTFRELLDTGFISPVPECIIGTGILSSWQNHHIGPLTGRVRAIMVGKAKWKLLELPLHRRIVNQKQCHSLGEIVEISATIKDLKDTGVVIPTTPPFNFPIWPVQKTHGSWRMTVYYHKLNQMVTPIAAAVPDVVSLFEQINTFPGVWCAAIDLANAFFSIPVHKAHQKQFAFS

SEQ ID NO: 924000 - protein, 147 aa, Homo sapiens
MTKLFYVILSILALLAPLEVLRLVQRLQDMEGYNIFSNLEPNKVKIREGNEYHPEPPRTVIRQCFLECEKQYDVGYEFVMDGSYYFETGDSRRNGLSPQYKSQLQPTLENSLVVPQKAILHVLNIHMWLLTITLNNTGLKPYCTSMR

SEQ ID NO: 924001 - protein, 242 aa, Homo sapiens
MSTGNGSVSTGEVSPGPGHPFGVGIVCGQCHKGLIYHGAAQGCWWPGQLRVGGSEKPVPEGSRASEGIVAKDLRGPGKPLVHTQQEYFASFNPIKLTFNINHHSAHSMMDVVQCNQAATRFVVSLASGVKLQTLMVSVTVHKGGTLELFIPPIGFMVSLASGVKLQTLAVSVTAHKDGVDLKNVDLVDILELVDTTEQLTEYDPMERHAFNLVLDNEEEDSTQCEANEGEGLYDVTLSLNEE

SEQ ID NO: 924002 - protein, 136 aa, Homo sapiens
MAEEEANMFYFGNQGTGETNGLRGGETKKGKTTPARPTYSFPNGKHKHQFHGGIQWEAAKYPEVFVEMELCECAERVCRECAATPRSLHSKRGSSGSPVKFNTFLLTRQTVFHFLTGEVTCIFLGTAEYSSTIDRY

SEQ ID NO: 924003 - protein, 159 aa, Homo sapiens
MIWNDLCERAKKPWQTPGVSPRVQKLKNLELDDEGRKHPAQEKDKGRNSQGLSVLGKRQLSSKAPVAWSFGGQWPEDTTGVQKLGKYSHSNLEKLAKTKGYRPYASPKSSNCQGLGLAPSEATALALCLPLSATAGVTGTQATKFLACKQHGDPDTVHW

SEQ ID NO: 924004 - protein, 155 aa, Homo sapiens
MLAGSRAEGVLLHCDLCTGKVSRHRLLIQLRLLVQASVRSECLDICLDVEWRGPQWIAILREQARACSNDTQRPVPGHQAGPRPVIGESTIPVPTAEAISTVLLWRYQLHCKASAPIFGLRLKCLHSHAAGLPKSDRTLKVRPLKDARSLEVAGA

SEQ ID NO: 924005 - protein, 139 aa, Homo sapiens
MLITKTMKKMSPEHFRCLQGSSSHQRPGGLGGKIGFKCQAQGFASSYSLKTRCPASQPWLKGVKLKFKHSLQRVQPPSFSSFHVVIFALYISPFLYCYEEIPKTKYFTRKNSFDGLTVSHGWGGLTIMAEGEGGAKHKA

SEQ ID NO: 924006 - protein, 174 aa, Homo sapiens
MIRKLSSPQNQSGFTEIPGVPSSRNKFIHKKRSDCFHSSHCHLKPQKHACHSTSLPVQNEQGDIVSHKKAHISCQDLVSKYMKKVDELTHISALAVENKNKLAAGLILDQHLLLVLAHINSYTLGPATPHLQGLVVFSNFLPCPLLCPAYPNVEQLDFDVATAVVAGPRTGALN

SEQ ID NO: 924007 - protein, 173 aa, Homo sapiens
MDVFPQCLLYRKHGSFCLWGSLWKLTIMEVEGKAGTYYMPECEEEIKRGEVPHTFKQPALMVTHLLLQEQYQGDGVNPFMRTLHHDSVTSHEALPPTLGTAIELEIWVSTVGVINPKVRFLPITSRATSKLGEKEDLWPIVYSYSMTAITYHNKLGGLKFQKCILSQIKHPEA

SEQ ID NO: 924008 - protein, 153 aa, Homo sapiens
MGTHLLPQHDPDARYGIKRDHFGALRFDCPFGFQTCMGPEAPLFCRRLRFKHHCGIIEPSGPRSRCLSKFRESKAETLAASEEEDERGHTYEGVKPGLGTKDAESLWRLLRAGLGVAWEPRVGEIKLKEDFVTEDRKGYKRFTGYYEPEKLLG

SEQ ID NO: 924009 - protein, 156 aa, Homo sapiens
MTPHMARFPSETKLPEERSGSNICCSAIFAVLQPPLLIPRQTGSGVDFQQTPTDLQLRVLTVRRKTNKQKGHPHQNPICTSPSSKTKEIWDCVKRPNLHLIGVPESDGEKGTKLENTLQNIIQENFPNLARQANIQIQEIRECHKDTPREEQLQDT

SEQ ID NO: 924010 - protein, 135 aa, Homo sapiens
MLSHKVIHPTTYCLLMAVQFILEPLHDTGLSKHRRISPRCVSGLYISLVCQDQVLNSVPGAVSQTVRISVTQKSNTLHWKKDVTCSKDPLKMLKGPRRGPKASLLEKVVLMKERRHPILERLEIWCFTSRQGIFI

SEQ ID NO: 924011 - protein, 167 aa, Homo sapiens
MLVPAHHCQCLSLTGSSAAGLLEFARGPLQTLFVWVPVVVAAEQRIFMNRECCCLIVPLEVLFQRSTMCKTLYFLRCQSAPTGGCLPVRLLRGQGSGVRDPREEAVCPFSDLQLRAGRTTALFKAVRQGHLSLQRLLLSFCLSVPCPQRWSLQRQAGLLELWWAPPS

SEQ ID NO: 924012 - protein, 205 aa, Homo sapiens
MTRTVNIRLMTNAAIQWLLQAELRMSLILSRIQEFKRANLQSSHTGSDEKAVTFSTRQQKRRQWENMQWAGDSPKVKILGPHHKLSESESLSRNTIVNCACEGSRLCAPYENLMSDDLRWNGFIPKLYPLPQPRLWKNCLPQKWSLVPERLDTAALGCPESGEHCLLSSTFQLCLLRISAPPSSPLIHLPPAHAPCFLMKLRVLL

SEQ ID NO: 924013 - protein, 227 aa, Homo sapiens
MKLQEEGSDSNICRSAIFAVLQPPLVIPRQTGSGVDLQQTPTDLQLRVLTVRRKTNKQKGHPHQNPICTSPSSKTKIDKTTKMRNQSRKAENSKNQSTSSPKEHSSLPAMEQSWMENDFDELMVMELDKTFNKEHNQSFCTICLAGIRPFYITTYNYPTAIAARVTKASNMTQRRSTGKASDTNGLHIVSYCPVQLLFLIKGFDGKGNRLATDLLQVTLRNRRHSHV

SEQ ID NO: 924014 - protein, 136 aa, Homo sapiens
MVISVHRWRSPANKSEFISISQINIFDNILENFILEGYHPPDLSAVDIKKLTATTTYLWSNPNFNTKTKQKTLQERKFQTIISYEQRCKNPEQFNNKNEIVGCGTILKQFIIYTIGISEAVDRKKTDKIMTKNIQI

SEQ ID NO: 924015 - protein, 136 aa, Homo sapiens
MLVHPAMAHADCFLGSSWFWLQVLPSRKNCSCSSSPPASGLQQGTAPFQCLLLRHFPQFWLWRPLPHCNLWPEGCSNLWPETNVSVQPHCWVPKEWLTLYAPGLKMASSSRSWVCENACSFFQCLSLSEPPSLSPS

SEQ ID NO: 924016 - protein, 143 aa, Homo sapiens
MRGVHSAGLDKWGKALSKDMVREKVYDERKGVLWRKLGGKLFWLVGKNGKQIVGSVWTIYVRSRTRCFRSCSCALGGRGKVLRLNNLVLALLINSARQEELWFGKVLALGVSDLVSAVCRLPKDLSYMHPQNPGEGGCALRPL

SEQ ID NO: 924017 - protein, 182 aa, Homo sapiens
MENSRRATLRAVTLTAKVRSFTPEPPRPRTPPEGRDSEHIRTSEGTNSGHAAFKNCNTHSEGIKQHLNCLQGKAFSALQRWSLISQYFIINMCEVFQYVLRTYTGFSCVMRIMEIKTCISALEFDCLMGIKLCIFTAHESYRCNTKGVIHERKRMDKLAFAKTESFCSTKDTAKIRKRQATD

SEQ ID NO: 924018 - protein, 164 aa, Homo sapiens
MIFRNLTCELLPRSLSLHFQVKFSSLCFLCIVQASVRSCSLGYISCLVWQYALEKELIPRPLFVNPQMSSKRGDGGQKRMESPRYHRNPGADHPLLLLHQTTQGVHTDDDDDLVYPWKDGTEEEACTEPINEIRAILIPGIWSRGDAWSLVMALRGDYVTRVEP

SEQ ID NO: 924019 - protein, 273 aa, Homo sapiens
MGRNQSRKAENSKNQSASSPPKECSSLPATEQSWTENDFDNFTIRFDQGGERVSVIEDQMKEMKQEEKFREKRVKRNEQSLQEICDYAKRPNLCLIGVPESDRENGTKLENTLQDIIQENFRNLAKQANIQIQEIQRTPQRYSSRRATPRHIIVRFTKVEMKEKMLRAAREKGWVSHKRKPIRLPTDLSAETLQARREWGPIFNILKEKNFQPRISYPAKLSFISEGEIKSFTDKLMLRDVVTTRLTLQVLLKEALNMERNNWYQPLQTHAKL

SEQ ID NO: 924020 - protein, 141 aa, Homo sapiens
MYGFWNVHRVPTGVPPNGVVRRGPPSSRPQNGISTDTLHCAPGKATDTQCQPMKAAEREVVPCKVTEAELPKTMETYLLHQHDLDVRHEVKGDHFGALRFDCPAGFWTCMGPVSPLFWPIFPIWNGCIYPMTVPPLYLGSK

SEQ ID NO: 924021 - protein, 140 aa, Homo sapiens
MEEGEEGAKAHLTWQQARDNESQVKGKPLIKPSDLLLIQVSGCSRCMEICLGTERRGPDCTRSLHRKGGTTQAASQCDQSGPYSKSHRLGKTEAVAALLLHQPLPKLAPEFKRQSALPQPGLLRSPVESLPVTSLIPFCC

SEQ ID NO: 924022 - protein, 143 aa, Homo sapiens
MLSLCQKEYICILNGSKRQAGGFVFPKVYMSKDYFVVIFLAKCVNLIQQHILKYLSIIWDVCLKASPLNPPEVIFQVKCSQQVPFIGEQTISLVTISYGGKTLPYPEARQLLLLLLRLAAAAVSSSYSYRASSFHWPELECKL

SEQ ID NO: 924023 - protein, 143 aa, Homo sapiens
MTKFLGRILSEMGAFGRFEWRGSTRLEMLPSRRAGSPWSAAKLPLTAGILLPRGTGIEQNRAGPDVSKQEHGFGDMDEAASHYPQQTNAGTENQTWHVLIYKWELISENTWTEGEEQHTLGHEKPVLVTRQGTIKFADTSKEA

SEQ ID NO: 924024 - protein, 140 aa, Homo sapiens
MITLPYLIATAWDNFPNHYLHASLDLTLLCGEPKKTSGKKRLYADEESKRRNSWSERVMFVFAFSAGLLKQSCRGGWLFSATHTSQRLQPRLTAKASQLYCTLFLEFEKAMITAETECSLQHLQDLLLLSLSLIQDLALQ

SEQ ID NO: 924025 - protein, 1139 aa, Homo sapiens
MGHSEGRQLSSAITARKWALSVPCGAATVSTPTSTVSTPTTVSTPTSTVSTLTATVSTPTATVSTPTTVSTPTSTVSTPTTLSTPTSTMSTPTAVSTPTATVSTPTTVSTPTSTVSTPTIVSTPTTVSTPTATVSTPTTVSTPTSTVSTPTSTVSTPTTLSTPTSTMSTPTAVSTPTTVSTPTSAVSTLTSAVSTPTTMSKTTSTVSTPTATVSTPTTTVSTPTTMSTPTSTVSTPTAVSTPTSTVSTPTSAMSTPTTTVSTPNSTLSTPTTLSTSTSTVSTPTTTVSTPTTVSTPTTTVSTPTTTVSTPNSTLSTPTTLSTSTSTVSTPTTTVSTPTTVSTPTATVSTPTATVSTPTTVSTPTSTVSKPTSMSTPTSTVSTPTAVSKPTSTVSTPTTTVSTPTTVSTPTSAVSTPTTAVSTPTTVSTPTSAVSTPTSAVSTPTTTVSTPTTAVSTPTTVSKPTTVSTPTSTASTPTATVSTPTAVSTPTSTVSTPTTTVSTPTTVSKPTTVSTPTSTASTPTATVSTPTTVSTPTSTVSTPTTVSTPTTVSKPTSTVSTPTATVSTPTTVSTPTSTVSTPTSTVSTPTTLSTPTSTMSTPTAVSTPTTVSTPTSAVSTLTSAVSTPTTMSKTTSTVSTPTATVSTPTTTVSTPTTMSTPTSTVSTPTAVSTPTSTVSTPTSAMSTPTTTVSTPNSTLSTPTTLSTSTSTVSTPTTTVSTPTTVSTPTTTVSTPTTTVSTPNSTLSTPTTLSTSTSTVSTPTTTVSTPTTVSTPTATVSTPTATVSTPTTVSTPTSTVSKPTSMSTPTSTVSTPTAVSKPTSTVSTPTTTVSTPTTVSTPTSAVSTPTTAVSTPTTVSTPTSAVSTPTSAVSTPTTTVSTPTTAVSTPTTVSKPTTVSTPTSTASTPTATVSTPTAVSTPTSTVSTPTTTVSTPTTVSKPTTVSTPTSTASTPTATVSTPTTVSTPTSTVSTPTTVSTPTTVSKPTSTVSTPTATVSTPTTVSTPTSTVSTPTTVSTPTTVSKPTSTVSTPTTTVSTPTTVSTPTSTVSTPTAVSTPTTVSTPTSTVSTPTSTMSTPTTVSTPTSTVSTPTSTVSTPTATVSTPTAVCFMTRGSRLLLSSLSAFQEDESETMMLRVSVI

SEQ ID NO: 924026 - protein, 160 aa, Homo sapiens
MLKGLAFSRGRAVVAFLEVAGRRRVFLPSCLLPCESFLTAASLAPFQSSSCPLIFVETTLTMISENLLVLCQIQGFPLPPTHTLALLLPGSAHSPTCFCTRGPSGEKQMSLELKKLQFTQAGLSWRLWARERGRGRVFLHAHPEQPPLGFAAHGWHLECQ

SEQ ID NO: 924027 - protein, 142 aa, Homo sapiens
MKEQGKTAPRSDSESQLRNQPIAWTALLPISMTVSVSRSAPGPSCSSVWNEQDDFVAEMHGAPRLTFPCASEYLWHAREKAYQDHRRKHRPFTGVGLGYSQVFLIPRGRISDYHMGRNLGQYPAFKGRGPCGFLQCIVPLVY

SEQ ID NO: 924028 - protein, 135 aa, Homo sapiens
MYPCILCGSQPGILLSNADAHQKLQPSAWALLPTAPSRRAFFLEGAGPYFSHLVCSCLLLRLNPREKIAIVPTPSSRALRFCPEEEADPQLIHKFNKVAEYKINTQKSIVFLYTCNEQSEEETKKTIPYSKVSKE

SEQ ID NO: 924029 - protein, 201 aa, Homo sapiens
MDPTPAQTPEPQTPPLDKLKDHRPHPCGSSKTMNPTPAQALGSRIPPLWKLQDHRTHPCGSSRTTDPTPVQAPGPQTPPLDKLQANEPHPCTSSRTMNPTPMEAPGPQTPSLWKLQDHRPHPWTSSRTTDPTPVEAPGPRTPPLDKLQDHKPHPYGSSRTTNPTPGQAPGPQTPTPMEAPGPQTPSLWKLQDHRPHPCTSS

SEQ ID NO: 924030 - protein, 180 aa, Homo sapiens
MATEHVNGNDTEEPMDTTSAVIHSENFQTLLDAGLSQKVAEKLDEIYNKSAFLCGVMKPYRQREKQGTKVADSSKGPDEAKIKALLERAGYTLDVTTGQRKYGGPPPDSVYSGQQPSVGTEIFVGKIPRDLFEDELVPLFEKAGPIWDLRLMMDPLTGLNRGYVFVTFCTKAAREAVKTV

SEQ ID NO: 924031 - protein, 143 aa, Homo sapiens
MLADRGLLERHVWFVCLSHSYSTHTTYMLKPLAAIIKMVPTRKCAKRQDSEVDPPERWTKDILLFASSLHRIESVPTPVSEACISGVLSDTGARRPEWEEFSSLIWDEALAKSFVPGETTKRSSSGSQKENMVGFLEGKFMKV

SEQ ID NO: 924032 - protein, 213 aa, Homo sapiens
MCRWSGKPTACSCLLLPPPPPPPPPSSSPSSSSSHIFKNNDIPGPLAGIWIMSVTGLAWLCQRASVFPRWLCLTWAPSAETTAPAVLSLPPSVSLIPQPYQARSQRGPRSFQISSQTTWEAQVGSSRKRDLPVAPQYYPHLSHTPHLSNWENFPHGEKHQGVSHYIAFFPPPAFHSTFWKSKTGKCFNALPSCHSSGFQTLLKIIVAGIAGAP

SEQ ID NO: 924033 - protein, 140 aa, Homo sapiens
MGSTRADRGAKEAGRGYLGQEPLLWFLWEGTGKIEAMKLGCWIVTLRLIMKGRRNKGPWLATGSYRTGRIAVWQRVGISEDLQGVKEHDVYHLFSNGLQKIPFREKGENKWETISVSPNLDVDKKYLGGVGLILATSLEG

SEQ ID NO: 924034 - protein, 157 aa, Homo sapiens
MIGTLGLHALTLGDWDQAHSFVLWLLKDPVSLEGLRYSQSTGNNPLKGACWQKYFTGEVAVSFMLSITNEVVQEGCEQKHTGEAVWAAVSRCMLGVAHLQKLSDDLVVSASEDMAVTTGKCHSWRSQTALLGEASRQGALRSDCPHPMSRQSCSTHV

SEQ ID NO: 924035 - protein, 146 aa, Homo sapiens
MVFALKVWKSYLLFVSSLLNSSHHRSQHSLSLEIRKRDGRVQVLFHGKGNSGKEFGGRPVLSGEKNSCLEAALGGLRLQFQLREKLRLRWKDCLSPEGTIAELFQEAPSLCCNPEIFSVQYTEPGIPSKSPVSFNRRTVLETKYGH

SEQ ID NO: 924036 - protein, 147 aa, Homo sapiens
MFLEAAMVAWWRVHISWVRYCQKWGYSISTCTCTSTEDRVTSVCAHIHTISCGDRATGVCELVHNSGNCGVQRVAESPPSMHVFIPAMTVRLSAHTLVVWGGSMLLHTSSSSGVYMQMCNGRAKMRSASTCLLLILGQQFLTVLKAL

SEQ ID NO: 924037 - protein, 176 aa, Homo sapiens
MLLVRAGWFPALMVPGEKERERGQRKKERKKRKKERKKERKKERKKERKKERVRREGGREGKKERKKERKKERKKERKRKKERKRKKDRQTERKKERKRKKERRKEKRKREKERKKERKREKEKERERERERKRERERKKEKEKKEKTLENRYTLRTIANKLGIIKFRGILCGNIP

SEQ ID NO: 924038 - protein, 166 aa, Homo sapiens
MPATAEPQGVLTAFPRGVLRSEPPGNATAPLLSFPPPMAWLIGACYNSGSGSPEVWTLFTPIVRQMGVCHSAFHSCCPQLEKPDRSMLQPFFAPAVQRFRVLVHNQEERSYVDTGEVTVHWGKGNDQTFQGLLDTGSELTLIPGDTKRHCGPPVEVGAYGGQAHQK

SEQ ID NO: 924039 - protein, 138 aa, Homo sapiens
MPCETGTVNLKMRFIFLAAVSLTLNTKLSILKTLSDWFQSFKELADSFRLNAAVLIWANATKQQQMLWRNLSQKEESVNVTNSIVVLKILLQPFQYTAANTLISQQPSTSRQDLPPIKSLYLSKGSDGHKYVLARKYF

SEQ ID NO: 924040 - protein, 192 aa, Homo sapiens
MEPKPLHYTIYPCNKPAHALLESTNIKKISIKGFGPLYLRVCDGIDIEKDSWKNFTYEEEYQKYLTKTSMFCDQAVAYKSEAYSQESYKPLLNEIKEDTNKWKNIPCEWIGRINIVKMAILSKDIGMGKDFMTKTPKAMAIKAKIDKWDLIKLKSLCTAKETIIRMNRQPTEWEKIFAIYPSDKGLIPRIYK

SEQ ID NO: 924041 - protein, 140 aa, Homo sapiens
MTLAHHVAGDEKEGKKGREQLQRQSRPRSFLREPRPTSSLSQGCDTLFGAVRFLKSPSFRAAQVSGCHRIPGASCGSCLQYTWSSCSLTKSQCRELPAPLQPVCLTVCGGWTPCFLAHTALAAPLALVPSKRDIQNCNYS

SEQ ID NO: 924042 - protein, 153 aa, Homo sapiens
MGTHLLHLHDPDYVVTTLLGGRIFEPLVVLHMFLDGPIEALSTLLPGSFLRVFYTVGILDRGKRHSFLEEDQIQIRDDSLGSSSKRSYTCGEVVPIFNGKEFRVHLVDGKSTKEVQVSLWLRAGLPPGIQKPHPAPQKLGPVQYQDSTMYVFE

SEQ ID NO: 924043 - protein, 159 aa, Homo sapiens
MGNFLYTWRETMILMAMSQRVYTPFVILFRISRGEENDVTPNIAGGVHPSVILWGEDDITPNIAEVVKPLRYFSYNLGGEDDITPNIGEGVHGHCDIVPNIHTLTDNGITPNIAEDQCENRLIQKVSADIDAYINVFINGFKKERKEKEHVTVWLAKLE

SEQ ID NO: 924044 - protein, 157 aa, Homo sapiens
MVSKDLCNFELERDDLGFLAEEISNHQRVHEEAGYKSLKTLHPDDAVEKKNPFSGEKFKPAAEIYINNKKLNVNHQDNRESVSRACQRSLQQPSHYRPRNLGGKNDFLGWSQGLLAVCSLGTWCPPSQLLQRPRERECGYYVKDLYGAAPERASIIL

SEQ ID NO: 924045 - protein, 137 aa, Homo sapiens
MGPAEGCRCPQRKLCAVHLVQPQPCTELPVPPQQPVWLAVGSGWNPCLLTHTLFDTLCLAHPWQAKGAICHVEIPFCGLEGSGLHPIAPLGIALMETLCGVSNSTFPLVIALGKFLSGAFISMVGFCLGIQAFLHVV

SEQ ID NO: 924046 - protein, 202 aa, Homo sapiens
MDFASLILDWNHSPQVQTLECGVCPLSTVRHAGCHSGEGSSKYRHGHQFSVRLRLDLAHCKQLPQLPPGNAVVPGSLEIPGTARPQRRSHIPGLGSSQVWGSPKDYSSSLLLFTHNVTIKGVFSPVCVTALIAMPFSQSQVLVLHAGRMSIQALPGLKVEPHQGPVPFHPKPCLPPAATHGVQAALRANQGTSNIYLAGFQN

SEQ ID NO: 924047 - protein, 163 aa, Homo sapiens
MGPNPGSQAALFCGPHFHSASQFKTHWLGIQLANGSRLKSTFDGSNFPGATTKSVVWSTQPLQPAGFGEYSHLLHVHVGQQQVSPLLGQSFQRKELVDIFAVLKPSFVVPPGMGETEATGVWSKSPENCSSPMRAEFTGQSTIPQFKEREAPPKQQDCKRLIT

SEQ ID NO: 924048 - protein, 169 aa, Homo sapiens
MTAESGYTYDLAPKSYVWPVKTKRVPTNSDRHWRLEIESLLKGQTMPVISSLSLHLIMVLFVENSAMMSITILCDRRENNSWVNACMSMSGPHMQLAAYFLYFFLLSGREAMINLVSCPRSEILGSHLPISLKLEEKKKKIDSPSSRRKLFLPDCFEVEHLSFLAFGLK

SEQ ID NO: 924049 - protein, 149 aa, Homo sapiens
MKFLSSSEIYCPPGTSMYFSSLGRSSLKGSSPSQGLIDKTPISLGWSTWRKGWLWSSFSRLQRSCLPALKRAAHLPAQRSSSAKGQTASSSGSLTPVLPDGEIHPSRGRQTPHTGELWLASGGCPSGTKLPEEAAGSNLCCSTASASDT

SEQ ID NO: 924050 - protein, 178 aa, Homo sapiens
MHGVYVGRYTVLLRLQHQEKWEIKLWGLGAAAGLLDFAGGPLWILFAWVSSAEAVEQQILQNSKYCCLILPLEASSRKGTCVYEVSVSPYWEVYALPPEVESTEAAGLAELRWAPPSSSFHGCFVYLLKPQQYQTPLPPPGCILTGQSQTAVLVVLKAPWAWDPLSQARDVISWCAIC

SEQ ID NO: 924051 - protein, 144 aa, Homo sapiens
MSFLQACTTGSLSCPLPCPYSIPPAAKGGLRKRGYEPTFHNAPTDDDRKSYSQQILMLFILGFQFLVPLLATVKYSSYPYLLGMNSKTPNGCEKQPINNMFLQICWSIQEGNVDQSHLSQHTDLQEKAKLGQSSQSQVDSPRQA

SEQ ID NO: 924052 - protein, 177 aa, Homo sapiens
MGQYIDTAYKIIKSGTYHQAVYKSFGIHSIRYGHKLHKNLGSTVVAATKTPDAAGEAWLGLRATRSPWEPEQVGAPPSSELVGCPAIVVDLDIPVLSGLRKPLDTAGVGVPASAAWPLPAPGVCSDFGAKFGPSLGAITTPSGVCALTAVLTCQPPATSSLSGIWVPTSMRGRSRGC

SEQ ID NO: 924053 - protein, 137 aa, Homo sapiens
MINCCCDQGINSFSRVFYGSCIKVQLKKCGNRLIQKIGTRKVGIAIKIPENVEVILELDFRGCVETPECPGRSHLQGWSPFGEPVLGQCEGEMWVWSPHTEALPNGALRRRPLTFRPQNGKSTNSFHSVPGKSYRLK

SEQ ID NO: 924054 - protein, 345 aa, Homo sapiens
MQKHKNDIMDFGDLLGDVEREKVFASSSPSAIIWVRGLTDFKNEATDPRGWSNDCDQNCDSAVDSEVQTDEFLDGNEEFFGNWNKGQEFKHTVEINLSKVEPSANSQDNEEKDLKVCRIHESRLGSLQLDFTRCMESLGVQTEACYGVEPSWRTTTRAQWRGNVGLDPPHRVPTGSLPSGAVRRGPPFSRFQNGRSTNRLYHVPRKVTVTQCQPVRTASEAEACKATGVELLMALEAHPSDQCTLNVGHGVKKDYFGAFRFNNCHSGLWGFCIGPVAPFLWQISPLCNESLYLMLVPPLNLGRRSDADRNAMVDDFRYVHYTFSAELLSSEFLMASNLGQNFRNK

SEQ ID NO: 924055 - protein, 146 aa, Homo sapiens
MLPAGYSPFGSLRSSLAQGRSRNAVLEPRPGFGDPNCLLERIHLHNIKVQGESASADREAAASYSEDPDKVIEKSGYTKKLTFNVIETASYWKIGFNKNNHNQMPKKTDKIEKETEYKNLWSYETVDPKLPKSELLNFLMIYCCLC

SEQ ID NO: 924056 - protein, 173 aa, Homo sapiens
MYENAWVPSQTFAAGAGPSWITFASAVWKGKVGLEAPHSVSTGALPTGAVRRGPLSSRPQNGRSTELAPCSWKSCRHSMPAREISQEGGCTLESHRGRDGRRPWEPTFCISVTWMQWADPYVTQVSKLSAQPQSVVGAIWENLDWVALPTGPLMAGTVSSMQLHRKVAKHLEI

SEQ ID NO: 924057 - protein, 149 aa, Homo sapiens [sequence omitted]

SEQ ID NO: 924058 - protein, 165 aa, Homo sapiens [sequence omitted]

SEQ ID NO: 924059 - protein, 162 aa, Homo sapiens
MFPFLCPCVLIVQFPPMSENMRCSLSLLDIRRLYGNAWMPRQKFATGEGASWRAPARVVQKENVGSEPQHRVSTGVLPSGAVRRGPLSSRPQNDGSTNSLYCVPGKAADTQHQPMKAAMREAVSCKATGVEMPKTMGTHHLYQRDLDVRHRVKGEKKPALPI

SEQ ID NO: 924060 - protein, 187 aa, Homo sapiens
MPSPPTASYRAGTCISAWSCRLRRRQPVHWAVRSGWTLHSPTHTPLTAPRLAQPPPKRDPGQKHEPTYLHMATFLHLQSQQELCSYGFGRLHPCGFAEYSETDRWEGVPGETPTSLPTEVEPREVHYVCSREEPDPSSSVWNLGFNQPVSSSSSLLSPVCWELDTWPKVARMADWCFPSSWSLSLPR

SEQ ID NO: 924061 - protein, 183 aa, Homo sapiens
MLQALIITVFWKIGTDKIKRVHKTQGCGPSARLMPGSLQHSAESGSSCPHYPGRSASTYFEGEVESPWVGKYLMTLARLPRQKDRTLSSLGIQTTQSIMCLYCLSVVQTRCGPRGNDLVGVPATPEATEVTTHGSLPLVLRLGKMSLHEQIEGWRTWRILLNYESGSPWAGELKRRRDRQSYF

SEQ ID NO: 924062 - protein, 144 aa, Homo sapiens
MGCCGNVILLLIILFRMGTAVSGAPIWASHHNSYYLIDQELIVKVALAINPSWNFWHGYDLTVSLPYQLYKANCMEILLEYWKKFCPMGNYSPWHFYATCDSSFSRLFLQEYLHNFQSTTKMSVGKVIYQNSIMKFMIGDLKGI

SEQ ID NO: 924063 - protein, 138 aa, Homo sapiens
MVLRQNTAVIKKAKSEVHRKQSNFYAKGRVSQLHLPLYPWEHPTPPGTEKIQLFPYLSQPLGNLPFQLMAKNPSFLTEGSCVRWPLVQQINIQRLGIEQRQGLTFVHTAKEGWPSSDSKPAGQVSELTEAEQRQLIIL

SEQ ID NO: 924064 - protein, 152 aa, Homo sapiens
MHSALVANRQPICESKGNALKEIYSATPVNSRMIRRQNSLIANMGKQFSGTIEDKTSQNISLSHSLLQIEDLTIFSSMKAERGEETAKEKFKAINSRDCFMRFKKRSCHHNKKVQGEATSDHVEAAARIKNLNGCVMKIFFHFWELKNTIAT

SEQ ID NO: 924065 - protein, 164 aa, Homo sapiens [sequence omitted]

SEQ ID NO: 924066 - protein, 168 aa, Homo sapiens
MKLRSLACPSPLAVQLGSYSEAQNKRLVKSCTSIVPCISEEVKQREVEQQLSGYSVAAVSRPQMRKTCRIVHPQPEPAFVRVLPNTVTQAQVGWKLMPPLPLVLLIRKTSVELNLKELESNERFANRAAPRITADSETLGVFRGQTRFIDKKSKVSYKFPLLLFVFGF

SEQ ID NO: 924067 - protein, 168 aa, Homo sapiens
MLINFSSSNALFCCLMSQAEIRTLSCRSVGVYWRSTPDPVCLGISSGGCRTADIGEPQMLLPDRSSGGFVSEEYLAVSQAAWWENHYSLQSCQTGTFKSAEVIAVFCLSVPCPQRWSLQKRAGLLQLCWAPPSSSFLAALFTYSSLSNGGCPSPSLAATLQFDLRLLC

SEQ ID NO: 924068 - protein, 143 aa, Homo sapiens
MNNSRRATLRAVTLTAKLKWVGEQESEASLNNTGSHFLADWFGRRRDLETLTKLHRKQQESGKGACGMGKIFANYVSDKGLISKIYRCLSIYDGVMSHPHNSATCPYPEPEKTSLRKANLRCRNMSVSRGLSAINKRIFTWVA

SEQ ID NO: 924069 - protein, 135 aa, Homo sapiens
MLGGYQSQCWLLRISKGLDLKGLRELAAATLVLVTPPSKSSAGLSLVAVENLQGSTVGTLGPSCMDSPVGSSDLQLRQNLMQCKVLIRVTACRLFYVPLVARKSRCPPSLKVRVLNKGVNHRSYILAPFISSSII

SEQ ID NO: 924070 - protein, 204 aa, Homo sapiens
MTKLAKIWWYYEGEFLCTSSLSVPAAIDVRCDLFLLAFCHDSEASTAVWNCESNKTFLLCKLLNLRYQKMCGNTRISRQKFTAEVGLSYRTFTRAVWKGNVVSEPPHRVPTVAPTSRTVRRGPLSSRPQNGRSTDSLHRVLEKLQTLNTSLGNQPGGRLYPAKPRGRAAQDHGNPPLASVHMQKSGSPANGTEKWPKDMKGNNL

SEQ ID NO: 924071 - protein, 192 aa, Homo sapiens
MCLASPSLSAVILLQLQPWLKGAKIQLGLLLQREKATSHGGFHTVLVLWVHRRQEVRFGNLHLDFRGCMETLRYPGRSLLQGQSHHGETTRAMQRENVGWEPPHRVPTGALSSGAVRRGPQSSRPQNGRSTDSLHGVPGKAAGTQSQLVKAAVGAVPSRATGAELPKALGAHPLHQHALNMRHGVIGDYFGA

SEQ ID NO: 924072 - protein, 141 aa, Homo sapiens
MSHRVPAYFNFTVKLKRSNQPQRSLKPKPNSEHGTHSLKFCEGCESHPRALMQMYKDINVFISVNTISILYSMDQGVILNFMSCILRNTFCKALASIDNDFSDGSEQTKLETFWKEFAILDAIINICDPWEEFKISTVTEV

SEQ ID NO: 924073 - protein, 147 aa, Homo sapiens
MPLDLLCELPGVLQIVGVHQFPFHDHEGHIRAGGEVKVCDWRQGDRRTGFVFHTLKLHHFNVEIVSFPYCMMWLVLVYDFTRRHCLCRVWLVRSSTSESSIQLTLYQSPRIIYGNSTSAQCHAEEYSYFPKPSALWSSTAETCDKRS

SEQ ID NO: 924074 - protein, 167 aa, Homo sapiens
MFTYATNLHIMHTYVCLCTSDGYTEYSTLVGEVLLDNILKSVFKLGSVLPATFRDALPREEESREAVWLQWICRAVVGTAQFELPRGFVYNVREKAPNQASVMADTPLLTKLELPRSTSDCYVVKVSQDLPFYPKSDPFYTKSDSVVGAKIDGTGNLPHHRPSARNI

SEQ ID NO: 924075 - protein, 131 aa, Homo sapiens
MLYNVVAMEASACPLRFALIVQSCSSRNSSARALYPYISQALWCLMMEKFLLKNHIIPFNYSICTETEIECAHHTRQSNKAPSWKQRAAFTKHQYQCLNFGFSHLQKDKNPGIATAMKTNIIGKLYQKKEK

SEQ ID NO: 924076 - protein, 198 aa, Homo sapiens
MGPKGVVGNDEYVHYLHCADGIMERVPGSCPTTKRNKVCRHQRLNQFYQFYLKNLTIIINIVKMATLTTEIYRLNTIPIELPMSFFMEFEKNPSKIHVQQIWNWSELPHRNNTYTCKALTAGKGIKHTDYQGCFQIMGQRQVSGQVATSLSKLFIDNCNIRDLQQVLPKLERGYAFRVLKGHASSFRPFSMMLTVGLP

SEQ ID NO: 924077 - protein, 149 aa, Homo sapiens
MVPRCSEVMIFTDQAKDECGNFWVIRLLPWKGGVTSRCCHGNGKPMWHTGAGKSKICRVGQQAGNALSIPQNVAMTFAVDGRCFLMSANQKGCSKTHVQEPLSQTIALLQLGHGDTFWIARPRYPLPSDHSKFSRYSGTPLSKDTYDIS

SEQ ID NO: 924078 - protein, 145 aa, Homo sapiens
MGRNKSRKAENFKNQSASSPPKEDSSLPATEQSWMENDFDELREEGFRRSVNTNISKLKDDVQTLHKQAKHLEKRVEEGLTRINSIEKTLNDLMELKTIEQELRDACTSFSSWFDQLEERVSMIEDQTNEMKQEEKVREKKSKNK

SEQ ID NO: 924079 - protein, 158 aa, Homo sapiens
MRPFHVGAVGMDIFILVLLEKPYNPYVDPPPVISEINLECHRLLKTITSSAISCQLAIHFDLNANHQESSATEHLNNLPPELEHTLWWTWRCATHHPLQGLVPASGGVVAGQPSAVTPFGDSPHAMTNQGGGRKPWPLAHRTTLMDHFSSRNGANGLA

SEQ ID NO: 924080 - protein, 162 aa, Homo sapiens
MVSPQIKTLSFTLWISTCSEVVENENLLTVSEHARTQSKGWSNTGTLGKMDERTLATSTRAVPNEVAVEEQVSQTGILAAVRSPEKTSQNLESSALGVPGPPCKRFKTNWFSKCGAQTSSIRTTLEMQDACPILDLQTTEPLGLGLHSLCVILVHTEVKLLI

SEQ ID NO: 924081 - protein, 170 aa, Homo sapiens
MGDDAWKVMLNGMPAIENAITRGLTLKLPALAPLNHRVKAPIFIASWKDRVHSSPEGASSLTVHLTSAPKALPSFCSRHEGLLVCSLTCLASFHLGLSHLPFFSPDTHKANSITSFKSLLKSHFLHEAYSDHSSYHCNPPLPAELHHKLLYSTPNPSVYHALRYLLVSWG

SEQ ID NO: 924082 - protein, 198 aa, Homo sapiens
MIVPRSLHLALCVHLCFVSWSIILHSLPFIRKCFSVSSSTYEPLQFLFVTYYQTFLTKIIYVDFMDPGGSSRNTCGKQKISCPFPSDMHSLLIGQNCVTWPPLSSWAWGSRILLDLTESIILNKIGVCKEGKGMDIGGHLISKGICPLGLILLQSDEDAACGKQGAGATGHLERAAKCYFGFLLLGSPRSEDPMTWIP

SEQ ID NO: 924083 - protein, 156 aa, Homo sapiens
MNPVSLLELVGNLVKQSKCELSFPHLCSRASVLVPCTAAELPAKLPGNGPLFILGGMAAPQAPSVQGSRQDQMRGKHQIPYSKLASGAQQWPSDPPLPLTHQNVIEAPSKKLWSWGSYQDEQGHDRVLSTLRNTCLGEFHLEVKIRKGSYSIIQLK

SEQ ID NO: 924084 - protein, 136 aa, Homo sapiens
MGRCPQKSALNQHILLQASSLNIIPSPSQLPEIHRPFCSIDAPFPPPLKLTYSILFFFVVIRMAFWWTGENIQVPMALTPDLNMQEVHFLEDHLSPNISANSREVYLDLLTECKLTLYPHFYGIYYHGHDVRAFSI

SEQ ID NO: 924085 - protein, 210 aa, Homo sapiens
MTNTRTESRKRERKERSRIQGKKKRENGGDSLAKQEEVEQTPLQEALNQLMRQLQRKDPSAFFSFPVTDFIAPGYSMIIKHPRDFSTMKEKVKNNDYQSIELKDNFKLMCTNAMIYNKPETIYYTAAKKLLHWGMTILSQERIQSLKQSIDFMADLQKTRKQKDRTDWGGWRQSGEDEGCWPRERGLWRCRSTSLPESRQRKLKYRQRYA

SEQ ID NO: 924086 - protein, 145 aa, Homo sapiens
MLVMVNLCGSAATSILASSEERIRLKGIRQKSNKKGSTSSSTWQHRRAGSCYTGLVFSRHVWEVPFEEQLLGGITGPGCSQNITLSNVNVKSSGPGLLVHGILEDPFFHLIKLATETCACVTKFSCHGFQLHQVIYGLLYTVYSS

SEQ ID NO: 924087 - protein, 164 aa, Homo sapiens
MKPQTFTVSVTALKDGVSGVSSFWWVCGLADFKNEAADLCSQCYSSYRWFGPKETSSTCVGTARSTEACSFPLSPLLQVYSQPTRHYFQSLQKPNIHGALKSWYLGACCSLLLCISHGEHAESKFSQWRGFFSTLARSFTPSWLSIEIEVIWATDYEGSNFSNK

SEQ ID NO: 924088 - protein, 159 aa, Homo sapiens
MDTLPDPEGWKSAVGLRLRQTAVVDGQQKLSSSPFWAKPFNKSPGSSKLSHTFLSSSKPSKLLQPLPITQFQRCFHIFRYLFSSTSLYRYQFSVLVCFHTADKDIPETGQFTKEKGLVNLQFHIAGEGLTIMVEGKEEQVTSCVDGSRQRELVQGNSHC

SEQ ID NO: 924089 - protein, 137 aa, Homo sapiens
MGNNSTPSPPMAFKKLAYWIKKAGKSKIFRVGCRLETQRRAGVVLQVQRPSAAEFPLAQGRESGSLSKSSDLGVNIHQVNIRGSQAQSRESLDVGKKGRFRVSKALNEFGDLQPVEGERVVEGQVENMFQDGHYDQL

SEQ ID NO: 924090 - protein, 139 aa, Homo sapiens
MDIGNNVTGGMYTFFDIGSNTILSPRDCRRNIEEVLQRHSTGSPSQSNQARERNKNHPNRRDKVKLSLFKNNKILYHSLCPKAPGSVRQLQQSFRIQNQCIKISNILYSNNIQADSQIKNPIPFRITTQIIKILRNTAN

SEQ ID NO: 924091 - protein, 161 aa, Homo sapiens
MQAIAWWLPSGGTSQAFLCLVILTSISALHLGAIVKWKSKSPMKSIKMKKCGTKLTLKRKFGYSMSTEIRMEEEILRLLITPGPGNVRGLEFKKGSLSKKPEGKCGMQIEQTNTGTDNQTPHVLTHKWELNNENTGHSEGNITHGLVGGLLSYNFESEKGS

SEQ ID NO: 924092 - protein, 207 aa, Homo sapiens
MPALFLSSAVTLPAVLLLLESPQFQSSRYFNSREELKEEENLSAAIPKSRSVAYKVEDAQELFICVYTLSLRGHWRLLCEIGEGVVCFGQLQSSTPARGPGMIRFHAANKDIPETGKKKRLMDLQFQRTGEASQSWWKVRRSKSHLTWMAAGKERVCAGKFPFLKPSDPVRPIHYHKNSTRKTCPHDLITSHQVPSKNMGIVGYNSR

SEQ ID NO: 924093 - protein, 145 aa, Homo sapiens
MIQYYLALWQWSGYFVFPSLNSFPASSSSPPETTSAWTALSISLSAFWSKLFNQSLRSSNLSRIFLPSEHSKSLGSSKFSHIFLSFEPSKLFQTQPVTQFQSRFHIFRNLKWGLKNCISKKFLYDADVAGSETTLRKTLMKENIN

SEQ ID NO: 924094 - protein, 152 aa, Homo sapiens
MKLCKVECSITVQVHCGDDGLMASKVRKPCSLSQLKTETLQRQGQLACLTFLSVENNKRRGNERKIKFLRRDVSSKFNAGAIFSKQRTFCFYRLGSVKTCSTSSLLCVFLFICVSCHKQSECRAIKRYDFLNGPIKSGSAHETWISPEIMER

SEQ ID NO: 924095 - protein, 297 aa, Homo sapiens
MASWGVPYDQLTEEEKTRTWFTDVPNSPVAETNTGTLIWHHSSGDQPATWWQVDYIGPLASWKRQRFVLTRIDTYSRYRSAYPALYAFAKTTIHGLTACLIRHHGIPHSIASDQGTHFIAKTVLPCPVIKVNGKLQQPNPGRTTNGPDPSKMKVWVTPPGKKPRPAEVLAESKGNPEWVVEEGTHAVLKVCSYPSAQLRCRGGGLLDQREFPRSASLLGEQQKDKNANIEAPTITPNPCCWAEALCSFLAVDQRLSSIPCQVGLSQMATCLSKHENQEGDKESLLARHKSQSFVIYL

SEQ ID NO: 924096 - protein, 154 aa, Homo sapiens
MGCTHCLTSPNEMIQDSIQDTSLYVELTLEQHKEHIFNGTSDEWVTGHWGYHGVPMCLMELDPEGGRKGSNRDLSCAFEDTWATWQEARYYYWMENVLRLETASPTSKSKEKQEIFKQAGTFKPVQCIQIQIYDCSVFRCKLSTKRKPSLDFIR

SEQ ID NO: 924097 - protein, 154 aa, Homo sapiens
MLSPSHTPHCSMPGLPLAGPARPSGQNKLSRPEQKSSKGTTGHRDFQPEKQHPKDPITIAKVAAHSPGLMAQCDWDLGVMGDEPIWGELVGSARLRYLGAYEQVGHDSVSHSYAWNKSKDPALHYTNANVGRTGFFTTQRAQWKVVFFVSAKLK

SEQ ID NO: 924098 - protein, 162 aa, Homo sapiens
MFGASVWETCMARMSQTGRSRPFALLCSQHLNVGSFEASDVPHVNVFSVCWHDILIHRHLLFYHVLLETQGSNQVTSVENALHPLDLHLAGGPDKGHGKSQGLCVFPAESGEGAWCSSSQAWVGSATACFLGANVSFTTDPATLCLLIGQFSPFIFNVIIDK

SEQ ID NO: 924099 - protein, 156 aa, Homo sapiens
MRVYLHKPRWHSLLHTWAMWYGLLLLGYTPIQRVTLPNTICKWNTMVGICVSKHRREGRFDGIAPGEDYFPTPFPFQLPFLLSTTFISNKTPTFTISNLFTCCHGATWSFTPASTQKHSPRLLHPLACAPAPARGGMKQDQVNGVHPCWHQHTCAL

SEQ ID NO: 924100 - protein, 136 aa, Homo sapiens
MAIDPLWVYLQGFPMSQSSRCQPCRLLAAPPWASDLSSLGLSFLIDSGKEEVRAAMADTSMLGPLRAMAILGLTLARQPKGCMILAAAQATFFVLPQKATPHPLKFDHKIAIHLMGLIVVLLLFLPHLQLLPPLRF

SEQ ID NO: 924101 - protein, 164 aa, Homo sapiens
MATLHPGEEGESDESVDSTRSGPSVAGLLEFAGGPLQTLFAWVSPVEAAEQQRLLPVPSSGRFVPEGHPPDASSGDAAPWPIFGADVLKDREEEKAVVPHQSQAAPLRGGLMGTRIPANLTSCSMAPAFPQAPAEEKSRGSGPAAGGSGESLSGNRLACAPVLA

SEQ ID NO: 924102 - protein, 225 aa, Homo sapiens
MTWILSLCCQRNVVKMEECSLNLGYMNCCRFHVDLLEHFKLPYKKCKYPEKAYSMRKPKFVIQKEHVKGKRDFVQPPLSQSFLAQIDQTSYNTPLNQCLIQNKALSLYNSMKAERDEEASEEKSEASRGWFMRLKKLIYLDHIKVQGEAESTNIKAASSYTEDLAKVNDEGGYIKQQIFSVDKTAFYWKKVPFRNFITKEKSMSGFKASKDRLTLFLVVNAGGDF

SEQ ID NO: 924103 - protein, 152 aa, Homo sapiens
MERGWGEHQGVAYTVAVCLWGLPTVTDLEDYKAFCGSSVLLPAVAEDWISITDYKPLLDSETTNLTGDIRPQMVVDIEAIPEGKPGKQEEATLPFYVICKLSKASQKALKILQFLTATQELDCNSSGCCGGASWPELPKLIKHFCSIWYSLT

SEQ ID NO: 924104 - protein, 196 aa, Homo sapiens
MCEKATKSLPWAGLVGDVWDFWWKSQSPRADRGMEGRERGSWSLGNKRSAPCGTENNSVTGSKSSHLYEYRFPLLKMEIIIMAPLLLQKGYAEKQEEWAEVAKRRGCKKRDAFLSWAKRERIHFSGTVVRIWGGWGQGGAYSSLLLPVLRPQPSEGLRRFKGHEEPAREPQTRQRRGTEIDAHRKMTTEKYIQRGR

SEQ ID NO: 924105 - protein, 135 aa, Homo sapiens
MSQELVALQVTLLHNLRTIALFFFSICQLNGENFEDLEDSEDKMEPEWKCGDFEKKKKRRRREEEEERRRRRRGGGWGRGGEEGEKEKEKKKKKQKQQQQKQKKQQQHSQKEQSITKNPIHGNSKNTELILKDFK

SEQ ID NO: 924106 - protein, 158 aa, Homo sapiens
MTILIQLPSWTHTPAVELKHPSYSISPKPQPCWVMRARRQNLILLYPNLDYCNLVNYANSIPGLRDEGEEDGKKKVLDEFWWFAVTETWAYWRHRGLMVRKPQLPQSQGKLCLRPSSVTWRPISESSTSWKDYQGVKVSSLLERGLILLVQKSILIHL

SEQ ID NO: 924107 - protein, 136 aa, Homo sapiens
MVDAFLCTWKLSDSKNFDDYMKLIGASFAIRQVASMTKPTTIIKKNGDIITLKTQSMFKNTEISFKLGMGFDETTADDKKVKSIVTLDGSKLFHLQKCNGQERTLVPELSDGKLILTLTQGTAVYTRTYEKEVISY

SEQ ID NO: 924108 - protein, 152 aa, Homo sapiens
MSSLTTKASFNLISPTLGSHAAPNPARSSPEKHRPLSLHTAPQNFHCPNTLPLFHFIVLINIRRQECQASEPKLSHHIPCDLHVHIQMAETRSLVSLNNPRPRPQHEQWLSAQSWLTSLPASLRRSHHATHSVPPGLHKDKHQVTQEEIFCG

SEQ ID NO: 924109 - protein, 164 aa, Homo sapiens
MINDEEPDTKWIVPLTSTLFEGWELELLTSLSLPLVTSCKREPMSKQMWEPEGTNAGTSQSLLSGRSRLCAVPTAASQPLPSQHPTYKSPLGKSRQGTECVLGTWAQDIRGTWQGCCVEQEALLKVALPLLLINKTALWNLLLTKSKVIFCPLSLASLSLVICS

SEQ ID NO: 924110 - protein, 137 aa, Homo sapiens
MASLSDKTPGFSPSCHVFPSPRRFCCEPDCQPLFPGVRLLPREDPIQKASQAKSVPAECTLPLNTQSIGLFLKAAVFLDHDDEAKAEAPYSLFCLFYEPSTIWDDIWLLNLTKKTKLALDEVITLQISDCHSEFSVI

SEQ ID NO: 924111 - protein, 273 aa, Homo sapiens
MEMHLFPNAFALLKLPHTLLVLSHDLALYRFKTLFKTFPSQLLEPLLLSICKPSGYCRSPLEQRFSVCFLDQWHQQHPKTCYKYCSHALSRSTESDSGSKVGPSPLSFNKSSRAVQKGNVGPEPPHRVPTGALPSGAVRRGPLSPTSQNGRSTDSLYQVPGKAIDTQRQLVKAARREAVPCKATGAELPKTMGPQLLHQCDLDGGPSPCPPCAPEFTAFIAQLFHFFWRPFQEARDTWGAPVSSLPPPWGTTNFTSSVKANQGLSENTSKQNR

SEQ ID NO: 924112 - protein, 115 aa, Homo sapiens
MASLPQRISYTDVKVLLTPEVTFTPHSHFSVILCVPSSLFSRGESKVSEIGFFVQMFTLPLELDSPITVPSCPLVPRMDMHRCEFLHYIWHMGTGQVLIFVAELKCPFFAYGGLS

SEQ ID NO: 924113 - protein, 164 aa, Homo sapiens
MTYSSIFNQLPMWNVGTGAVILRYEMEAVLRMLGIRSFHPWVVLPRRRDIYQCLKTFFLDINEASSVKARGATKQPPMHRVAHIAKNYAAPSVNSAKVEKPYFRDKRSKDRVEASTLVPWGRPLFAKGTESEQGQGLVLQLCPSDVIEPWNSVPFLEGLRLDGD

SEQ ID NO: 924114 - protein, 287 aa, Homo sapiens
MAQAILHPHHFQARMLHWKPSSSSTPANRPHCNDPKDHLTQTWMRKVDPGNPGLGSWPAVGSAGISVDGGLWNGGKSWPAVGSAGISVDGGLWNGGKSWPAVGSAGISVDGGLWNGGKSWPAVGSVGYLLMEGCGMVEELAGSRISGVSVDGGLWNGGKSWPAVGSAGISVDGGLWNGGKSWPAVGSAGISVDGGLWNGGKSWPAVGSAGIAVDGGLWNGGKNWPAVTEQMYREKPDSRDWASLNNTCHGGMVFSHLRASISGCADHREREKDSLETEQYVKPLRRI

SEQ ID NO: 924115 - protein, 244 aa, Homo sapiens
MVGLACLECHPLTNKSLDGGFSAVAVLLSWTISVCCGGCPVHCDMFSSIPALHPQGYSSTPTLNHDNQKWRSKLWLPHCCWSSEASTEDKALENLARASRVDGGIRAPRIAVTAVTWLDTVMDSQGGVWWPRKSNCHVDNSGGMESKSLLSHIHSRKLTRSSNGGRGKGVENLDSTGRGSTLALVKQAEPQAPPAASLCPGDPAAQKGYTDFPCRATQRISFLYSVLKQRLLLPSVRRPLPWHS

SEQ ID NO: 924116 - protein, 168 aa, Homo sapiens
MVTVPRENVINHDIHSFCQQAFIDWLLYAATPESQQLNTVGVSVLAPGAFQCLFKQAVFYKGIQDPDSFHLRLHPFLRPPSSALDPVCVAAEGRRRGHVEGFCGPDEAAKPKLIEPLDYENVIVQKKTQILNDCLREMLLFPYDDFQEMAAAKRMLRGDLLHLNNLAV

SEQ ID NO: 924117 - protein, 131 aa, Homo sapiens
MIFLNDYVQFFVNSRCFYGHNTLFSLRSQVVQLKAKFSDLLFRSGKKREGSMNFIEFTYETLCSVNKHPVLGGREVGPNKRISHCRLQVTGAVPHTWCPWACASDSKQQTSPFLGNIIGKHGIPMCSENMV

SEQ ID NO: 924118 - protein, 136 aa, Homo sapiens
MRLKDLPTESQPVSGTVRISHVCSHSVVLTPFMLPCSESLSHEFSESGKQMEFASWLRTWGNFAEKLPNEGVEEREEAGCGGSFILWSKESTILRDSGEEEPDQKWPFNCESYMDLGYAVSSTRFIKFYFCFTYQV

SEQ ID NO: 924119 - protein, 152 aa, Homo sapiens
MRFGWGHSQTISWMNDGMSACGCGEKQDCPRFVTVVATGGEAEEDRNTWKSLELPRDLLNGCDQNADSDIDSEVQAEEVSDGDEELIGNWSKGHSCYALAKRLAALYPCSGDLWNFELKRDDLGYLVEEISKQQSIEDVAWLLVKAYAHLGK

SEQ ID NO: 924120 - protein, 177 aa, Homo sapiens
MNKGRSNGKCSEVIRSTLYKTAAALLSENPRGCKNKLSVITSISGVIRTFKFHSTWYSMERIPNAKEESSNRENNIKIWKHYAIEDVIIFIENAMKAIKPEAAIMKEIVDVAKKREVRGFKTDLGEIQELIDTTPEELTEDDLMEMTASKPAPDNEEKDLEEAKNRVTSDNLTERYC

SEQ ID NO: 924121 - protein, 214 aa, Homo sapiens
MRGSRDVKTSKEVHSLLVEGDPANDQVIKILLDKSCYRDYGFGEKAATIPKLRQFLGQYLVPGKSLKYVLNQCLALNCRHHVGLQWIDWTLTGSSYLEFLMRMQSDGGWTGAAERKLQTFAVNATAHKGGMHPQSEQQQDLLRRVKEQTLHMIERDPSGLLLLARVEEVLVEQGQQQWGYLKKQGKKGAGTEMAGVTAVGFLDGPSMGWMQGDR

SEQ ID NO: 924122 - protein, 152 aa, Homo sapiens
MAAPLFQREEDSCKEEAEEKAGGAVQKPQEVGENITSGSCKRLSVSTKDKGESKVTQKALQQAMVLFPGGVTHTFIPEGPRQGSRLCAAIMLDPLLLLKHRHIIMHLCLPKAESLHIKKAGKCYSYPYNKKNTRHILSQQLSIKPSENEVLR

SEQ ID NO: 924123 - protein, 138 aa, Homo sapiens
MLPLLAHLIITETHTYNLCTWCCNSISQRHTESYINKGIFPRSNNRCGRSEGVAVGAQGRTDLLHTKQVNPMPRQNRPKGALGPFHYVTTQQDVTIYESENEYSPNAEYASMLILNFPASRTELMWIIEVVFNKTMEE

SEQ ID NO: 924124 - protein, 249 aa, Homo sapiens
MDADELRPASDEVCVAPGLHFAARKVKIGVEVPSAMLVGCNQSGIDLWSFELQRDDIGYLAEETSKQQSIQEVTWVLLRAFRFIKEAKHKSLKNLQPENVIEKKNSFSEEKFKPTAKICINFRGCMEMPGYPGRSLLQRQGTHEEPLVGQCKSQMWGQELRHRVPTGVLPSGAVRRGTLSSRLQKGRSTNNFHCLPGKAPDTQCHPVKAAGREAIPCKATGVELPKTMGSHLLNQRDLDLLHIHEHVAG

SEQ ID NO: 924125 - protein, 162 aa, Homo sapiens
MADVTGGGAQAVLVLQRAIKSGFSTAINCCSKTHFSHLMRKVILQKKVNGLCAIAFSPSNLHSSSIKCLEIDRVDIMFALDTFRATKCDTALERKGKNDSAMAADDARLPPALFCIPTFLPADAAGANLAAQGESLATCVFTHFAITQQQRFLPIESKDPSI

SEQ ID NO: 924126 - protein, 159 aa, Homo sapiens
MQSSPILQATILSHSCQFDPDGKIKGPSHHGTTVILVHQRFLPHAVFSQLIFKFLLGKCFMNNDMYSVAGGSIFLSKLMEKRKVVCGHDNYILPEKVEGLKIPRTESSDGAASHPFTPTVPRYYRSVCIKRECIPSMVFLPPATVGDDINFNKITKNTR

SEQ ID NO: 924127 - protein, 136 aa, Homo sapiens
MSVCSFSWCRVQTSDESTIWGSEGWWPLSHTHSSTRGAITKSCSVADLTNTLSHSSGHWRFKIRGVISSGSSEGGEEEIPSFPPSFWCSQHGLDTEEERLIVSSACLPSCHGAAQSIGFSSESPHLEVRISLSLDI

SEQ ID NO: 924128 - protein, 157 aa, Homo sapiens
MRQVINDPVSFVWCTLLAKLLAKSNAGADLIGGRAQGKQWGARVNTYEASLTGLSLPSCCVARFLTGHGPILFHSLRVGDPCRVSEAGRWAVTHMPVSLFNSLGREWSTNLAVAQLAVRPWMSFKQMLCLLGQGFLLHSLQEKCHTSEKGEVNDTKG

SEQ ID NO: 924129 - protein, 161 aa, Homo sapiens
MILIKVLFCVDFNSICCFCHFKKLGLLCAVVKSTVFWSADMQTTVPSPPPVNSQVCTIPKGCCAQPFLRSETQILISYELHSNIYYRGSMPVVVFSVEFLKTDSDNSVCVCAQVTRYKNCCLRIKFPENKVPDITLFTFICLLMDYNFNPWLKSGSSVICD

SEQ ID NO: 924130 - protein, 135 aa, Homo sapiens
MEYEEALGILKLEGPALLRSLFVLLIRVKMELDKRIPRGGPLGATLLLLCLHHIAMAVTHPDDWDQLRLQQWNTGLQEESSHKEEEHLDTQSLNIHAELHQHKHPAGIGDITRYFRIILYVCCLCPKMCHFCKDP

SEQ ID NO: 924131 - protein, 144 aa, Homo sapiens
MVCRSQTLREIFVFHMRLHHIEMTKTIKSHQSKSAERRGSGSKGEVCQEVGKVTQDRKSATSEVGSYKDMATLWLVVEKGDNFKHLAIFGDVFDWHDLDVEEELPSCNIFVQVKMETKSSPAERIILKDLPNKFFKITYVETQR

SEQ ID NO: 924132 - protein, 139 aa, Homo sapiens
MTAFVFIVSHHLSIHPSSMDRAAPLCQALGIPKLPASVGRDQISPRDPGCAFHLLNLSAQLWPPGIRLLLTYEHCHYCGHTTVMMATTTVRSMMISPLVIITSPMTTAHMVTATTIATGIATVIAGQRLFNSTYHRMAQ

SEQ ID NO: 924133 - protein, 170 aa, Homo sapiens
MAKRGQGTARAVASKGASPKPWWLPPGVGPAEGKCGVGVPTQSLPWGTAVIRGPPSSRPQNGRYTNSLCSAPGKAAGTQHQLVKAAGGAVPCRATGVGLPKALGAHLFHQHALDVRYRVKGDYFGALRFNDCPTGFQTCMRPVSPLFWPISPFRNGSIYRRPVLALCFGS

SEQ ID NO: 924134 - protein, 126 aa, Homo sapiens
MKVALCSQVAVGLEKCGQFRVMIRSQSTSHGQESLNKGSAKDDIQQVPIFWINEPPSLSRLFKTGYSFSKPKSILTHILPHAELMTPEAGIRVMLLQAKEHQGPPNAGRDKEEFSLRGFQVTWNLG

SEQ ID NO: 924135 - protein, 207 aa, Homo sapiens
MRCPAWRSDTAEGQEGEGDGVSWQQWGPAGAMQGEEDVSAISKLMRVQGACHRPAAVHTDLHNRARASGRHPETLKVIEPPMVPALLPLALAKRVSLVAAVGGEWRRGDDSGHCWYWILGAGHGRGQYSWKEAIDGWQSVPRALCNYSVTPACGRLLERKPTASLLAKNQLLRYGCSGGKETWAPGRTMLHSKERRLEADSFSDGDP

SEQ ID NO: 924136 - protein, 157 aa, Homo sapiens
MVSSLRCWVTLGISKSVVLAARTSTPVSKNSGKGQEEIEEHLANPVILKKQQHCLSQLIYQKQFLQLTCYLLNSFTIIAIYHKYKILGIWEVILPERPNSILTTSIPYCETNVFIVYRFHIAANVHTEWSSCQRHPIQPSECASASCQRGGRRKRRW

SEQ ID NO: 924137 - protein, 138 aa, Homo sapiens
MHDFGGPRGFPFTMAMCLEWHLQAKEWQRLWANSRSCSRYGKLPPSTIRESVALLTPDSRMNSCDPLGPTQIIQAPPDLSQGPQCGPHLPSYFCHTTEHIRRFWGLGCGVLGGHHSAHHADRQYLHSSPVSEALWCPC

SEQ ID NO: 924138 - protein, 151 aa, Homo sapiens
MGRDQRGNSRYQQAMSEAYVMPVKPCRTALEMKALSTDWEFLQQYRQPLSAAAPVLGQNTHDKMPLMEKGVCGNSLQQQWETYRGTKVGKDEIANEMAQRVTGVRVCPGVLGGKLVKRIVRTERPSRFKAHLNHRKPSVRGQRMSDLGGIL

SEQ ID NO: 924139 - protein, 148 aa, Homo sapiens
MFTYLVHFLIKKIAALFLVYDSFFGKNHLQVDLNFLLNFRENSSSAWPSRTLTPTEMDKKVGRCQSDERAEILTALEGCQYEMAVGQAVAACWREAALASGSQAFGLQDLLQQLAEEEVGGIQMRAVVCQDQSSAAHAKESNSQTLGA

SEQ ID NO: 924140 - protein, 157 aa, Homo sapiens
MCKMTTSPNMKHPKAPCSPLLISVPHQEWELTWQLLGVGVLFIVVPTTYGGKWEHPADHLLLPQALSWRQSRALGPVLPGGLLSRAIGLKRRHLLRTCSWTFSRSCWRSGSELRKELGPVSHRHSVASGSHPHPLHRGVLLRERATSRCSLGCHQLP

SEQ ID NO: 924141 - protein, 290 aa, Homo sapiens
MCLEMSSRRQVLDQSPHNCDWYPILLWLSRYPRYKTKSSPPFPLLSSSRRKGSLLEPQAVQPGVRGGAMPVLPCLPQLVSQTALSSVLHNCCALPPLVPRDALHTTSQRFFLPLKLKPGLLEFAGGPLQTLFAWVSPVEAAEQQILLPAPSFSSFVPEWHLPEVSWSSSAERLSLLKLDPQPPLPPGALSQADGNFTYQPLAGAAAFLSEMPCPERRNLERQSGPRYFAMLRLTSYCCAGSENFKPVDFSLLDFVGMGPAVREDLASWLQPPFQGSEWFCLTGVPGTAGV

SEQ ID NO: 924142 - protein, 254 aa, Homo sapiens
MVDPLTACTVCLEKPQTLNTSPGGGIENHLLLRKYFRMTESSPRLHTAPDAEGNILRANFKGNGTQRGETKMKVKTTDIVAKGTVTGSSTSHCNRNSTRVVAHSHYSLKRLHAACEKKQIAQSEWLEKAKPCGIQTKNPYLVFIEISNNYSNKKGQSNHATQEYKNMNIDSMDLHKGKYGYSSKQMKAALEVFKGFDVLAYRPHTMNNNISHFHPAFQGENFKQRQHSVSHIVEIKVPRIRPAIPIQECSVKFQ

SEQ ID NO: 924143 - protein, 135 aa, Homo sapiens
MNEMGIQDLFLVGDDKITPEKRTKEKTILDADFGKGFNEKVEVILGLEGRLRFLEAKAVLGEGLKGGEVRKRRRKGGGEKGGKRGGKKEEKKGRRDKEKEAWLFETADLTFWSMYLLSSIAERLEWSQEEEEVEL

SEQ ID NO: 924144 - protein, 144 aa, Homo sapiens
MLEPIHWMLPGFSPFGNLSWACKAQQAIGGEGLVEIFKEETHVKGKSVLDHVKSHNYRGQQTLKAGQSAHLPSWRVSRRGLSRLISMNGARGQLVTHTSCQSSRGCRPALLTKDAPGPHCQTQPPPLRGAAFPTSLPTVSITHC

SEQ ID NO: 924145 - protein, 147 aa, Homo sapiens
MLCGKTCLSPSTMTVRPPQPWGTSVCFNHHLDQFCNTYRPCTYIVAVLSEALKTVRWSIETHDSTGYLDRPPGIKSSMNNVYRKADFGVKAKATAEISISFVHKSLPIYQGSLEGLWLGENIARPGFQPHAFPQPGVCAKHDLHNPI

SEQ ID NO: 924146 - protein, 168 aa, Homo sapiens
MQKDTSPANEYEGLSLQMKRRHRSLKSQIIHFDVEFPNQYIQERLMIDAEQPVYNIHRLRILDGEPYVLEHTFMPVHLVPGLKKEHLLASIYDHLHQELNVHFAGAYRAISADKSDEYDQQYLNCAENDPVLEVQQVVYLKDGQPIEYSSSRNRFDVRNYSVLDVRST

SEQ ID NO: 924147 - protein, 143 aa, Homo sapiens
MTVDYPKLNQVTSIVAAVPDVVSLLEQINTSPGTWYAAIDLANAFFSIPVHKVHQKQFAFGCQGQQYTFTFLPHGYINSLALCHNLIRRELACLSLPQDIALVHSIDDMMLIRSSEQKVANTLDLLTSLKDSSEGKSSQWAEV

SEQ ID NO: 924148 - protein, 130 aa, Homo sapiens
MAQCLLYFVWILLLSIIIFSLIFVESYSTASQFLYPSIPLLMGIRVVSRFQLLKTNFNTTFKAPLILESTSGAGAAPCLFHFTDKDHSEMVINKNCSVGTQEETWAIVLHLSLCISVLCIDTMGVIGWMQ

SEQ ID NO: 924149 - protein, 215 aa, Homo sapiens
MGQVWALAHSTLEPFHTDDEEEGEYNELTEDMTEQVSFPPKAKVAKEGEVCPYPSAPPHYFEEKEWPDPPDLSFPEDTRKGKSPDPLHFLEPQQLGLDLAGPPPGSLMADTNTSAKKEYTGWPPGTQRDGTERALMHYNLRGAGWCTNDTCQSVPGCEATPGCKSCHTGKTATIAALLLPQASKRVDHNFSAHCSGTFHSSGYGGPYPTPEKIPV

SEQ ID NO: 924150 - protein, 199 aa, Homo sapiens
MSPPGGANNFRCATLRAVTLTAKVCSFTPEPARPRTHQKEETPNTSEHQKEQTLDTPPLRTVTLTSRVRSFILEVIRALFSRSAGVCWRSTPDPFFLGITSRGCRSKDCCLLLPLEALSQRGIHQMPARALLYEVSMHCPERRNLKRQSGYSGFAAAVVVPPSVNFLAALFTLVLAHFHAANKDIAETGQFTKERDYEI

SEQ ID NO: 924151 - protein, 146 aa, Homo sapiens
MCVMFVWVASFLGNWGIGNSSRICTHQYNITLKVKEESAEAEYLRGRGRGLGLSVSASDDYTGRTDSKGKNTTDPYCSSSEHAARKSGEGNEERWPKHMGTHGFVSKYSDLEFKPDSLLAASYYSPLANDACPLKGCFTLFSTYGF

SEQ ID NO: 924152 - protein, 147 aa, Homo sapiens
MGLGSLEQGVALVGEAPATQEPMEWVGGSGMAGCRSRGRPCGKAAKARREIKHSAGGPALLGDSVHPPQPLARVLSPPLPGASRAGWLLRVQGTPSPRPPGTPAGPQVLHTAPVPARVSPSTPPCKLKEWAPALASPERGSHSAVGD

SEQ ID NO: 924153 - protein, 127 aa, Homo sapiens
MPTVQRGLSSCPVSRKNEVTQTTREPLFCRSAGICWVSTPDPICLGITSGSCRTATIAACSFLWKFCPRGSPVRCQPELSCMSVCQPLIGGNLLVCGLQKRWEKCSIWALSFTALSFMALSLTASLG

SEQ ID NO: 924154 - protein, 175 aa, Homo sapiens
MVSALGPPLLAEALKRQTIPEGPRRSYSRKPGHSEGLPTTWVEVTFTPMGGTARGCQDSGKKERKKKGAAYSLSVTYPWFLLEERQTKGCFSPLPDGYSKLSMIDQGLDENPIAFLERLRGALVKHTFLSPDSVKRQLILKDKFITQVDPDVRRKLQKQPMGPDITLDNLLKVVT

SEQ ID NO: 924155 - protein, 148 aa, Homo sapiens
MGLEPSAQLLHLSNCMLSLLYGKAFFLGNTYCLSDWLSVLRAAGLDQSPCVLVTDFGSLIGKTLLVAWLLWARSPRSAPKQLPTQFRLEVSFCLSLAPQALTLTTFLIALDELTLKFDICIPIEAYLRFPSKKGAIVQGSTCIPFGVS

SEQ ID NO: 924156 - protein, 150 aa, Homo sapiens
MPVIPALWEAKRGRSLEFSRFSGRLRKVPPVFLILMIKCERRGDKLNKEIVHFSSKVQRKYEEHRMCCVRNIIPVLSMLLTLREIQKKTSRWVFWAEHLSLQFTALQIKAIHEEIHQSPSSTSGCYLNKEILDLEFLPNAFMKGGFLSYI

SEQ ID NO: 924157 - protein, 216 aa, Homo sapiens
MAPLREISSSNATAIPLQFDIEGGCHCLVLPANLMSQAPQIGKLSCRLQTHDLEGSRNHHPLFLVVGRWDAVRHLETVQSGLASLGLVGQHTSHRPPEDAAGSPEVVGTSGRAGVHPLAEESQVVQLVSVEIARNVDAFAAYDHHLPAQQYLFSHDGRQAAQEMASTIKHQDLHLRHLRQPLGKASGSYLVNHLLLPLLLLTTTDMIFLLDIFLLL

SEQ ID NO: 924158 - protein, 167 aa, Homo sapiens
MGDGAVKAILFLVPPTTGQHLCYWKPKGQPHGSPMVVVLEAALHSHVKSHQEDDYETYSIAQGPTTDNFPLFSTRSKRAFLISIRNVWKLEFLLHFLVVSVKFLAKVVKERASDCWRSKGGNSASESQSRDRTVTQRTATAENHYYLKLKDYKTGGAHCPKSFKVTW

SEQ ID NO: 924159 - protein, 135 aa, Homo sapiens
MVYTLPSAVSPESSAKGDPSRSYGLSAASSIPVFHLALQIDSAPGNVGNFSCKQTFSFSSGSVCSGEKDLPFLLPRLGYSQVWGGLPGLVGAVCFIQRVCGSSQDCWFVVAVDLELKFTINTGIPESKFIFHFWF

SEQ ID NO: 924160 - protein, 180 aa, Homo sapiens
MGAHLLLQRDLDVRHGVEGDHFETLSFYFAQAIGLGYYVPRPAWRTVQALFYEVGVLSCGYVPAHASTDSPKPGDNKIKAYEIAKMANCLFHWELCPRELQISYWLNSHSRGWLEMETQARRTHQEGRYGIEDLHNKESDQFSIGLRGLLQSLVTLDFLISRDINSENCKITKMVACPFL

SEQ ID NO: 924161 - protein, 138 aa, Homo sapiens
MGISLLASRKLIHIVTEIPIQVLYLITQALAQGFVSTVTRIPTENRLSKNTYILEEKKGQNNWNARKNGMKSGGKHENLEEGSYTTQKCLFKDLGAHPLKQKHAGRWLLLSNLPIPVERKIKPSFTLKSLSATTVEGE

SEQ ID NO: 924162 - protein, 135 aa, Homo sapiens
MGAVQSATSRTQGTRDAGHRGPTAATATPPLPQLLLAPPLASPHCSQCDGGGSSGRLATAIIIKVVWMPEFLVKQELNTVELLVMLGPHSESPEQPVTSEKKQKGKTQKVIIYMEPRKLLHIKSVVFCYISTNEL

SEQ ID NO: 924163 - protein, 139 aa, Homo sapiens
MMAEGDLSDMNISQTEEEEECGCKSVIIDSYQQQDLSSFTRVHSNGSTAACMFIGCGRLLMASVLASVWVFTAKALAAWLREDVTGNCAYICASSDVSTGAGHWKARDCVCPLCAFMWMTVVTQGGGGSTVLCAVLHWQ

SEQ ID NO: 924164 - protein, 155 aa, Homo sapiens
MLHWVHAQVCYIVCQKVKDYRKQRRILNIRMEHFNNRLLCLYPSMWPSTLPTYVAEPVGYTHLPFKPDKAQRSRSMASWERRYTRRIVINNDIVIETKDLSSYQDPDSSGNYRIEWRAERQAYTVYPLVVLGSKIEINPLPSSSSICQPIVQYIV

SEQ ID NO: 924165 - protein, 150 aa, Homo sapiens
MFYGLHNNSILRLCTLIMRDLGEEDQIFPASLIFMTIDVYLKKSGHALTRKIVQKKSVSNEKQWLIGILSSEKDIVIYGAYTYRMSTGSTILHKVGELESIVKEHTIVRSLHLGVPLNAAEQNMTRVHCTWVQIYTFPSCVTCRKPLKCS

SEQ ID NO: 924166 - protein, 150 aa, Homo sapiens
MPPPHERGEPRIRQRMGGQLEPSLFWTLVKKIREHSPSRFQATSDHAGPRVRAIGADSGGFCSRFFIDTRTVSISTGAQAIHSNLDEFSMKDSGKGDSELNDSHLDISREGFKKTSFQMIAKQGAQATVTGEIIDSEALLHNKRVFQWLA

SEQ ID NO: 924167 - protein, 135 aa, Homo sapiens
MAHKALHGLVKLYLEGFVFIHLLKLYGLAKMNALKLPEHTLFSLIPRTAPLNVVTRNPKFKITYKACIYDSRYVSVRLHWYGVYCLAHLVNEQTGRWIYVKGDGATWDGTPYFKPMDSVLKEPCAPVSIFPGIKY

SEQ ID NO: 924168 - protein, 182 aa, Homo sapiens
MVNPTVFFNMAVNDEPLCHVSFELYADKFPKTAENFRALSTGEKGFGYKGFCFYRIIPGFMWFMCQGSDFTHHNGTGGKSIYGEKFDDENFILKHTGPEPSHSQTNYLSMANAGPNTNGSQFFLCTAKTEWLDGTHVVFGKVKEGINIVEAMERFGSRNGKTSKITIVIHPPQPPKVLGLKE

SEQ ID NO: 924169 - protein, 125 aa, Homo sapiens
MILLIVICQGGFFSSLEEVSGAFPVLGPVSGPLDSHRVMGSLHGSSFTCRSWTRCSALQHLAIDMILLVKMRNVGSDIKVMVISNSPHDTLAKRISTVKVVGHSPAQAPALAHGRSSVFVWLGNT

SEQ ID NO: 924170 - protein, 166 aa, Homo sapiens
MNNSRHAALRAVTLTVKVCSFTPEPARPPTHQKEETLNTSKHQKEQTPDTPPLRTELSPIQPHGSPTVVSAPGLCETNFSFCLNQLEQIVAKQPLMKASVNCYFSPLRVCVVCVRVLREGLFDLIPKAFPLVYGDDKFFLTIRSCVTHQQHKPWGIISETPQKPFA

SEQ ID NO: 924171 - protein, 134 aa, Homo sapiens
MYHVSKQYIFIVEGTEKNWDFFITGAGITLGVTRWHLNMRSKRKEEKKERKRERQKRFHSELKLRNTEFSRLHDCRMLQAFNMLSFSGFCQMVSKVVVQLHFHQLCLRVAVVLLPCQHKFPPFSSWHSDGCTAL

SEQ ID NO: 924172 - protein, 179 aa, Homo sapiens
MTANDPQHFVSEALLFHKNCVTNANFLAGTISSRFAKGERNNEGTSVGSLVCVITEANREVRKQTISTTKRRKGRYSDGSTFKRGLSPEVRVDVSCTSEKMMSLQGEEMKRSKIEESEEVLVSSQRQLPHKAPLKGPDINALSPPLHLSCKHQYQHLKILEMLQLLDWSNYVSDTVEFP

SEQ ID NO: 924173 - protein, 169 aa, Homo sapiens
MFRYTNTYHCVTVAYSIQYCNMLHRHTPHQGRAATGSLTPENNKPLCWGEGMGGGTRLERRLGRGHRNLRSTVRPEECKWKVGLPLMRSCRKEAQRMGSRFVQGYTARWCEDRAALWSLGPLSDVVAVSALVLPNGSVVCPDVRVGLEHFQPGSLDVELAGLWDFSVSH

SEQ ID NO: 924174 - protein, 191 aa, Homo sapiens
MISRRSRNKLRYTSKEKHLKDWAPSINPRKENLFDGAPSNASFYLMAEDKGWPRGGVSQAWDTNNFSAVLDVGLLGVVHRAILAQDVGTLLLSWPGWCLPGEAQGAASMTQDVGTRLLGWPRGMSSGSSPWGSFSGPGHGHSWLIGWSGGASAGNGYRNVSRAHERLHSCLVGLGVFLRGVAYRAVPQAGT

SEQ ID NO: 924175 - protein, 143 aa, Homo sapiens
MDTEFLIQYWLILNTRESCTEDTRPETCVILAAEPTPTSSERQWRQKQSGFQGLRVPEFESLPEWPRGGENPICDMEEIAADKEQWSPGQKGMELMEHGLVPHRPDLCQHVRHNNIESRPFNKSMRVSKCPSERKSQKPLTLN

SEQ ID NO: 924176 - protein, 140 aa, Homo sapiens
MVELMYSPTNSSGPFAAGLLEFAGGSLQTLFAWVSPAEAAEQQRLLPVPPLKLGPRGALARCQPELSLMADNPPPSKLVHPRSTSDCCAGSENFKPVDLSFLGFLGVGFAELGHLAPWLQPPFQGSEWFSLAGFPGVNGV

SEQ ID NO: 924177 - protein, 137 aa, Homo sapiens
MAQSLMASLGYGREFPHSLCFPGEVMPHPASAHPPWAAPTVKGTTRDREAIQGSGAAALPTPLRERVEEGTRARTQKEESVESTALRAPATTQVTLQGGDPETNTLTHSPLSSSFLHSTSYFLLPLFSSTFASFKKL

SEQ ID NO: 924178 - protein, 134 aa, Homo sapiens
MSHWRLPEAGVSFTWLAGWVPSTVVLECLHNTAADLPQSKSYLQNQGGRFNAFYDLASAITHCHFHSPPTNTLQESFTKGKCDCILTVGQLNQINGRSFLPRKVTQVAQDVLAAKWQRQNWTPGQMSPVHIQET

SEQ ID NO: 924179 - protein, 139 aa, Homo sapiens
MRIPVLSVHPSWAQQNCSTQHCTHTAALHCVHICPQLPNAQDIQAPCSVAQNTPNTSLHVPPECDSHYLSLLCLFKCLASHSTAGSIRTAAYSLCPQSSEDLSASPAADHLCDIRKPLSQLLNALSPKSDCMEEDSTQQ

SEQ ID NO: 924180 - protein, 183 aa, Homo sapiens
MQTVHNITPGVAHTVIDVNGIPGTLKLGFITVKYHRYISGLVIVDQHSDSLTEETTPSPLDELWTQTAWDRIPALPLTSIVGVADFIWVKCEYLNCRNGRSPQPSPHLNQSQFQPLKDQGEDIGVQCGLQQPLTNSTLASVSCFGIHSHTCVRHQARARSWTGEALLSCSLCFRKETANKPNK

SEQ ID NO: 924181 - protein, 152 aa, Homo sapiens
MGWLCRKNEFKRAIVQREILSRISHGFSRGQPGPREVGTQGKHYCFQGPGCTLSMRTSPTQCWVHARLHSVPKETFIEWMVVPLTETRMAKVSLVMSVKALMNRLHGDLQEAAGPQSCSFEGIGERRPTACLRSGFLPILMCPFRGGEFLNI

SEQ ID NO: 924182 - protein, 154 aa, Homo sapiens
MAASRRLMKELEEIRKCGMENFRNIQVDEANLLTWQGLIVPDNPPYNKGAFRIEINFPAEYPFKPPRITFKTKIYHPNIDEKGQVCLPVISAENWKPATKTDQVIQSLIALVNDPQPEHPLRADLAEEYSNDRKKFCKNAEEFTKKYGEKRPVD

SEQ ID NO: 924183 - protein, 137 aa, Homo sapiens
MLGPPVELRQTHIGGRRQERLDIERTSRGAHLHTIDQRNEAECGWSTCPSRGLSSGTLKKRATPSSHVLRGRQGNFSGFTSAWLELALKHPFPSSLREQRGKAVITAAAECIWVSFQERTCCSALKNAVGQQPPAAL

SEQ ID NO: 924184 - protein, 155 aa, Homo sapiens
MTRRSDGFMYSTTVLTAMSSRRWETSFAHLQRAASATKEASGAPVMTSAFQMEREKVGEVGKEKLSHKSAPWKLRFYHALECGQSRCHTASVLWSVQLKLYSEMRKLLLLQMLVSILSWFLDTRMLLQKPKPKPKTFHSAPHQGLPATAFEAATR

SEQ ID NO: 924185 - protein, 142 aa, Homo sapiens
MDSQFHMAGEASQSWWKANEEQSHVLHGSRQEDMCRGTPLYKTIRSHETYPLSQEQHGKNPFPFSYLPPGPSYNTWALLQFKISSEAAGAAKPMLMGLIFVSPVLKVVLPEGKILLEGNKRLTKDLKEKIGNDMSPVNFKKL

SEQ ID NO: 924186 - protein, 159 aa, Homo sapiens
MRNLLGTGAKVTLNVLAKRLMALCLCPRDLWKFEVERDDLGYLAEEISKQQSIQEVTWADNVIENEIPFSEEKFKPRAETCISNKKPKVNHQHNGENVSTGSAEGKCGNGSHQQLAPYAQKSCRHSVPAIKAARSGGCTLESHKSGAAQDHGDPPLASA

SEQ ID NO: 924187 - protein, 154 aa, Homo sapiens
MEIGGQLQIRPSWKASLMKQYDSFTDDGFTDEAYAHEEGVRGRGGKGQQKEDKRSTELEGTEEQTHVEAGTGDEGHAGHAATYTMESQLEGCCQGASRIVAKGMDWFMTYLEDIIRRRQFLSNEKAEQERGDEDISHPFGNWKDGDSSSWTMEM

SEQ ID NO: 924188 - protein, 330 aa, Homo sapiens
MLNSKLENDTVNFDATNLKDKHILSQPLCKAESKFSSLEIDLHHTRDALREKTLVLESVQRNLSPHAWHQRDDLGYVVEEISKQKSIQELTWILLKAFSFTREAEHKSLENVYPDYAIGKKNPFSGEKVKPAAEICDSGPHGEPMLVGKGNMRSEPPHRVPTGAPPSGAVKRGPLSSRPQNGRSTDSLHHASGRAADTQCQPVKAARREAVLCKATGEGLPKTMGTHLLHHCYDSGEPVFLGERYGYGLGTGGYSYITGGGGMVFSREAVRRLLASKCRCYSNDAPDDMVLGMCFSGLGIPVTHSPLFHQTKNCVDRLQGNVLNQDCYPV

SEQ ID NO: 924189 - protein, 179 aa, Homo sapiens
MLSSNDYRMNRVCAKCCGRDVQDAVRTCCREIDGFCLDWGDGSQQGAILHPREQSGVLLNILQRHRTVPPHHRTINYRIQNANSGKLEKLWGKGQGRLPRGCDVRAQTRKGSRNQLNEVKDVKWPQPVVKIAPFSSLEFLSSCPSQCVSDFSTHENHLCVLKKPVFVKMQIPAFQLQIF

SEQ ID NO: 924190 - protein, 150 aa, Homo sapiens
MRPTHIGESICFSHSTNSMFIPSRNTPTNTLRMVSDQISGQVDIKLTTTELKPNQAKQNRYLTGRGRMASQKRQRGTGEDGVRSLAKMENRSKKHSLWVRMKGPRLLGAKTKSPKVWHGICLEKHGLVWRNHNNLILPFLGLVFILPCKK

SEQ ID NO: 924191 - protein, 168 aa, Homo sapiens
MGLVMTKSLSICLSVKDFISPSLTKVPQLQVCWNSLDVHFRPCLPGYHQWKLQNSKYCCLILPLEASSQRGIHLYEVSVGPYWEMPPSQATWGIPGQSHTAVLAASKDLWVWDPPSQARGESPGLLVVKTIGKAQYLGRRVPFLQVRRHPALVQLALHGLHPLSNQSQ

SEQ ID NO: 924192 - protein, 146 aa, Homo sapiens
MHQGHDVQDEPRASTWIDRAECGDSHYQLLLQDEYAKKAERIHRPFEGSGLLLQDLGDSPNTVSVQTVKVGKGDHLPLNAHPHWGTGTGKRLQGEGNLQLNFVTIPNECEVSWQNLGEGRIQCEDMTGRRRRSPACFLGQEAGSLG

SEQ ID NO: 924193 - protein, 139 aa, Homo sapiens
MRCHREAITNTARGLARPWRASFPCDWLKSDPHPLRTGEAHGNVDIILSNDNSLNLPFWCSKSTTKVACYKEWTFGHIGKASLSSWPNTVFQGVAHCDTSAEIAPVQGSRELGEAVGNYREHSPPKLPVGGTGHLTDTV

SEQ ID NO: 924194 - protein, 139 aa, Homo sapiens
MKISCSDLLLQGAKLMMVPADSLLDLLLLTCLPQAGEESGKDNQEERTECSSYGVMQRYKLIGDGLVLDQSWVNQSGGIVGIKITWSCQAGVGVIFWPSSFFRAGCFLTLNIGLQVLQLLDSWTYTSGLPGALGPLAID

SEQ ID NO: 924195 - protein, 157 aa, Homo sapiens
MILSIHRKQAAGHSGCSGTHFYFDPWVYQFMLIRILLGIPCSPQIAGTLSGKAVHFSSPYVQTVSQQFLTKQNILLPYDPAIVLLDIYPNELKTCPHENLRMNVYSSFIRNYQYVEEIKMSLNRGIVHVVLCPELVPSYGFLVWLTSIMKPRTPAKD

SEQ ID NO: 924196 - protein, 173 aa, Homo sapiens
MGRYVFPLLRCQERSDNCQKDPRGKRRQGQNRRIRKLSIPLTNSHQQSNCAWERLLTRNLEKYMDTKNSSCTHVPQDMMIPMNFLGMKMINLFNFSTASLISMQCLPKARGEHVLRRQPCLGRLHSSVARMPPQTFPCDSISDLRLVIPSPVLNSINGQPESLSKQLMTNRSH

SEQ ID NO: 924197 - protein, 160 aa, Homo sapiens
MMNMKAEKQQDSHAMGALMPLVEVDWEVAFCNAIVIPSPVPDVTVEPLNETAAPANSRTAAFSDILSQINPVKLLLNSWPIGTIRRWDLLGGDSVMGVEPSQMISVLLTHLSLPSCEDIARKPNCETGPHQMLDLPEPYFGLPNLQNCEKYICVVQKPPS

SEQ ID NO: 924198 - protein, 136 aa, Homo sapiens
MIFLRPRSWIDAFRNEPNVKDKCVKLSLGWYEFTHAVHRAVPAKSEALDKTSYDYFYYLLNDERRLKIASSEWKTLHHLLFLETRRLLLGPLVTMTLESRAGKFKDDVVHEAEMGHHSFCTILFSVCFDGLYFYLI

SEQ ID NO: 924199 - protein, 147 aa, Homo sapiens
MLSNSDSVKCGSWTRVSYYIVCTGKPISPERNETTRLTPLLEEQGFPKDQEEICSTLSYSPAEFWLSQCSSSMAFTRSDSMRNGKVTLFILSRYFWTIVAPDPSASQASDPSGTPIYFPRARRTFTGDCGKMATWKCYFKSALPVTT

SEQ ID NO: 924200 - protein, 135 aa, Homo sapiens
MCVLFETTNFLVICDSSYKRAIQMRGIRQLGLELRVGLFRHLPHFCVVNASSCANRKGIPGSQACSTWKLHLPFSLSTMCAVQEQATWHRPGHSICPFWRIRKKAPFWKQRATLTRDGSADALILDFPASKTVRR

SEQ ID NO: 924201 - protein, 155 aa, Homo sapiens
MAALWNRKGGKVGKRLRNRMRGFTGFFLFFFLFISFPRAHNLLLLLVSDFWCLNHRLGCGIIPFLSLILYGEALSLCLLPILLSCGLRNLIKERTITDPNPQKYYEWGGKLTFRTRVLPQHRTMATRDSVRGIIFKISKSSFKDAPKRGVRQMSC

SEQ ID NO: 924202 - protein, 194 aa, Homo sapiens
MRKVDASSNIHTEYLLFLLNSPTFDPVHGLPALPLFPFVAIAVHCFITPYPKSPFQKCPSALPIEVRCQEFLMPYERGLESGIESKESKKLPPMNENARDTLCKIIFLSEEIESYQKTQSRENSRETMTSRYFKCGIYDWRVVSKASQPFDLNCGRIKVPFGHFPTPLHAFEFLPKWKNSKLMVADPIAIASSE

SEQ ID NO: 924203 - protein, 143 aa, Homo sapiens
MSNYLSSSLLAESGDFMGWAMGDSGKGNIQVGKHGCKLSLWAKQIHQSGHKHPLPIRPLKRTHVHLTASSDSNGVLPVTLSFGKCKKILKKKNQVGGIIVPDFKIYYIAVIKTVWHWQRDKCIDQWDRTENLEINHTHMLNRF

SEQ ID NO: 924204 - protein, 141 aa, Homo sapiens
MGLLCQSPGTGKWSTHGLVKGIYRQQYRTPFFQSSLRLATFRILLIGAFYRVLIGAFYRTLIGAFYNPLASYRALIGAFLQSADWCVLQSSCKTGKFSKSPLDPGSPAGVISQKDEARFLLPAAEGMWFQDSHSESLTLIP

SEQ ID NO: 924205 - protein, 138 aa, Homo sapiens
MDLFSSKKNFSLNIFNTFCSEEEEEGEGEGEGEGEEEEEEEEEEKEEEEDEEEEEEGEEEEEEEEEEEEEERRRRRRRRRRRRRRRRRRRRRRRRRRRRKKEEEEEEGEKTGAWSSFSLCHLGRELYIKNDTMRKFLP

SEQ ID NO: 924206 - protein, 152 aa, Homo sapiens
MGDTPNGGPAPPSAARRRVVVVVLLLLLLLFLAKNRKEETGINSSLSYPHLLGTQDLYCLRLRKEESVCSRQKNTCKGTEAESVVHLRNCQFLYFFYEYLTSIGVEGTGDAKRDKTETQGYTSKIEVSIKSIKSKGFLRTPKMDLNLSFFPY

SEQ ID NO: 924207 - protein, 170 aa, Homo sapiens
MDTVTCKSTEHLGHHNQRVMVGLHHRAPLLPEASSSKQDAKGTFQALKHNEKDRADYNKKASAARPEAQWCMSPGAPSVGLNSVMGLKSHCVWAPASCGRMSKYTEQTISTFMSELPHWGAGDTLPSDPRQAGVTSDLLYAMLLAFHRQTRAQWGALGGDREAGAEAEAF

SEQ ID NO: 924208 - protein, 130 aa, Homo sapiens
MTASCLGCPDHGVKLASHSLSFPAGLDLVDGQEVMHVQKLMHLQEKNGEFERLGKKDQCAAMQEAKSDNAEQSVTEVEKESYCLLVSHTQSQESILSSRVTQYLKLYAAALSCMHKFPPGHFCIHSCRES

SEQ ID NO: 924209 - protein, 146 aa, Homo sapiens
MDDDMSPVALCSAKDPGSLRLLALHLWSLAFILKLTSWCKMEGASAAIILEESHYLDAACSYSPPRHGVIQAKLLLEKTVLGDLGRRANKVTQEAAQLPPEVYYFYQDCGKWELNPFSQLSFMSHWPELPLPKPHPGREKELPQLA

SEQ ID NO: 924210 - protein, 216 aa, Homo sapiens
MENHGALWKGVVKGRSSEYKKARKTSAQAIERETGMSEFEGLGVKHFQLASRGLMKEKPAVGGEAQGVFLQDTRKVVYKEAEKAGDGFRACGTFHQILIQLVQKATKSGISTLWDNLGQPGLVLGGGQNRRRPVETGEWERQPTHLQRGETIAGLESCTEPLLFLGGETGEGDDSPGSAMLEVTPELPFITRTFTNDSSLSFFTFSRCGFEVYSDS

SEQ ID NO: 924211 - protein, 139 aa, Homo sapiens
MFQLPGLYSVGVRQKIRLTDVGLGEAGGRQPTAQFVTPGLKAFESQAWCKGGRRSGKVVMEHEVVIAAANCQVGTYLSVVDVLNSQGALPGPPVTSHLISIQKDTLSTLEIPRVLEALCQGPGTKTKYYNKRYSYHSGS

SEQ ID NO: 924212 - protein, 166 aa, Homo sapiens
MNEIAVFLSHFVLGVSLACSVWLALALGSEHGSVHGTVLPAPSLHVAVITNPLAQQSQDLDILKQVSDDEAHQPSVPLEDFRLSAPEPPTVLRTGSQGDAGFWRPAFVFLGSLRLHTRPMKIRISGIEPAHQDYFNFSGLSEEQSWLKTTSAPPGVIPGPCHLGAC

SEQ ID NO: 924213 - protein, 192 aa, Homo sapiens
MFFGVEHSELVLPVPEQNARLSGFTTETFLTVLTLESSWRPRTTAHPWHSRREKSKTISPSLDLGWTMKALTKRIYCKGHDSSSMLTCVKASSLVLVCPEFIPSGGFLVSLTSKMKPPALVMCPEFLHSGGFVVLLASGVKPQTFAVSVTALKGGASGVVCSSWWVCGPADFRNEASDPRGIPVIHKFGLFT

SEQ ID NO: 924214 - protein, 157 aa, Homo sapiens
MEFFIHSFELLIFHYDDLMHEQMMWQEWLAALPSMTHPSFSVVAGGSCPHGPQFPAPQPAAIRVFYARFHGHKEVEAFRYCKEFRQTWGQESNTKSGPLYENGCEGEGKLLGGPALEVLMPVHKMSVAPPFILTKQFHKFAKYPLRNENEIVSPPTD

SEQ ID NO: 924215 - protein, 181 aa, Homo sapiens
MVMTEQLIGMSQGGAAKAACGKDPMSVRYGQHQCHHHGHCLVVTQRGRDISGNAAWTQVSMVEAAFGLLDLLQWLSGLLSQTEACTVGFPTFEVLGLGLGRYWLPCSSACRRPVVGLHLVTVTHHGSGGESASGSQPFLAVLAQPPIHIFVLILTTLYWHMLLLLMDGAFPGKAFQVFKVN

SEQ ID NO: 924216 - protein, 128 aa, Homo sapiens
MVWVSPEASMSEFHPSLQGSSFPSGPGVEKSYAACVEDGKGNSESSWPTLTENRKKPMLKFRGWVPPIPWLTLDFTQVLCLPLDSGCDFDSVPVQAAQFPSLTTVILLQSVKFFGKKVYTQQQKIRME

SEQ ID NO: 924217 - protein, 151 aa, Homo sapiens
MPISLQFGVALSMLGYPARRCLFCAMEPAQGKRGSPGSQVSRFPGKKMAVGPPSFHTPDPGGERVSPGILMATSLTGSEQTTESGNGSHAFYPLPPWWERPSRQSWEGPAGKGACDQMPLGPMTMSVRPVLAPNVHYVCKNITDHFATCQY

SEQ ID NO: 924218 - protein, 158 aa, Homo sapiens
MCTALNPATFLPEDGEPIKHDCQQIIVQTYAAQDDLLEVPLANPDINLYTDGNSYVENGIRRAGYAIVSDGSADGKCGVGASTQSPLWGTASGAVRSSSPNSGRSSRPHNSRSTESLHHVFGKATGTQCQPMKAAVPCGGMGTERPKALGVHSSHQCG

SEQ ID NO: 924219 - protein, 140 aa, Homo sapiens
MMSLGWALIQYDWCPYRKGKCHVRTQTYRRRPCDQRGRDWREAPANQGALRVTGNTTGRRAAPNISFSRSLGESMACRRFSFGLLASITGRLTGSAGRTLAALPGLAVPPVFDVYKNGILIKAENTKSCHLKDTYPFMKG

SEQ ID NO: 924220 - protein, 149 aa, Homo sapiens
MLRKVVAKRMARSEETPILDAPPSAREETLFLKTLWLQDAIPYSEPILTGITVERQRIVYKAWLCSQYFEVTQFNCRKTIPCKQYCLEVQTRCPFILPDNDEVIYGGLSSFICTDKREGQVMSLTSHSRCTRESEMQNDFTGLCVILLT

SEQ ID NO: 924221 - protein, 138 aa, Homo sapiens
MLMFELISGAHDTTSKRPKTGKIKSPPPANWRLMSWGLSVCPNFLSVSNNDICPIELGPTLKASWHPNNDICPIELGPTLKASWHPNNDICPIELGPTLKASWHPFEGLTHTYCEIHLHVSVLGVRASTEMSLFPMLS

SEQ ID NO: 924222 - protein, 163 aa, Homo sapiens
MALTLPGVDHPQRAEEQAHGKATDPLNTRRDTVSKDASASPSQGLHKAFLSRPIYAAEADWQDHHSVASAHSITVHAGDHPERGADALSNADTGRVSIPGGENSKCQGPGGQDGEARVGRGGYWNVQQGTMEAEASVASTEMVRSHRFLDTLKATWTRFADEE

SEQ ID NO: 924223 - protein, 150 aa, Homo sapiens
MHGCSPVSLGAVADVKSGPSHALSHAHAAPSATNQLEIKVGFETGGKDFLNSRALYVLAKKPYTNAKAPGSRLQEPSLFCKQTASFGFNTNTHKPPLVHKSGRESLGGDLDSVHCHFSDLVCNKIYIICSKSVMHKCHYHKIRKIGLFKK

SEQ ID NO: 924224 - protein, 191 aa, Homo sapiens
MVNPTVFFDITVDGEPLGSVSFELFAEKFPKTEENFHLLSTGEKGFGYKSSCFHRIIPGFMCRGDDFTCHNSTGGKSVYGEKFVDENFVLKHTDPGILSRANAGPSTNGSQFFTCTAKTEWFGKVKERMIIVEAMGRFAGNGKTSKKIAVADCVDGHLWHEDLMTCFRGEGREKSQNDFPRFYSLLQKCRR

SEQ ID NO: 924225 - protein, 199 aa, Homo sapiens
MLDPKANSPMVHLALFQPLLFSSSHWKEIKKRHHWPEETIRLYYKSGRLTLQAVHTFDDSECGQMCEFGPVIVSEGAWVQLSENPMGHTVRNTIPGLCNMSFSQLGISRTHFSADPSTQNKTECDTRVHAAGQSGGGEGLRAPGEESTPRLETEGVCSALDGDHSMGLQKLLPGPQDFVKGVWGASVEHLGLSKNFWGR

SEQ ID NO: 924226 - protein, 144 aa, Homo sapiens
MRTKCITVNRVSPPKCAAIVGLVSGVPDWWGIPCKCQFAIFIEWIGSFWHLWLNKKMKVEGQDMDFVYCYWATKKGCPRTEPRRTLTHSSCADLCGRCRCAQGMLPHGYHEKTPQTGWLEQQKFIFLEFWLLEIQGKDVAIINC

SEQ ID NO: 924227 - protein, 158 aa, Homo sapiens
MPSDTALAQDPVSQLPGAGASPLVSPPPELPLSMAVAFKAIPGPAVAARNALGMQILKPHPRLSELETLGSYKEGRKCEETQGENDCLQAKERGLEQTFPSQPTEGTSFADTLILDFQLPDWQLLHQAVDTPTQGLHMRVEKRIELVHFQKTPAVQEI

SEQ ID NO: 924228 - protein, 155 aa, Homo sapiens
MEPTCFFSQQEPSTDELFFPLWFYFEMILGVRKSYPSAPPGHPPGWEYHGSKSTLPLHNPALATRMFILPNSEPALQEFSFTPLLKSWESRFVLAIFQAGVNLPAGFSQGEGPTGGEWLRAYASCSLLSSVCISQWQALALSGAFTSRSSSADLH

SEQ ID NO: 924229 - protein, 176 aa, Homo sapiens
MLDRFHLQYTAGGPEQGVNENSIYEACHDCWVEQRGQPPGIGQNLLLCGRVEKMEHKGTHPCAQGLWSGKGPGGSRGSAGSGPDFGVEGPGWPPMEPLSPDLLLPHRGSGSSYRPDGSERAPAAGMERRRNGCGVSQSPGEQGGVCASLCFASNVGQETSRLSQLLRQLSPLKWLL

SEQ ID NO: 924230 - protein, 141 aa, Homo sapiens
MRVRGSHGAKHRCKEEELSGYPSRASRVRTETLSPEVTHHFYLRCIGWNQSRGPCQYQEVLRKREGTRNSLQMADWKVSPGLDVTLLVVHKHLIKDLCIMDLLCHALHHGGMREVAEDLLVYYTIKRETGVRGVRGEEFPA

SEQ ID NO: 924231 - protein, 212 aa, Homo sapiens
MKVVKGKQFSASMEGDPPAAHLVDIRNLKYDRVGMQLILAACSLSSDASLNGCCTEKPASCASSASPDLYETSRLRWEPAQLQQYQRHVFCHVDQGSEVRQRDKREKAKTRQRVIAELKPWNGAPWMGHCHGQGRLMTIAIFPWIVPQGASGLNENQVKTLSQILELLFVPLLMWSKNPNAGSRLYFILWSISLFIHSLNKHTYHVPGKRMQ

SEQ ID NO: 924232 - protein, 149 aa, Homo sapiens
MYKSKLATCCPNPCFIKCYFNKSLFSEVMIHVTQNMCSHSGRSKRRGRKWQQVWHREAQLLERGCKIKAIPAVTVDLGIDSSSTSVFSLSSKPADFKRGKSGKRQDPSVFISDDIQPQGSIACSGETHQERTVPQTGSFSNGSPGCANS

SEQ ID NO: 924233 - protein, 170 aa, Homo sapiens
MPGAGRVYYLYLSPERGILFALIGCLGYLCAQPNADSQAGNWKGPRFSVVEKSGVPSNFTWLSGRSQMVTCNLTDKCTIRNHHKWQERRRCQKKRKVGPACCSLKPAEWSQHCQHGQHVHLCLPNGLLLCPCWESLGRGSSCSSSLSLPALAFLGCSGLFQRGGPSQRGT

SEQ ID NO: 924234 - protein, 177 aa, Homo sapiens
MGVFTQCLYPLTIYCDYLASTFDISDSGIKCREYETPPFCLCQKTSYRCLSSISTVVFKSQNDSAQVGYNNDGQDTVRGKAGFKRGLEGAQTVNIQVRRKGFEPAVEGKQCKKLCLPLHEGKSWETVHSLHSLKGCGDTIPGELKIFMEMSCKYEVFCGPPVADTLSFVSGFTRRRD

SEQ ID NO: 924235 - protein, 336 aa, Homo sapiens
MYTYVEPSFSLVNLAPGLAGENLTYSIGELQISSELLLLVDLNLDFPSVPAAAVTSQVASDFRVSKEDAFTKQDKTGEALITNKQQALHQASQKDADFLVFICCLSLLELEAKLIPHAGDEPGPSCDDRLFPAKAEGDVAIGTCCEDTLGHGRWWDWNVKNPQQKASSLGRDSIAAQGWDYESGRGEKRQGYGAMPELKPRKLGDLNVGLYKKGSTSIWVPWEGFRQLPLMEKGEVEQMYRDHMMTEKQGKEKRERKSGGSRIFSTINSHGHCKFTESFKSAETVYHAIISKAIEMKAKGNASTTFIKKFIELLISTAGYKQRKQPLEINIKSSSP

SEQ ID NO: 924236 - protein, 119 aa, Homo sapiens
MACVHSQVAFRVISKEVGTSDASMAELFTSFTPRNGWYSKVQGKKMAPLTSRTPHTPLFDPEVLEPVRKDEVARLILNSWPQAILLPCPHKGMELQKHPYVLQRIPFFVDFLKPRHNSL

SEQ ID NO: 924237 - protein, 164 aa, Homo sapiens
MNLRRLEETGVFLPLHGFPCDSRSLSCGYQHLLWWREQETEVDSVRVFGYKPPAEKASRLTFPWLSQSLEQQSTSFKGSVDSLGFPGMFLQYFLEQKFTVWVSTCCSVHPSGSCKNAEVLMQVRKSISQLVCGSLDSAAGRAGPDSEVKAMVSLTASSILLGKA

SEQ ID NO: 924238 - protein, 162 aa, Homo sapiens
MSTVRRRERCFVAVKVTYQEDMTVINVRMLKKSFHIHEANIKKIKGRNRRTHIYSWRFSRLFHSNWAQNYWLMWLPVGKRMWEVSPHSPPLSCTFISGRQIPESVECATRQPWVQGEPQEVRPQPEYLLDAAVLTAFGPNQKCQSLMDDPSLGSLLCMDTVA

SEQ ID NO: 924239 - protein, 136 aa, Homo sapiens
MSISAVPNATSLVSFWLPGLESICPEGTVPNDILVQRWHECQVRKTGSTGRLRTLLAASLSASRMRSLCAGHQGRQLLQPHCCNSMAQSEPSTEELFWGLSLQQREECGGGKESTSLGHTLPGGLLDATTSAPPSC

SEQ ID NO: 924240 - protein, 142 aa, Homo sapiens
MKLLSPLFTLQLSSYLILPECNEKVRRAVALLGAQPSGFPDLDAGACNGSCLWYVWSSFSLSQSWHLCRHLGLPVLPQQPVCLAVYSGWTLRLLAHISLATLRLAHPWQEQPTSVAPKGLCSPTSFSSWCLAASAPAFDIHK

SEQ ID NO: 924241 - protein, 142 aa, Homo sapiens
MSLPQRSLILRLPKPSPTDRVAPTTARFSRSNFSSNSASSSKQSIRCATVQLLEDQVHRHVCWGDWMGHVWHPGWVEAAIMSWEDLVSQSQGIMNLTAVEVNKDARFMNLHGGYSCFLKEIVNSLMSETVACASFMGDAEKL

SEQ ID NO: 924242 - protein, 182 aa, Homo sapiens
MGMMRCEKEVTRGTVQVLGRQILGEQPKYGRHVRIYFPQTLCVASTHRIGSDIKVACVDSLLERALQHPSACCLPDTGDGRQQQLEQLRATEREHQTRRGGWRSGHDVPSAESRCQATALYDSLISVDVDPAHSQQPTCGELPLAEGGSSLGRHSGLHHIGSMGHGKGKKEHGHLVTKLSSS

SEQ ID NO: 924243 - protein, 142 aa, Homo sapiens
MGAQGWGRAPYTPSVALPAGIDWIKCKYLSPYHCILDSFPGQKAPGAPWFHTEAEAGLCPTQDSTFIPCPTPGNQSDQPDKLSHLTLFPPCQGTLCTQKTAQKGRPELQNHFCLFLTGMEAHFFFGGQSTESCYVTQAEVQC

SEQ ID NO: 924244 - protein, 164 aa, Homo sapiens
MQVSQLSWQQWHLLLKKLATMASPQTALLDDCPLCYPGSPLVSPGIYLPNRVVVRLSKPRCRELRAVQLRWMPPSLEYHSHPSIHSAIVFSGVSCLLSFLTEFAVLGCPPLTWLTSLSFKTFEMHLKCQSSAEADLRAPVCIPPCMLRVPLFDKGYLHPHVDYR

SEQ ID NO: 924245 - protein, 153 aa, Homo sapiens [sequence omitted]

SEQ ID NO: 924246 - protein, 151 aa, Homo sapiens
MTLPNPPLVIWAVMGGSQGLEGARLQIHIRITCGKCLPSYEGKTRAVYVPPVYSRDHLKRNGWTLTATLSSALEGGRTREEKRHEETLCPTHHSTDPTLGVEFGIVPEKRIAKISSMPFSTFSAASPTSSWGLILSFRNNSCFRATCHRVS

SEQ ID NO: 924247 - protein, 191 aa, Homo sapiens
MRWASRWDLVLSSRRRSPDTGQQLLWTGARSHRLSLSIALGWEEPAERLAVSGFEILPLSLSLVSSKLNQFLISVRILIPDWCRQSLGFGLMHLNPVSTFSGCMTLDNLLTVSWTSVSPELRQVLYYLSHKVAGRIKWDSRHKALDPFKYKAMPGLPSGEDPGDLSPSSLIPQEGSGQGRGIPAPGLCVPE

SEQ ID NO: 924248 - protein, 147 aa, Homo sapiens
MGEGSPALHRPPPGACTGHWLYTRSMHGVLALHQERARGTGSTPGRGVGTEEWLFWRAAAGRELGSLIFQPWPPRRSGVSPRAPEEDRALLSSEPAVPGGWILHKCQRPLRCKKQGALLRVCGETPPSGGQMMNSISLSFTYFYTCH

SEQ ID NO: 924249 - protein, 237 aa, Homo sapiens
MKDKSTKESQVRPWSALRREGVGASTENLITLFQTAEDSVSVSDAPYNCVIDCEEKAGTESGKGTESSHCKYVAESVMAWSTQNVDYNQLQERYQNLKEVWKKNVHSFVLATASLTLEGEAIKEEMKCEQWHEHLVREFLGYSWLKTGVTDDLQIIQLSDYSDILAQWPPHGPLQHKPFDHLAFHRLSKILSRPLHCASVKTPVALFDMPPFVLLPRAACDSSPLPVNTVEEQLSSW

SEQ ID NO: 924250 - protein, 141 aa, Homo sapiens
MRVSRMQSKRILGECLKLHVPVPALLAWSQASSMMMPLNTSLLASACVCELFWLLVVNFWPLTLPSPTLNTSPQHHLLMGACVEGKPVAASDPVGHLGTGAMVPGGFVEQVTAIIIITEDFCDMKLKSTAQWGPVMSSGDP

SEQ ID NO: 924251 - protein, 149 aa, Homo sapiens
MLLVPGPLRSRLRSVLPTSHHRDPASGQGQTSCLLSPEAQSSWLIPAWTINTRSSCAPPSTGVYQAPGTKCEQGLSKFTNSVMLLAESWLPFCHLLLPFHGYWPGGSCGAQHWTMFSRPIPVITLRDENGALWHGLASGCPSLYLLLLF

SEQ ID NO: 924252 - protein, 142 aa, Homo sapiens
MQLVLRLASQIHCEDHICAFHYDESKGRETVQNITEFKRLSFKAPHSSTPSQDRTPFTERAQSSCSNSCNNLQVGTQRGQTEEEASKSLDVPGALRGNECTFRGLKYHSSCLEPLMSMKSIHDKSRALGGFLHEFGGQTRIF

SEQ ID NO: 924253 - protein, 162 aa, Homo sapiens
MTHDITKTTQSINQEKSSIIQNEDRTRGHIRNATEKQIPPQKEQNWPQLQGICPSTMVNRSAAALERPDTLIPPGIPTLFHPQRSGWTLWPQMDFAGHVTDLMGQGGHLSYGDSIKISVCLKTSGASILFTGCTCPLNESSKPLIRETSSLWIQEEPQALYP

SEQ ID NO: 924254 - protein, 170 aa, Homo sapiens
MTKQKLHLKVTNRRPKNASSPPKDHNSSPAREQNWMENEFDKLTEVGFRRWVIRNSSELKEHVLTQGKEAKNLDKRLEELITRITNLQKNINDPMELKNTARELREAYTSIRSRINQAEERISETKDQLNEIKREDKIREKRVKRKEQCLQEIWDYVKRPNRCLIGVPDE

SEQ ID NO: 924255 - protein, 139 aa, Homo sapiens
MLENVFIQSHFPIYMMKNPPVMHSRELRDAPQKHLSLRGLNWWAEAGEQGALQLEHGKPDLLAIWNLTIRGSFSFGASAMLLRAALLSSWGTHHYLRTFPQSSNEEVMLAMGASLPYNTLTLGPVAVHTGSYLFVPAGL

SEQ ID NO: 924256 - protein, 142 aa, Homo sapiens
MPCENQCGIGNEQGSSYAYPKVREVVQRSTGGHHLICNSSYASMKVSQESVKQELKQDSAGLRLRLLLKSVCHPTDQESWSLHQQIQGGLERKEAHRQRLGHFTLQGVLKCTAPLTLDVKSSNIKNFKTSYSVYLKIPLYGV

SEQ ID NO: 924257 - protein, 148 aa, Homo sapiens
MALLHTVSQGPKSFQFVASPSEGSGSQPGVTLPPGAHLAMSGGWPLRQSIFLVQNVIGAKVEKRCPRDVSSSGARTSGEHLVSHPVMVALVKFEPYICLLAHDIAEASMGLIKLRRNKHSPNLLLRLQILLSSVLLNTPLSVKNNTAK

SEQ ID NO: 924258 - protein, 149 aa, Homo sapiens
MAQSVVGPHQGIHSAFLSLSWNLLRPHHLLLTDLSDLLPTQNLFFQPSPFTMITHLVSFLSPQLLDRLSLFGAHLSCEANTMERTGSCCACPDLLWPHSPWTSPERAGTCGHSFPVRALLWMMTGAAQVFAGASRAFDTIKKTESILNV

SEQ ID NO: 924259 - protein, 257 aa, Homo sapiens
MEDLRGGFKELNTHEYAHPISHIRADRSPPLGPRGPVTLAAMCILGRMISGERPPQTCGGSRKFCKGDESLEDGEPCGWPSEVDDDQLRTIIKADPLTTTREVAEELKVDCSMVIRHLKQIGKVNELDKWVLHELRKNLKNSSFEVSSSLILHNNNEPFLDPIARCDENVGQQKGPNSSPPQHPTTCRTTNASKVEQRDVKFCLVCHIHLTSCQSTITSSNISTTFCRENVSTTSRMQKMLSKSLLNPEAWVFMLQE

SEQ ID NO: 924260 - protein, 146 aa, Homo sapiens
MEGGFSRLGVQGIFRPPERIREGGRRWLCDMWLDVVVEKNWALSVDQRWLQVLQFSVHLMDLLRILLRCNGFPGIQKAVVDQTSSRPLNSDHDLFLVQVWLWEVPWSFFSVQPLSCSLPVFSRCIKSTFHHTSQSDPEMVHCCCVE

SEQ ID NO: 924261 - protein, 153 aa, Homo sapiens
MWRKYWYLCTMSPDVGSSGITFHWLCNFKKATDEEGTHPTNGNNETYATIMSTIMRMFQEAKSHKYFDLETEWSAGPTHHLMDEDNEVSKKRLRRHPYHELAPVATKHRCIPLVCIWSTKMKLRLQDNAEFTQHVAVIQRQNCFRKLGKEFQL

SEQ ID NO: 924262 - protein, 165 aa, Homo sapiens
MGPAPSLPTGPANLCSPTNPLVTLCPVSPASYGLGCGLPQKAPLKEEDMRPSVLPHRPRHVYRFWPSLLQGSFFIVPFKWSISRTMPGELESLELLRHTVQTFPPLPVLVQAEAVESALREEGCEEENGRETSAEVADVMTRTQLTAAGFEDGGWGHQPRNAGGL

SEQ ID NO: 924263 - protein, 156 aa, Homo sapiens
MELKSTISCYFTQRALSSHLPPLQTQFSCPGLQLCRPQDFRGTRLSLMFRTFCSHAFYRGGFQWGMGQQFLLAGDVCQCLETFLVSQQQLKVGVVLASSGQTEIRDATKHPTTHTATPTTKNQPAPNVHSAEVETPCSTTANCVFILSDKCLGLYC

SEQ ID NO: 924264 - protein, 137 aa, Homo sapiens
MEVWGQIVEVSNSSTSRGHFEAHLKAKITPHTPNCRRDLEGPPSPSQAKVHLADSFSQWYSVGFSKASLGLLDRASQKGVAVFAPCGPQITGIRIVSGFFHLQIPSPTHPGLTNENLNFHKDFPLQMILMPVEFEQQ

SEQ ID NO: 924265 - protein, 144 aa, Homo sapiens
MCVPPEAVCSVKGDDHPQQRRTGLRLNVTSSKRPSLTLSQSKWHSLLSPYVSVTVLITVFHGVSEDCPCIAWPPSPCVSVEETGTLAPAVSAQQSAYGKAGAQDFLDEGVNCPYLCFVNFDFPCLRPLDLDTDLKSSCDEVRPI

SEQ ID NO: 924266 - protein, 138 aa, Homo sapiens
MDEGDVYIHRGEHKGPRANKYLPFIPNWSYCLVCLIKTTFFTHYEISLVPGFSYPLMALWPFPEILELSYKLFVHGQENPTTKQPFLLIFWLKMFYECNGFQTCLIIRNNCGGVESYSKLLSQTFGESSKQKWLLLLR

SEQ ID NO: 924267 - protein, 135 aa, Homo sapiens
MGDVEKGKKIFKTGQAVGFSYTDANKNKGITWGEDTLMEYLENPKKYIPGTKMIFAGIKKKAERKMIAYLKKSYYSTSNSTSLAVYTTCTDTSSTEVLNLSKSSMRAGISFFLTPVNVGILTSSHELQMSFICDS

SEQ ID NO: 924268 - protein, 209 aa, Homo sapiens
MAHKPNVLHYLDLYGKNLLTSDSTQQPVIFSKCNGDGDSGDGGGDGNGGGSGGVDGGSSTTIMVVVMMVLVVVVVMLVVIVMVKLVLVVVVMMVLVVVGVLMVVMVMIMVVLVVVVMVVVVVVVVMTVLVVVGMVMVVVIVMVMVVVVETPPDSPCHPPGSAQGHSRVLLGHPVHGSVVALAALNYAFLFMYASSPPDCELVMVKKSCP

SEQ ID NO: 924269 - protein, 150 aa, Homo sapiens
MAGCRSRALPGREAAKALREIYRSAAAGPGAKPLIPRGRQGWPAAPSAGPGKPTLTRNSSWPGKRRAQPGSRSRLSLHTSLQAEGAGSGLGQPRKGLPQCSGGLKGSSSAAKVGIQAEEAPRANEGCKDCQHAVTSQYRLFIYFETVYIT

SEQ ID NO: 924270 - protein, 132 aa, Homo sapiens
MTEGVPTQTNGIAYCTPKLCGVAYRSEATNLYSINSGEPPPRCGHNRQRSIRFPQHRHVHTGTWAAGFLISDTELLYNIKEGFVSSGKWGTAGGMWPSTQMKTGDHPLGHTWQGYGQSELGWPQAPKLPSPR

SEQ ID NO: 924271 - protein, 151 aa, Homo sapiens
MPALPLLLPWRLCFWSAALTVWISSCETLQGFSLSSKQTLSSLFLLRGLPCSTPSKNVGLWSRRIKSELGPVVLSYSKLSQVENRLTLGPSEGRTNAGEQMLEFRLKTMNPYSGLRGLRHLSQPRPPWPHLPLSRPDSLASWPFRLTGMLP

SEQ ID NO: 924272 - protein, 153 aa, Homo sapiens
MSNKFIPGMWQNASLIPERDLLRKKQKQKQKQKPKKHLGSSRIRKLDLLMWKRVSVIPKAERANISDVKSSACGSEGMGHGPGGSPCLRPARLGKMIHSSPPLGTRRAPRLLEDSQTTKTCLLRSISTNPSLMLYKSSVSLIRNPAAQVPVWT

SEQ ID NO: 924273 - protein, 135 aa, Homo sapiens
MEFYFGEDSRGLWREMLNSPGPQPMGPLLTAGQGGPDPGDSARVALTRRDGPWTVSLGGAWRGNGADLSLSLGWLGRCAGRWHTWEQVRSANRGGRPRRDAGEPQRLLLAPQNPGWPSVERDAFCGLYRLHGPIH

SEQ ID NO: 924274 - protein, 186 aa, Homo sapiens
MTTEMKCALLSASHQGVHDTIVTLLSTPWLFGYGASSQFLYYKANNLGKYSEIMQSLSPHNFPLGFSIHQLLLPTAFFLGALPTAAFLLLSFLLCLLTGPLLLSCLCLHVGSLWACRQRNPRTFTDKISNICKCTVYKLLSLTLSHLISSHEQLPRKASAFWDPCNGHFSSSLSGTSNTVLAESSC

SEQ ID NO: 924275 - protein, 170 aa, Homo sapiens
MCIPLSPLTSRSGLPRTVFSPGWAQGLCSHYHNQIKNISVTPKVSLCSLSILLHCQAQAITDLLLGTITFLEPHERDGWVKDMNSVKGFDAYCQTTFQKARDDSSPIGSSQALTSELFLTQFLLNVYNCGGVFQFYRCMESALCGEERQLMDPPCLEEQHRGEAQRAGRQ

SEQ ID NO: 924276 - protein, 154 aa, Homo sapiens
MISAFPTEVPDSSHWGLSDSGCRTVAKERGDRRHLENRVTPTLILRFSDGLSKWHTRRLYSPPGSEGPTPTEPRSLLAQQSEIKLQGSCESRGGAPMNAEARVDKTFRGTIRQQHLLCTNIRCSAASAADTQANRVWSGPPANSNRPAAEGPEC

SEQ ID NO: 924277 - protein, 166 aa, Homo sapiens
MRRFFANKRSQLHPALLLRVGSRSCSETGIVTSVKDIVAHVPDSQLTLGHMEEHSFTEPILIPKKDGLGLAVPAPTFHVSNVEKYVEVSSSSGFHLGSSQCHRHQQCPFYVPLQLQIYWAQCSVAGTDVTKQKDCKMKLQEFVDYDYITNHKRVLTITNLEFFDTQ

SEQ ID NO: 924278 - protein, 173 aa, Homo sapiens
MSSFVEPPDTMKKLFRVENWPDDALLAKPKVTKSCLICVKDSYTDFHIDCGGASAWYHVLKVSAGSFGDRVLGLAGPRQGYSPVPRAVSPPRDLSASLTCLLPCPELNATPAQSLQRGPQWSCLVSMGTPHHRGHLGAAQPALTELSWAPSPAASQGGCPLVHFSYAGPSGEA

SEQ ID NO: 924279 - protein, 138 aa, Homo sapiens
MGQTASSGSLTPKRPDWERPPNRGRQTPHTGELWLASGQCPSEMKHPEEGAGSNLCCSSASTVDTQQTAADLQKRGLLEEKLRNRKQQYQHQQQQQQQQQKTHRETSSKDHQHQRSKKVGNNKLLCAKGACTNQMQGS

SEQ ID NO: 924280 - protein, 141 aa, Homo sapiens
MRTSSLTLVSSVASLSYSAVATKTLFLVFKHSKHVVAADLGICSLHQESSSSQPEHPLHLEFSFQQSGPSAAGLLEFARGPLQTLFAWVSAAEDAEQQILLPDPSSESFVSEGNLAVRGVSRSLLGIISQLGYSGLSDKDV

SEQ ID NO: 924281 - protein, 157 aa, Homo sapiens
MSPSWIKCTTFHQKRQTRPGTPCFCPHGCYISDTEVRQQIHTSIIKRQESLYWGLVSSWLNSQFLNCCYHAKATTDNQYKVLGGPVEKKEDDDHSQGHAMSPFLHLQLLQNQEERAILFSSGCYPFLVVCIKEQKDEAPLLFAWESRIQQALGKYIL

SEQ ID NO: 924282 - protein, 139 aa, Homo sapiens [sequence omitted]

SEQ ID NO: 924283 - protein, 176 aa, Homo sapiens
MRQNFIAQFIQLLKCWLCNVLSVVVVEKNWALSVDQCRLQAWQFLVHLIDLLSVLLRCIGFTGIQKAIVDQTGSRPPDSDPDLFFVQVWFCEVLWSAFLVYCKRISFDDCSQLVITNNFWPATTLLVFKAVVSFAALLQPPPHSSWAKCVVDLSVVLKLRNLLFSSKGEGSSSAGP

SEQ ID NO: 924284 - protein, 218 aa, Homo sapiens
MAITTTTATSPNMATFSTKVTILATAASITTTNISIRVTIPTTATFTITATNTTTATILTMAAFITTATTAIFTTIATILTTASNTTEVTTPLTDAFITTVDITISHHPLTTVTVTTTVTTATFTTIANKATTASTPTTAIFTTIVTFTSTVTFSTTATFITTPTIVTKTTTATILTTITLTSRANITTAVTFTTMATITSTVPSSPEPPSPPPLTLL

SEQ ID NO: 924285 - protein, 135 aa, Homo sapiens
MHAHSQFCMSGDHTLEGTEHAIKEIVKEEADEYFVIVLSDANLSRYGIHPAKFAQILTRDPQGNGPTSTGKRYVAELAGLPGMPNIRYYTGWLNFIKCHSKARLHWHSERRRSFEENCVLQFCCLQNGLLFQIIN

SEQ ID NO: 924286 - protein, 148 aa, Homo sapiens
MGALPSGVVRRGPLSSRPQSGRSTNSLHHAPGKDADTQFQPVKAARMGAVPCKATGVELPKTMGIHLLHQHDLDVRHGVKGDHFGALFDCPAGFQTCMGPVAFSFWPISPIWNGCIYPMPVLLLYPWRKLTYIRFDMLIGRRDLPCLR

SEQ ID NO: 924287 - protein, 152 aa, Homo sapiens
MPLQEVASAQFHGPPTPAILHIPAQTTKIFIITFEYPGVDNSKLTQTPSFHLQGHLVSKNWKTGFQVYQTPKICTLNPRVSQQVEHLTFMSDTSIKLECKSLLWCIPGPPAVWLVWFRAFVEGSGLLRRWLEKEDEEEGEEEEEKRNLTTCS

SEQ ID NO: 924288 - protein, 195 aa, Homo sapiens [sequence omitted]

SEQ ID NO: 924289 - protein, 156 aa, Homo sapiens
MFVITDLLKPTAVNLSKSFSVQLCSVAGKELRSFGREEALCQEPQLQVFWSLLEVHSRPVCLGITSGGCRTANIAEQQILLPDPSSRSFISEGHLAVRLEKHSIKAGLFQYSGYPVWLPLARKGKSRDHLSFLGIAIDDEDSNSEQYSMNLDFDGV

SEQ ID NO: 924290 - protein, 136 aa, Homo sapiens
MKTLFSELGNVLRIIVAAECHAKFQHKSCFLGIVFFHVLIALKALCCLHVYFICWVGCLIFTLTEFARYSLRESCACDMVQNNSTFEKGELKCSFRHGPPVQRLWCGPQDTQGCLKADVSRVGHQKRQQTNECSDV

SEQ ID NO: 924291 - protein, 156 aa, Homo sapiens
MFPLSHPAAAPHPQIHKQPTQTVHFQKSSLLTAVQHAEGPLVSVLSEGGYVKGKWPLTSPKQLQWPSPGFPRLRGRMANNTMEPARPQAAPAAALAGHPAGTLDLLGAVGIRVSRPLFSSSAISSSQRDCPAAALGPGGSCRSQSLPLPSSLFFSS

SEQ ID NO: 924292 - protein, 139 aa, Homo sapiens
MSIPSSSSLLRSGDAIPAQPLGSLVFRVELSQKASVWRGPFNFFEFQQKVLSGRLTSVQFKTTFNKLILHSYTKSTTARYFTIIKQNKFQDNLGLLDLLESDILYLPQKPAFKNTCQSPVVDYKPPSKKEKNKTTLVCG

SEQ ID NO: 924293 - protein, 173 aa, Homo sapiens
MKIKSNQSRSRGLLSSNPNLETRNHIPITSVYKALLCLWDYILCAGLREHEEGAICHTLEAEACTSAARLTVVGGGDGNCRSARVVEKLLQGFSGFACPAAPCLARGEGGATCGTLEAGACRWHGSAAHLAAVGGGDRDCSLTVVVVTRSSATACPLVTGSLHHPSWVAAALT

SEQ ID NO: 924294 - protein, 143 aa, Homo sapiens
MNSKDKFDGWVCSLGDWREGGIEEAEAARMSSRAGPIAGNATEDTVQRKSGCTRKEGRLPSSLENLFIVDTEWEGPASRSGCRAEFQEGEGWELLTWPWVVAAAEASNEADASLQGQSGAARSEEQPRREPGEGCCLANRPGL

SEQ ID NO: 924295 - protein, 135 aa, Homo sapiens
MRFVKWTNQHPVKWANKHPVKWTKQQDEGGEKKGNKSWPPQPAEATCSAVTLMVKVRGIILQVSKNTNPLQKLQTRLKEQTPDTPPLRAVNTHHEGNVQLEILTVLTKINQWNYILNHSKSCILRALIRFSTEKC

SEQ ID NO: 924296 - protein, 143 aa, Homo sapiens
MVVHLIFGTYEASFVDSWPSSAGFLDPSVAEGEVWGTDKRKDMPRSNSTHKLYWVMAGWVCMWVKSLTVAVCPNEWHRCPNTEAVEGKEASGGEAVWTRGLGDNNAGTRRNAKELKRCPGSIPGTLNSRSGLHYKVGLIWKFS

SEQ ID NO: 924297 - protein, 278 aa, Homo sapiens
MPHLATLGKRWHQEAEGVRGKCGQKSLLWFPQEVTGKEGQTGLVLMSSSNFSTLWDLGAVPSCLVSGSGDAWEAARNPENLTLKYWGPYVSGIGSFRWVLGLTDFKNEATDTRGVKLQTFAVSVIAHKGGASGVVRSSDGFMVLLTSGVKPQTFAVSVTALKGGASRVICSSQWVGGLADFRSEAADPAVLQLIKQCCFQFLLSPEPKDDSNKEGDSFGNKRSSYAVLKPTPAPSGSFLPWSELFQEASQLSCNGTYLPSTGFLSLSTIDVLDQIILC

SEQ ID NO: 924298 - protein, 248 aa, Homo sapiens
MPALSSETLNSCFGWYHSFQCDLPYLLRHQLARSNTDLQGSPCGCEFPEGAGKQTSLAGSNGKAEGTRTYAIFTADSHSPLTDDSYPVITVAHKCPAGDERRKVQCSKAPLPHSPKYIGLLASSVPCRTFDSLALSSDQSAPIPKLWLQPDPNLQVPPASLTVFPPHIDRTPLKPVPPRKPTWVENSDGSPWKTDISGFSLVLSIVSRLQHRSLRGSRTTPSLPQSNGPGVPEPVYPHSSQTFKMRTN

SEQ ID NO: 924299 - protein, 159 aa, Homo sapiens
MMVLSNPRDDSLHLIDIMMQSRYTGPGNTGTEEVNFAVPHSLPDSGPEVHSICSHSHCQSQTVRAMGETVSVLRMDALEFNGSSCSNHFLLHRKSPLRVKRMLKYSHPVSFPLANPFLLWGFPGQFLSPVMLVILRMMEKGLLEPPIKYVSFRIWTFCL

SEQ ID NO: 924300 - protein, 142 aa, Homo sapiens
MVTLTCQSSHNPTHTVTNKIRKCRSSDVNSKEFPEHCSREPWRRCHLNLRHSQQKGNFITSEKKALVQQDVTISELQMCTSNGKTQLKQIIMDKVIQSEIYAEVCFLPKYSPLFTMWYYGEQTSSTQTSLKIHWVAFIPFFF

SEQ ID NO: 924301 - protein, 224 aa, Homo sapiens
MYIRSVCRKEGFAWACCGEALCEQGPLEDDRWPAAIGAGADPGPVRGDLGHTLRTGHFSQVKKICISCPGHNALELVYTGWNKACTAHLRMCCKGCQPCWEIAASLSFLSWLWLWLPTLAILPQHVALQTVWHMNCDDVFPSWISAESRLSILSLGSREGGVCIPDFLEEMAVVDVVFSSSFDSTILTPALAEVKVASVPWLVDQRAPWDPKEGGCRPDWEEIW

SEQ ID NO: 924302 - protein, 188 aa, Homo sapiens
MGVVSPCCSHDTESGNILEGSKENRKMWESLELPRDLNSFDSDPENEDQAEVISDEDEELVGNWSKGHSCYVLAKRLVTFCPCLRDLWNFELDRDDLGYPAEEISKWQRVQQEAELQSLENLQLDNALKKKNPFSREKFKPATEVCISNEELNVNHQYNEENVSRVCQTLPRQPLPSQAWRPRRKKWF

SEQ ID NO: 924303 - protein, 149 aa, Homo sapiens
MPLEQAKDGDCAGSTLELLLGTLTGALHCPCCACLLLPGKLKGLWSRPAIGSQEPRLLVTPPPLECGLPPRELPRGEAHEAWNPEPKTCQRPLCKPGRHPPESGLERAPAPAPDPADALNDTPRKALSERTQESSQGLGAGSVNGAVSG

SEQ ID NO: 924304 - protein, 178 aa, Homo sapiens
MSGHSDPGGFDDYKEKIKFRKKEEKGKRVLWGYEKSRGREQKQFCNEEVTWPMAVEEERTLSTREPDEEGVRGSRAPLALAQPHRSPAASRSLKVAASADFLILLFLDGPGPKARGAPSSLQAYARAVALWFLISSGSPLEPVACRGSGLPGSRSLRQEAGQVSACSSSYWQAPRMEG

SEQ ID NO: 924305 - protein, 157 aa, Homo sapiens
MSSPTQQRRSPSRADPLTGERTNERTGPGQAPCPSLYAPFWALSLVLSLPQKSDLSHLDSHIRLSPAPECPNRHCSLACSHLKAALVTDNQPSHLQKAGPGSPVTVSFHTLPLSPYSCIQRPPFLTVMPLFCSALQPQGPTCQVLCPAHGKCSIHIS

SEQ ID NO: 924306 - protein, 134 aa, Homo sapiens
MLFINLHITTVLQGKHGYLQFVNKKGLQRGSVTCPASHSQSVKSCLQRFLGARRVCFSALGQAPQLLHNCPCLSSPLSCSASHSYLLFWSPKAFEQVIPIPNPSARATADLSDVDSSVSLVLASQPVHFIPLPM

SEQ ID NO: 924307 - protein, 137 aa, Homo sapiens
MACKDVTNKCQIAWAQAGNAVDIQRTGTSEGTSVIRLHKIPEKVLQTGFLGKMKTVLYLAPWKLDLGGCTRCKSILVTRQSCGLAQQVPTHLSGSTVSVDCSLVFPLLLLEGLLLSVSSAEVSKRGDPIESTSVFIV

SEQ ID NO: 924308 - protein, 146 aa, Homo sapiens
MFLTLCPSVLIVQFPPMSENMWCLVFCPCDSLIRMMVSSFIHIPTKDMNSSIQDIGMGKDFMTKTPKAVATKAKIDKWDLIKLKSFCTAKETTIRVNGSIVEMFRLYSTSVSHEVSPEEWRVSLFAKMPCFEYCSDSIHSYFLSQI

SEQ ID NO: 924309 - protein, 136 aa, Homo sapiens
MPPRAGAVECGEVVNDAKSKMRKTCFPTLLLRFTGKEHCLLEITYGNAIFTAFLGLMPSFVSWVEGRAKGSEGGEREDYVENGNFYHHPAIMRPHTSHGDIRDHMGSSNEAPLPRPAEVLSVEANWGVPKYHCYQQ

SEQ ID NO: 924310 - protein, 213 aa, Homo sapiens
MTSTPSACDLTLPDVTSTPSACDLTLPDVTSTPSACDLTLPDVTSTPSACDLTLPDVTSTPSACDLTLPDVTSTPSACDLTLPDVTSTPSACDLTLPDMTSTPSACDLTARRDLHPYACDLTLPDVTSTPSACDLTPSWVLGSGCSPARRLQVLCKDLTAEDKPTSEETDAPLADTKDKMPLEKQTPVIQEQDDKCDKLHVCDKAVFQMRTIT

SEQ ID NO: 924311 - protein, 149 aa, Homo sapiens
MNWASVVTHACQLAGDGLLKTLLSLLLEELPRGHQEPGDRSQPLPPNSSNLCTLPSSKATSTSSGSAAMTGLGKQMLAGHRASLQVVLEHLNPSWCPPGTMTSSPECGFAWVQTEPAWDALGQGRLFCVQAVLTPCPHRKRQIEAAESA

SEQ ID NO: 924312 - protein, 143 aa, Homo sapiens
MTSSPECGFAWVQTEPAWDALGQGYWGLSGLLQLIQRHPEPTYLNLTLIEDSSVCRLSSHPVLTGKGRLRLLSQPSSTPEAKECCYCKLQTTHLVEGSNILNPGLAKTYPSNSSDPPTSGPSSQPLCGWLLKLRKASRNVEIQ

SEQ ID NO: 924313 - protein, 178 aa, Homo sapiens
MRVPTTRAALCLAEFSEDARSDQRPVIPSSRPRVAFSMSVVDLDLKPYESIPYQYKLDGKIINYYSKTVRAKDNTMMSTRFKESIAAGGVMDINTALQEVLKTTLIHDGLARGIHEAAKPLDKGQAHLYVLASNCDETVYVKLVEAICAKHQINFIKVDDNKKVGEWTIPFEDSSPSL

SEQ ID NO: 924314 - protein, 160 aa, Homo sapiens
MRLIHCHENSTGKTASMIRLSPTGYLSQHMGIMGATIQDEIWVGTQPDHIIRVVQETPWGVDKSTFLNKALRMWGAVPCPLLQLPLSTLSACAPATLPTSSSLNKLLPTQSLHSAISSPWNNALPPCCLANFRSLLKCYFLGEETLSLKLFVFFSFTVLK

SEQ ID NO: 924315 - protein, 196 aa, Homo sapiens
MAMTNTNSKLSINTVKKTASQVSFQCVKGPPFPPLQTVMLVSPGVQDRLTRPRLDLRPCPDPRPCPDLRDPVQTCATPSRPVQPRPDPRPRPDPRPGPKLCDPIQTCDPVQTCDPVQTRDPIQTLDPVQSYPRPRPDPRPGPKLCDPVQTCDPVQTCDPVQTRDPIQTCDPIQTHDPVQTRDPVQTCVCSGGASQH

SEQ ID NO: 924316 - protein, 141 aa, Homo sapiens
MNSTLDALADSSLDVSVVLPANAAIILRPVLEEWPTGNKASVEHVGGFQGTAAGSLGSRSLQGLLLVLSAFKAVASLLPQLSADYLPNARAQRFPATAVRYSLCRQWGLPANQAGAGKAVRWLQLEGKLLCSAAQMQVRDR

SEQ ID NO: 924317 - protein, 161 aa, Homo sapiens
MGHINGSAVWGQDPKTPGEVNIHLRLSQVVQAISGLTALPFRNALLSALAVARSGLGPRRAQALVTGDGAELPLRESWICAPRHGKGIRTPADLALTERRWGPWKGTPPVGAKSKKKMTLISQPRAGRKGGVGVVAPCPSSPTPTVRAHSPGVTRDVNPQA

SEQ ID NO: 924318 - protein, 195 aa, Homo sapiens
MAKHFSFPSPSLELSFFTSISIKILPTKLRGYVSRACFFLTFCHDYNETEAKVKMTISPSLRRSWEISPRDHAVLSLITASESLLTQCSVLAAIQITNQDEELIVGSILGSLGQSHALFSPMFLMVMENNGLARTGSAVRDFQGDSHRNSPFDREGSECNGGEAFSPQLQYSPGLAASCGAAAATFSTMKEAAWS

SEQ ID NO: 924319 - protein, 160 aa, Homo sapiens
MTLPGFGFPPIPVPSSISWNNFPDKLLTPKSQDLLHGHLKLRGLSSFPSTCVCPIQSSVCVPAAEEKRLLRATSSTDRPQKPKHEVRLKTGQAQALPSQTQRKRVRAQQRNQIPLEIAAPRRVWKASPNKAAPEDLKDPHGPHLDGDANKNLRTSSLQAL

SEQ ID NO: 924320 - protein, 118 aa, Homo sapiens
MQDVRPKDTLVLPLESPASFALCSSVCLGPGDESRWRPSPDVPRLLCVGKGGEAAGNWTLLERGRASGLWVLGLGTVLPSLVAPSAVDGVGILGALKKRNSTNHLEDPGSSGAPWSLR

SEQ ID NO: 924321 - protein, 141 aa, Homo sapiens
MPVNLTRQARPCISPILCDVGTQMQAHPHEGLTSASPVPGSSRMGSPGSSTKHGAGLWDRLLRQPCRGLADLLGNTVGEPHLLIDKMRKISSSSQVFLRIEGREGPVQKRLVDLKVSMNMENLKPVVSWRSKEGRVLASCP

SEQ ID NO: 924322 - protein, 186 aa, Homo sapiens
MLSQLKPFSALSNRALTTPKALEARAAFQDCCKYPLFPYTAPLRGASWYVPLTIRILPGKDSCTQDSEELLRVRNRQWEAGVNPEGLFEALTSCQGRIEEVRTQESEWLKFEEGYRPCPGDSEKMAINEELALIRHQICQHLDLGLPSLQNSERVWSSERLQLKLLQALPHCRELPLLMSALPGSE

SEQ ID NO: 924323 - protein, 287 aa, Homo sapiens
MEQEPGAVLTAVHMEQEPGAALTAVHMESEPGTALTAVHVELEPGAALTAVHMEQEPGAVLTAVHMEQEPGAALTAVHMESEPGTALTAVHVELEPGAALTAVHVELEPGAALTAVHVELEPGAALTAVHVELEPGAALTAVHVELEPGAALTAVHVELEPGAALTAVHVELEPGAALTAVHVELEPGAALTAVHVELEPGAALTAVHVELEPGAALTAVHVELEPGAALTAVHLELEPGAALTAVHVELEPGAALTAVHVELEPGVALTAVFGSPELCPEHHDWAQ

SEQ ID NO: 924324 - protein, 130 aa, Homo sapiens
MCPCGTIHNSKDMESTLMHLSGGLDKENVVPIYHGIRCSHKTEHQTSGPLQQHGWSWRDGAGGRHPTRINAGTENQILHVLTYKCDLNTEHTWIQRRKQGTLGHTLGYYSDDLGDKIICTPNPMTCNLPM

SEQ ID NO: 924325 - protein, 183 aa, Homo sapiens
MRLLSAFRNCLGNGSQDLLTQRIPQTFQPFLLGGLRGLPTTASVLWCPASPVRLDCLPQLTPICGSPRPVSTVSCLHPLLSLLHWRLPSSDTQACLLPHRLCAGCSLGVPGPCPLHAPGLSLLSRSPPHPSSPALHPTPPFPPSTTPLLSGSWAPPRHLRLLSSAKCTICSSSAHSLPTGRPC

SEQ ID NO: 924326 - protein, 154 aa, Homo sapiens
MQRVRSAEEVMENEVNKSYPWTLDAWEGLEPSGRRRRWSGSSRRPAPTGAAKALGLSACLCGSCWIQNRLDHLKSYLIPADFLRGQPGGDIIGRHTGFRIRGQKCGLSQPLTQFCSLAKPFAARAALSVSGGGQLPSQSPGGGEVEGPRGGTLQ

SEQ ID NO: 924327 - protein, 151 aa, Homo sapiens [sequence omitted]

SEQ ID NO: 924328 - protein, 132 aa, Homo sapiens
MAGRSRDPQSRCGAGARSSQQQVEVLADTANPGPQSGVSREAGHISEQSSELSVRNSHERTTCPGYLLQQGERQTYPGKRCKNGQRLHQNFLLETAGGMVKMRRRPQPTAGKRTAKLTPQLGRLMAIIIMPT

SEQ ID NO: 924329 - protein, 405 aa, Homo sapiens
MKLGCGGSENPVLCLSLSLEWEDAEDEGMKTTGGVLQVASYLNLASYLNDASYLNNASYLNLASYLNLASYLNLASYQNLAFYLNLAFCLNDASCLNLASYLNLASYLNHASYLNLAFYLNDASCLNLASYLNHASYLNLASYLNLASYLNLASYLNHASYLNLASYLNNASYLNLASYLNLASYLNLASYLNHASYLNNASYLNLPSCLNLASYLNLASYLNLAFYLNLAFCLNDASCLNLASYLNLAFYLNHASYLNHASYQNLASYLNLAFYLNHASYLNLASYLNLASYLNLAFCLNDASCLNLASYLNHASYLNHASYLNHASYQNLASYLNLASYLNHASYLNLASYLNLASYLNLASYLNLASYLNLASYLNLTFYLNLKSYLNFTSYANLTSYLKIH

SEQ ID NO: 924330 - protein, 181 aa, Homo sapiens
MPSPPASPIHAHGHTVPSLTKQLSAVSGTDLMMGWKRIGGPAAWLALKTEDGAISQGIQMGLEIGKVKETDAAPRTLEGTQPCGCLHFIPWDSDQTSDLENSKKIRAKMLSLSLLATIPKYSFICSLFSKYFLSTYSVPGTVLGTGDAAVNVMLSPRFLQISPVLQAVLVSGGFCNKYYRS

SEQ ID NO: 924331 - protein, 285 aa, Homo sapiens
MHRCPRPSGTHEGTNLQMAQNLSRDVEKCKAPEFPPVFTGLRVKRSRCWQSGSLTWYSKTLTVPPWAESPQGWLDQDVPPALKHTWGHMLANGSTLSRESESCGAPSATGAREVAGAKCLWVPGVLRAEWLQARVQGPAREGTAAFPKVQGPLQGFFLWAMSCPCRVLSMWPLGWTPASSPFDMKQRCWASTHVVPLVSCRACERVRVPLSPTGLQGSVSRVCRLIQPSSRAPASAPGLAFLTRTRDYRPLTKYGLDCDTPGSQFPARSGLPHSRTEPGDGPVCT

SEQ ID NO: 924332 - protein, 192 aa, Homo sapiens
MAQFSGAQSPTHVPAPSPPRARKVILRTQGPGGSGHVGRGRARALAAVTLGTALHCATWAGPGPPVSVAPSDSLLFKLQQSHSRLRHDHVSHTPSDGHLADGLENRSHQSRCLRAPLPVPSSVSVPNMLPPPKKNCPCRQPRVPLTCGRPHSSRPPPGYQLACIGPLVPSACSSTVGFSGCGLSVSLQCILN

SEQ ID NO: 924333 - protein, 741 aa, Homo sapiens
MEFRVASVDMPEETQTQDQPMEEEEVETFAFQAEIAQLMSLIINTFYSNKEIFLRELISNSSDALDKIRYESLTDPSKLDSGKELHINLIPNKQDRTLTIVDTGIGMTKADLINNLGTIAKSGTKAFMEALQAGADISMIGQFGVGFYSAYLVAEKVTVITKHNDDEQYAWESSAGGSFTVRTDTGEPMGRGTKVILHLKEDQTEYLEERRIKEIVKKHSQFIGYPITLFVEKERDKEVSDDEAEEKEDKEEEKEKEEKESEDKPEIEDVGSDEEEEKKDGDKKKKKKIKEKYIDQEELNKTKPIWTRNPDDITNEEYGEFYKSLTNDWEDHLAVKHFSVEGQLEFRALLFVPRRAPFDLFENRKKKNNIKLYVRRVFIMDNCEELIPEYLNFIRGVVDSEDLPLNISREMLQQSKILKVIRKNLVKKCLELFTELAEDKENYKKFYEQFSKNIKLGIHEDSQNRKKLSELLRYYTSASGDEMVSLKDYCTRMKENQKHIYYITGETKDQVANSAFVERLRKHGLEVIYMIEPIDEYCVQQLKEFEGKTLVSVTKEGLELPEDEEEKKKQEEKKTKFENLCKIMKDILEKKVEKVVVSNRLVTSPCCIVTSTYGWTANMERIMKAQALRDNSTMGYMAAKKHLEINPDHSIIETLRQKAEADKNDKSVKDLVILLYETALLSSGFSLEDPQTHANRIYRMIKLGLGIDEDDPTADDTSAAVTEEMPPLEGDDDTSRMEEVD

SEQ ID NO: 924334 - protein, 156 aa, Homo sapiens
MECCSICLYSLYFLEQWFVVLLEEVLHILCLDGIIGEFYQTFKEFTQTLLKLFHKIEEEGTLRSSFYEASMILNSDKDIIKKENYRPISLMNISATSLNKILANRIQRHIKRIIPHDQMGFILGMQEWFNIQKSITVTHYINRMKENNPMIISIGA

SEQ ID NO: 924335 - protein, 242 aa, Homo sapiens
MWEEEEVEEEERWRRGGEVEEEERWRKRRGGGEEEEVEEEEERWRRRGEGGGGGEEEEERWRRRRRRGGGGGEAEERRRGGGGGKVEEEERWRRRRGGGEEEEVEEEERWRRRRGEGGGGGGEKEEEERWRRRKGGGRGEVEEEERWRRGGSGGGGGGEVKKEEEVEKRRRRRGGGGGGGEKEEEGGEVEEEEERWRRKEERWRRKERKVRRKGAESTLLSRIHSCDDGVNPLMRAEPSGPN

SEQ ID NO: 924336 - protein, 141 aa, Homo sapiens
MTQAVCLLEELLYENIKTHFLSASLHHSDPLPMSTWGPAPPGPQLTSLPGGILQEGSSLDTGKPRTAGGLREAYTVRGRHNACAHPGGRPPCDRVLPWNTPFRSCNLTMLALPVNLWCSVEPLAGSVNMVRPAASEWGVLW

SEQ ID NO: 924337 - protein, 194 aa, Homo sapiens
MCLLTGMLLLAFAASRGLQGLAWTIFERIQDDYWYKHRHVDQWTRIENPEIKLHTYNCLIFDKPGEKQWGEDSPFNKWFWDEWINDLNVKPQTIKILVDSLGNTIQDTGMGKDFMMKTPKAIATKAKIDTWDLIKELLHSKGNSQHSEQTTTEWEKIYANHASNRGLISSIYKELKQIYKKNSQPNPLKSGQRT

SEQ ID NO: 924338 - protein, 245 aa, Homo sapiens
MIEMTKPLGMRKKGAVEIKVKVRDLRGAKKLWYMRNWINGRPVDNEERRLSKPTLLQLLLLLLLLLAVNTRIAQITFEPVRGAKMQVLCVPKGPLKCHMGSLGKEDQENYPIPEPGPNDTHPPPLTPRQSGPLSALEELGVSFPTLSYLTPEPQLLGEHQIKGSFPGRSTALLLKGQLCYRLVSEVLLRMHSVGICGSDVHYWEYGRIGNFIVKKPMVLGHEASGTVEKVGSSAKHLKPGYKIWI

SEQ ID NO: 924339 - protein, 216 aa, Homo sapiens
MNTEFQSVGLISDLSFLTTKNKEKDKEKKEKREKRKEKKEKKKKEREKKEKEKRKRKRKKEKEKEKEKEKEKEKKRKKKRKRERKREKRERKREKRERKEKEKEKEKEKRKKKEQRKKRKKKKKKRKKKAARRGKAARRGKAARRGKAARRGEAARREAKEGFQKKNLSFVKETNMSTIAKLVHSAYLKNHCKLCYQSVWLPTSAKEFTISIPTLE

SEQ ID NO: 924340 - protein, 288 aa, Homo sapiens
MVAEGNASPRIKSGRGSVTVKVTGDNLVFSVAQCALEGPSDACFTIFLKPSYLAGYSRQQVRSTTDTLVVGTRKAMPVISPFSSGMSLPTAMEVPVDAGIIITAFDFGGILLLEDGDRISTDDKLVILSLDSAVELATGGIILEHVDHVAGVSEGVTDDDNIHFARVKSSPVDQMPSTAKCVYYNLQFHQLSQGHGCCCMAAAAWLLLVANSPSRFRDDVWEPGPRIGNVRNLPGILSTAVSLAPKQSLSLSLCPPLPQAHGEYCGLPWGGQGIDSVHLRPKGSSVIL

SEQ ID NO: 924341 - protein, 167 aa, Homo sapiens
MSELDSFGSYLGWIEQLAELRQEFLRQEDQLQDYRKNNTYLVKRLEYESFQCGQQMKELRAQHEENIKKLADQFLEEQKQETQKIQSNDGKELDINNQVVPKNIPKVAENVADKNEEPSSNHIPHGKEQIKRGGDAGMPGIEENDLAKVDDLPPVSVITSVIIASCT

SEQ ID NO: 924342 - protein, 140 aa, Homo sapiens
MSQVPGLLLSRTERISECGELQFLNALLLLPQLGFQTESPEAALDESHRVIVDIKEARKYSATAEQQCPQLKIQIFSKGKEKKESIRWMTDASEIWIPKKKETRLLGFSQLALQQDTNNSLSLVVECILWIQAFGQLYMS

SEQ ID NO: 924343 - protein, 421 aa, Homo sapiens
MTEEELGASGDLSSEKQEQSPPQPPNDHSQDSEWSKREQIPLQVGAQNLSLSVELTEAKLHHGFGEADALLQVLQSGTGEALAADEPVTSTWKELYARQKKAIETLRRERAERLGNFCRTRSLSPQKQLSLLPNKDLFIWDLDLPSRRREYLQQLRKDVVETTRSPESVSRSAHTPSDIELMLQDYQQAHEEAKVEIARARDQLRERTEQEKLRIHQKIISQLLKEEDKLHTLANSSSLCTSSNGSLSSGMTSGYNSSPALSGQLQFPENMDLAKHVVDTSMADVMAACSDNLHNLFSCQATAGWNYQGEEQAVQLYYKVFSPTRHGFLGAGVVSQPLSRVWAAVSDPTVWPLYYKPIQTARLHQRVTNSISLGEPREGRLPWGLVSGVPSGVLLGDRGGGLEAALFGGQCTWCATPPCAH

SEQ ID NO: 924344 - protein, 129 aa, Homo sapiens
MRVAMLEEWGRARSKYQLKSPDGWGHPGGPDGSAFLSSRYWGKPPCSGSHGSAAGVRGEVQVEVKAHSWLTGTEYHITSHLDPRVPYGAGCPPTSHSTKMTKTQDLSLPLEGLWRQEFQGSEATVREIN

SEQ ID NO: 924345 - protein, 166 aa, Homo sapiens
MGGEKGLRTGVHFSLQQRSCEPQDPIQPHAATTTLQARRAHSGTAKTKRSDLLWRSGKWIQKYKADDWKQGSGNGSEICLPTPGYMGFLSPAAQPPLEKRGSQRPCPWLDTLKFSWGTELQMPAGTGYLGMEEANSQGPQAQVILPPSTAMETDLIVILNIMNNNK

SEQ ID NO: 924346 - protein, 134 aa, Homo sapiens
MAIVVEHTLEATLPDKTPGAAKTPHRQGGCQRQPWDSKEGHGVPHQHPVQYSSAHGPRKQASSGFVFMYSHVPYNILVNNRPHKTITELKNSYHRVTPVNSLVTLSWCDTVTITAGVKNSIENQQPEGFKILYL

SEQ ID NO: 924347 - protein, 236 aa, Homo sapiens
MFPFLQTQFLRRKVYRFLHWFPLIPTPRLCLAGMVLILATSIPRLQSILKPGLVNWLNSINGKDILTELLKLKCAFEPHGTLLNMQILAPSGNHCEQQGPRGSVGSVSAAGSLQQRWRFLERGQISPEASVYLFLQLRERDGISPTYKDQLTLRHCLQSDREPDLAALQKLLLSAGGMGLESFHCPSQHSMTRVLGKLLIVDWEIYSRGSDCASFTLSGLRKPSSQKFMGTLSEYR

SEQ ID NO: 924348 - protein, 154 aa, Homo sapiens
MSLSAAQNQTETINWYQENGALLQRYLKTWKRLRNGVIGRGGNSLEGSGEDTKSVELPRDLLKGFAQNGDSDMDNKVQAEEDSDGDEKLVGNWRYLVEEISKQQSIQEVTCILLKAFSFIREEEYVSLENLQPDYAIEKKNPFSGEKFKPATEI

SEQ ID NO: 924349 - protein, 155 aa, Homo sapiens
MNLFCMELAWGKHWQRHPTHPSWLEASGGSWGHCLPNQHQEESPWWHFLPGSFPGNYSKAVNLHSSGLRHKEGIALPCEMCKEICRDSQRPSSDTHVFKNGVPGNSFSRWGFSKEQNKVFTLIRGSKILKFRDNQILLIRVDACYGEAWVNCKCM

SEQ ID NO: 924350 - protein, 156 aa, Homo sapiens
MHVEGRAQGLSEESHVEYEREESRTTTRLLAKVPDHYLPSAIPFSISVAASCLREPGWNDSDVMLSSQPLVKNNKKRLCLDGFVYLYKTGVPIPSLKRSELRGQTPALPIGETCRQVKRITTCWSRNLLGKQYWGRKGLTVIDELFLGDSMWTSLS

SEQ ID NO: 924351 - protein, 149 aa, Homo sapiens
MEADFSLSYTAGISLNNLLSLPHFWCFSQPLKVIFSGALKYVMPELQKNYLMEPLDLFRYFPQNKRRLSLSPELPGAGGGVIQAPQWPPPPGLCWNSEFLLCITLYFIELPQNSYFEFCLKVRMSLSLEDWSQVSYLDCLVKSCFSGWS

SEQ ID NO: 924352 - protein, 136 aa, Homo sapiens
MVLFPMPLNWLRPSNRDCQALYIGAILLTSDKLVEMRKNQQKESTENPTGQSASSPPNDRNTSPARAQNWTEDEMDELTEVGFSRWIITNTTELKEYVLTQYKEAKNLDKRLEEQLTRITSLERTINDLMQLKNTA

SEQ ID NO: 924353 - protein, 131 aa, Homo sapiens
MSCQRQQQLMDQAHIYIRTLCGSLCSFSLLMLIAMSPLNWVQFLVIKNGLELYAGLWTLCNHELCWSHTPKPPLCKCLKGDTPVKLYIFSVQASKRGNPISKHKNKIVPGWVRFPCLVQVLENKMKQGGRY

SEQ ID NO: 924354 - protein, 409 aa, Homo sapiens
MEKVKVKRYVSGKRPDYAPMESSDEEDEEFQFIKKAKEQEAEPEEQEEDSSSDPRLRRLQNRISEDVEERLARHRKIVEPEVVGESDSEVEGDAWRMEREDSSEEEEEEIDDEEIERRRGMMRQRAQERKNEEMEVMEVEDEGRSGEESESESEYEEYTDSEDEMEPRLKPVFIRKKDRVTVQEREAEALKQKELEQEAKRMAEERRKYTLKIVEEETKKELEENKRSLAALDALNTDDENDEEEYEAWKVRELKRIKRDREDREALEKEKAEIERMRNLTEEERRAELRANGKVITNKAVKGKYKFLQKYYHRGAFFMDEDEEVYKRDFSAPTLEDHFNKTILPKVMQVKNFGRSGRTKYTHLVDQDTTSFDSAWGQESAQNTKFFKQKAAGVRDVFERPSAKKRKTT

SEQ ID NO: 924355 - protein, 154 aa, Homo sapiens
MSTDADSNGMVGCAYTCSSGAVVRSAYVCMCVGKVVEACQLELPEGQVWYACEGVMAVASRQYPGWVSKAALEADMARQGPWERLAHRVMLRSHEKNYLNMVIIFKFGQTNIPEDICYPPNPKRQTRHCAPFFVTGHARCSNLCFGLEIIQEHH

SEQ ID NO: 924356 - protein, 248 aa, Homo sapiens
MHATSSICSCLHPGFGRESPSPLSVQRFWEGHLAESAGRVVAAALQQAVLATGLAAVRPLFCRAAVVCWGSTPDPIHLGPSCPWRSSCQGYQSSSHKPLAGDAEIPTERLYLSHWHQQQGKMANWSHSDVGHPSPLGTQSSQRLGGLSLATLLAHEGISPGLHLGSKLPAIMFRAPLWPLDTPAALVPVTATISAALMLVFLLFRGSPADKGADGDLEGLLQKFLGRPKIRSGYKFTVLWASFLLWFK

SEQ ID NO: 924357 - protein, 150 aa, Homo sapiens
MSTGLNTWVINIYLEAIILSKLTQEQKTKCCLFSLISGGKMIRTNEHKEGNNRHWGLLDGGGWEEGEEQKRAACLGYITRFLLCPSGFFVGLGNGAHQQETGERFQAPTYGKLSLHQDTCKTDQSSNGKVTIFHLFWVSYHDELKFQEGN

SEQ ID NO: 924358 - protein, 136 aa, Homo sapiens
MRVNGYAQRMQETSRKGRTKKPSPNEKHQLLKPPCNEPITNTGKFIPRKPKVKTMIMTVYTQQPHSILKTEKLGKDYLMIILKAKDTFQWIHKLSKEIFDNCAKSSSDLQKKLKTKAVKVEKSCLFIVQPSIPPTI

SEQ ID NO: 924359 - protein, 174 aa, Homo sapiens
MGKKQSRKTGNSKKRAPLLLQRNAAPHQQRNKAGRRMTLTKKRIKRNEQSLQEIWDYVKRPNLCLIGVPESDRENGTKLENTLQDIVQENFPNLARQANIQIQGIQRTPQRYSSRRATPRHIIVRFTKVEMKEKMLRAAREKARKLYKPEESGDQYSTFLKKRIFNPEFHIQPN

SEQ ID NO: 924360 - protein, 146 aa, Homo sapiens
MAKESLKGYMGMKLDFKRRKNQIQIQSSSERITLKKAMLDAHPGTWMVIMKSMKISRKHLHWYNSKPCQLGRMHEKYPGETNVSFRYSNETGGYKSVLHHALSSLVEAAKSSRAATDQQMGNEQEYKFPANQIINICCLHPGNTGQ

SEQ ID NO: 924361 - protein, 181 aa, Homo sapiens
MGWLAEYEGELTQGSQLSPAREQNWTENEYDELTEVDFRRWVITNSSKLKEHVLTQCKETKTLEKGRIDQAEERISDTEDQLNEIKREDKVRDKRMKRNEQSLQKIWDYVKRPNLRLIGVPESDGENENHVGKHPSGYYPGELPQPSKTGQHSNSGNTETTTRILLEKINPKTHNHQIHQG

SEQ ID NO: 924362 - protein, 183 aa, Homo sapiens
MSILSPAACTTVSHSKRSKLEPDDVQHHVQVSKDQTKVKKTTSRTYSFILCMQEVFKLRAYCTRSQDISKLLYIKIYVLTHKSNKEAATFLEPWVEINKAIEPGAYATPICRRGGRKSITGGIDIVRIGKLKTGTAKNCNQDTFSLIWEMQMGVPYKLSRVGERNGKLLEDPSKYPKEKDLAV

SEQ ID NO: 924363 - protein, 148 aa, Homo sapiens
MNKLASSLGCKNRLLLQGEPLPKERREDIHKWKNIPSSWIGAINIIKMTILPKIIYRLNTIPIKLPLTFFTELEKNYFKFHRESKKTLYSQDTPKEKEQSWRHHVYGTIVSPGGSVLPSGAKTSRQAEHNVTGIGSKSFASGPLGVMD

SEQ ID NO: 924364 - protein, 167 aa, Homo sapiens
MGKYLGFMGHTVSVATSQFYHYSAKATIVFFFPSDQTYLRHSCDEPDLRVIITDTFKTRTFKISFMYRRNYKVTTCAKGRKTPKTVPEKNLMTDILNKVIKSTGLKMLKELKEVMEKTSSMMYDQNGNRSKEIENLKRNQKEIPELKSTTTKMKNSEDSEGRYEHIV

SEQ ID NO: 924365 - protein, 134 aa, Homo sapiens
MCEQVSECHLRGAPDEEADAHGKLNNSFKMRLDPKNVLPADINTPAAESAADLPLHRETLILDSHTAPLRGSLGAAQAFPSPFPSPCPVILLRDLVPGQPFPGRLLEYPAEAFLCLLQRCYSAGQAAGFHVTVS

SEQ ID NO: 924366 - protein, 196 aa, Homo sapiens
MPPSCAYNLCDLEVLRLIVKSPKIVKRNVKDEAQDKTIAGRHTSRWTSRGTRCLKKTQAAGLREDVEGSMLVEEHMTDGTWAGYGLAERGGVWLGQSEESRGCRVAQIQGKTISLLALPFAESYFYSIKPCTNSPSPHMIQFFRYTKARTLGYRKPSVLAIRQGWRVNGLPVTSQCEEAGQVSQKQRDQDSNSCLP

SEQ ID NO: 924367 - protein, 153 aa, Homo sapiens
MKERDAAPAERGKPATYTGDKKAKMAAKTNKKWVRLATVFAYVLSVSLAAIVLAVYYSLIWQPVGAGTSGGAAGPPPGGSNATGPSGTSGAAAAGPNTTGSSRREAPRDVPPLQAARPAPPEPPADSPPAGPLERPRGPDEDEEETAAAPGSR

SEQ ID NO: 924368 - protein, 359 aa, Homo sapiens
MFGTQVIHWGVCWWFWCDIKMENHRAQYPTSVRQPESARFYWQLCHLTQMELAVSENPQFYSHMLLLSCHFPTLSLYTLEKLLPHIWGNVGFAFTKEDLTEIKDMLLASKVPAATCAGPIAPCEVTVPAQNTGLGPEKTSFFQALGITTKISRGTIEILSDVQLIKTGDKVGANKATLLNTPSISPSSFALVIQQASDNGSIYNPEVLDITEETSFLLPEGCPRCCQCLSADWLPTCCISTPFYHQWVQMSPGSVETDYTFPLAGKVKAFLADPSAFVAIASVAVATTAAPAAAAPAKVEAKEEVEELGRLGTACFKSTDRSNPNSVCPAKVGTAPDPHELLEEKSKEKVSEDVCRKNC

SEQ ID NO: 924369 - protein, 205 aa, Homo sapiens
MTLSRQDKVVSCVQVEGTAIKRSTGSPFSDMRDGGALGTGAGRWVVELVEELRAYIVQLPREAIWLLLLLPASRRKLRFAIDVPALIELLPRLHQAWSSQLHAVCPKGHEFSCTSGLYKPRSGQLIIPHLISNSHLISNRQEILGRSQEGLAVPMGDLRGHGSGIRSDIQVYTCESSTGHVRSAQPGSRQVLSPAAGKCTGLDDG

SEQ ID NO: 924370 - protein, 158 aa, Homo sapiens
MKPGSSEKGSHFPQLHPGSTSLKTEATQAALSGFSLQSQWAVSHGLRCKQAALREPWRAGRGCSDHSCCWSGTSLQEVRSLQVVPKQFSPIAFSWDDSRLSPHFCHYQAEQNSSSPGIHPAADLRGYMSSCCYSGEKRVWALESDSQGSNSSSAITCW

SEQ ID NO: 924371 - protein, 149 aa, Homo sapiens
MVTLISKQHLELCALQSGVETNGPFTRSAHEPWGDPFDHQLCARVSFVRCSRMQGPLWERLANHRSWLCIPELLYCGPGAPEHPMALSESMVGFWLHWGFYVLQITRKQQQQQQQQQEEEDSNDEAAYRAFMRTSYEKNPKLLASLAAE

SEQ ID NO: 924372 - protein, 153 aa, Homo sapiens
MFAEKLPNLTHLNLSGKKLKDISTLEPLKKLECLKSLDLFNCEVINLNDYQESVFKLLPQLTCLDTYDPEDQEAPDSDAQVDGENEDGEEEELDEEEDEDEDVEGDDDKDEVTEKVKTGREKQMMKKMVKTPDHLQKQNCSVLFGLFMDLVAV

SEQ ID NO: 924373 - protein, 137 aa, Homo sapiens
MQGLLSGFVVFLQVKYSWLRRNLSFFRLKGLELKNTCYRCSESFYETAGDMNRAGGHGALDDLEFLAVFCGLPCRFQFPAYPWLSVTSVEDDRNEIKLAQWEFSQTFDLTIWANFTDSILADQAWDLTESMTATFAE

SEQ ID NO: 924374 - protein, 146 aa, Homo sapiens
MVATVRKYRGATRTYQLTTTPKCHLQDNIRKLQHQKYLTDIHPCETKDEKSATNKGPARSHGLILHKKIIPKTRSHQIFQGRNERMLKAAREEGKVTYKGNPITLTANLSAETLHTRRDWGPIFDILKEKKSLTKNFISSQTKFAK

SEQ ID NO: 924375 - protein, 154 aa, Homo sapiens
MEQSWTENDFDKLRKEGFRRSNYSKLKEEVQTHGKEVKNLKNKLDKWLTRITSAEKSLKDLMELKTMARELRDECTSLSSQFSQLEERVSGMEDQTNETKMEPSGKHSAGYYPGELPQSSKAGQYSDSGNTENATKILLEKSNSKTHNCQIHQS

SEQ ID NO: 924376 - protein, 227 aa, Homo sapiens
MVVGEANMSFFTWQQQEEGPNKRGKAPYKTIISHENSLTIMRTAFRDLLNGFDQNADNDMDNKIQAEVVPDGDEEFVGNWSKGDYCYVLAKRLDAFCPCPEDLGNIELERDDLGYLVEEISKQQSIQEVTWLLLKAFNFIRVAEHKSLEKLQPDNVIEKKIPFSEKKFKLAAEICMSNEETNVHHQDNGENGSKFPQALGSARGNIQDPGTEIKNLRNQPHVLLYCS

SEQ ID NO: 924377 - protein, 133 aa, Homo sapiens
MLILMDWQRKCFLEMKSTSGEDAVNIVEMTAKDLKYYINLVDKAAPGFERTDSDFEISSTFKMGCKAAETTRNIKNTSGPGPVNKGETITSEKYVQQMDEMHQKLSCSRHWSTERAQFFPTTMLNYMAFQEDD

SEQ ID NO: 924378 - protein, 136 aa, Homo sapiens
MWPKFTVSPWIQGRIHVLANIVPGRRSPLDGQAATVLLPHVGPATLTGSADLPKKGILSERRNDADLGLKTEEGGNDPWSCRAQGLDPGPQWFLRKDQTFKDIKEHKSRKPNPRTAIRKIKGTSVHTYEREQVQEL

SEQ ID NO: 924379 - protein, 146 aa, Homo sapiens
MNPQGIMDIIFLAHSDWHVGDTNRFHSIPAFNISREWEANKCVLRYEEALKHQLKELSENVLQTCKILETLQQLSTSSCCTSGHKPLCDRQVSGMLNKPRSTDGVEYIEKTHSQSWQKGTSCRICPQGFPPHRMGLEKIKTISKEV

SEQ ID NO: 924380 - protein, 306 aa, Homo sapiens
MPSCCGSGIWKFLCAGDAAGVCLTVEARNCNFFSVIVHLEGVPINSTTILSFAHYIGQPADYSILNSVPFLVDCFRAKEHLTEDSASASLELMLLNPVPLCPTYKYILQTLHSNAADDTTGSTSSAIPPGNRSQQEELTSIPYDFIFNPTNQHSPLSEPISAKLSLKTLIPEARILPLSFVTENTKENIVPSQQQSNGHAGCYLLWYWNLNLPAGSPYSTPVVIPHCQRGVIIMDIAFDRTFTLVLQPLGTVVWNMFLDEISRAMIFHPIRDMDSKNGVNSFDSKYYVIPTEAYIHLILKTWLCKK

SEQ ID NO: 924381 - protein, 167 aa, Homo sapiens
MLLALDHITGLFGVPGHKAPLGKCCGWQTGYILPGPVLLREEYPAPELAHEPMPHPSQCSESGGSPLPELQAQISAPYSRAEGLVPVLTPWGMGTGPTILSSGSSGSNTSCAGELKCSQATGKTESFGKLCWKSSFPSWESRGCAVRMPLGEQPDRGIWRDRLTKGT

SEQ ID NO: 924382 - protein, 154 aa, Homo sapiens
MGRESLMVLSTGYSKLSCGKYSAEWNKKPQLSGQKTIKGNPREAESIRDIMRAQRYHESSYLGKKPHKAPGFTLKLPSNTRLIEVMKADILVLFQILRKNMQSFTTKYDVSWQWAPLWPRVGLEILSRNQGLEQGTLEAYLVFYPTVAELVPKL

SEQ ID NO: 924383 - protein, 139 aa, Homo sapiens
MGDFERLKTSVEGVTASVVKINLSPSNYRSTIEQQMRLTLHDCCECQKKNCKHALKTVTHFVHCHEEVMLLGNRKAFPTNRIVVRKAVSGDGEGFRDLFPILSTGVSSCSNVLVTTEARPQGNCHRGICPRGIATAGQW

SEQ ID NO: 924384 - protein, 134 aa, Homo sapiens
MPKVPCPTQLAIFGPLHHHMNFRISLSISTEKLWTSGEPLNPCTINYTLVNIFINNYVSYEFRPKELHIYEGQEETGCAGQTVTQPVAGRSVDCLAQIEPKNGREGETTYGRRGEITGRHCPLISGQFYPFLKI

SEQ ID NO: 924385 - protein, 156 aa, Homo sapiens
MRAIYGPMAPTPFCALQVLKIRMQTSWGCHYFVCQCPGPNQTSSPPPAATELASGCLDPGDFKGCLDLGWQARTHRQHRTRSRQDIHFLVASSSRHQLFPGKTKAKGRRWRGFAAVLHLCDSRAFLWDLMRLLFTLAFTMIPEPASLEMMFSFMNG

SEQ ID NO: 924386 - protein, 140 aa, Homo sapiens
MKEERKTPESMRVLQWSLGSVCGADHSSQSRFLQPIKLVLVPPHCAAEVSNQFNYRVDIQGQRNIKSWPKPGQSCAWTSRAAGWEEKAAWSGADELAGGDGAGCIPQFTARVTTDTQRISKEAQMCLKDTGLPEAPRMQV

SEQ ID NO: 924387 - protein, 267 aa, Homo sapiens
MGRGWKSVEGSEEDKKMREKLELPRNLLNGCDQYADSHMDSEVQAEEVSDGDEELIGNWSKGHLCYALVKRLPALCLCPMDLWNFELENDDLWIWLNNFSKQQIVQQVVWLLLTTYAHVHEQRNNLKLEFIFKREAEHKSLENFQPGHVVEKKSPFPKEQFKPDAKIRITKRKARANSQGNGERASKAFHRPSWQPLPSQARRPRRTERFGVPGPGPCHHERPEDTVPCILAALAPALAQSSPGGPGHGGRSACLGPHVPVQYTYRW

SEQ ID NO: 924388 - protein, 170 aa, Homo sapiens
MLAVALFFITIRLTSLMLLAAFLALFPLHDSRGLKHTGAGHVNSVALLPIPLKAVSLSPVSSLQVPCVPEATGFKVVPCPKQYNEVIPEALLMEGRTGANFLVPLTPFFVPSLQWRVGAGMKMIVSLVRLNTLGCSGEGYQAPRDTCRWRDILRAMASVEWPDNVAPIPT

SEQ ID NO: 924389 - protein, 172 aa, Homo sapiens
MTIYELGNRPSPETESAGIFDLGLLSLQTGTANRVEMKTSSRPLATLARGNSLLLEDCCQTEVCGHLGIAIDLKMRVEWVIIAAPTLELSPLLSPCCGACEAGPAANGSREGIRGDQGFCSPPSLRLSPCAIVVLELGACTQFSASRGWLCPAPAGDSHDGDFGAVNAQEAC

SEQ ID NO: 924390 - protein, 135 aa, Homo sapiens [sequence omitted]

SEQ ID NO: 924391 - protein, 202 aa, Homo sapiens
MAPPAPPRPPGLSLKLKLLRGSFLPSVFTRGPLAAPCISTCVCPTSSQSLPLTMCPLSRGAHPPPALQQPPKITLNLAPGASALRVKETRCLGCPRNLKPQAAAKRVAAAPKMAASLLFSDLGFLASRIPRNETLGHAEQWRTFSPNRSGNGRLAGSEMQQTPCRIRRGGSQWRVWDAGEQQWWTALSRWDDTCLYYLIVFS

SEQ ID NO: 924392 - protein, 131 aa, Homo sapiens
MRWAGAEEAPATHCHGHSLAEISNKRRGEVGLPGCRSYTTAAPVQQPMAFSYISCKRGAEGDSCECVAVMGIHLVDISRLQLCCVWATECDGRQGGCVSLDSYRCYTDEKNVMASLVWEAPLDMGSAAVAG

SEQ ID NO: 924393 - protein, 184 aa, Homo sapiens
MFLTALKRGFCLGCCVFLLNFGCFYENQCKKAENFKNQNTSSPPKDHNSSPAREQNWMENEFDKLTEVGFIRWVIMNSSELKEHVLTQCEEAKNLEKRLEELLTGITSSKKKINDLMELKTTARELHEAYRSINSRIDQVEERISEIEDQLNEIKCEDEIREKRMKRKEQSLQEIRDYVYSNQL

SEQ ID NO: 924394 - protein, 207 aa, Homo sapiens
MDQAWGLLPGAPGPQLQPKDSFGKVQEAGRALPAQRGHCGRVFRRVSLDFEGCQPPDSHSALYFCVFVLIPLALLEVWEKIGGTLKKAYKDGAEDIPVTVWSVWALVCSTLESFHTDDDEEESEEEEECNEVTEEVTEQVCLPAKAAKEGEVCPYPSAPPIILKKSGLTLQIFLFWRTGAKSSCPGDRSSSASSDLSQFYSGRNPAS

SEQ ID NO: 924395 - protein, 142 aa, Homo sapiens
MNMFLFFPFSSQDNIFIHIVPLYCQLEANNQRHSNRQVISEGRIPQIAPERGQGAADLAPANHTEGSELSYSGCGQPLVGVVCSRRTAFEIPTQHSVRLSFQPADSSSASFVLMILKEGVNGRFLGQVHVHSYKDNHKKSAF

SEQ ID NO: 924396 - protein, 127 aa, Homo sapiens
MQTGARLTRGGFVDLILGVNLTGLRNTSKAGKALFGVCLMDHAEMEESMLHLRRWEYGRKTWAQDKGTTLNPNPLAKEALLQPPGRGGNALERGRAARGSGHCHIKWEFLFIHQILMDSFNHYAQDC

SEQ ID NO: 924397 - protein, 369 aa, Homo sapiens
MWCLERLRLGPECLRRSGDWLLPGRARGAKSRTTAACANVLTPDRIPEFCIPPRLMPRLALAALRNSWVEEAGMDEGAGRTDWDPRSQAALSLPHLPRVRTAYGFCALLESPHTRRKESLLLGGPPAPRPRAHTYGGGGGPDALLGTLRVPRAPGPATPAAPGCPRPPQDALARRPRGCRLLRVPDGLLSRALRAGRSRRLTRVRSVSSGNEDKERRAGSQSPARAPSTSPPSSRVPFPERLEAEGTVALGRAGDALRLAAEYCPGTGRLRLRLLRAESPAGGAPGPRAVSCRLSLVLRPPGTALRQCSTVVGRSRKASFDQDFCFDGLSEDEVRRLAVRVKARDEGRGRERGRLLGQGELSLGALLLL

SEQ ID NO: 924398 - protein, 239 aa, Homo sapiens
MIGRLHDIDRLTLVSSLCDYLHGLVEELMQVMRHQSFQAPLAATCCDSDHWGPHCSNRCQCQNGALCNPITGACVCAAGFRGWRCEELCAPGTHGKGCQLPCQCRHGASCDPRAGECLCAPGYTGVYCEELCPPGSHGAHCELRCPCQNGGTCHHITGECACPPGWTLSEIHPAGWVLRGPAAAERLDQDVVGRTSTQHPFACKGLSGDTAEARVAEQGEEIPGHQALSMPTRYSASPT

SEQ ID NO: 924399 - protein, 137 aa, Homo sapiens
MSGEWVKGRNPSDLSWSSCSRDDLENFLKSKVSTCLLVTDPRSQHTVRLPHKLPGMHYSANEQCQILFGMNATFCRNMEQTGKALATGEGQEPVVHLALAVTGLGEQNLHHPVEKEGRSRGTSQGTEQVTRGTDVNY

SEQ ID NO: 924400 - protein, 173 aa, Homo sapiens
MVPSLVLQHLMCAGLWCLVEGDTSCKTKLDPPLDGTECGADKKEPRFPHVELAVPSPSSKHNSQVHNLNRGMPPPSEKRTHWCRAGECVSKTPIPEHVDGDWSPWGAWSMCSRTCGTGARFRQRKCDNPPAHRARGRQGRDQNCQVCTERPVSLDGEAGPNCCCDFIFWSVFI

SEQ ID NO: 924401 - protein, 144 aa, Homo sapiens
MYLCPAWPTHTFPCQRPPTFPSSDKPCELYCSPLGKESPLLVADRVLDGTPCGPYETDLCVHGKCQVTYFSFGPWWGFGEETHSPQTGKRAPPEVAQQLGWGVGVEALYFLCLAYATGTILPGDSGQAGHVVREPQHLSQLGHL

SEQ ID NO: 924402 - protein, 270 aa, Homo sapiens
MVFHTALPLTKALTLQLKRCGSGLMLMEFTGLTMFSIILKRLQRTVEWPFEVTITMPTSSRGRNAATRRHNDSIKLEDWYPPGHFGLLPPLSQQAKKGVTVLTGVTDLDYQDEISLLLHKGGKEEYAWNTGDPLGRLLVSPCPVTKVNGKLQQPNPGRTTNDPDHSGMKVWVTPPRKNPRLAEVLAEGKGNTERVVEKDASCPGTSDPKFFSFGTGTGSPCSSACGQPIVGCCDYSCCVMVLATNISKSFSGNMEVTHFTGHLNVCDHVT

SEQ ID NO: 924403 - protein, 135 aa, Homo sapiens
MGMQAQPFHVGAATVSQLPVVWFPGERRTIVSCTRIVNKTTTLVNDSDCPQASRPEPQVRRCNLHPCQSRMKFHPNAEGLEEELTAGNLLEHLVLLLISVSFTVFQVQSKITSHIGKQIHTQKRRPLMETDWKMT

SEQ ID NO: 924404 - protein, 160 aa, Homo sapiens
MTLRPLKLLILSLCLVENQLAGWGGPDLRNRKRPAHPLHCHAPQHRWKGKGLQSLQILCFLKAQAAYFKSIMPWPQSKADTAAQRFQEPASEGACSPATQAQCATSSQRAHSQNGGSADPSQDRQRACHRSRCCGGKVFHCSWPALQDGLVPHMASTGKH

SEQ ID NO: 924405 - protein, 175 aa, Homo sapiens
MSQPSENSIMNVILKDLKDAAVVVPIIFPCNSSVWHLRNSQWILSDHSGLLQLYPRMSPTQTAVPVHGILEPVLKGPCLGNHAGGATSAPDSGDAVPSLMLKGDETLGLGWGRAHSWDVCHQNPTIPWRGPLQVSRLMVLAEVLTDSCHHRPQVQDYSPSDPSSLYLTFEPPQQR

SEQ ID NO: 924406 - protein, 148 aa, Homo sapiens
MEETKAASTGHIKSKRSLENIRVPSVSLNTTTAENSFINVLPLPSCGTRFGCTGPGGFPLFRSPTHLAQRLGWCPLAPIINHYAPPHTLALGTIESDTNKAVDRLKTHPHKPVFRSEQIWAPEEPRKLPPASQVRYHPFRFDFFQVCR

SEQ ID NO: 924407 - protein, 370 aa, Homo sapiens
MGNLKFGSWLGHFLVSCMTVDTLFNVLKPPSRPDSRQNSNKDSLPTVVHQRPSLLRFKDQLLSIQTLCKSSKNKCSQCRHLALDALQMKEEDVLAAGTNLGGTNLDFQMEWYICKRKSDGIHIINLKRTWEKLLLSARAIVAIENPADVSVISSRNTGQRAMLKFVAATGDTPIAGCFTPGTFTNQIQATFWEPRVLVVTDPRADHQPLMEASYVNLPTIALCNTDSPLRYVDIAIPCNNKGAHSVGLMWWMLACKVLHMCGTISCEHLWEVMPDLYFYRDPEETEKEKQAAVEKAVTKEEFQGEWTALAPEFTATQPKVAGWSEGVQAPSVPIQRFPTEDWSAQPATEDWSAAPTAQATEWVGATTEWS

SEQ ID NO: 924408 - protein, 305 aa, Homo sapiens
MSPCSCCCHPNILEALKITNYDQLTLYSSHNFQNLFSSSHLTHILSAPRLLQLFSLFVESPTITIVPGPDFNPASHSIPDTTPDSHDCISLIHLTFTPFPHISFFPVSQPDHIWFIDGSSTRLNRHSPAKAGYAIVSSTSIIEATALPPSTTSQQAELVALTQALTLAKGLSVNIYTDSKYAFHILHHHAVIWAERGFLTTQASSIINASLIKTLPKAALLPKEAGVIHCKGHQKASDPVALGNAYADKVARQAASSQTSVPHGQFFSFIIQACPQNATRYSPFELLHRCSFLLGPSLIPDTRPT

SEQ ID NO: 924409 - protein, 238 aa, Homo sapiens
MSLHALSCSGAQDCQGRPGTGVNGCQSSAGAGLQDGSACASLKSGVVKAQPGTGADWVPSLQGLAGGWVHECWPEAEEDLETRSTKAGLESGVTGPAWSLRLLVPASQVLRQSGASGHWGHPGSGTGLEPENGLKPEAASAKLGCRDRTNTGGSMKPRAIEASPALGTIWSMEPLGTAQPWGSACCWMSLRTESLGPSWSLTMVSGLALEPVQSLGLLQVTETTESKATDKGGLLLNS

SEQ ID NO: 924410 - protein, 226 aa, Homo sapiens
MKTSSGLPVILHYGIPGAAGNPGERGEKGDHGELGLQGNEGPPGQKGEKGDKGDVSNDVLLAGAKGDQGPPGPPGPPGPPGPPGPPGSRRAKGPRQPSMFNGQCPGETCAIPNDDTLVGKADEKASEHHSPQAESMITSIGNPVQVLKVTETFGTWIRESANKSDDRIWVTEHFSGIMVKEFKDQPSLLNGSYTFIHLPYYFHGCGHVVYNNSLYYHKGGSNTLVR

SEQ ID NO: 924411 - protein, 155 aa, Homo sapiens
MQHGCPGSSQGVLSPTLRQTLNCVTLRSHGVDGEDSQRAWGKLPEGPAAIRRTFQGSSPLSMTRMQEPEEKLCEPWSRPGTCRFIDHKVMRKRFYISRGYPRRKEVKTTAKPSLFHTECPHQAGPSRLSWEEVQELGSEVCTQLDVPTSGPKLRG

SEQ ID NO: 924412 - protein, 165 aa, Homo sapiens
MELISAPPSKASKASPQGHRTSLVLNSERQEFSHCMLLEAYTESGPQCLNPKRDDQWQEVKNPRKQEGSTVWMSAEVDLKVVKCKPETQMLIMKLTFVMILVNSRSFKQGFPSCLYTPEDLQIPGSCPTLAESEPSGGGVQEPAFVPPLVILMTSKCGNHCPSKP

SEQ ID NO: 924413 - protein, 147 aa, Homo sapiens
MSKTQDRKISKSSYSRVTVHPGKGGGQNQNGSWDERSITGTRPCQLQEELEKRRYEREVCRAEESPTSWSEKSSSSHCQRWSMKAEETSTASYFFSQAPEDGRSYCWPGGCPTVKKTKWTWSTRTRRRLWHLQVCLSLHLTALTFRG

SEQ ID NO: 924414 - protein, 145 aa, Homo sapiens
MFPPWAGCRRWETRKPRVEDGSVGTVGHCQREISKSDVTLSGMQLRPAILVCPQSNFLCHLLEWLFQVSGFLKSLSLSFHFKENIAVIGWELAPSEEQLCPPSHPLPHLGSSWLALPFGHWLPARDLCRGSAPSHALSFLHLPLC

SEQ ID NO: 924415 - protein, 164 aa, Homo sapiens
METSLMPCTLGSVFPKLFLIFDFVLFYSPKPRLPGWWGECQACFPLLSALSSHIPPSCEFLLLMGNASVLFLEEQPSNWYPLKSTSRTLKCRNSYSLVHSLQFQIATHLQCYLLGKPSRSLSYAPLFCFSLLPVPLALALFFLILCPSLDCNEFGTPCHLGRTD

SEQ ID NO: 924416 - protein, 138 aa, Homo sapiens
MDRDKKSFEVHARKSLDCCEWTLKGNSGESLEGGKESCRESLHLLTECLSGCDQNIVRNMDCKGNSDEILSPCVPLPGNSAVVGTLAWAQGGCMTLVADTYSFSDPREIASPLKGYPPKRIMYYQWDRGSHDAGPILP

SEQ ID NO: 924417 - protein, 134 aa, Homo sapiens
MRGRFGVSELEQHEDSCPAQGGKVSMQQGEGEKHIHKGEPIRGVGIPSRVKRIPRVRGKSCHGCQSLSQVRTGIHMGAGEALGEVSEPQQGKGGPPCRRPAQHWVLEPEQSEEGVHTGGWFIYFAKFENFAAIV

SEQ ID NO: 924418 - protein, 131 aa, Homo sapiens
MRMLEVLMLKIPGLKYCPSHGPHPSGEGVCLEGKKIQCGIRHARFLSADLLNLPGHIALRIKPVSFAVKCDHVTNFGYQDVSGYNVCSFRVIAIQGKSAGYIVALPCACQYKKYQKGCAAGWNPLQGAGEI

SEQ ID NO: 924419 - protein, 162 aa, Homo sapiens
MVMALEHIITAQQDSPHPHYNQDYRVPQKPKTFVKTLKLNEDFEPCECYLKEEMMVNIIFSNLQVNPLTQYIASPAGADDSGPRHKASAEQETAEDISECCMLSGKCGGDVAVNIGRGKFQQWIQKLVENLVMNVISWEGPDITYVTFQPEMHNLNLLLRKQ

SEQ ID NO: 924420 - protein, 187 aa, Homo sapiens
MLTYQPPLQPMAPDALKGQDWVTGFTWEPGLASEPENLVTWVNGCHTGKQNTSSETNKEVAQFSAEIWKGFKEEATFDLDFDRTMEVDEVETLETQAKRGVGCLVAEQGVYDEALQPGPGLPPTPSLGTQGPWASEKTFSFPNLSSKPCMGLPWGPRISTVRLTTRGRGSVSPEGSSSKTNSLPGKR

SEQ ID NO: 924421 - protein, 129 aa, Homo sapiens
MTKVSRRKGHHKTRRGQVEGRIRSITRPHSSFIYSFTHSFIHLVTIEHLVRGRQTAREEEMTPRRSLEILESLAVAKPGFNLQTLIPHTSQIDAWYCKVEAGLFEGMDESYSKFILHYQLCKNGDGPIK

SEQ ID NO: 924422 - protein, 127 aa, Homo sapiens
MTAATSQGNWHRGTQAWGRGLLDFSVQNAKMAFVSCLSTEVEERWGCGNSLAPINTPRLPSALTLVCFPAGCGPGTTWQRKQPGPRGEGETGEPSAKAEVLQQSPSSGPPRATDTWSEGHPVHYTMN

SEQ ID NO: 924423 - protein, 155 aa, Homo sapiens
MGYTNIKEEKLLFNTPKNTEFLYLPEFRSLAQYFHFDGFFCYSLLKHVFISFTKGKLTWWSSSAFSSVWSSNWKGISWKEQGSYRSDLGEVARFAEINRRFAAKRLSGLGWARWLTPVIPALWEAEAESPRFNPDVSKSNSVSFNYGSINQRLQL

SEQ ID NO: 924424 - protein, 156 aa, Homo sapiens
MACDGGSLWSLTFVSTGKWGSSANPGQGTAWTICHQCAESAEKHNPAQAFCGCGQEVGTGLPRLSQSAGCLSNAAGGDLQKEKEAKADLPVPMRGTGCLEVVGPLQGGDRKKKVRCVAATAEGLPEPASELVGSLTYGKDPGKSCKILGKGLYGIL

SEQ ID NO: 924425 - protein, 150 aa, Homo sapiens
MQPGKGCSNLLNQTPWGWAQQTVFEQDLQGTLRHQSLRTLRYRVETTEGKLLTPRAVAWRQYVGLWVWTKIKAKGQVLRQSVRRLPSLGEDRDIHVDLPKALADPQRPARSCSKNRCGGRRKLAASIGPALGSAAQRVDGGANGTKLQVS

SEQ ID NO: 924426 - protein, 150 aa, Homo sapiens
MPSISKTNQVCMEKKNPAKMRVLKENILLQCERGKGEQARKTRGIGPRSQHCRGVAVSLSDANKMTSPQQMRSPSSGDGMSSSHNLMVQRQRSYNHRHIINEETDIQGHPRGKSWNPDFSPDLLTPKLCSLNHSSSLDLRTFPEIQDLNT

SEQ ID NO: 924427 - protein, 134 aa, Homo sapiens
MEEMESKGRRSRSPRKRDRCFPPGNMLAQICSKQKREYPQPCEEESLGRDVWWRICEGDWASVILLKSLLMASQDEAISIVGSWIRTDSEMETSQNGATDLTMNIMTGLDIEKYYADSPDPDALTKANPFRAIT

SEQ ID NO: 924428 - protein, 206 aa, Homo sapiens
MPLWAHEKHCQPSAVTRGSSCQSDVNPLNSFTAKHNVGQSGEQCDVVCKLIYHPEQYESGVQTWSTSSQYCTIPKVLKYFLNPRYCVFRCKDETSEVTGEHVCNTEGEEHRSSLSYRNSMGPQGQGQEKSQQTESGTGHSPEPVLRVEGLGIVRVLHVHHHIGSASSSFCKAKDVKDLGYGQTGSKVNYPAVLLFKECIAAENFVP

SEQ ID NO: 924429 - protein, 149 aa, Homo sapiens
MSRWKTVILMILTLHRPRLIRKSEFTFSPPPAPFLPPALISPLTVSTFEIHPNIFWSLLRNLACGPCVTILGGDRVSSPVRSYSRSHQTVKQRVEGSVMLFLNCVVEIRRRSSKEGHSGQGRPAGGVLAWERGLEHSPGKWTLLGTLLS

SEQ ID NO: 924430 - protein, 176 aa, Homo sapiens
MCKDSRGYTLASNDSLGFKCLSTSHTHLYSSTSCSASSGKGIATSVIRRKGNSLRSRLQGRLAETYCVFRCNGREAAGILGPVVWGRCWDGIDAESFGRSPVSGEAGGSGGSGRGQERGRGGRGGDGGRGGSDGDRDGGEGGGGGGSEGGSGGDVVNVVKVVEVKVEEEEKTLILV

SEQ ID NO: 924431 - protein, 146 aa, Homo sapiens
MREEEHRSDSEANVLSIIPYRLSRGQSPLHYIMRLSKSSRKVIMVCPDLVSSCGFVVSLTSGMKPWTFTVSTTALRGGVDPKSEQQQDLLWRVKEQSFHSMEIATFYVIYCLCRPGMKGALYGMGWANVGEFLFIRSEPSGHVKRS

SEQ ID NO: 924432 - protein, 138 aa, Homo sapiens
MGGALMCSTSQFLCLNTPNIACFNVHHDTLSTGKRGRQLPMPGKPAPAYGMDGECEGLEMTQGHVSGDQAVCNRQKQVSGLSTGKLIQMQMQGSNCAEPPVTEGAGKPLRDFKQESDRIWIVSYRQKCDHGMKEHRWT

SEQ ID NO: 924433 - protein, 193 aa, Homo sapiens
MTFLGLKLRTGRVLMLLLLLYFAWLPKSISALVHACCRGGALAWRGPCTHVNQWHQNGEFHVCTCVAVGESHRQVHTGKAVGGGVWHLCVYRGLSAEAVQWLDGICYDVCCRRNPGFGIQACTASGCGQEGPSKKPANEGCSDQTGLVPVGKTARLCPEEMNKSTYMCNLPILNENLQICLKKYKNLNRIKNE

SEQ ID NO: 924434 - protein, 174 aa, Homo sapiens
MKGSRCHLWISGIIPGREQMLDKSQLLYYPYHCTGPPRKLEFLYFPKFFPVTERVSQVGAIGYNGGLACARGKHGTMFGDEVLKTASSETMLRTRLCSESALLEGLSFSVPSNQARCLNMVTFSRSLTADKMFLSTSTMQHTIYEKRETMDVPQLPAMFLSISLTGLPCDQWLP

SEQ ID NO: 924435 - protein, 169 aa, Homo sapiens [sequence omitted]

SEQ ID NO: 924436 - protein, 136 aa, Homo sapiens
MPGIPETHSPVGRENSAHAEHSYCYVTMLRTVHSSSVSFLSIYIDITYTIRLLTGLVTQSLQPLCYARATCLLAVDPIHAELRHVRGHPGDTCCGVDVLLCFCSTTRAGFLGTVYSALAQPHTQKGLRFSALQWQS

SEQ ID NO: 924437 - protein, 182 aa, Homo sapiens
MAYAHIEWDMIVCAAYAHELPKYGVKVGLTNDAAACCTGLLLACRLLSRFGMDKIYKGQVEVTRDEYNVGSTDGQPGAFTCCLDAGLARTTTDNKVFGALRVLWMEVSLSLTVPNDSLVMVLKSRSLMLKCIRSTSWVRMLQILQRALPNGRCLQGKNLYCSFHGKEWMRQGKGILASSVRA

SEQ ID NO: 924438 - protein, 196 aa, Homo sapiens
MLLLTFLHLLLLPSRGSKVALAGCLRLVHSIARCLPCFLPETFLCFQNLRFGRLFCLLSSLHSLSLPLTISICPRASESKSRGGHRSLLEREREKIFFSSTNGHQGAGKWRKDGAQNHFAPVNPPRNLPLLLLWESQLFGCWGETKKLCIETDIKLQTQPLSLKLKELVAVKCKQNSELVGPTMDTCQASTIRKVL

SEQ ID NO: 924439 - protein, 163 aa, Homo sapiens
MPAVVGFGEPQGNLFCCPHWKCGIDDNPAPASDYSNSHSKAIGAPTPIRSSYYKEYEFSVTNSDIKAVLLYFSIIELNFILSCRPHPLTSEDTVLLFSGIPMPAGLSPGEVQSMILSQNASGTQIFIKFLPVVFLPPEAQTWHLSWKSCPCSPTCSSAFWFTV

SEQ ID NO: 924440 - protein, 324 aa, Homo sapiens
MSKRMCSAFTLQDPVHLVPPPGSLLQSPPSFVICSVPPEITGRVTDPFKLCGLLSGCGPARDTKGELSVEEAQDPFLVSIHIIADPGESQPLQEAIDNVLAWIHPDLPLFRVSERRASRRRRKPPKGAQPALAVVLFLQEEYGEEQILQLHRTLQQPPWRHHHTEQVHGRFLPYLPCSQDFFTLAPGTPLWAIRPVHYGKEIVRFTVYCRYDNYADSLRFYQLILRRSPSQKKADFCIFPIFSNLDVDIQFSLKRLPCDQCPVPTDSSVLEFRVRDIGELVPLLPNPCSPISEGRWQTEDHDGNKILLQQTCSQFFLVTPGRIL

SEQ ID NO: 924441 - protein, 137 aa, Homo sapiens
MEDEHCVVLQRFSRLCLFNRNLPVFSYFYHMTKGVQVQISYVQILHSDEVWAFSVPITQIVNSAPNRMLAMGKACVVFLEWSVQEEDLDGKGKVHPKNGQSPYTFCKISDVFGRKFESCQRDAELDRMAVPIILSCT

SEQ ID NO: 924442 - protein, 162 aa, Homo sapiens
MGLCGPGKSRKGLAATWYQPSGPLEWNPGPVCDRLFAQRRLREGLIAVCPSAAKILLVQHRNGKLIKGRSMPSNGSHSTGKNKCLNIHLLSNKKHLFALGLGKSVQDARGEGYRGALAKLEKLEAMKGRNAVSSSDFAKRLSSERNCLPSSSIDIDQIYFWC

SEQ ID NO: 924443 - protein, 171 aa, Homo sapiens
MKHLFLLGRMWELDFRLSLLCVAFWNETFWRVGEESTPQGNSLRLCLREMIMQVRRTRPQEAKLTKDVKTKRSWGGGKVQGVHMQACYMGKLRITGVWCTNDFVTQVVSIAPDEEFFRPHPPPSSTLKEVPVSVVPLLVLAVWLVPVNGCNVSSKAEAGSSLPSPSIQHGR

SEQ ID NO: 924444 - protein, 294 aa, Homo sapiens
MLRERHPTKASSAAPVETSSTDILHCPSPPRLPPPGPTLDQLDDACPYWGGWIFFVQLLIQMLISSRNALTDTSRNKVLPATWASLSPVKLTHNTDYHNVQVQGSWEKKELGIKQRVFNRGQNRQCHQHQRPKVDKTTKMGRNQSRKAENSKKQSTSSPPEDHSSLPARERNWMENEFDELTEVGFRRSVVTNFSELKEHVLTHRKEAKNLEKGLDEWLTRIKGVEKTLNDLMEPKTMAQELHDTCTSFKSRFDQEGERVSVIEDQIKEMKQEEKFREKRVKRNEQRVQEIWGY

SEQ ID NO: 924445 - protein, 155 aa, Homo sapiens
MGNSPSGHSWSACFQARQTAVCLHPGLEQLHPHAPGQSNSTMASPTKPYSKFSDPLYTCIHLYPEKQKKKWDLTTDMTEIKRIIRDYYEQLYNKFENLEEVDKILDPYNLPRLNQEEIENLNRPKRSNEIESGTKRPSTKFEDYENAEYVASYEP

SEQ ID NO: 924446 - protein, 166 aa, Homo sapiens
MAAKYSMARLLRAALCCAGLASNFKWLVSSINFWRLDKGPTKDTIPCGCRCQISKDALSRQSGTQLGSAAGPEGDQNSPPDKIGKPMTEMMSIAKEEGFNRVLQPRRWESSKPPPFPASAPEAGTTVLHNAGHGDAELPLRRSQFRETIHMSFHKGLHHTKGKLIL

SEQ ID NO: 924447 - protein, 171 aa, Homo sapiens
MERGKMSNFTVEKPDRHYLSQVIKVNIIMVSDIDSRLLPHNPSECQCQKPGSAWGGQQYQMLKTHSNRVVANESPHTQCQKSQSIQGAAKDQVGATEQHDSGIPGFPRLGQAWLLRGNWHVILQPPSQSFESLHYGYSPIHSAQPSARKDDGPEKNLWTTNPPKNLFKRSY

SEQ ID NO: 924448 - protein, 274 aa, Homo sapiens
MSAENNQLSGASPPHPPTTPQYSTQNLPSEKEDTEVELDEESLQDESPFSPEGESLEDKEYLEEEEDLEEEEYLGKEEYLKEEEYLGKEEHLEEEEYLEKAGYLEEEEYIEEEEYLGKEGYLEEEEYLGKEEHLEEEEYLGKEGYLEKEDYIEEVDYLGKKAYLEEEEYLGKKSYLEEEKALEKEENLEEEEALEKEENLDGKENLYKKYLKEEYLERDEYLEEGIPKDGNSSLPGCPGKKHKPDIEPERKLSTLSMVLTGRKTHLLTKFCSQL

SEQ ID NO: 924449 - protein, 148 aa, Homo sapiens
MKDIGPAEVTETICTLCHQTMFPNFRWDKTRAENDSVLLGAHWRQKKPALGLSYLLHLSSEISRIARFPVGNGSWDTNSQLEMATELQHLGQTAFGAAEEDLAGLEEYFIPYNCVVQGSFKAVSGMLLHLLITTHCEKGVFAHGETET

SEQ ID NO: 924450 - protein, 153 aa, Homo sapiens
MGAPESQRPPLKNLFSGNRSHQLCHYLPCLGICLCPSISGSFAFTLSGLLKGCGLGCWRTGLTLDSEPIQNRQKKPDVDVIQYQLCLSSSSVLGLLAFRLELHDQPSWFSGLQTQTGTTPSALLGLQLAECTSCQPPQSCELISYDKSISVYL

SEQ ID NO: 924451 - protein, 163 aa, Homo sapiens
MHREGAPFSWGDVVTADSRKLDSGDEQRPVDLGGRGAHEGARDGNSPMAEALVFRDKFVHSRPCSLSVPDKATSSHLSYKNTDTKGKSPSPEKEPWPCTPLQSDPPSRDLDKGPCTSTVYGLKIKDPLLKCSSGREETINKTKTKFLASFVRPGSLIPRNHIT

SEQ ID NO: 924452 - protein, 137 aa, Homo sapiens
MVASAEQPSGSVEEELSKKSQKWEEMNILATYHPADKDYGLMKIVEPSTPSCRKMGDGEDACSGIETTEAVAPDILAKKLAVAEGLNPKYRVQEQESSGEEASDLSPEEREKRRQFQMKRKLHYNEGLNIKLARELI

SEQ ID NO: 924453 - protein, 175 aa, Homo sapiens
MEELPQKGQEAIVPIQKLDSAPKEEREKENAVVNRSSAPHSKQTPGPQQLSFLLSLQEARPLGGAITSLHWCCTSLAALVEDWSFPIPNPTLSLADSDTRDLVLKSATVGTDLTGNAFNCFSTLKNWMRFCQCDDTYSVRVLWYTVVLTRSSFDICFVPASEVLIHEQRHHRLCG

SEQ ID NO: 924454 - protein, 152 aa, Homo sapiens
MSTVTNNDLHTLLFRSCLFLFSVPQILCLKNLQILKLRNNPIKEIPSEIQQLEFLRIFTIAFNLITVLPIGRLQASSDIIKMFICKVCSMKTHQEGTYTVKNEGAEFFISKGCCQKSTLLSKEDLTECGETWRSDVGKKPIGNRLKMWKDDR

SEQ ID NO: 924455 - protein, 182 aa, Homo sapiens
MPIVKQAKIYHNKLKVEGNCEYLTGWLQKFEKRYSIKFLRTHGAKASTDHKAAEKLIDKAAKVIADENLTPEQLSNADEISLFGHYSPQKTLTTADETLKILIKNNVDAMYFPLNVTSLIQPCDQCNLRSMKSKHKNPFLNSMLAAVNRESISKLEEVNIEEVFNLYHRGPVVHSFTIGEIA

SEQ ID NO: 924456 - protein, 184 aa, Homo sapiens
MVITAEKELFQGYEVLSPDSYYCYHHHYSRDIDILIHSTNCYPQRPSIDGSGGLSGMATTMMPAAVGEVLLGLSLHGACGGQKQAGAPTSRAQLQPPKLVLQTQASLCSWGLEAGRSPALPGTAVGSEMSAPTAWPLPAPCTHSDLGARLRPSPGAVGAHLGVYTLGAALTPQPSAALTPSQSR

SEQ ID NO: 924457 - protein, 578 aa, Homo sapiens
MVGKAKWKPLELTLPRKIVNKKQYYIPGGISEISVTIKDLKDSGVVIPTTSPFDSPIWPVQKTDGSWRMTVDYRKVNQVVIPIAAAVPDVVSLLEQINTSPGTCKILGVQWCGACQDIPSKANDKLLHSAPPATKKEAQCLVGLTGFWRQHIPHLGVLLCPIYQVNLKAVSFEWVPEQEKALQQVLAAVQAALPLRPYDPADPMVFEVSDRDAVWSLWQALIGESQQRPLGFWSKALSSSADNYSPLERQLLAYYWALVETERLTMGHQVTMRPELPIMNWVLSDPSSHKAGCAQQHSVITWKWMTHSVDTTQPLSPATPVIAQWAHEQSGRGGRDGGYAWAQQHGLPLVKARATTECPICQQQRPTLSPRYGTIPWSDQLATWWQVDYIGPLPSWKWQKFVLTGIDAYSRYGFAYAAHNASAKTTIRGLMECFVHCHGIPHSIASDQGTHFTAKEVQQWARAYGIHCQQAKKGVTVLTGVIDPDYQDEISLQLHNRGKEQYTCKTGDPLGHLLVLPCPVIKVNGKLQQPDPGRTTDNPEPSGMKIWVTSPGKKPQPAEVLAEGKGNTEWVVEEGSHK

SEQ ID NO: 924458 - protein, 138 aa, Homo sapiens
MGRFSLGPHSFGTVSRIPKPLCSSGSHSPGNLGSEKFTKGFYAVPGLAECLDSVVLKAENVTMISKGLNDYSRGEKESRISKACVPNKPYCLSFLVGESRILQESSSAEGKPFSGKVYLRLDNLAALHMGYINWHSFA

SEQ ID NO: 924459 - protein, 139 aa, Homo sapiens
MKLFRIKQIYLKSTNVYTFSHTSLELLVSGNTAASEINICGISELRLSLGTACCGCCGRCRCGSQANGVMFPGGLWLPLLYHTGHQGSEEKPAPKGLTQFPMQPTVRKAGLTPTMPLTTVPSLFLAAGKGYFVDYSDYV

SEQ ID NO: 924460 - protein, 183 aa, Homo sapiens
MPSHKQAEAFVNTAAVFLSCFEIHIDRASERLFVFTINCVTGIIFLVKSLAFIFISLYRLMHSLCLLLGDFHLLCVKIKLFLESLYIASWLYPTATIFGITSTRSRDPRTLSWGLDQDPFSVTPSQRKPLLPLFANLQIQKKREESNSKDGIIMCESDIIQLKITQEAAFQQSLAEFLLSDIW

SEQ ID NO: 924461 - protein, 153 aa, Homo sapiens
MPMKKPHPKITSIKDQRDENWMETEFDELTEVGFRRWAITNCSELKEHVLTQCKEAENLGKRLQELLTRITSLERNINDLMVLKNTVQELREAYTSINSQIDQAEERVSEIEDQLNEIKWDYVKRPNLPLIGIPESDRENGTKLENTLQDIIQ

SEQ ID NO: 924462 - protein, 139 aa, Homo sapiens
MPHYSWHSPSQLPLARRGSSLTPCASWLRGHTTLLLLALCGLHSLPNLWITSLLIFGDSSLRDGHLSFPQLPWLLAMGTKKAPRSYCKLRLFGMAQVPQRKSNWKVHYRQMVKGTGIGNTTNGPQSGFKEKMKVVKKEI

SEQ ID NO: 924463 - protein, 139 aa, Homo sapiens
MEVWFSGQWSYILRAIMAASSESYRSPEKASSHRPHLLPTQPKSLKASLTPTVPPQQHRVYFLAAETQGEYCASQPLEKRQTTLPPTFVSDAGEHVAASNLPISIVVTKHQTKRQIPGTENPDLRKRESERALFNSVTY

SEQ ID NO: 924464 - protein, 138 aa, Homo sapiens
MLSPLNRTFPHWRSPTRRERAVCGDPYSELFLQELPQEHTRKAERIYRPLKEVDCHCRLHGTAEELASMYPPYTITADVLSKAPPLGWRPVNTKPSHLTKIQPRTITESISFPCYLHQIPDCPSDIIHPNENKPEKQF

SEQ ID NO: 924465 - protein, 137 aa, Homo sapiens
MLLMGSFSDFCPCDESARNTPNPGSIQPPTCPFTYLITNQPPGTENGGHKHHCGHQHWNCTGSDLKPAQHWVSPKACLREKAILPGKSELVWLPEKSHLDVVTKGMVLNMEIGESIVSTSRVNQAQGNNSHQPNSQV

SEQ ID NO: 924466 - protein, 157 aa, Homo sapiens
MPTEAQAPSVGTGLLGLPDCFLGWKRRQWELVTRLCRTKDTADPGPRLHTAGIVEFSHSCEPGIMKMEPQCWRRTVATGPWSRVHSRNGSGLKMGPCCGSLAHRGLVGDGECTPCTPNVEKYSCSNSWKLSKLGSELSSCLLLYNVQSLQLYLAGGR

SEQ ID NO: 924467 - protein, 149 aa, Homo sapiens
MPGRLVKWQFLDYIWEPISVAAPAASISSPEEAFCKELSAPSGVDTELVHYASMLLSSDVPSCSAEFRKAEESLPMSINITRHWEYCHDSADVHLRPKGFVVSLWSMLPCLEFTFQGSGLPSGPGPEMPSKSQLWNQGPEEPTWFTSPL

SEQ ID NO: 924468 - protein, 137 aa, Homo sapiens
MHRKGGEDNELFLAAGWGEKLEKWKARWLFMINRKGDIQKEKSSRGVGGYRGNGQQGHRRGKKRLLEATGSSLLCVPTDSSQYDYCSSSSKWNYQASRSSRDTPRNIFDSSIVHFLLFNLSGETIASWCHRGVTIVD

SEQ ID NO: 924469 - protein, 150 aa, Homo sapiens
MWSSEGKMHRNRAAQEHLALCVWDVSKHPGPSTANGSYNRGDVLNAPVWTLKTVIKHVTLPPINACNEVLTSKCCTKEILYTIATRNKEKSFAPSLVIDFLPSAATYSNVANIYKAPLCAELPGQTIQRISNKTNTILMAERTGFPFALA

SEQ ID NO: 924470 - protein, 145 aa, Homo sapiens
MQLYEYAKDLFQQRYHHTKQLEHQRDRQKRREERRLQREHRDHQWPKEDGAAEGTVTEDYNSQVEDQSEWEVSQRIDLINPFKELKAKCGSPAAPPDRDLEMLLSLCLASSGVQGKALSGGSLAPGTERGPFHTLNIFCTTNGYC

SEQ ID NO: 924471 - protein, 150 aa, Homo sapiens
MFQDSAGVCKWLGHSAGLAKQNICVSVYFIHPSLGQGLGVRPLQLVPLCEERYHTSWPGLGSPSNGFQRELDDTVWGQGMGRWVLIAMLQSIYFIIRSTVTIKKVGHGSDMTRSLKRYMQALPRTVGLDFESDSVFSDQEPQNGKDVMKS

SEQ ID NO: 924472 - protein, 178 aa, Homo sapiens
MPECFLTLARMTHQDSCSRVDGTGVEVKIGITSWCQGHNLIAESDLQRLPLPVSALDFQLCQNLSPRLNVAECLKVVPGVYVVVGFPVDSDSQQELNIAVLADEQTQIIVKEDNALRQGSPTPGLWTSPDPWPVRNWTTQQEAGGLVYQDEKAFLVTCQTNEDNYLLLSSEDSTNESH

SEQ ID NO: 924473 - protein, 146 aa, Homo sapiens
MAGKPTGNSSPELKEVPEEQSKTAIECHNPSSPPPIVDPSHLACQIPNGIVNDYLKYGCPDPKDAPITCKEGKLLRYEKNLLVSLTRHNLGSSNQTPNGAANRTTYGHNILPRTLRSTPGGALAAVPTGRPFAAGSSQKELWPKAP

SEQ ID NO: 924474 - protein, 141 aa, Homo sapiens
MFLTLRAVVNWDISMFGTVFRLSMDGPYQRLQNHTCRSLLLPFACVASCVGPSGMQKTNLPHISIVAGLLHLYILTGFTQNLSKTEPHKFKLYSMLHISMSSCYSRLPRPQVKVEEKETEVLFLWQQQSGLGTFADGLREI

SEQ ID NO: 924475 - protein, 137 aa, Homo sapiens
MGFTRLMKFSAAPNKAFLFGNTHCVSDWLSVWRAAGPRLTPWCLEKQLGPTAMGPARDRTPPMAKEKVRQLLRRTSETLPTYSSQAMSKAFLVRDPNLTKALGRMEAALSMSVVRVTLLPVSRGDLLLLLRFMLPPG

SEQ ID NO: 924476 - protein, 192 aa, Homo sapiens
MLTPSVMVNFSRQLDWVQEYTDSWQNIIPGPRTTELQVLRPLDSDRITLQTSLVLLPADGVSHDFSVSIIRNASVTSVCLPYQEARVTTAVSIFPAENRTKNTTKNDGIQLLAKGQNVPTKGDTVKKWTTMNTNNSGPWNITMNITNTHNYHKISTALSALFSASSVLNMLVKALFDYVPRVDVMEVQLKHR

SEQ ID NO: 924477 - protein, 139 aa, Homo sapiens
MVELVYNPTNSVKVSEKFDRLKPSSLNLSKSFSIQLCYIAGKELHSFGGEEVSGPSAAGLLEFAGGPLQTLFAWVSAAEVAEQRILLKSKCCCLIFPLQASSQRGTQPSVVGSTQFELPGCSVYLLKPQQWQAPLPQPC

SEQ ID NO: 924478 - protein, 209 aa, Homo sapiens
MERVTKLSPTECGKLDSLNVSFQTHASKEWITILLNLKVWYIGARRWCAFCNQWVENVGKIREREMSQGAAAFWKLKRCDERTQPIVAGFENRLKRPQTKKCGWPLEYGKEVNHGTQSDPWSTSTRRVVIKIEMRLGAQGETFEPCEFRKHFLVPVAQKEWFRRRQERIEAHEKAANVLATCRKLHLLSPLPLLRKNCFCAFSGESLSM

SEQ ID NO: 924479 - protein, 141 aa, Homo sapiens
MVWRENGRCFSGLLQAGLGAAWEPRVGEIKLKEDFVEIQHSPASKDYVFTSRVKSGSLGIAPGDISCDGLEKQCKPAVPGGNAINKSSVIRVRNRKEGNMGKWGEYQVDQRDTVMGVRCGIRNNVGGWIEVQARNNGNCGT

SEQ ID NO: 924480 - protein, 146 aa, Homo sapiens
MIGPGQSDYFIPQQTEIDPKSGNMSSSLVALTSGAVTCGSPSPRHRKGRSADSMHHVPRKNCRHSTQPMKTALGAIPCRATGMELPMAVGTHPLHQCALNVRYGAKGDFGALRFNDCLAKFWTSMGTEDLCGIKEASKNTVYLRIT

SEQ ID NO: 924481 - protein, 169 aa, Homo sapiens
MEPAVEMTNVLLEGNVNYMELGDIQQEIREIEPDYVTELLLSLDKTWMHEELLLMDEQKKWFLEMESIPGEDAVSIVGITTKDLEYYTNLVEKVTARFEWINSSFKKSSVGKILPNCFTCYRVLFHESKGKMDAVNLTVVLFQEIAIAIPTFGNHHPGQSTASTLRQDL

SEQ ID NO: 924482 - protein, 228 aa, Homo sapiens
MGVPLHKLPCLLPCPLRVIQNTFQKYLTVGSSGEVPLCQILSFTDLGLVLRAATFQRFWAAFVCRSPHQKAKIWDLAIWQCPEGVCLFHYIDNIMLTAGSLANLEAAVPLLQQHLAACGWAINESKVQESVLSAKFLGVIWSGKIKAIPEAINDKIKAYPQPTTVKQLQTFVGLLGYWQTFVPHLAQMIKSLYWLTKKGATWDWDDVAETTFLAATRFNSAGTSPMGS

SEQ ID NO: 924483 - protein, 162 aa, Homo sapiens
MWKLSVICEWQCVSSSVGPLPHHVGQTLFAGEDKGPVGQPFWVPALGKQELGRGKEKDLVNRKQVIGMAIMMGEKSEVSLYRYDDLGTSWGSLPVGSAARPGVGKRVQDLAGHFGCWQEQALAGPTAALSSAVHVQSFAVSSVGPLPHQVKWLPLYEDKGPL

SEQ ID NO: 924484 - protein, 140 aa, Homo sapiens
MRLRPSRGLGPTLILEASPTSCIYVKHKLCPCPYHVTKQQLQRLLPDSELSTWPYPTTVLFSQGRQLCNSALSETISELSQKLNLMTEFNQWSHWTMEHSQQYHMTAVHRKLSIPAIEPGTKNCLFVAPTSQPTQNPGLD

SEQ ID NO: 924485 - protein, 215 aa, Homo sapiens
MIVRLPSPYGTESIKPLCFINYPVLVSHHWGYLTIMVEGEGGAKTCLTWQQAREHLQLTSFSCAGCFLPSNTGLQVLQLWDSDWLPCSSACRQPIVGFVIVWEGPEDIPLTKALQNRFVSVAPASLKSPVIALFCAIKNIHDTLEKVKISTLTGVWKKMIKTLIDDFEKFKISVEEVTADGVEIARELELEMDPEDDFSNGSRVAYIRQCIKPYI

SEQ ID NO: 924486 - protein, 156 aa, Homo sapiens
MSCNILTTLQSCFLGKIFPYNGRSHKSWKCENNSTDHFWFEDRGLMRGNAGFPNLKSVRELILKQGQAKVKNKTIPLTDNTVIEEHLGKFGVICLENLIHEIAFPEKHFQEISWFLHPFHLSVACHATKNTVDFLKEMDSLGHQGKRTNQLIHQLN

SEQ ID NO: 924487 - protein, 154 aa, Homo sapiens
MTLYHIVRHLLQAWLFLQVIPPSVKLSAERRPVTGSPSLQAGHPSKCVALGGEKIRRESSFLQGGCPDKCVSLGFFNVLRMEEVYVDWSMGGHKFQAFPGLKVGFHWGLAASCLGTCLPLTCHQWCPGCPCYEDPAVQDQAAFSNPWTPYQAVS

SEQ ID NO: 924488 - protein, 158 aa, Homo sapiens
MLEKEQFQKRKYSGEPVVTRGPCSQSSQDGGGPLPKWRVASKMVARLTFSDLGFLASQIPSIRIWGHAPYQKWQWVRHWIRSTADTLPDPEGWKLAVGLQRRQTAVVDGERKLSSSRNKHRPEDSSVARFNRVKTELPYKGRGPKKGAPTQREGTQKG

SEQ ID NO: 924489 - protein, 260 aa, Homo sapiens
MWQYIKAFLNSLWLDAAADATQTAELKHTWPLGELCTSRAKYCNLVGVVIVTSKDHSTVPSIQLLQDDGESGKGCNIINLPPGSWLITQRNGNILRAQRWSLLLANWALSSGYSQVSLVADHPAKPLATAHESLYNRTSGHFSFHAKCITRCTAQSSANWEDFLSLLFFRDVLERGCSAAAVHFRVVPAYCAESSVNQMCPEFLPLGVFMVLLTSGMKPQTFTVSVTALKGGMSEVVCSPPGWVRGLTSGVKLHTFTCLQ

SEQ ID NO: 924490 - protein, 144 aa, Homo sapiens
MTWLQRGATHSRAFFLLTAEHSRGQPAYRDELPTAGHLSAVLTLHQAPRHLAHPPLVCILYSSWMQDKNSAKGTTGHRGFQPEKQHPKDPGEEDKGGFCSHRTVRFYFSTPNSLLHHHSRVHTTAGAFQVPSTEGTSVPMLTLR

SEQ ID NO: 924491 - protein, 139 aa, Homo sapiens
METPILKPSDLVRLIHYHENRMGKTHSHDSIIYHWVLSTTHGNYGSYKMRFGWGHRAKPYQAIKQPPTLSDIKIAHNITPYQREGIALQTWQEIPQAISDSYSQILSGAQDNFLDEFYKPVTAQNSDQLIVFKRCSSKS

SEQ ID NO: 924492 - protein, 137 aa, Homo sapiens
MAGQASGNLESWRKEKQGTFFTRQQEGEVRPKPNPEQGLSIFNSMKAKRDDKAAEEKFEDSGEGQNINIKRSLEEVDPNVKDNFEESKTSVEEVIANVVELAKFLGLKVETEDHPSIHIKASSDGVESDYTARPRAT

SEQ ID NO: 924493 - protein, 191 aa, Homo sapiens [sequence omitted]

SEQ ID NO: 924494 - protein, 152 aa, Homo sapiens
MGVIYQETSISLSPWVLCCFCMVVPFLLLELPSPGDIYHRWAVSGRMGLQDGETTSAILSRKKFTTERLDYPGDNQLRVRHPFSSDDKHFTTCSLSEVCYLRDSSGQYEKRDITIETIEIQRIIRDHYEQLYTNKLGNLDEMDKLPDTYNLL

SEQ ID NO: 924495 - protein, 127 aa, Homo sapiens
MYKKINDVFMPTNRTFILQPMAQGVILIFKPQRDALLFPPKEDAAKRQYYEPECRPLLVTEIFSCLDLGLLNLQNYKSGGRCHQTRNAAIEAAKGKETDYLLEPEERVKPCRGQEPRTRQTVGAKEL

SEQ ID NO: 924496 - protein, 141 aa, Homo sapiens
MVDPLTSWHPAPGKATGTQRQPMKAAPGASCEERLSYQCEENDTVLQTAVKEVAIRVIKRAQALVHNVFVVMKMRSLEWKPVNKDLQPENLVEFWKLKPSKCEASTKTADRGDFYSHFSPYLASNNSSKLQLSDPTSLWVQ

SEQ ID NO: 924497 - protein, 161 aa, Homo sapiens
MTDPAEQCSYPIDGEKGHTSDPEEVKNSHVVNCLWEVQQVGDYTRPVGSVGSLHLIVCNNVDFQPYSQKKYMYVCLTVFVNMKIKQGSSMDPFMVLVKRLTHLRSPQLSTPHGNGNTQPPKIARAHQPFNIRLVLLTSDDLQSYQSFKLPGGKKKTHFYKF

SEQ ID NO: 924498 - protein, 230 aa, Homo sapiens
MFKELKDKKLPMKNTVSSKEICISNEEPNVNHQDNGKNISRECQRPSWKLLPSLIQRLRSKTWFLGPSSGPPCSVQPRDMVPCFPAASAPFLAKRDQDTARAITTEGESPKSWQLPCDIEPVGPQKSQIEVWEPLPRFQRVYENAWMSREKFAAGAEPSGRASARAVQKENMGLEPPHSVPTGALPGGALRRGPQSSKPQNETSTDSLHCVPGKVAGTRKCPSGDSVWGL

SEQ ID NO: 924499 - protein, 161 aa, Homo sapiens
MVGSLPLFHANPSNKWLLLLLLAKKMNSDKAMWATLKFVCSFSSEKQYPDEVGLHMIQRPQVPSQYFEMQDTVIRIISCLSNIISPHLPLTLNHSAIRNALCSGTHEDGERINSEKGNELGFLVNTFKRSWDSWRGLLTFPFAVAFRVWNSEVTIRGPVVI

SEQ ID NO: 924500 - protein, 151 aa, Homo sapiens
MLRLCCSYNARPDNTLTNFRKSGKFGLYTDTSWKQRIQVPPEILRSHIKNHWIRGKMGANYKTMITLGLLATNNSMSDLRLKDMFLLQDQENILMFQVSHPEKQIPYGYRRETEVLAASHLFTSERKQVGDSTRKSRDTSQLGRMIKESES

SEQ ID NO: 924501 - protein, 193 aa, Homo sapiens
MGTQCKLSVDVPFWGLVNGGPLLTTPLGSAPVGILCQSTTPTFPFCIALAEVLYESPTPVLSGHSGISIHPLKSRWNFPNLFLTSVEYGPSKCMGVFAQEKNDSDSSDGSGQSELKAVWKELTIPDVIKNIRDSWEEVKVKLTEICKKCTSALLDDFEEFSPSVEEMTADVVAIMEIKVTKNVDGQRGGEMVQ

SEQ ID NO: 924502 - protein, 187 aa, Homo sapiens
MLKRQVLEQQICSCFPTIAFTFITIHCLGQFPTPYPKTLEALHVQLTLVHNDVHWELKCNSRAGGHGQEAQPSAHLERFIDSFKMGTRDGSFLASSGFLHNWFKSCGDHPKIKCACMWVFSIYCILFQMLTDSHKTKGKLASKVPAHHPKQNLKGYVQRSALALGQSSKIKLLTFNKIPVKTLNKQR

SEQ ID NO: 924503 - protein, 554 aa, Homo sapiens
MLPIYKGRYCVGKRKRFRLCNLQACPAGRPSFRHVQCSHFDAMLYEGQLHTWVPMVNDVNPCELHCRPANEYFAEKLRDAVVDGTPCYQVRASRDLCINGICKVCLVRKRLSQHCLPPAPLAGPRTWGCDFEIDSGTMEDRCGVCHGNGSTCHTVSGTFEEAEGLGYVDVGLIPASTREVRIQEVAEAANFLALQSEDPEKYFLNGGWTIQGNWENLTSPGPTKEPVWIQLLFQESNPGVHYEYTIHREAGGHGEVPPPEFSWHCGPWTKCTVTCGRGVQRQSVYCSERQAGPVDEEHCDPLGRPDDCQRKCSQQPCPARLSPSPWLPLQCSVTYEEGTQHRNVLCISDTGVPCDEAQQPASEVACSLPPCRWPLDTLGPEGSGSGSSSHELFNEADFIPCHLAPRPSPASSPKPGTMGNAIEEEAPELDLPGPVFVDDFYYDYNFISFHEALSYGPSEEPDLDLAGTGDRTPPPHSRPAAPSTGSPVPATEPPAAKEEGATGPCAQAPVVVASSGHTLVKCVNTQTGLPEEDSDQCGHEAWPCELPAVWHRGL

SEQ ID NO: 924504 - protein, 164 aa, Homo sapiens
MADRLASSTKNKSLCCPFGVLWSSKRKLSPDIAPPKCATSSETPCHAQPVDSQPPPSLPPSTKHGGAVQAAMWPDSLYQSCCPSAENQTHFRMTENVCYGSPHEIHQVSPGSIQVTGLEGPQQPSWTCSDTLGLLIQWDKLQDPVKETGTHQAEQGLATLMVKG

SEQ ID NO: 924505 - protein, 460 aa, Homo sapiens
MWSPPLGGVECNDVTSATGIYGEGRASSTTLEDLESQYQELAVALDSSSAIISQLTENINSLVRTSKEEKKHEIHLVQKLGRSLFKLKNQTAEPLAPEPPAGPSKVEQLQDETNHLRKELESVGRQLQAEVENNQMLSLLNRRQEERLREQEERLREQEERQREQEDRLHEQEERLREQEERLCEQEERLCEQEERLREHEERLCEQEERLCEQEERLREQEERLHEQEERLREQEERLCEQEERLREHEERLCEQEERLREQEERLCEQEERLREQEERLCEQEERLREQEERLCEQEKLPGQERLLEEVEKLLEQERRQEEQERLLERERLLEEVEKLLEQERQQEEQERLLERERLLEEVEKLLEQERRQEEQERLLERERLLDEVEELLDEELERLRELERLRELERMLELGWEALYEQRAEPRSGFEELNNENKSTLQLEQQVKELKKSVKNEFE

SEQ ID NO: 924506 - protein, 1589 aa, Homo sapiens
MQPLVLFERSLYPGSLLCSGKAHCTLDAAGRGARPGRETPLGPRGGESELAEASGSRNLQGGDLSCWEFLGLTSCQVKVWAGHKNHPEVTVAMALTDIDLQLQFSMSQPEALLLLAAGPADHLLLQLYSGHLQVRLVLGQEELRLQTPAEILLSDSVPHTTVLTVSEDWPTLSVNGFLNASSVVLGAPLEVPYGLFVGNTGRLGLPYLRGTSHPLRGCLHAAALNGRRLLQPLTPNKHEGCAEEFSANDDVALGFSRSHSLAALPAWGTQDEGTLEFTLTTQSWQAPLAFQAAGWHGDFIHVDIFEGHLWSMVEKGQGTVLLLNSVPVTDAQPHKEHRSGLTPGAANASLLGWLHGRPQCQWLEAGAVGSLADAQHGGWLQTGGGGGARFIHDGPEDTSDQLVLEVSVMAWVPMPSCLRRGQTDLLPIQVNPVNDPPHIIFPHGSLMVILEHTHKPLGPEVLQAYDLDSTCEGLTFQLLGTPSGLPVEHRDQPGEPVTEFSCWELEAGSLVYVHCGGPTQDLTFRVSNGLQASPPAMLKVVAVQLAIQIHRSTGLHLAQGSAMPILPTNLLVETSAVGQDVTVLFHVTGGLPFRELQKQGAGGVEDAEWWVTQAFHQQDVEQGHVRYLSTDPQHYTEDTVENLDLQVQVSWEILSNLSFLVTIQRATVWMLQLEPLHTQNTQQEALTTAHLEATLEEAGPSPPTFHCEVVQAPRKGNLQLQGTMMSDGQGFTQDDVQAAEVTYGAMARASVAVEDTFCFHVTAPPYFSPLCTFSIHIGGDPDMPVLMVPEGGECVLSADQLFIKSLNSARYLYEVMEQPRHGRLTWRGTQDKITMVTSFTNGDLMHGQLPVNDHAPMQTISCVFHVAWGRWRLLTTDNMAFSNADSGFAEAQLVLTHQDLLSGRGASGRGESCSHTQADHGWIPLQVSDGQHQAITVLEVQALEPYLCVANGSGLMVPQGGQGTINMAELHLGTNLNICSRDEAHYHVTDSPHWGQLLQATQPATAFSQQDLLVGAVPYGHNGSLSSCNTLAFSMDVGPVHTDATLQVTIALEGPVAPLKLAQHKKIYIFQGEAAEIRRDQLETPVYPALFSEPRPGPGGSVKGFCLPRNLTEQPRAFQRSDMPCDLRPVLARSQPYSSTLLISETLLVCIWSLGPMVAQEAVPPADIVFSVKSPPSAGYLVMVLRGILADEPPSLDPVQSFSQEAVDTGRILYLHSRPEARSHAFSLDVASAWVLPLRTSRGAGGAACCHPHWGHKTSAVEGAQSQLHPGPSTAPRCQVLLPHSPGPWPAGAGATPAWGPAEGGWASSQDPQHLLLERGGRASDPVPARWEQDTDGFVLMANASEMDRQSHPVAFTVTILPVNGQPPTSYKLRPAGGGLMVRRPQKSGTQHPGTTGWDGSVAVRPPGGAIYPCLFREPSDGALPPTVWPLLPRLGLRAPCGQGRKPRNARGLFSGHTWEGATVPIPTEALRSMDGYSGPKDLVYTIKQPSNGWVVRWAVPGTEVRSFMQTQLDGGLSPSSHSAARASEPAGTDPQLLLYHVVRGLQLGRLFHAQHDSTGEDLVNFTQAEEPRPAALPQVPPEGTPVSP

SEQ ID NO: 924507 - protein, 119 aa, Homo sapiens
MIALRETNNENGLVDGGKVGMQPLVLFERSLYPGSLLCSGKAHCTLDAAGETNNENGLVDGGKVGMQPLVLFERSLYPGSLLCSGKAHCTLDAAVLECLEDAKNNNSEVASEHLKIPVL

SEQ ID NO: 924508 - protein, 210 aa, Homo sapiens
MSGLVGKSEKPGTSSWQSKAIKEELMERSKGGRAASLPICGPRPKAVEGLAPLLVSKATGRENDPEAEQKNAKTSWNLPDISDSTHYHNDRTAFYEKVSVSSSHPHFNTLGPQDRQREVWVSLAQDGGTGAISAHCNLHLPRSSDSSASASQETGITDVCHHTPLIFIFLVETGFHHVSPTGLGLLASSDLPTSASQSAWITGVSHHTQP

SEQ ID NO: 924509 - protein, 149 aa, Homo sapiens
MLSDSPKSTAVFMAVSRLRRAGAELGTKKGVSWLQLQCWEQPWASAARGGPILLRPLSLPLRLQGTDSVPVSACSSWLYDPVSRLDMFEEEEEQEEQLCAQAQPAEGQQLSFPSSLRTLVLMRPLGAWVWFFSVSQDKQMYLGSVHDFS

SEQ ID NO: 924510 - protein, 124 aa, Homo sapiens
MSQMLLAPPGPHTSLSSLTTVPQNPAEYSNFWCLLDTYFSCLVSEMDLQANIMTSPSYRTDVDQEGQTHMGVAAHAGPSSCSSGVGTDPLSPSPSPSLAFRELIFCRHAWSLVRAGQLSTQGWK

SEQ ID NO: 924511 - protein, 147 aa, Homo sapiens
MSVLLPAALLSAISRSHATDNPFTKTFNSQKQIVQPDSINRWIGGIYLTKEVKDFYEENYKTLMKEIIDDTNKWKHIPCSWMGRINIVKMTVLIRKNNSKIHMEPKGACIAKARLSKRNKSGGITLPDFKLYSKAIVIKTAWFWYKK

SEQ ID NO: 924512 - protein, 139 aa, Homo sapiens
MTEPLSHPYPRRGSWAPGDLKVFPLPQPTDGLLMDKEAVEIDKWEVKKEKNRKAVTQILVVSIGGHASWKECSKLLQQGKMGEEMHQLFTAVAQKGHSKVSHVTRAPISFTRQVMNRPPLGNHRGIHDYSVSMTSVRLI

SEQ ID NO: 924513 - protein, 160 aa, Homo sapiens
MAVLWNRKGGKSPWCRALSGNRPRLLGLYGSEGERSILELRKTLPRAAFAHCDGAPSTSLAQRRGSVNYLQTTRGTVRVLGYDFKAEELPIFLATFYHYSNLIRMKLQIRSSRLNYFNNFCNVFHYLSIIAYSSNFKNPFSKTNAFSKWSFPLGTQVFYS

SEQ ID NO: 924514 - protein, 152 aa, Homo sapiens
MNIPRLQFHPVLPLPSLWFSAAGDAERVAAARLPSFVKALGAPRPAGTWHAPSLPPGCPRGRSSPPKGPPRKSPRGHRRVCQLNLLQKWKRSQKRQQRRINLQTKKRKQKGKGEQRENRQKWLTKKLKKIYLQKMIQDSLHIVLDDSYVLNA

SEQ ID NO: 924515 - protein, 147 aa, Homo sapiens
MIVLLGVFLGKVFQGPFRELLLRENNDDFCEEDHMDPEAVQLLETKTLLLQMDATDRPITHGTHISHCSPRKCQVVYRPGFDPRLFSLLTFHIHRQWSGVAVNTDSIEPDFLGSNGSFASDHLGNHPGAVMVDFMYQLDWAKECSDS

SEQ ID NO: 924516 - protein, 139 aa, Homo sapiens
MGTNSPQYRGSYVMELLSPDLKRSCSFHCCSLGAPGSNEEQPWASCQMTATSVPDLEGGNATLENAEPCWSECRGSGVARTPPWQAPPPWGAPPPCNSHALCAYAWYHLQMSQFLTSPWLQSQPQAELCNQGRGRKGRC

SEQ ID NO: 924517 - protein, 123 aa, Homo sapiens
MVTPSLGSGNYCLYCRTELPDPQKDKGGCSGHRASNDWHLALPGCGFSSQPNTFPAHSRCSICVYPVSISKACVPPLYTEARSSVVDSEEEPLDRVLGHLYENPGLAEQQLEDQFSEVGPDLL

SEQ ID NO: 924518 - protein, 153 aa, Homo sapiens
MSSGEVVEVGGAWNKLGDCWRGHSDEDQNISTSDTCYSDRDARVPGRMDSAHLLSQLGLAFSSLTQSQQADCRPTLRGWAQGTSQQASRSPGGNSERQNSFTQTHHSAVLFGAGLQKAVGQAGLKLPTSGDQPASASQSAGITGVSHCVPGSR

SEQ ID NO: 924519 - protein, 148 aa, Homo sapiens
MAPMSWGESDHLSPGSRSATSRQTPSLAALSPVAKKGGGLLYSKAPEPIPAAHQAKNQEMQVQLMNLFPDAGFQVSCVLVQATPGTDTGTNVEGELEVTHLTGFCILSGFLHPCTKDSDSSLLGFCFCRNMSGTGFQTPSHPDGSGGH

SEQ ID NO: 924520 - protein, 224 aa, Homo sapiens
MGDAPEEARLESGPPYEEVVVDGDRSQHSLAAGRHDLKIQKCECPRTTLTSGACKLVDHWPSLPAPRAQSTQFLRGSSETCLIPKPKLLKAYTTSLPVEYQQKAGHIVVLAANVTIILNLTINITNITITIKIAITITTVTVTVTIIVTIINITISFTINGPVITGSRACQIISLSFSFFICEMRITISTPEVRRVVADSPPRKRCILKGEAMDDDFTQCFSLF

SEQ ID NO: 924521 - protein, 164 aa, Homo sapiens
MVNRPAEAVGLLRALWSALHSRYRSNSTWGFTMLPPSMPKIKMENSFLLPSKALDAAACHFFFTTNAWKEDAVSLAVLFLSQLCQFLCKPSALYFVAEFYNLPIDVVRWRHVVSSSSGLCPSLVQNIPAFTFLAATKETVCSSASSYKMAEPPSARMAELLLGG

SEQ ID NO: 924522 - protein, 218 aa, Homo sapiens
MLLKHLMTGSICSPKTYCFLGLLSAQRAPEFCQVPRERLHSPGGLLSMATQAQLASPRGSCTGAAGAAARQSRPCAAEQEVVLLREARALRGWEKDRKEGSGMAGCRSQALLRREAAEAQREFQRSAGRPALLGDPAHPPQLLARVLSPLLPRASSTGRPLPMHGLPSPRPPAEPTPTRNTRWPAIAACSSPGDCLSLELAVTDDSLRETVNNRPTIT

SEQ ID NO: 924523 - protein, 155 aa, Homo sapiens
MVRAEKMKGKNKLVPRLLGITKDSVMRVDEKTKEVLQEWPLTTVKRWAASPKSFTLESTSVALSDIVGTGERPDSCPLGFSGLGEPAWSEEDGASPWAGKGMGPEVKERSASLGFFRHYCFSALYISQPLVHYLEKATHPDDSQFCVPDDIPSIY

SEQ ID NO: 924524 - protein, 194 aa, Homo sapiens
MDPRENQDWKGQDGEESGAVVWPGSGPEAALPQEVGDQERLLQDRPSAEMGQLLMGLGSQQRCSCLAYEAQLGLSFSGSHPRHPCFPSYTSQPLISPTLEGGPSLSGGEAWIARVALPGGPRHSRWQRKGAASPQNPQRHQDTQGSPTGPKFLQSCHQNAAELENLPLKEGASLASRPRPYSQQSGGEIMGCLS

SEQ ID NO: 924525 - protein, 174 aa, Homo sapiens
MCSLPGALACPRPGSKQLLFLTADPTTHQQPPGYHQSYKKLLMDMVSPDMGQGRAHSPGCDIDVDAAPSSANVCYRTSGPCSMEPATDMLQSAGYAQSHQRPLSSPLTPTTSPTKPCQHWEAGTGPHLWNSQPPHLLSQQSIQSHHLLPGQFPAAGPERDSGTLEAEDTGIFMI

SEQ ID NO: 924526 - protein, 154 aa, Homo sapiens
MRVVCMESGGRKNKDLLHARPLEQGGVVLGCLCADNVSRALNAGHVCLSLLGLDRGPTQLICHTYFEYHWICQVARPTGQQLLLQLELAAKPSPALHPTHTIQPYECDASIARLSAEHKTTYEGLQHLNKEQQAAKLILETKIKDAEGQEHGTF

SEQ ID NO: 924527 - protein, 150 aa, Homo sapiens
MLREPVAPLTCINRRVMSTMENYVLANLPAKHKIDQGIRRPPAAEEMIARWESWAKDQPIFWYRKCNHGNSSEGSSSSISNDTLKREIQSMKRIQYIIADFEDGGCQVPGLRVAFGIETSPWLTASKAMETSVLQLQGAEFCSQPDWVWK

SEQ ID NO: 924528 - protein, 327 aa, Homo sapiens
MVAKAKWKPLELPLPRKIVNQKQYCIPGGTVEISATIKDLKDAGVMIPPTSPFNSPICPVQKTDGSWRMTVDYRKLNQVVSPVAAAVPDVVVLLEQINTSPGTRYAVIDLANAFFSIPGHKAHRKQFAFSWQSQQYTFTVLPHGYINSLPWCHNLFLRDLDRFSLPQDITLVHDIDDIMLIGSSEQEVTSTLDLLMRYFCARGWEINPTKIQGTSMSVKFLRVWWTLLSTGLEVFVPEGGTLPRGNTTMIPLNWKLRLPPGLFGLLLALRQQAKNGVTVLAGVVDPDYQDEISLLLHNRGMKVWVIPPGKNHDLLRCLLKAKGIQNG

SEQ ID NO: 924529 - protein, 146 aa, Homo sapiens
MSNSASTWCFLFPEIKYHHLILAKTLQPQQENIVCKCRSQPGHWVSNKKAPDALVAQRAQLLERLPVRNLAFQYQGKWLLGRVIKSQVPQPAELCNWATTFSRLFKNESMMSSYMGVPITYSVKPVLSNQELKTLNNFLPSSVPEF

SEQ ID NO: 924530 - protein, 143 aa, Homo sapiens
MKPQTEPDLSENGRSHRVLRGSGLTTLGTTPTLADNHFLGISVRITECLENFSSVTCQVHFDSASGASGPGPALCSFLCPHRPGFRHSLCPGSPSKVLKMASTILTSPPPQDSLLTATPGSVSLFPGSGIFPQEMPLISFCFL

SEQ ID NO: 924531 - protein, 144 aa, Homo sapiens
MDDTVIRNGSANPLFHMSTCKSILQDTCDHQNSDPNPLTSISSSINRRTTLKAAVRIQYEKGHETSGTFHKCYFPFLSLSDTTHKQQLPLRGPSLQSRTSWCFLLFSPHTHWLVGKRNILGQATLCWSPAQQPICARFQMREIL

SEQ ID NO: 924532 - protein, 161 aa, Homo sapiens
MHESLRTNHPDKPITTFRMELASSSEKMEHLKMIYVYQHMCEFEYEKFFQSHAFQGPIKISFFPFPMILLSFQGKNCMSTKNGAFSYFHKSGPCELFSTPDRGKEKFVYCKKNHSVHGTQCDGNTFSLQCWGGRVQGTVTDYTLQALPPELSGEGSAFVQF

SEQ ID NO: 924533 - protein, 147 aa, Homo sapiens
MPPLASSITKCAIFVTCPTSSLGNPVICCLSLNTVPNLLAEPSFTLSCDQVIVLLLLLLHLFADDGQVDLFSHDPFLCPTPHFQPLTGHLHSQPWLVLPFLPVPTAAMLVQSPVTHNKMNSNVLFSVSLMEQMPSSLFGLESVPANV

SEQ ID NO: 924534 - protein, 141 aa, Homo sapiens
MSQKPQHSQRKTWTFPSDENMPEVMTWALSFGVPVVVLQEILQAGLGGHWQGKPDLREKGGGWESTEQEEKRTSDRALGGTMAGKQFGLHMQQQTTLDSNPVLADLLELPQAHSILIHSRQDHRKKKAPMASVTSMGPMTG

SEQ ID NO: 924535 - protein, 186 aa, Homo sapiens
MDMKRRIHLELRNWTPSAVRELVLDNCKSNDGKIEGLTAEFVNLEFLSLINVGLISVSNLPKLPKLKKLELSENRIFGGLDMLAEKLPNLTRLNLSGNKLKDISTLEPLKKLECLKSLDLFNCEEGEEEDEEDEEDEDGEEEEFDEEDENVEGDDEDEVSEEEEEFGLEEDEDEDEDEGGGRRQER

SEQ ID NO: 924536 - protein, 135 aa, Homo sapiens
MELTNSYHLGCCGRGRNEDPLLLGQDQSKHHLPLWEAQDALSCVKPTGDRRHDRRDRSTSKTPPSETLVHRLCGGWARRMEQHPTVRKPFNTRPQTASTTSPTKSSSNGIYHQGAGKSTQRHLPPGGGQDHASPR

SEQ ID NO: 924537 - protein, 145 aa, Homo sapiens
MALNTELDGRREGGFHPKEKRDRERREKTAVTRRDQGSPHRFLADLSGPYQCSFTALPSSNLDTTFTSVVLSAPSQEAKSKMKQVSKACKYAERLQLGLLLLTGNIVNHNILLDACRALGNRILGPRDMIQLVVPLCQGVMPYKS

SEQ ID NO: 924538 - protein, 147 aa, Homo sapiens
MVKLKQKQGIYEEYEDIRRENSVGTFHCSICGLGMATLGFVTPEAPFESSKPPIFEGLSPTVYSNPEGFKEKFLRKTRENPVVPIGFLCTAAVLTNGLYCFHQGNSQCSRLMMHTQIAAQGFTIAAILLARSLDLRMQSEKSLTEKY

SEQ ID NO: 924539 - protein, 138 aa, Homo sapiens
MLRASSIRLLPSPEICWSSKSEWAGTCGYLDDPSELGPTSGAVMPGNFCGNLASSQYTEWGNSQKTIEKRVRVLKYRVWNPVFPTPCFLIYQLKTANVYHLSSSVGQECGAQLTWVTLPQGLSQGCNHGIRQGCDFIL

SEQ ID NO: 924540 - protein, 142 aa, Homo sapiens
MSKGTINICMLCGDISFQLTQRQVLLVSVEPCYHLQGHHFPDILKSFTSSFSSSSDSAASSTATKCCPLICTGPEPSFNHKTTGGVISKSPRETSDNAEAMPSRPGDEDMGQSQRRAKRTSSMWLRPKGKGNHMDLKQLGKV

SEQ ID NO: 924541 - protein, 138 aa, Homo sapiens
MCHITMFQSRIDHVSDMSFSGDTEEKTGLTFTEVILDHLHQYWLDLCLKIHVPGRHCRPPELRIWSRIFSALGEGAQCPVATGPNSWGLEQPQNSLAVGQFWCKILYIFVMLNKRCTFFSGCLFTLLVALFLVIKNLM

SEQ ID NO: 924542 - protein, 151 aa, Homo sapiens
MTCRFLTWELLNPTFAPGSTARCSAENIKSIHKRDITDFVGCKPERRIFLLYFMSMGFKAFIIPGYASPVPMHLRCKEAGFFVTSCHPSLVEGCSQHLPACKAEAGSSCSVELLVCMNGKCWGHGVPTAAVTGIGASAVCLVLHVHLLACL

SEQ ID NO: 924543 - protein, 257 aa, Homo sapiens [sequence omitted]

SEQ ID NO: 924544 - protein, 137 aa, Homo sapiens
MPAEGLGPLRLGLGAVWEPRVGEIKLKEDFVASEEIRQCQSSAAKPRRFGKESVKEPWARVPGALGVVARMSLEKEFQKIMSSIKPGTGHFHFFCGGTSSVKAGTDHFHFFCGGMSSVKAGTGHLDVYVQVTGDMMA

SEQ ID NO: 924545 - protein, 371 aa, Homo sapiens
MFFSWPLHHWERLQAALPLQGCHLQLLQVGCDLRWGTPFSGIEAAQLLHGRQHWAYALPTAKEEEEDQLHRRCCQGRAQEEVGTVRLRAKRVNPGWGTGSSEEKPHWSCELRAAPGSWHSPPAQPAGLDPGAENARLAADDFRVKYETQLAMRQSVESDIHEICEVVDVTWLQPETEIKALKEELLFMEKNHEEEVKDLQAQIASCGLIVEVDAPRSRYISKIRADIQSQYDELAQKNREELDKYWSQQTEEGTTVVTTHLENSLRVVEVHYTMQREQLNGVLLHLESESAQTQTEGQHQTQEYEALMNIKVKLEAEFTTYHCLLEDREDFILGDALYSSNSIQTIQKSTIGRLVDGKVGSETNDTKVLRR

SEQ ID NO: 924546 - protein, 185 aa, Homo sapiens
MGCPRISSLQGGFVQSGVVSFNVGENPNEIFCFADKVTKARRIYVVGNKGTKSYLITTATTITTIIIRMEVMRWGFLALLFTACEELCAAARPGPTFMDENLPEREFGIAQHLQPQGYSADALSSLIMLPTPTGGFNNGSLFSHSSGGWSSKIKVLAANSNVISSMKPWLPLTEKQAESCTRMPG

SEQ ID NO: 924547 - protein, 145 aa, Homo sapiens
MKERKWHSKQHKHLKQIHIVKKKSGMIITQRDYWPDWTTYSYYVIVAAKFEELEQKSYMTNISGPSAAGLLKFAGGPLQTLFAWVSPAEAAEQQRFLPVPSSGSFIPEGPPPTHQMPARALLYEVSVIPYWEMSLSQETRGTIQN

SEQ ID NO: 924548 - protein, 161 aa, Homo sapiens
MLFWILSMGACNHHCSYKLVKLASVLASGIYNLQLGYLCQPLLVLLAECQQPIVEKVQCKHVAGALQLSMLCGKTSVVADHLRLDLHLAEGFAVVDAHHAAHHLRQDDHVLQVRLHHFRLLHGRYLLLGLAQALQRRVLFPPQTRFKRCCRRALYSCISCS

SEQ ID NO: 924549 - protein, 144 aa, Homo sapiens
METCAWTTLSCRSVGVCRRSTPDPVCLGISSRGCRTADIGEQQMLLPDHSSGSFVLGVPGRGREVNLKTNHMSLEGDPSPTEPQHGSSSTSGLKTQRNSAPTAPATAAILPAKAPSSLPKTASLHSGAIAFRLNNDFYAMNAQA

SEQ ID NO: 924550 - protein, 140 aa, Homo sapiens
MWVSKTETGKTQGHYRCNLTEVPSNLMSRDVTVSLNGGNEEKNTRWNKIKLYPQVCSCYIIWMVTMGAPDSALPQERRSDRRLPRGVLWEGHVGGEAFGYGGRARSFRSALTSDSSSQIKKFSKIFATGKFLESLNWGHY

SEQ ID NO: 924551 - protein, 175 aa, Homo sapiens
MSVHPHPKSWTKELYLVSNCGSNPITSGSHGFPSGSLAWGEESSCSQEQLWSQRACSEREECGPEEMEMKISGNEADVDHFQLLIHGSIITSPPELHLALFFLRSLASFLCKLRMPMRSKKVMNVKNQTYIHLPFHNIPCPLPCCKGNIQELGVTKPLPTVHAWALEEAHSTSIL

SEQ ID NO: 924552 - protein, 141 aa, Homo sapiens
MPGKFFIVFVSLLGSQQKQGQTSVPPNKLPLCLSAPHPNTTVGVDIWDGILGPSIQVWMNGEVLIICGLRCGIKRQMEFDKRMIDPPTVRTVHLEELHTQCQPVKAARREAVPCKATGAELPKTMGTHLLHQCDLDVGIEQ

SEQ ID NO: 924553 - protein, 145 aa, Homo sapiens
MWVASTFWPLLPGADLGTDLSNSGSTFDYFIISNAVTSAAAYTTIRKHASHTNLTTVHPGSCRLARAPDATSSLESTLTLESIALGWSLPSAIDYLSDSSFQFKFTLTEIQDGVVIWPQPRDIAMLALTTPLVKACVAADLSNSF

SEQ ID NO: 924554 - protein, 135 aa, Homo sapiens
MKKENESRRSFSEKEELTQSAMMVLFQADLFLEPVGRKHFSVTFLVSFATQESLNPNNLEYWMEDIYTPGYDSLLKRKEAEFRRAKVCKIAALIAAAACTVILVISDNTKSDAEVMNHYHGLELLDAWGLGIDRR

SEQ ID NO: 924555 - protein, 172 aa, Homo sapiens
MRVLIQLWCKVMNSAVNPSGPGLFLVEVVQGQWSGWLETILGKLPENQIARSECIHSSQKPLFLPNRMGHDPLGTSLPSPLPVEEMKAMGNQQRQRADNILFMPNVCCHLHLGSLSLHSKETVSKVSLQHKRNNIMTALFFPPSAKGSYRNCFCLFRIKFLYKNSQQIFQQK

SEQ ID NO: 924556 - protein, 209 aa, Homo sapiens
MKPQCQSSPRGAWDGGKRNKIEPRLRAMQQPSEPIWKETEVRSSLNPVDLWGHRNYFCNIIASWDLIAQPGCCHLLGSHGDVTRELGSSPAQGWWCLSGVTRCYTANTMASNVTNKTNPCSMNSHVFIGNLNTLVVKKSDVEAIFSNPLLHNTLNAPLNSNICGTLLLAMLRVKLENLARALEASKAIEMDKQQMEDRNENVKRLQLKE

SEQ ID NO: 924557 - protein, 147 aa, Homo sapiens
MAKPFHSVLIFPTLSPSFLLICSLHGSRVCRIEVLNLAFLYLNSFIRKSVTEAKKTSGKGHCSKCFRSIKPLNRHATQCKFSSEKLRIPKMSEESRVVCAKDIALFLGRRTAKEPVNEVHKDKLLRTWIKVESESGEADLEEIQHHP

SEQ ID NO: 924558 - protein, 144 aa, Homo sapiens
MAGDWQAAPPAAPVRDPLGEASWAPESGGDMENLYVCSFTPEASETTSPLGGMNNSRNAALRAVTLTMKVCSFTPEPARPRTHQKEETPNTSEHQKEQTPDTLPLRTVTLTVRVHGFILEVSETKNLPILDTVRPRTHQFRTQH

SEQ ID NO: 924559 - protein, 138 aa, Homo sapiens
MSDLGGILLHPGLGGYPSPFRTGFVLLHVELGGILLHSGIGEHPSPSRTWGTSFSIQTWTTIFLYRGLGGPSFSIQDSGDIILHLKYEFQCPSLDLLYPVSFFVCPGGTWMKLEIIILSKLSQEQKIKHRIFSLIGGN

SEQ ID NO: 924560 - protein, 149 aa, Homo sapiens
MTLEAEEGEGLKGYTLGRLREKEKLGGDKFLLEKNNDRGRARQWCRPLQLSYPYRNINMNNCPHVKLPLQEPTEPQYMNKVMKHLWPVKMGKTMAYRVREPILCDCDTPPSVPLCQGLPVDHPWAHPANVAAVVEPLEDLCLTWDLDSL

SEQ ID NO: 924561 - protein, 231 aa, Homo sapiens
MDGFDPLDVQWSLVFRTKRKFAWQIGSFPFGFFNHLLRSSDTPTSDEIRDSAQEHEAQQERHGGCRAVGGGCRCGFPGQPLSPPLSSCLQKWLCEPFEEKMGDFGLQPEENTVEMEEPLGVRRLTENMRGHKHGTKSVTNLGRALPCVSLRAARWCSWMSPPGAFETATGTGHQAPADWPPHAGFRDLQRSAVQAAGDLNVELLPAPQAPGEAQDAASPPQEGQFGGKSLA

SEQ ID NO: 924562 - protein, 166 aa, Homo sapiens
MYSQELPTPTLGSGYIIQGGAKIEHSLSGGGHTAQPGPDCSSLLRGPPGAVICQPCFPVEDPTRTSPRNLGKARAPQEPPGVRATTPGQAGWWPLGSLPPQPKDSQLQHRAALDRQHQLEGQGRSLQSRAAPGDEQRGPQSSCQRLCPQEPLPASLKPTRKVSTGA

SEQ ID NO: 924563 - protein, 145 aa, Homo sapiens
MSKGVWGNCHAFWQSGMQMGRSQITQSYHFGQRNRECAFLFLLIFALLEVWAMKMGKGRRSLWILPADRGHSGVGVDPKVRGVELLCSCLSCLSVLTQARLSFQGFHDKGIRILIYSFSTTFTQTVYNKKRDSASQTTRPSEAVP

SEQ ID NO: 924564 - protein, 213 aa, Homo sapiens
MYLEPLSMNRFTTALIGQLVVCTLCSCVMKTKQIWLFSAHVLPLLARLCLVPLETIVIINKFAMIFTGLEVLYFLGSNLLLPYNLAKSAYRELVQVVEVYGLLTLGMSLWNQLVVPVLFMVFWLILFALQIYSYFSTRDQPASRERLLFLFLTSIAECCSTPYSLLGLVFTVSFVALGVLTLCEFYLQGYRAFRNDPAMNWGMTGGLLSYSLC

SEQ ID NO: 924565 - protein, 137 aa, Homo sapiens
MHSGQPVALPTSLRHRSRVRQRQAHGPWLSATPDTSCKAREPLGNRTARMLALEQELKEMKKFKGICKFTQKSNRYKSLKDTTYRYFISSHMPNPAKPNFGASPASRPATGGEAAQTSLCSENATLCVLLTPSPLWK

SEQ ID NO: 924566 - protein, 175 aa, Homo sapiens
MFHCLDTQALARAPSIAEPGPNVTVAAAKPGGLPGGGCRGARTENLPLNPISVGCGVGSGLPRTAWPAVLRSGRGGGQEARRRQLPGNLQARQHPQPRRTRASVAVAAAKPGGRPGGGCTKNKNWPQPHPRWLRRAPASGPIFLQRRSRAARAAGRAARLRSYGVPGEPKRTALL

SEQ ID NO: 924567 - protein, 134 aa, Homo sapiens
MCFVKQMLEGSMLVKSHHHSLIASTQGHKHCGSELCVKVEGARGGNDTAVRGLFMEGLPGHKHLDKLLPGHASGMVSLVQLIRGSDPWIEGSRKIKSERIKVQSLQSHKPSVWASKPLGLRGISNCHPSWIELK

SEQ ID NO: 924568 - protein, 149 aa, Homo sapiens
MAWLPESLGTTAVLFETLKTWSKFGSNSRMIGETDQVHRPWWLASKFINSPNKHSRIAIYEGGGGGGVCAESVTMIGCHSCDCHKSVDIELIKRETIQVILGGPGPTRGAFERSHVRRRICFPFTFCPDCNCQTASQNGCATLYSRSNR

SEQ ID NO: 924569 - protein, 160 aa, Homo sapiens
MDLNGRPTKQSGQVFYTLLARVLPGVHRAAFCPAPTPAKVCRNQASALFAIPLKVEDTEEQGIQENEQHSLGNGGAVASKGAKRGPSASGPGRGESCCPLSRGRACYSVALKSGRLQWGSLVKEAPACSSNHTWLDKEAQITKGSLQKFFLAPLYHLFVP

SEQ ID NO: 924570 - protein, 152 aa, Homo sapiens
MESRTSGLPNRTSPSTFYCLCMYPVLKTSAPLSSARTIRAYYQRLKDIPGPPANAFWNHLHIQTHRKQQRGNTHASQKPFIPLGKGGREGSPTLEKPGLHRQGDEHSELGSDSENKLSIPNPNPKVKNPKCSQIENFLSANVYSKEKLTGVF

SEQ ID NO: 924571 - protein, 209 aa, Homo sapiens
MKMWLMRAMSSRWALLSGQAEESLSMATTVQAHGKYCLGTTDVDSRPREGHFSQLEVNVASAESLPSGQWAPLWPREGPEMPSRNQGLELGTPGVHLVLYPTVVKLVPKLFWARPSALLFCEALGPEYKQLVLANSLMENAAVVTAHDWCPYEKRKFEYTEKHQGCAWVEKDYLRGHEAVLDSLCKLSPRPLGIAVTYSIVIMVESPKL

SEQ ID NO: 924572 - protein, 326 aa, Homo sapiens
MYCFPCSPPKLFFTLTDFRPESLQQQLIHVMEHICKLIDTIPDDKLKLLDCGNELLQQRNIRRKLLTEVDFNKSDASLLGSLWRYRPDSLDGPMEGNVLTSTAVKDQNKHTASINDLERETQPSYDIDNFDIDDFDDDDDWEDIMHNLAASKSSTAAYQPIKEGSKSAKIQSGIFGKGSAYSRHNAERLFKKLILDKILDEDLYINANDQAIAYVMLGNKAQTVLNGNLKVDFMETENSSSVKKQKALVAKVSQREEMVKKCLGELTEVCKSLGKVFGVHYFNIFNTVTLKKLAGFNRNLCYQFCFEGGGFLMIPEGVNRRLYISQ

SEQ ID NO: 924573 - protein, 159 aa, Homo sapiens
MRNRIGSPHWGRRWQLFTVSAHSALRSSYPQHFPNLPTAPGGASQSNIVSPELTPKPTTALKHAECLLDLNSHSLYRKPRPKAAVYLNLSLPLKSVHRLSLKKSFGFGKRDFENNSVFIVDSGGTCADLREFFWWSNNLCGARARSLEAGLRTPTPAPP

SEQ ID NO: 924574 - protein, 135 aa, Homo sapiens
MLTDWPVTQPLDGGSGPGYSNVHVSKVEELREPQIHTIKGFDMLEVCKFLRNSQMGTQPYPPCLLFHPNLRPVTRRLSLTQMLRGGRPASSCQPGGGEVLPCKSRTDSEWGSVGEMAFILDGNYLVGSNGDIGKP

SEQ ID NO: 924575 - protein, 135 aa, Homo sapiens
MPLPLGLCPISPFATTLVQLFITFYLDHWNSLLAALLPPDFAIIQRPLHQVSLTAVQLETQKKKDGLDVSQVNGCLGKSLCVADANGVGEGEREDIGYLMAGRFATTLARLSQSLIGSAPGSKDFTVIDLQADEL

SEQ ID NO: 924576 - protein, 167 aa, Homo sapiens
MVNGTTISPGAQTPGEDISDTSFLHSKPVNGFLWQLESNIKSSRSRRALQYFGCSVASPGTPGRRPPRSWQPGTSRGSQPSPSCKMKLLLGNLLAQDAVFHIHDGISMLVRATSRTVLCAGRAPMAPLLLAASLSRSVPGTAKGTGPVVTVPAAREDAGEQHAGSER

SEQ ID NO: 924577 - protein, 176 aa, Homo sapiens
MQLMYGVLAIRQRGRSITHSAQGIAPGGYQQVGGQSPQDLPAGQGQLQAQGSHGQGQPGPLVACGLQVKGSPQPLLYTPSERHEQSFSGTGALPAPLPWPLTPQPCSPVLPLRAETREWRPYGNPGASSLRKMLHRALLYGPSSYSLWKEGFDVLPPSRSSPKTLLQPHISGRSRR

SEQ ID NO: 924578 - protein, 186 aa, Homo sapiens
MARGLLISRRPPLGQAALIVSPCLGLLARFTGQRQCHSSSPSRERDQQMLWEAGKEGIQPLAGSSFEQQGAAGPFHTCEGRLWIVTELPAFRNPRFFPTIAVFPSRDSRGRQLSCQHWVPGRPPAHLEMGSITLLRNKARDLSVSDELAPEALVECGEFALPRRPTHLSLGLGQASVERLAGPPLV

SEQ ID NO: 924579 - protein, 149 aa, Homo sapiens
MRTPLLHQHDLDMRHGVKGNYSGALRFDCPAGFQPCVGPEVLFLASFSHLECLYLSNACTPIARRTKQEVEAEAEAEAEEEEEEEEEEEEGKKEEEEKEEEEEEENVKKQQPQPYFTFASGQAPRPLTLFLPQDLDTGSSIKEVIIMDA

SEQ ID NO: 924580 - protein, 135 aa, Homo sapiens
MFSQCLDCPRKRMKALKALSHCRCTLPLWRSHPPELSGNPAPGQKYSGTLTLEPQARSHFQLLPAYEDSQRNVPPTCPWLTVLSPTTSQRLSFLFLSYPNSAAELISSHGTPTLQTGWLAQSSVKTHRIWIRTKP

SEQ ID NO: 924581 - protein, 164 aa, Homo sapiens [sequence omitted]

SEQ ID NO: 924582 - protein, 168 aa, Homo sapiens [sequence omitted]

SEQ ID NO: 924583 - protein, 127 aa, Homo sapiens
MCLVCWGHLLLRRSSWRGAGEALDAADPPALRTLLVVCCQAGSLGYWDEDNENMFVNCAALVTQQVVITIVTSSSSYPFIKPTVMPAHGQQKAQTPWMMGTFTKQSQLRFPNTSIKQGPHYCTLFHD

SEQ ID NO: 924584 - protein, 141 aa, Homo sapiens
MPLGLSSNPERAVCVLIVVLFASQAGREVRGEPEATDAPASHAVNSVPQSRLTKDKPVPWQPKKAVLRQTSAARRKLSEQPRSPLRLLAEPPPFLHVGTGGLAGGCPTSQSLDLEPLSGTQHTQLQINHPSPLLTAILWTT

SEQ ID NO: 924585 - protein, 223 aa, Homo sapiens
MTYGGATETKHPKILSQHSGDSTLESTLERQWVCLNDKYTCGLEEEEVRGRVEASPCQGPGRERIHSDGSNEESECRDFLPRGGQGGRGEGETLQPPEPGDGGKLPPEPGDGGKLPPEPGDGGKLPPEPGDGGKLPPEPGDGGKLPPEPGDGGKLPPEPGDGGKLPPEPGDGGKLLPALACYGNLVTVGPLEEEAWAQRMQGCQRHPLTSLLPPHLLLATPYG

SEQ ID NO: 924586 - protein, 137 aa, Homo sapiens
MHESFHPCCSVFRGGGVEGELALEPGGPAQSLALPLALPKDGGQFTVTAASLSIKQRHDAGPTSSTDKLHFAKHCARQEHAVDLGGHTVVLELLGGFQLFSASTDTYEGSQNAFSTYMAAPTSVTPIKGGPYCKRGK

SEQ ID NO: 924587 - protein, 140 aa, Homo sapiens
MPRAPLPASLPSPSRYPDQMIHGDSALVFLWAALRDGGTHPLRITSSYLGAPCDTDEPTSVFVYVPTVVGGPFVKGRGSLALLEGHVQTPKDVCARTRNTSLPGRQEGLVEELELLEDIPGTAWDMTCERDGAHGHHEGL

SEQ ID NO: 924588 - protein, 138 aa, Homo sapiens
MDFWGEKGRACWEQRQTETEKSSEISTRCEIHRTTQNISSQYYIVTPDSPVEWSTASDQICVFGRRACEQINKLVSESQRRDFVRQEFTKFTCEHMGIGEVLRDGFIQLVNFPDEDCEHPRGEITCPQSPIHSIGSRP

SEQ ID NO: 924589 - protein, 127 aa, Homo sapiens
MWRDSRPTRSPQTVGNKGQPPRVLLSQQEWMPLSTYTDSPELGAGANCRRPEAKQDIYSHRRPGQAVTTVYSFLLPTGKMGTHILESSLATFIKICLKGSQPLDTGIYPKKTIPNTERAICIKVFIM

SEQ ID NO: 924590 - protein, 152 aa, Homo sapiens
MREKPAGSREGHYQATATIWAKGDGGFYQGMERRGAFEGDPEGGANPRGMRKNEDSRKAPEGSALAPADKGHDVLEHVLSGSGLELGDAGAQNSQGKVSQILFSTSISSLAFFPGLSLTCHRKLQDLPPMEVPINALNRHSLICHYFKTDVK

SEQ ID NO: 924591 - protein, 146 aa, Homo sapiens
MAAFSGPAANPVAEPTERCGFQKEVAQVLRITQREKQEQLTPGVVYVCHLHNLLNETQILSYSSQCGTVTSFRLSRQKRTGNSKGYACVEYESEDVAKIVAETMNNYLFGERLWECHFMTPEKVQKELFKDWDIPFKQASYPSVKR

SEQ ID NO: 924592 - protein, 326 aa, Homo sapiens
MAKDAGLIEANGDLKVFTDQNLSPGKGVVSLVAVHPSTVNPLGEQLLAKTSGQSNVNIAQQVVVGTPQRPAASNALGNQPSDSSPWSAGKRNRKGEDNGRGLRHFSMKVCEKVQRKGTTSYNQVADELVAKFSAADNHILPNESACDQKNIRRRVCDALNVLRAVSIISKEKKEIKWIETVSTSKLILQQIAFKNLVQRNLHAERQASQPPPANSVIHLPFIIINTSKKTVIDCSISNDKFDYLFNFDNTFQIHDDIEVLKRVESGSFSAEDLKMAKSLVPKTLERRWPQSSNGSQYSSSRVETPVSYVGEDDEEDNDFNENEEDD

SEQ ID NO: 924593 - protein, 157 aa, Homo sapiens
MATAVATKMLYSPGPPCEVLQLPLEAGVCYEQEPQLHLWVGAHGPPCEVLELLLEAGVCYDQEPQLHLDFCGQRFSIQEEHQTLLCPSEEIDGPQPHFNAKDMRHQWKMKMWVLYLQPEFMASLQKAGTSYTFFCYPFPTKGWAQHVVQRGHFMNVC

SEQ ID NO: 924594 - protein, 261 aa, Homo sapiens
MNGDQKSDVYAQEKQDFFQHFSQIVGVLTEDEMGHSEIGDAIARLKDVLEYNAIGGKYHRGLTVLVAFQELDAINYAILLEACIYYLLKLYCQAQPYYLNLIELFLQISCQPEIGQTLDLITAPRTMWILADSLKTEDPTGDREFFQIQDGYLDLFGDPTVTRKVGTDIQDNKCSWLVVQCLQRSTLEQYQILKENYGQKKAKKVVQVKALYEELDLPAVFLQYEEDGYSHIMGLTEQYAAPLLPAMFLGLVYKIYKQKKQ

SEQ ID NO: 924595 - protein, 141 aa, Homo sapiens
MDVRVEENGIKLPGFISGAGEVGPFNMMGKTEGGPGLLSCDESHLTIQQLSGPLCIALMALGRPGDQQKHDTYVMVKWHVVPGLQYQRSGMEWKTLWKIGGHIPSEVPVRPANCCHRALMLPDLLLFQENPEIRILKCKLY

SEQ ID NO: 924596 - protein, 140 aa, Homo sapiens
MGHWGFRVPLPCSESVQTWGTGASPPPSSKYKRHPQKNPQLISYILNGNRLDAFPPKIRKKVVQGLSPETEMERLMAAWVGEEMLSLLGMGKPFLLAKNGSSEFTNSGSPASPGSSHTSSFQVAGSHSFPIHALTLTVDT

SEQ ID NO: 924597 - protein, 174 aa, Homo sapiens
MALAEQGSVVAVSQLGFSGLHSGSCQVSFTLSLKSWTFLDEKELGGLSRGPGVWGTGLKCGVPRTPGEGISAGGVMDLNTALQEVLKAALIHDGLARGIREAAKALDKCWAHPCAAPNSGMWEEQFQPKSKLKVFSGRSQVGRIGRALVCSSQCERRRKRVISAFPSEVSGSSH

SEQ ID NO: 924598 - protein, 168 aa, Homo sapiens
MLISHPSFGPNNFADSPFQKEALARPNMEPHGKAVLYPLKTGKDNGHFCSTYIAEAPTCPKSESSLIPPFSFSSTIKPSASTSNTTFKIYLQYPPTYFHNHHLTQGALMSYWHDWKGLLPYLLTSSPALLPITLHQQPKQPLPCLTPFHGCPMYPMHKILTVWPCSLA

SEQ ID NO: 924599 - protein, 127 aa, Homo sapiens
MMDAEYQGDRKAARNLATLRSRMTFTRTGTCHGVIGGNQIKAVKKDMFASPSAMIPCGPSFNSHERSRAFCPLDPPACAHQLRSSLRCQLKCLFFKETYLSPAPMEKERMPKSQALPVGPGIGLRPS

SEQ ID NO: 924600 - protein, 173 aa, Homo sapiens
MPQMKKLLFSVLPKLPFFSSDLSLAPAYKMCLHIVGNGSHIMVAKKSYDLLSSNWRTINVNGVIQSESEGLRTKRNDGIIPGLNPKAGEDVPVQAEGINSFFIFLLVLFVSSMDWMLTVHIGEGTSFLFSVLIEMLISSRNTLTDISRSNILIAIWISLNPIKLTHKINHQKL

SEQ ID NO: 924601 - protein, 149 aa, Homo sapiens
MWLKEAKMSRQTVAAGAELSWRASARAVQKENVGLKPSHRVPTGILPSGAVKRGPPSSSPQNCRSTKACTGHLEKPQKPSQPMKAPGMGAVPCKATGVELSKAVDHGKQRGQQLAQKLGNREVARSCEDLGYEECWISHQSEFKATEGF

SEQ ID NO: 924602 - protein, 137 aa, Homo sapiens
MSRERFSSPPPPPRSQGGPNSAAEVTSPHRFKTRENNAARSLPQRLQVPPLCHLSIFTPESLRRREKLINRTPRRESQIRFGPSQPVSGACSQPLWDREALERTTDSFEETEEKTPTRTQCLTRPGAARLNPTGTLV

SEQ ID NO: 924603 - protein, 139 aa, Homo sapiens [sequence omitted]

SEQ ID NO: 924604 - protein, 134 aa, Homo sapiens
MRISSASPFSAAAPGRTDCCSIDKTQSLSACTTRNCGAYSKCLCGKYAKPVGGIPQPLQESHPAPDVAELQHHEFRGGGLEPRHYVPKYPVLRAYQYGPELLTSYLSAYGEVPQLCVTPRWAVVLPCFSPFSMG

SEQ ID NO: 924605 - protein, 226 aa, Homo sapiens
MEGAFKPALREELPMSASVTLGEHFWTHLGPGVSRRPEGKVTSLAGIATCLLQSPRALGKHKQQPGNGGKNGFGGQAQGSHAVYSLGTWCSECQPLQPLLKGAKITAQPMVLEGASQKSRQLPCGVEPVGAQKSRIDIWEPSPGFQKMYGNSWMPRQKFAAGAGRTSPRVLWKENVGSEAPHRVPTGATPVGAVRRGPPFSRPQNGRSTNSLHHASGKATDINTSP

SEQ ID NO: 924606 - protein, 169 aa, Homo sapiens
MATGPNGSVGLDKIIIATQEQYQKGSQRLPQFVGGPLQTLLTWFLSHLEVSPVEAAEQQGWLPAPSSNVQTLQRQQAGKTKSAEPQRLWLPLPTGVLPRKIRVLSINLWLDTTRGKQPTGATVIVTTPSPGNSVILDSLQSAVTGHSLSGDDSLHNSVLGTQGPGGVGS

SEQ ID NO: 924607 - protein, 150 aa, Homo sapiens
MVIIWSWRHEEQQMEGRVTLKTDHDCKLSEAITKSRCLHHDSCTVCRTVRFQRMYGKAWMPRQKPATGLNPPQRNTTKALPRENVALEPPYKVSPDELSGESVEMGLLPLTVEDTVKGTVEPLTDCSFNIENLQTLNFNPQEQPQERHPV

SEQ ID NO: 924608 - protein, 165 aa, Homo sapiens
MKSQKFIDLIWLIPEKLLKDIKRYVDFSVTSGGCAGSWHHEQELDKMRKQSKEGMKRFIENESTLHIVGGGLSIGAQGPSYRILGSLNTLLGIPLVTCGMPYVNEEDEVKLQSHLLGVRLVERIFLDIAKLFMDLKFLASRPYFPAHSPLRDVIPINLYGRQRNR

SEQ ID NO: 924609 - protein, 330 aa, Homo sapiens
MFSTNYQSLGSIKPPSYGALPVSSMANIYAGAGGLGSQISMSHSTSFWGNLGSGGLAVGMARGLAGVEGIQNEKETMQGLNDSLAYCLDRVRSLETKKWKLESKMQEHLQKKGPQVRDWGHYFKNIKDLRAQIFANTVSHACISVESDIHGLHKITDDTNVTQLQLETEMEVLKEKLLFMKNHKEEVKGLQAQIASSGLTGEQFEKSTTVVTTQFAEIGAAENTLTELRHTVQSLEIDLDPMRNLKLSLQNSLREAQKYEALLNIKAKLEAEITTYHRLLEDREDFNLDDALDSSNSMQTIHKTTTCRIVDGKVVSETNDTEISSSIKFT

SEQ ID NO: 924610 - protein, 133 aa, Homo sapiens
MCSNFSIFKTVVFKSLSTTAPVHFPVFSFVCLVIFIENWTFDYYNVVTLKIIFSPSPGISMGGQESLELPTPPFLLTSLPLTFNSQELLGYKAPQISIVTQCFWSILRSTYLSNLVLLLMTDIVLNDDHNFRI

SEQ ID NO: 924611 - protein, 321 aa, Homo sapiens
MLADSVSVGSPLHQALPSLQHLLSAALTHGSCLEAGGHDPPGGGMKRRAVMGPPQVQAWKALDLWESSQVMEGKAVVPMGRNPMMRKATQGQLENSPALEKLLPPLQGNVGFAFTKEDLTEVRDLLLANKVPAATRAGAIGPCEVTVPAQNTGLGPEKISFFQALGITTKISRGTTEILSDVQLIKTGDRVGASEATLLNTPNISPFSFGLVIQQVFNNGSIYNPEVLDITEETLYSGFLEVPPSIISGYKGCLALSVETDYTFPPAEKIKTFLADPSAFVAAAPVATTATAAPAAAAAPTKFENEESEELDEDMGFGLFD

SEQ ID NO: 924612 - protein, 155 aa, Homo sapiens
MAADPRISLDLPCLSVHLGASTKGHERTEAEEDPESWLPKREKGPKEELRQVKDIALNKTPSPGSEADRAEAQGACPELQPGDGVEVPYLWGRPKALAEGLGTMRPVSGLAELHLRCSSQAGSQALSRLRRCLRALADLQETRPTQAYVSSRTMT

SEQ ID NO: 924613 - protein, 155 aa, Homo sapiens
MPTTSFADADSISNAQRGCASPPNADMDNEHFPLFSGSCSCKHWPYQCGILHPSRHSLFNTSVFENLWTFVTASRVAMTQPLISEAVHMESVNYPHKPAPSPGSGPAEGLAVPSSHYVSATAYSCPFCATRKIEQPQMLTHSNSTTSLPYAIYFI

SEQ ID NO: 924614 - protein, 156 aa, Homo sapiens
MALKAKKEALAPPKAEAKAKALKAKKAVMKDVHIHKKRRPARHPPSRGPGHCDSRPPKYPRKSAPRRNKLDRYAIIKFLWTTESAMKKIEDNTTYVFRVDVKANKQQIKQAVKKLPDNDAAKVNTLIRPDGEKKAYVQLAPDYDVLDASQRQLSWL

SEQ ID NO: 924615 - protein, 155 aa, Homo sapiens
MVLTVKPLCGGIKAFTASCSSRKSPKVLASRLSADIRVPRLPGHPRLLLGFSEVTTTRSALFLPWEPNVTPAFPSAGPGTLWLFISSFSFSFPHKQFPQCSWNSSAVSQQEGLRSRTQRLLWLSVGNTFSIEIFLDLKVRDDPRLINRDSQRQQE

SEQ ID NO: 924616 - protein, 141 aa, Homo sapiens
MSGELAVNGCRRRLRLGRNAGMKITEGLAYHGKGVWADREELPTEKTEKQQPEREKVNWEQGNVYISQDSLVANNRSQCKPTEGKKGESYTDTGVVRYADIGMNGSEMKFKDVKNKMSSLMTDVVGVHSSLGFLFQLNLQV

SEQ ID NO: 924617 - protein, 158 aa, Homo sapiens
MRNEKKCLQLLPHGKVPSIPPPFHPSSLSQGLIRLCLALSETPISCFSCSQSPGVKWRICFASQCAYKEANRNLALLGIGRYSPWDETGKSCRVRECASALVPQSEPQSPAPFLRVFCSHSPGSCGGSRAQDTDPQLRPPQADVTDLSSPKCLTLLEG

SEQ ID NO: 924618 - protein, 203 aa, Homo sapiens
MNAQEPLWGLVCTTKRTIQFVTQGIASFMYTMTLSFYLGLGVTSLYFDICQITSIDSLFPVIHSSMEYYNSCHKKPALTSSSVWLLKSSVIGRFCIAHWGKAFTNPVGELVCLGQQYYNETLGKTLWRGNNKQGKDTTRLPCHNPFSHFHSLNHSWYQLEAPNEHLASTFWPRLDLWAMSLLAITCQLDRGLCVGDNKTIFLP

SEQ ID NO: 924619 - protein, 198 aa, Homo sapiens
MACTRWTKLQGRDWSGSYINASGGGIYYSDSVKGRLTISRENTKNSLYLQINSFIADTMAVYYCKRHSEEKSVLSPDTNLSAETHEVNQLRGRSGPTDQIQPQRQMQIQAVVTFSFSFLLPEKERCGPCGLNSKAQALPLELRWGSGCGSCSRMGEADGAFFFPQCLGPSTVFHGDSCGNLSGPGELKGISLFGESET

SEQ ID NO: 924620 - protein, 182 aa, Homo sapiens
MDTLLGCELCMMAIVRSGWAQPEPMELAKRKDRTEFLGSPTAAVYHRVPLSSPLLGLNQTDQPIKCACIGRRRASTLLRENAWRVNEAGKLMAYDGSLSLSEGEREAGLGGTFLHFCAVQRNSRLSLSLLQVKVAPQETPITPSNDSAPDECKAHSIPEKGAQDMGFSMSHVMDVREQELGA

SEQ ID NO: 924621 - protein, 134 aa, Homo sapiens
MNNAIREHTNKADISLVSPGSLAVCNHPAKERDGPISMTDTIEVLPQAQMVCDGCHFTNLEFREYNALLPHASQMKKPPCDQLSLLLSEPISKCQQFRSGGIPHCGVFPYFRKNHSPDNATAWTSDFHFVRCTH

SEQ ID NO: 924622 - protein, 139 aa, Homo sapiens
MCKQQKQRHKGTQGAASVNGQSQAMVSAPERWTKLDTHEPPSLASKSASLDGNGELSGIYSVWFLLLLRALVWWLFQIPVVVVIYWVCEQARGLLRGWNHRSNEKLISFSTAVRAGYGGSRRVYALLVIKVGNLACSRS

SEQ ID NO: 924623 - protein, 128 aa, Homo sapiens
MVSQAGKAEYLCVSVLYSPVVVSGPAGQTPTAGAPCEDRCKGSVTDPMKTKVEEDCVVKSVKQDGFSPIIQRRTQKGEGGRNVTCLTTCSSQNNKEETEVLPEPPLSIDRKNRGNTLQLYVPVFDKQH

SEQ ID NO: 924624 - protein, 147 aa, Homo sapiens
MGGSGTTRPRGLEKESYSDHGEESDTVTPPGAFSTGLAPALIGDCIKYWPPHQYNTLEENIGKCKDNGRKKSRTVEQFEASDTNSLRTKVMTQLLVDTESLLLGKLQYSKVTICKHDECTLATSPIVYCFPYFCLKKGVVYSGLVSV

SEQ ID NO: 924625 - protein, 164 aa, Homo sapiens
MLRTPERTQLNQGALRTAECAQDTRGRSEPPAGAQNSRVCSGHQGALRTTSRSSEQQSVLRTPGGAQNHQRALRTAECAQDTRGRSEPPVGAQNSRVCSGHQGALRTTSGRSEQQSVLRTPGGAQNHQRALRTTRGRSGRQGSLRHHEQLIQKGRKAGIPLSLP

SEQ ID NO: 924626 - protein, 139 aa, Homo sapiens [sequence omitted]

SEQ ID NO: 924627 - protein, 140 aa, Homo sapiens
MLDTLNSMVKFSYETLSRARLTVFVCFHAADEDIPETRKLTTERVLLDLQFHVAGKASQSWWKVKGTSDMAADKRRELVLVSVDFPGTKCKLSVDLPFQGLEDSSPLLTAPLGSAPVGTLCGSSGPIFPFLTAVAEVPHE

SEQ ID NO: 924628 - protein, 221 aa, Homo sapiens
MGSALIWASLLITLNISVPCESGPAAAVPHGAVLPFPQCLQKSCVKFIDGVRGRKLETGGNCMVDAPHNHKGAVRTIRRSSGHLGVLRTMRGAQDIGGSQNHEGCSGHQGALRTTRGRSGHLGALRSIRGAQDIRVPSVPRGGAHDTRGTQNHQGGLKYARLPGDSLPSSPFSRVLHTSHSSHPLPSLSTTEWALQFLLPCVCSALGLTSALMMTFKSPCA

SEQ ID NO: 924629 - protein, 144 aa, Homo sapiens
MGSSGFTFSSSWMHWVCQAPEKGLEWVADIKCDGSEKYYVDSVKGRLTISRDNAKNSLYLQVNSLRAEDMTVYYCVRGTVRGGQCEPRHKPPAGASGATRGRSGYTEDRGSPRAGAGGGQGLLSFRVCGFLSSNSSAGSLLYLQ

SEQ ID NO: 924630 - protein, 156 aa, Homo sapiens
MTLIENTRAVGGSTWGKQEDSTPGKGARTPRPASHMEEGQEHSQGHAQTLGHNAFLGIWKKEYGPRNMESLAPFPGELRDPAPAGSTGCDGEAETAQMRERVCEGFARPRTHEKYRCRHAQVLNNTPEQQSWAVEVASHVERSDSAKLYMGVSAGP

SEQ ID NO: 924631 - protein, 139 aa, Homo sapiens
MNSLKTEDTAVYYCTRDTVRGGQYLTGSSRGPILTPVSRRLLERLQDGQKEEPRVSPHDLEPPSPWIRPSPRDHRALHYPYPAVVPNKQHHTSIHQGKECLLPATVFWRPSQPCGTVIPIKPLFVPSFGCVFVSSLKMD

SEQ ID NO: 924632 - protein, 154 aa, Homo sapiens
MDWTWRVFCLLAVAPGAHSQVQLVQSGAEVKKPGASVKVSCKASGYTFTSYYMHWVRQAPGQGLEWMGIINPSGGSTSYAQKFQGRVTMTRDTSTSTVYMELSSLRSEDTAVYYCARDTVITVKLHRRCENSHESLPRTDTASSTTAILPHSHK

SEQ ID NO: 924633 - protein, 163 aa, Homo sapiens
MWRHSGLEGASQEEAAPRTNPASTWTLDIQTSEWEKQGPYPIEKEEKKQMGTPGESSLDLDTGFSGFPLETVEVNPGVPQSLPFFSSCQHRRTADKGADCGFFRSPGKSLQGLIVSHLTPLAHASKIKKKILTKYFQVSLFLSQYHTVAPALGSVTCGPQSSL

SEQ ID NO: 924634 - protein, 138 aa, Homo sapiens
MVHPSDIFRCFFLTGDTSQNAPASTPWDGAVWESKTATTAEMHPDTPPHHHYIAREIICRGAPSFDANLALKPHKTLPASRMLCPAPHQTMITTLSQSPSLPYQATLDLNERPALLSADTLRMQALSGTGTAPPSDSV

SEQ ID NO: 924635 - protein, 145 aa, Homo sapiens
MSPRGTQNHQGALRTTRGRSEPPGGAQHHQGALRTPGGAQKHSGTLRTRGGTQNQQGALRTTNGCSEPQGGAQDIGGAKDNNSGLRSPGGAQNHQGTLRTCRVPTMTLPSRAMEGGYQPPDPRMVDPQAACSSSLEKPQAPSSNP

SEQ ID NO: 924636 - protein, 144 aa, Homo sapiens
MKCVLGVISGGIESVLTGVYEVCATPIRINLSNQLQPIPWSLADTVHVVATEGELRGCTGESRGPRRLCQASPRLHQLHLTLDTCKHRDTPVRNCHTYPLFLTHIHSYSISLVLYRSRFKIATRKTQLSTNSMVSPLCSVLITR

SEQ ID NO: 924637 - protein, 227 aa, Homo sapiens
MNLIQLNGTMVYEYSGSEGQLLIAPPELHPRLRRAAPLLVSLLAGLSIAGSAAISTAALVRGETGLMSLSQQVDADLNNLQSAIDILHSQVESLAEVVLQNCRGLDLLFLSQGGLCAALGESCCFYANQSGVIKDTLQKVQKNLDRSQQERENNTAWYQSMFNWNPWLTTLITGLAGPIIIILLSLIFGPCILNWFLDFVKQRIASVKLMYLRTQYNPLVVTEESTT

SEQ ID NO: 924638 - protein, 152 aa, Homo sapiens
MELRSLRSDDTAVYYCARDTDQGHGPSVNGLRFTSHGASTGFPGENRQKQGEDTFQISSSTELALALFEETKQQQQTTTTANITRIKSVGLEEGDSAMGKNLTLSHPLCLRYWTAPALTMVIASDIASPPDNTLTWLLVPGFNQESCRLDSS

SEQ ID NO: 924639 - protein, 202 aa, Homo sapiens
MCEVNRDLCEVATGMCEVTWGMCKVTLGMCEVTQGTCEVTWGMCKVTLGECEVTLGMCKVTLCECVQCEVQLVESGGGLVQPGGSLRLSCAASGFTFSNSDMNWARKAPGKGLEWVSGVSWNGSRTHYVDSVKRRFIISRDNSRNSLYLQKNRRRAEDMAVYYCVRNPDTPLCFLETRLRTRVAISNEGTSFFGQNGVRMWN

SEQ ID NO: 924640 - protein, 136 aa, Homo sapiens
MESRCLLNVRDSDGLRNNPGAHSQVQLVQSGAEVKKPGASVKVSCKASGYTFTSYDINWVRQATGQGLEWMGWMNPNSGNTGYAQKFQGRVTMTRNTSISTAYMELSSLRSEDTAVYYCARGTELHQELTEDKGEF

SEQ ID NO: 924641 - protein, 130 aa, Homo sapiens
MELGLSWIFLLAILKGDSWRNREIECVQCEVQLVESGGGLVQPGRSLRLSCAASGFTFDDYAMHWVRQAPGKGLEWVSGISWNSGSIGYADSVKGRFTISRDNAKNSLYLQMNSLRAEDTALYYCAKDTQ

SEQ ID NO: 924642 - protein, 186 aa, Homo sapiens
MELGLSWVFLVAILEGVQCEVQLVESGGGLVQPGGSLRLSCAASGFTFSSYWMSWVRQAPGKGLEWVANIKQDGSEKYYVDSVKGRFTISRDNAKNSLYLQMNSLRAEDTAVYYCARDTVRGSQCEPRHKPPCRGPLGPPGGDRALSTGLSPGQVQVLLRAGFLSRSGAASSSNFPRNFSRFTILY

SEQ ID NO: 924643 - protein, 151 aa, Homo sapiens
MDTLCSTLLLLTIPSWVLSQITLKESGPTLVKPTQTLTLTCTFSGFSLSTSGVGVGWIRQPPGKALEWLALIYWNDDKRYSPSLKSRLTITKDTSKNQVVLTMTNMDPVDTATYYCAHRPQRHSPGHLLYKNPGCFSLVLPPHLCRTGKCS

SEQ ID NO: 924644 - protein, 168 aa, Homo sapiens
MTHPTSDNSTVTHIHGGSSSHGKYFLRLMDLLHKNMKHLWFFLLLVAAPRWVLSQVQLQESGPGLVKPSETLSLTCTVSGGSISSYYWSWIRQPAGKGLEWIGRIYTSGSTNYNPSLKSRVTMSVDTSKNQFSLKLSSVTAADTAVYYCARDTVRGGKKEGRNFSVYH

SEQ ID NO: 924645 - protein, 139 aa, Homo sapiens
MDWTWRILFLVAAATGVHSQVQLVQSGAEVKKPGASVKVSCKASGYTFTSYAMHWVRQAPGQRLEWMGWSNAGNGNTKYSQEFQGRVTITRDTSASTAYMELSSLRSEDMAVYYCARDTVLQSTHECLSFTYLIRGLST

SEQ ID NO: 924646 - protein, 177 aa, Homo sapiens
MLRNHQGAPTTPEGSQNHRGMLRTTRGRSGHQGMLRTLGALRNHQGTLRTLVGSQNHQGMLRTLGGAQEPPGVTQDTRGRSGNQRVPRKPGEVQEPPGGTEDTKGCSEPPGGAQEPPGGAQDTKVAQKTRGCSEPPGGTQEPPVGVQDSKNGSGHQGALRTSKGLFGGSSISGTWGG

SEQ ID NO: 924647 - protein, 362 aa, Homo sapiens
MDWTWRILFLVAAATGAHSQVQLVQSGAEVKKPGASVKVSCKASGYTFTGYYMHWVRQAPGQGLEWMGWINPNSGGTNYAQKFQGRVTMTRDTSISTAYMELSRLRSDDTAVYYWWPDNECALTGNTYQFSGPIAAIGGYGRATEVRPVELRRAMGTSRDNWHKGRKAGGKRRPCHKKRKYELGRPAANSKTDPCRIHTVRVRGGNKKYCAPRLDVGNFSWGSECCAGETRVIDVVYNASNNELVRTKTVVKNCIVPIDSTPYRQWYESHCALPLGRKKGAKLTPEEEEILNKKRSKKIQKKYDERKKNAKMSSLLGEQFQQGKLLACMASRPGQCGRADGYVLEGKELEFYLRKIKAQKGK

SEQ ID NO: 924648 - protein, 115 aa, Homo sapiens
MAILAGNYVVMDGFFYTEFISYHMVTFYSTAYGTFSKTDRMIGHKASLNKFKKIEIISSTLSDHSGIKLEINSKRNLQNHANTWKLNKLLLNDYWVKNEIKMEIKKIFEPKAPVT

SEQ ID NO: 924649 - protein, 147 aa, Homo sapiens
MTQPYFILLLKLFWLWPLGALPVGSCVPLRIGDCSPKHGDLGPLGRDGRACLCPHTAVGLRGDSCTSLGSLAHTAQCGHKSPGYKAGTPDGEQLEHGGKEAKVFIHQVTMLPSPATWNTDNSSQEKLAEPCADHSSPMRSSSYVLTS

SEQ ID NO: 924650 - protein, 139 aa, Homo sapiens
MWNSAESVRIPFPPVKGTMCAAVLWLPKQILQIGIWRWEPTATEETQLQLEVPLEQREGEKGLTCPFIPPFNLGSAPPIGQIYWKTEGKGAWMLGHSAIEESSLNYGQAFVQTTQKPAAPHDRGVVRKSFVLNGNRGDG

SEQ ID NO: 924651 - protein, 170 aa, Homo sapiens
MEITFSSSGESSRSTPWLERTGASSQPPAKWAPFSFQTCQAPRSQCCIGHSHCQQQAGQALSTAPAAPGPGSTPTEQAHPSSPHRTTRDSPPQPSAAQSEASGFALPGCLPLSPWGGYQGNPPPIFQRRFFLFSLRFGWLRNKKKEYKERNFTAGPLGVTSHIGRTMMSS

SEQ ID NO: 924652 - protein, 144 aa, Homo sapiens
MVGAASGCCFSAGASFFQGSVKGDFPSAAGGTLASVVAWVTLVSGLGLLADFPLDSVVGRVYGTGRWLQQRGSGQLVTPGHSMDTSSGLAWVACSSAGRRRLQTQSRARKGVFHRDCKFPEASPTVQNCESIKPLLFINYPVTG

SEQ ID NO: 924653 - protein, 248 aa, Homo sapiens
MTTIHTPSPVRILPEEPLPGPYSWVFPNPPSTASSILSWEESVSHQNCWLKGAGMKRFTLRTFLFVRSRKDSICQPGEDSGFIDSSVLSFTGKGFSKCQSLTPSEALILSSVKADRDEEAAEEKLEAGRGRFVRLNVCPQNMKVQGEAASADGEAAASYPEDPAWIIDEGGYTKQQIFNVEDTAFHWKKMPSRTFIAREEKEAGTAHVVEIARELELEVEPEDVTELLQSHEETRMDEELLFTDEKRK

SEQ ID NO: 924654 - protein, 140 aa, Homo sapiens
MEPQWPPPSPHSACADATLLDTCGPDGQTLCNVIPKALARAHSRVWTRTLFVDCGALSKTEGSVEWERHFDWEDEDALQVDGGDGCTNATVLNAADYAREWKIKNKGTTVGVNIRKSDVPSTCDVDVDAGKQEDACLHSL

SEQ ID NO: 924655 - protein, 281 aa, Homo sapiens
MRELLICREEIAGPPPWSAGSKQEARRGSANSAPVNERAALYGPSKAVQDALVYSQGKFQVSPVHAPPSILARSPASAAAPGAAWRAPSITSCPGGEQMELGRDCCARHTPPQTLGHCPSMQPPTAIARGPNWEALWGSLLWLTVTHSGTTGAPTPAAGRLNLEPHSPPLPLHMQDPLVTCQHVLEKLPLVVVWRQSQLICWQAGRRRMGLESPGDPGTTSQDKSMGGAPQHHHLSPGVDKHAAAFVPGFRGDICHGDLSSLRPELVCLGSVFISEGAHSP

SEQ ID NO: 924656 - protein, 157 aa, Homo sapiens
MGCGCPSCSCLQGPGEGHADKGSCEQPRSRRTFHTYFWSMCSVPDATTGAGDTWGAPGSHPWGGRRQPHSPLSNCPAGWCSAVPAHTSIDSRWHIRAGSPSPSSSQRPPLSGCTLYVPCAQSPDSGCRGSWHQMCRHKVPGQVPRQKPQSGAMSCNM

SEQ ID NO: 924657 - protein, 136 aa, Homo sapiens
MKPCSQRTSPEQACRCHFQNALLLLVQGVAATPPFPWNRPPGHVDKEELARLGEHGAEPGADPTVLPLPAWLWGSWPWTGLLLQGRCFHPRRGERLSVPPLQEERHCSPSQGQSDVSGRVCVCAQHDASVCSGDEC

SEQ ID NO: 924658 - protein, 144 aa, Homo sapiens
MGRWGLLLLFGSMAFDRTRRVVGFGAEDAQEGREGKAHELDLYLFLEASYVRDWLEDLSWNISSTQVSSLLVSGLICHHQLSQGSSLLTRCSPGTFQKRACLQFLLCAYGQKMPISQAQDKSSRTGCFEAVATGEEDPSAGWAS

SEQ ID NO: 924659 - protein, 343 aa, Homo sapiens
MAIVRRQGLQPPALLWACLAALSWGDPAVVGECGWAEQEVEPESPAGMCGVSVQTEGPAGVCGVSVETEGPAGVCGVSVETEGPAGVCGVSVEPEGPAGVCGVSVETEGPAGVCGVSVQTEGPAGVCGVSVEPESPAGMCGVSVETEGPAGVCGVSVETEGPAGVCGVSVETEGPAGVCGVSVEPESPAGMCGVSVETEGPVGVCGVSVETEGPAGVCGVSVETEGPAGVCGVSVETEGPAGVCGVSVGSEGPAGGVWGQSLVIYELWPPSLWLHLKPMVDTSCCCWARPCTLRKALPSLEHAAGKEDLGPAPQALSALRVSEGLCAVGGGRLTRSSFRVHSQ

SEQ ID NO: 924660 - protein, 158 aa, Homo sapiens
MRGCAAAALLGLGPSRLALQGLSLATEPLRAVVASGAPGLHDECVLASCRGQAPLGHPKPVMDKEATWPFHQSKDAGCCSPRGLSTAFSSPSKAFKQTLPGPQIDSRITILLQNRNLGKNSSTLGCLCTHFSWLSIMVPGSRVLGLIVVYSLTWKTHS

SEQ ID NO: 924661 - protein, 146 aa, Homo sapiens
MHEFARDAESAVKKAHRASHRRTSQYGLLTLLILPQNHLRGCWIRSPPGQCPVNRSALTNKYRSVLTKELLELTKIYPGLLLDVATWVPEMKGCGSITAMQRWTESSHFPLAEIANKIWSGLCANKRDKDCRWLWDRFPGRGSSHS

SEQ ID NO: 924662 - protein, 279 aa, Homo sapiens
MGLKLLRINVDAAGGHYPKGINAETENQVLRVLTYKWKLNIGGLDRRSNQPQYSLKPKPNPEKGPLFNSVKADSGEEAPEEKFEASRGANAAGDFKLKPVLTDHSQNPRTLKNYPKSTLPVLYKWNNKAWFTAHLFTAWPTEYFKPNVEIYCLVKKVLFKILLLIDNVPGHPRALMEMYKEVNVVFMLASTISILQHMDQQVKCYQTALHATEKYLVKGRVTDAANFTVDLFEEIATGTPTFSNHHPDQSAAINIKGRPSLHQQKEYDLWKAEMFVNIF

SEQ ID NO: 924663 - protein, 167 aa, Homo sapiens
MTVDFSSETVEPQGSDTAFFKILKEKTCQPRILYSVKVSFRIEEEKFEASRSWSMRFKERSHLQNTKVQGKAASADVEAAASYPEDPAKIINEGGYTKHQIFNVDKTAFYWKKMSSRTFIARQKKEHHKPWPVMKWGTGRGITLGEIPNVNDGLMGAVGQHGTCIPM

SEQ ID NO: 924664 - protein, 171 aa, Homo sapiens
MAPCCYNLPRCQLIFIKISPSLFFKKPKRLETWVTWFPPALRTSFKGFSTYSSYRCLSDLDFLPCSTRSQCPTPSPGPGPATLLSGPEKKAAYWKPFYHIDIRNMGLLHSVQRTQTPLSVTSVDLSELLWNQESSGWFHFKNKTKSKTLSLSGVSLASVGALAYHPSGTLR

SEQ ID NO: 924665 - protein, 143 aa, Homo sapiens
MYSARSGKTSLTHSRNPTSSSRNKSCLPKSRWSKKNRAGEDCLASVRHHHLEIPTGGEWGHVFAGLELQHGPQGPPMSSRKRPAQFCYELSRGLHTVNSLGKGQECVLEVRLKINDFHLWPGTCFQNWEENLWQIAAPLSPET

SEQ ID NO: 924666 - protein, 173 aa, Homo sapiens
MLRFKDGNGAAADADEIDCPSAVLIKCIRKLLIRNGVTLKDKPSPKVMEEQTVSKGKNSYGALSWMAADTGRILPLSSGPCVWTHATPQYRKPPSGVSGEASQEGPVPRNSLQSHQGNTGGSHAHRGATPLELTGKLLLEPQEELCMACCAARRQCFSSTSRGTKGVFAAERQ

SEQ ID NO: 924667 - protein, 168 aa, Homo sapiens
MQDACSSFAFHHESKLPEAFLEADAAMLPVQLVELFHKDRQQQQQQQNVELGVAGTMKTGKQMSLLEVEDKLELSLSPSLKTPERKETEEDPHQDPNWMAPLTWTSSPPEVEEISVCCYTQSTVFCYSSLNRLRPSTFLFSDAKSYFRPIFYLLSLPTLRSAISLRNS

SEQ ID NO: 924668 - protein, 166 aa, Homo sapiens
MTQEVGSQGPGQLSLFGFAGCSPCRCFHRLALVPVAFPGAQCKLWVDLLFWGLEDREELTGSLGSAPVGTLCGGSNPTFPLCMALVKVLHEGSTPATDLGNLQLCDLSDRESKIAVLRKRKEIQGNTEKEFRILSDKFNKEIEIVKKNQTEILELKNVGEGSKMAK

SEQ ID NO: 924669 - protein, 145 aa, Homo sapiens
MVESYGEKMPMTCALKCQGEKRLDSRDVCVCTSEVTVVTYSDGQRERCLTHHQLLGCGPTEVVATDRKLIASSFHNTPHGSSTLVDQEIATTLDTLKQLLALCWILVFDHGPLSIMVISEILVHPFSPESPESIISFLCLCILIA

SEQ ID NO: 924670 - protein, 298 aa, Homo sapiens
MCLLSLDCRPQDISQGVPVLGALSHTLCVSSLMESEGLGKGHITLLYTGFPSKGTRNHYKHEVILIGMSQVYCSEKVNQCCQQQNMQPNGPKQEVTAPGPIKKMLLLPNPDHMASTAPKPRKGMPLPNLFYEVVFCTGKWTLGAAFATSRIQGSKSSGGPVYLSLGNEDMRSKMQECQLGRNFPCRKKCTDSERSLTVIVPAGGVGPPAAGAGCMSLGEVLLKSWEDGAGEKSRLGYMSQRLLSRIPMVCLQVQGIQKSPGVQEVTLNCLTLSPKFHHGKKRDTSLRLLAAIFAIMWA

SEQ ID NO: 924671 - protein, 182 aa, Homo sapiens
MAQDSIPWNPLICHRDWERSTGPKLKKCEPVDSIHEVWTGNRRLWIDPCVNWRRRRRLSLRTITTPGNHADEGPCSPLKKTLAHRFSFPNHSKHSLCPSLFGHFDQNFLLYIIRRKCTVCSGTLSSPASHVFSRSPLVSGLSVADHHSIKEPVRPLDAVWGSVTSEEIPSVSHGLCRSVHSE

SEQ ID NO: 924672 - protein, 308 aa, Homo sapiens
MGALLDQEHSRHPARSGGMEVSSRSQNSTSTGSLHPVSGKARHSTTYERSCGGGTLQSHRGGVAQRLGSPPLEPVCPGLTGAVTQQPVWCRLHCELLDLEVSGLQANIPTLCRECILMPGSDTVKTSRDQDSSPMMYHSYKDFEGYVICTCGTHGNIVLGLQGTASQGDGSEFRAPCQKSICGPAAGLETADRGLKIAVCLLHRDAFPFITREILHSCSPICPTVVSQDAVVHSSISQGSTVQDQGTGLSVFSDCQRGHSVVHIACKTMNHVLWTLGGKLSIPMYVISSTDCGVVTRQVNRLFFVTLH

SEQ ID NO: 924673 - protein, 186 aa, Homo sapiens
MVSFSLFQLQLYSPSPDEADDSSSVSHVHWSNYGEKVILYPLQQWGALVHISVFLAHSQEIRLKTGTIIDAKTTQPPSMDCAEGRAANLPCNHSTISGNEYVYWYRQIHSQGPQYIIHGLKNNETNEMASLIITEDRKSSTLILPHATLRDTAVYYCIVRVAHWDRWGCTCAISPWWQVRRRVAFT

SEQ ID NO: 924674 - protein, 136 aa, Homo sapiens
MRFCGGIAFQAEWAKALIWKPAWSRQKLAVRWSHFMGSPSSHNGNIRIWKKMIPIQMYDFKKFKTLVEKVTADVLKIVGELELEVEPEDVTELLQSHDKTLTNDKLLFMDKHRNCFLKMESTSGEDAYHNIYAVFR

SEQ ID NO: 924675 - protein, 136 aa, Homo sapiens
MLLLLVPAFQVIFTLGDIDVAGGTRAQSVTQLDSQVPVFEEAPVELRCNYSSSVSVYLFWYVQYPNQGLQLLLKYLSGSTLVKGINGFEAEFNKSQTSFHLRKPSVHISDTAEYFCAVSDTVPETAGELNTNLLRC

SEQ ID NO: 924676 - protein, 410 aa, Homo sapiens
MKNLCWEAAIDGPAALPLLSHAPAARPSARGDFYSGIGVAGGTRAQSVTQLDSHVSVSEGTPVLLRCNYSSSYSPSLFCETSSHLLVLVSSDTFLPVLWRSCRKEPAVFPLFSHAPGAYPTAGDTFCPEMERTVEEAFILLVCLKPWRVASSLEKKEKEDESFQLLLGSRYNVLEGRKLEFIGLRIHCEDDSISREAKPKFKPKCGSVTTHVEFQPYKVCYMNVREWTRKDWGPENQDEDKLADHIAEQRETEENPATLTSAVWVWERLGPISLTMRMESSNLLVNGENVEQHPSTLSVQEGDSAVIKCTYSDSASNYFPWYKQELGKGPQLIIDIRSNVGEKKDQRIAVTLNKTAKHFSLHITETQPEDSAVYFCAASTHCFPGTCYPYTNLRLELKLHPLSFVIDRQL

SEQ ID NO: 924677 - protein, 184 aa, Homo sapiens
MCYQKGVPIQTPKRGFLDLAQERIQEGSSGLPIQPINGKPVQPLTHTGLIQLCSELRFTSETGSEGVGNTALLCSESCYNNGTCSQLQVFWSLLEVHSRSCFPGYYQQRLQNNKYCCLILPLEASSQRGISLFEDSLSPYSEGFPSQATRRSGACLKRPSVHSWSTNAMLREPLLSSELSDRDV

SEQ ID NO: 924678 - protein, 176 aa, Homo sapiens
MLLSNDQNLRGNIIFNNDGASGGAALVTIMYLVIGTAGQSLEQPSEVTAVEGAIVQINCTYQTSGFYGLSWYQQHDGGAPTFLSYNALDGLEETGRFSSFLSRSDSYGYLLLQELQMKDSASYFCAYPVVPRMEDGIYFWRKLFIQGKDPLVSALVYAVKDTERLNGESNTEANDL

SEQ ID NO: 924679 - protein, 313 aa, Homo sapiens
MERINSTLLTAFILTGIPYPLRLRTLFFVFFFLIYILTQLGNLLILITVWADPRLHARPMYIFLGVLSVIDMSISSIIVPRLMMNFTLGVKPIPFGGCVAQLYFYHFLGSTQCFLYTLMAYDRYLAICQPLRYPVLMTAKLSALLVAGAWMAGSIHGALQAILTFRLPYCGPNQVDYFFCDIPAVLRLACADTTVNELVTFVDIGVVVASCFSLILLSYIQIIQAILRIHTADGRRRAFSTCGAHVTVVTVYYVPCAFIYLRPETNSPLDGAAALVPTAITPFLNPLIYTLRNQEVKLALKRMLRSPRTPSEV

SEQ ID NO: 924680 - protein, 345 aa, Homo sapiens
MAVKEAAFDDGVEDDEKGEFGGFGSVSGNIEIEIKINHEGEVNRARYMPQNSCIIKTKTPSSDVLVFDYTKYPSKPDPSGECNPDLRLCGHQKEGYGLSWNPNLSGHLLSASDDHTVCLWDISAIPKEGKVDARTIFTGHTAVVEDVFWNLLHESLFRLVADDQKLMIWDTRSKNTSKPSHSVDAYTAEVNCLSFNPYGEFILATGSADKTVALWDLRNLKLKVHSFESHKDEIFQVQWSPHNETILASSGTDHGLNVWDLSKITEEQSPEDAEDRPPELFIHGGHTAKIPDFSLNPSEPWMICSVSENNIMEVWQMAENISNGEDPEGSVDPEGQESQTYLYFL

SEQ ID NO: 924681 - protein, 115 aa, Homo sapiens
MKRVKLCNVFEKVCSEPNGSDQWPMTQPSRDPENMCPRWSGYNMVLYILGKHKPSVSTCKMYTGSVQKGRKTGSGQLPGNIPGKCIKNNDLLLGFVVNMIINNSTDSHGNHVRLI

SEQ ID NO: 924682 - protein, 445 aa, Homo sapiens
MVRGFLKQLLARWLAATCFIVLFGSDQVSAGEHPCFYHLRQRYVQCPFNLLVIGEQMIDVLGPEKRRRRTTQEKIAIVQQSFEPGMTVSLVARQHGVAASQLFLWRKQYQEGSLTAVAAGEQVVPASELAAAMKQIKELQRLLGKKTMENELLKEAVEYGRAKKWIAHAPLLPGDGERTDDWMDGRRSRHTDDTDVLLRIHHVIGELPTYGYRRVWALLRRQAELDGMPAINAKRVYRIMRQNALLLERKPAVPPSKRAHTGRVAVKESNQRWCSDGFEFCCDNGERLRVTFALDCCDREALHWAVTTGGFNSETVQDVMLGAVERRFGNDLPSSPVEWLTDNGSCYRANETRQFARMLGLEPKNTAVRSPESNGIAESFVKTIKRDYISIMPKPDGLTAAKNLAEAFEHYNEWHPHSALGYRSPREYLRQRACNGLSDNRCLEI

SEQ ID NO: 924683 - protein, 269 aa, Homo sapiens
MASVNGSSQNCVSVQERSRPGVLAMPCISELISKSCVPMEFEEYLLLMFQQTFYLLQKITKDNNAHTVKSRLEELDESFIEKFTDFLWLFVRRCPGAPPHRGVESNPVQIQPGQLEELDDETLDDDQQMELNIMAENDCWWLHCSLRDLSSLLQAMGHLAGYFIGDVFAAWFNDALTVVESLVKVTLYGSQIKLYNIEPVLKPDLIDVRAQSLAVLQAYTHWLVQYCSEAHQQNTQQFVTLIPITMNAITPLISTKFSKQQSLPSTPFI

SEQ ID NO: 924684 - protein, 217 aa, Homo sapiens
MLGPLGWLAVPPLGVQQGEEDTEMWESLELLRDLLNDFTQNADSDMDNKMQAEVVSDGDKELVGNWSKDYSCYVLAKKLTAFCLCPKDLWNFELEPQNGRSTDSLHRAPGKAADPQGQPRKAAWREAVSFKDTGVELPKTMGIHLLHQCDLDVRPEVKGDHFEALKFDSPAGFRTCMGSVTPSFWQISPIWNGCIYPIPVPPLCLGSNELAFDFTGS

SEQ ID NO: 924685 - protein, 310 aa, Homo sapiens
MSPDGNHSSDPTEFVLAGLPNLNSARVELFSVFLLVYLLNLTGNVLIVGVVRADTRLQTPMYFFLGNLSCLEILLTSVIIPKMLSNFLSRQHTISFAACITQFYFYFFLGASEFLLLAVMSADRYLAICHPLRYPLLMSGAVCFRVALACWVGGLVPVLGPTVAVALLPFCKQGAVVQHFFCDSGPLLRLACTNTKKLEETDFVLASLVIVSSLLITAVSYGLIVLAVLSIPSASGRQKAFSTCTSHLIVVTLFYGSAIFLYVRPSQSGSVDTNWAVTVITTFVTPLLNPFIYALRNEQVKEALKDMFRK

SEQ ID NO: 924686 - protein, 248 aa, Homo sapiens
MTLSASDLNRTCNWINWGYESHIMMKQHTISFAACITQFYFYFFLGASEFLLLAVMSADRYLAICHPLRYPLLMSGAVCFRVALACWVGGLVPVLGPTVAVALLPFCKQGAVVQHFFCDSGPLLRLACTNTKKLEETDFVLASLVIVSSLLITAVSYGLIVLAVLSIPSASGRQKAFSTCTSHLIVVTLFYGSAIFLYVRPSQSGSVDTNWAVTLGRCCCIAVLLTVYVVLYPETFLNSIDDIQELFG

SEQ ID NO: 924687 - protein, 218 aa, Homo sapiens
MFSPDQDVAEAPRSLSAGKMMRTLITTHPLPLLLLPQQLLQLVQFQEVDTDFDFPEEDKKEEFEECLEKFFSTGPARPPTKEKVKRRVLIEPGMPLNHIEYCNHEIMGKNVYYKHRWVAEHYFLLMQYDELQKICYNRFVPCKNGIRKCNRSKGLVEGVYCNLTEAFEIPACKYESLYRKGYVLITCSWQNEMQKRIPHTINDLVEPPEHRSFLKLSS

SEQ ID NO: 924688 - protein, 161 aa, Homo sapiens
MDAELQVTLTVEDTSAPSLVTDHAPLTISLKPNHPYPIQCQYPIPQHALKGLKPVITCLLWHGLLKPINSPYNSPILPVLKPDKPHELVQDLCLINQIVLAIHPMVPNPYTLLSSTPPSTIHYSVLDLKHAFLTISLYPASQPVFAFTWTDPDTHQAQPIT

SEQ ID NO: 924689 - protein, 124 aa, Homo sapiens
MLLFWPEISVASGAFAQVLVRHPGRMRYADKWRAGHPIERTALSREETLELRCVMFPSLCPCVLIVQLPLMSENMRRLVFCSCVSLLRMVTIIFSCQVDFIATLDKYGPEEKANSNQLTALEEC

SEQ ID NO: 924690 - protein, 143 aa, Homo sapiens
MVILARVSWHSIFWGTIEAITKVMSISPSPSLHSVTENRPSQSSVHSKYLLILANGRHLWKKKASDHVLSVFIQCDILGYSEDFLVESIPRSPLHAISNIMLGFLHLAGSDLISRSLMAEEYTIVLASFISCISSSMDGQVVC

SEQ ID NO: 924691 - protein, 244 aa, Homo sapiens [sequence omitted]

SEQ ID NO: 924692 - protein, 234 aa, Homo sapiens
MIADFVSEKKTISYWGCITQMFTFHFFGCAEIFVLTVMAFDRYAAICQPLRYTVIMSANACTVLASLSWLGALGHSFVQTLLTFQLPFCNAQVIDHYFCDVHPVLKLACADTTLINMLVVANSGLISLGCFLILLASYKVILLSLQKQSAESRRKALSTCGSHLTVVTFFFVPCIFIYLRPSTTFPLDKAVSVFYTTITPMLNPLIYTLRNEDVKNAMRQLWSSKISLKEKQRG

SEQ ID NO: 924693 - protein, 233 aa, Homo sapiens
MLIDFFVERKIISFGGCIAQLFFLHFVGASEMFLLTVMAYDRYAAICRPLHYATIMNRRLCCILVALSWMGGFIHSIIQVALIVRLPFCGPNELDSYFCDITQVVRIACANTFPEELVMICSSGLISVVCFIALLMSYAFLLALLKKHSGSGENTNRAMSTCYSHITIVVLMFGPSIYIYARPFDSFSLDKVVSVFHTVIFPLLNPIIYTLRNKEVKAAMRKVVTKYILCEEK

SEQ ID NO: 924694 - protein, 301 aa, Homo sapiens
MESENRTVIREFILLGLTQSQDIQLLVFVLVLIFYFIILPGNFLIIFTIKSDPGLTAPLYFFLGNLAFLDASYSFIVAPRMLVDFLSAKKIISYRGCITQLFFLHFLGGGEGLLLVVMAFDRYIAICRPLHYPTVMNPRTCYAMMLALWLGGFVHSIIQVVLILRLPFCGPNQLDNFFCDVPQVIKLACTDTFVVELLMVFNSGLMTLLCFLGLLASYAVILCRIRGSSSEAKNKAMSTCITHIIVIFFMFGPGIFIYTRPFRAFPADKVVSLFHTVIFPLLNPVIYTLRNQEVKASMKKV

SEQ ID NO: 924695 - protein, 187 aa, Homo sapiens
MKTHSRKWEMETNQRTPNWENKEEVKDLDNFFKVHLAFTVDLPFCGPNEVDSFFCDLPLVIELACMDTYEMEIMTLTNSGLISLSCFLALIISYTIILIGVRCRSSSGSSKALSTLTAHITVVILFFGPCIYFYIWPFSRLPVDKFLSVFYTVCTPLLNPIIYSLRNEDVKAAMWKLRNRHVNSWKN

SEQ ID NO: 924696 - protein, 140 aa, Homo sapiens
MGFYTETFHCPGTGRRQMPSSCLNCKEVFLPLMLILLSTDPSWVSGWGMDLLLVKGWQACTNGSDDSGAALWLPQRKAEAKAPAESTVGQRQANPPWWSRVYVCGRVFPGCSREKAMVVVLRSNYCVILTIQVRNGESLT

SEQ ID NO: 924697 - protein, 308 aa, Homo sapiens
METQNLTVVTEFILLGLTQSQDAQLLVFVLVLIFYLIILPGNFLIIFTIKSDPGLTAPLYFFLGNLALLDASYSFIVVPRMLVDFLSEKKVISYRSCITQLFFLHFLGAGEMFLLVVMAFDRYIAICRPLHYSTIMNPRACYALSLVLWLGGFIHSIVQVALILHLPFCGPNQLDNFFCDVPQVIKLACTNTFVVELLMVSNSGLLSLLCFLGLLASYAVILCRIREHSSEGKSKAISTCTTHIIIIFLMFGPAIFIYTCPFQAFPADKVVSLFHTVIFPLMNPVIYTLRNQEVKASMRKLLSQHMFC

SEQ ID NO: 924698 - protein, 152 aa, Homo sapiens
MLARLILNSWPRVICLPRPPKVLGLQANTNRACAFSLIHLFALCGLKTWSLTQRILGYIKVTVETPFSPFLKCSKGTLTGLHKGPQSPPGTQTFQLSHPAEKGQQEVVNNPRSTEGHLGDVDDRNQEPDETKYPAIDHKIGTETSGHNGWIA

SEQ ID NO: 924699 - protein, 195 aa, Homo sapiens [sequence omitted]

SEQ ID NO: 924700 - protein, 315 aa, Homo sapiens
MVSNGIYSNRMESNGMPSYGIESKGKESNGMDRKETDWNRMDSNALDCNLCDLNGMETNGKNAMEWNGKERNGLVWNRIIWNGIEWNGMEWNGVNQNVMDSNGMDSTTMDKKGMVSNGIYSNRMDVNGMQLYGMESNEMDWNGMDRNGMDSNVMNGMECNGMLSNGMQWNDMDLKGMDWNGMDSTGMDWSGMDSNGMLSNGVQSIAMESNGMELNRIERKRMEWSVMENYRMEWNGMDSTGMDWSGMDSNAMEVNGMDWNGMDSNGMDWNKNGIKRIGIEWNGMEWNAMKWNGKEWTRMEWSRMEWRRKEWNQKE

SEQ ID NO: 924701 - protein, 180 aa, Homo sapiens
MNKEETFLLLLCLEESSLSSKAWKRHHRLLTLLCAPPPLCVLWTWISARGEVLLEESRTLEGLSFFFETWCSIPISKASSQMPVVGEDVDAEAVSGLLYSTSPTTFGEDAGLSGVAVTRSHTWSDFEMDPWFYSSRDVKWVNDGATLMWLFNGTVKKASKMEPDRPGFNASNDLTCDLRQ

SEQ ID NO: 924702 - protein, 136 aa, Homo sapiens
MKLTNLGQVGEAAQGPGAATFEHSAALPKPIPRSGGGSLPPELCGAHRPRLATVRRSRSFGPGHSPALQTPAVARLGPRTLNLAPGSLGPDRGVPGTFLPGLFATFWKLYSSASFMHSLHQQGASLYLATQSSLLH

SEQ ID NO: 924703 - protein, 188 aa, Homo sapiens
MASQRHFEYELKANRPRASDEYLVRYYFESLHTACTNKHKPLSAQRVSHLTIKETRPDKGISVDTDIGLEVIGTCEKDGASQWEYTGSYGRKPSPKADASAASLSHCPASWKAQGTAASWPSLSLALRAGRLCTGSEASITWRRHRRPAAVGLDLSPGRWRGELHIRKPCELRQEHTKSLPGQGGALL

SEQ ID NO: 924704 - protein, 290 aa, Homo sapiens
MTQKGLVHQSAPSAAGLLQFAGGPLQTLFAWVLAAEAAEQQILVNSKCCCLIVPLEVLSQRSTRPSSSMVGAPPPTSLPPCSLISDCYASNERGSMGIIPSEACTGYNLLVCRLLRPLEKHSIRVGVTRFSRCHVSPLSLTRKGNSLIPCASQIIQGYCEHLYAHKLENLEEMDTFRKTYNHPRLNQEEIEALNRPIASSETESLIKKNCQQKSPGPDEFTAEFYLTFKKLVPILLKVFSKIEKEEFLSKSFCEASITIIPKSRKDIKENNRSISLINIDAKIFKKILDN

SEQ ID NO: 924705 - protein, 159 aa, Homo sapiens
MWQVLSSCPVSRKNEVCRQVEASCPDVCSAVAEPRAFMGLRGEEVHTNWSTGSHGLAWKTHHKFPFWSVGLEAQPAAFRPSLGRRNLCVSCYIHGARAVGANGHLQASIKLPSVPPWLPSYAQQCPKSGGGLGSRWLVCQHCPECVHTWLGCDSVRAWP

SEQ ID NO: 924706 - protein, 158 aa, Homo sapiens
MRLAGQPWGTGRSQEPQNDHTVNSSIQRFLVQCGRPNTPLRFVCEAGCGKRCPGREVHDNRAGRGGGGGGGNGGDGRACGDGACGGGGDDHGVPSISVAVDSQVRVSSPEPSPEPQFLHGSSSGHPVSVLRSNSACPNELFFNFHPGLKPTIILHSLS

SEQ ID NO: 924707 - protein, 1304 aa, Homo sapiens
MEESAEQAQRRDETRVGRRRHSWRSRQSRQTKEFIFSELLSNLYSRRNLQTLVEESAEQAQRCDEMLLLRAAVQPALAWEREDTRGGSCCPTCTRVGTRRHSWRRRQSRQTKEFIFSELLSNLYSRGNEKTLSCCPTCTRVGTRRHSWRRRQSRQTKEFIFSELLSKLHSRGNEKTLMEESAEQAQRCDETRVGRRRHSWRSRQSRPTKEFIFSELLSNLYSRRNLQTLVEESAEQAQRCDEMLLLRAAVQPALTWEREDTRGGSCCPTCTRVGTRRHSWRRRQSRQTKEFIFSELLSKLHSRGNEKTVMEESAEQAQRCDETRVGRRRHSWRSRQSRPTKEFIFSELLSNLYSRRNLQTLVEESAEQAQRCDEMLLLRAAVQPALAWEQEDTRGGVGRAGRPRSSSSQSCCPTCTRVGTRRHSWRHRQSRQTKEFIFSELLSNLHSRGNEKTLMEESAEQAQRRDETRVGRRRHSWRSRQSRQIKEFIFSELLSNLYSRRNLQTLVEESAEQAQRCDEMLLLRAAVQPALAWEREDTRGGSCCPTCTRVGTRRHSWRRRQSRQTKEFIFSELLSKLHLRGNEKTLMEESAEQAQRCDETRVGRRRHSWRSRQSRQTKEFIFSDLLSNLYSRRNLQTLVEESAEQSQRCDEMLLLRAAVQPALAWEQEDTRGGVGRAGRPRSSSSQSCCPTCTRVGTRRHSWRRRQSRQTKEFIFSELLSNLHSRGNEKTLMQTKEFIFSELLSNLYSRRNLQTLVEESAEQAQRCDEMLLLRAAVQPALAWEREDTQLLSNLYSRGNEKTLVEESAEQAQRCDETRVGRRRHSWRSRQSRQTKEFIFSELLSNLYSRRNLQTLVEESAEQADQGSCCPTCTRVGTRRHSWRRRQSRQTKEFIFSELLSNLHSRGNEKTLMETKEFIFSELLSNLYSRRNLQTLVEESAEQAQRCDEMLLLRAAVQPALAWEREDTRGGVGRAGRPRSSSSQSCCPTCTRVGTRRHSWRRRQSRQTKEFIFSELLSNLHSRGNEKKLMSWQSRQTKEFIFSELLSNLYSRRNLQILVEESAEQAQRSRQSRHSGVTRCCFSELLSNLHSRGNQKTLLEESAEQGDQGVHLRAAVQPALAWEREDTRGGVGRAGRLRSSSSQNCYPTCTRVGTRRHSWRRRQSRQTKEFIFSELLSNLHSRGNEKTLVEESAEEAQRRDETRVGRRRHSWRSRQSRQNKEFIFSELLSNLYSRGNEKTLLEESAEQADQGVHLLRAAVQPALAIIGDINMNTISTATGARGRLLAAALTFVTCNPQQAEAPLLDL

SEQ ID NO: 924708 - protein, 228 aa, Homo sapiens
MEYVPGCELFSYLRNRGLFYSAEIICAILHSKEIIYRDLKPENILLDRDGHIKLTDFGFAKKLVDRTWTLCGIPEYLAPEVIQSEGHGRAVDWWALSILIFEMLSGFPPFVCVCVCVCVCVCVCDNMFGIYQKILADKIDFPRHLDFHVKDLIKKLLVVDRTRWLGNMKNGANDVKRHRWFRSVDWEAVPQRKLKPPIVPKIAREGDTSNFGTYPENDWDTAATHRPA

SEQ ID NO: 924709 - protein, 150 aa, Homo sapiens
MHPYCSRQHLSTVMLNCLHFICQRHRGERAAHGKGPEAAHCCVWNLVGKGKRKSWSSRLRAGHCAKESGLDPIGDNWMKMEASCQETNSAVVSWQKMVLKMHEPITEKQNVFEEKGRPGSPDVGGTADVWFVRDTGINLLKLSTCQSTFK

SEQ ID NO: 924710 - protein, 142 aa, Homo sapiens
MVSNPYTLLSSIPHSIIHYCVLDLKHAFFTIPLHPSSQPLFTFTWTDPDTHQAQQITWAVLPQSFTDSPHYFSQAQISSLPVTYLSIILIKTHVLSLPIVFLVFSETFISLTVLSLQERIQACPWNATSFSIHTKLYPGHHQ

SEQ ID NO: 924711 - protein, 164 aa, Homo sapiens
MGLFSPALDIGVHQLWALGLEKALVSELWCSHSECPCLLQQIKMHKGGSTEQKWLCTFELAMRITVELQHVPEARVWTRDEMLELMKAHVMMWCPPSWILEEATGSSRKSRMRGSSAFVSCLTRNSASLLLAGLLTLVEPKAPLHVEALQEMADLAVKEALSSW

SEQ ID NO: 924712 - protein, 291 aa, Homo sapiens
MVGANHSVVSEFVFLGLTNSWEIRLLLLVFSSMFYMASMMGNSLILLTVTSDPHLHSPMYFLLANLSFIDLGVSSVTSPKMIYDLFRKHEVISFGGCIAQIFFIHVIGGVEMVLLIAMAFDRYVAICKPLQYLTIMSPRMCMFFLVAAWVTGLIHSVVQLVFVVNLPFCGPNVSDSFYCDLPRFIKLACTDSYRLEFMVTANSGFISLGSFFILIISYVVIILTVLKHSSAGLSKALSTLSAHVSVVVLFFGPLIFVYTWPSPSTHLDKFLAIFDAVLTPVLNPIIYTFRN

SEQ ID NO: 924713 - protein, 140 aa, Homo sapiens
MAPILSSSCNSLGELTSTHMPTCTYKHSGASSLSCDSTSTDSGSKGESPFAQPIVLWDGQVWKLYHRHSHGTGRLREHDSCRQLPGRQPMMVDERDSVALQKAKYRPDGQRSEPTQPRIQCESRQCGVLTPLATGASSFE

SEQ ID NO: 924714 - protein, 140 aa, Homo sapiens
MCVVVLSSSRWTAYELSEASPKLRCSITFVQHKRLKNNCKNGLKKKGCIFSHFLVLTHSRPSVGTSGERCRKAGEPESSGASARLQKQMLVPRLYSQQNCEPNKPLFFINYPVSDIPLQQYKQTNTSGIPSNRKKQENRH

SEQ ID NO: 924715 - protein, 158 aa, Homo sapiens [sequence omitted]

SEQ ID NO: 924716 - protein, 145 aa, Homo sapiens
MFSTIIVVRTHEEPLPSEGSPTVARDAGTEQSVPSPHPLESLDYSGNLLGNIGTISPRQGQLAKSEPFQRGRLQHWEEGREWSGSWQGVGKWFLIISLVLLVLAGCLPWGLGHSGLGTGMGPITAGAGHFREELRGASEEEMGAN

SEQ ID NO: 924717 - protein, 135 aa, Homo sapiens
MVPSQQRGSLPCLRALQVWCTTGAEDRNQPYTISVVEERKVTLREEPLNKKKPGLDRLKNSQSFQVVNDTKIERFIVRKACSREKADEWPCIQQDWVLIPRGSVDTETDVHRGVMIKATRSASPTSQGQKGEARG

SEQ ID NO: 924718 - protein, 153 aa, Homo sapiens
MNRPLIEKMDIKGAGVKSSEGSKEYILEIGGEIFLLLTFWVRISVKSCNTGRVCGFTPKSGRPRTPREKRTLDVTLLGAMDAKGQCVDTPSRPGGGHCALAGFITERGMSPANLTTWKAALRLAYKEARWKHVSSGQDTTAAEEFASEIIWAW

SEQ ID NO: 924719 - protein, 141 aa, Homo sapiens
MLACCGVTCLCPEEPRLQGAPGSFVHFLLQAYGQPFSKEPWFLLLENAIRNQGLGTSYAHSYLGVIDSEPSQLTEQGNAVNQGELLMQCLMSVPKSERTAFIRGQWGPARVNPIVGDQGGVPQCREQLQGNHIPLKSEESW

SEQ ID NO: 924720 - protein, 283 aa, Homo sapiens
MSPVEAAEQQRWLPAPSSGISVPERCRPDASGNAPVYGVRKPLAHPVRRHGIRDSLKEALWLSLGEGVHCAGGNSTRPDWLGSSEPAGGKTKSAGPWRPRPPLSPGAQSQGGQSSVPKPLVGVAEIPAWRPRPVRRDGSGSCLKRHSGHDLPQPLCWLWGIPPGSIPSSLPGAGRGKTADWSCSDGSRPSPGSSVTLGSSRCRSGGDGRPSPGSSVVLGSSRCRRSDGGAIAPPCFSSLSVGRTNCLVIPGDRIWIPRLPVQDLHTVFVLFHGNLASQLFLEP

SEQ ID NO: 924721 - protein, 144 aa, Homo sapiens
MESTHAKRHTIKLNLEMGQFSKKQESPSNPSKDSQSTGASLTRNFLCFNPYQESHFKMKNLLFLPCFCFLRSFLSMKPTRCAQLREPLSVSYRSCCLVHETTHKSQLDLQSQFVEMLFDTNYSDSRELSHILIYLEHEKDASFH

SEQ ID NO: 924722 - protein, 155 aa, Homo sapiens
MTDKLSEADFRRSVITNFSKLKEHVLTHHKEAKNLEKGVDEWLTRINSVGNNLNDLMELKTMVREVRDACTSFNSQFDQVEERISVIEDQINEIKRNDKFREKRVKGNKASKKYGNKQMLRDFVTTRPALQELLKEALNMERNNRYQPLQKHAKP

SEQ ID NO: 924723 - protein, 131 aa, Homo sapiens
MPETCSFLAILWVKRRREELLPFGKPRLGSSQSQGCGFLFGVFGSWCLQASRHHHIPQCQPGKLLTLSLIQLQSRRKLAPTPAPGSACSMAAASMSNCTVAGPHARSHTPCHSTPDSQSPLEAWDPGRYLK

SEQ ID NO: 924724 - protein, 186 aa, Homo sapiens
MLCLRVEVVILFADSSDEQEMTALHMAEDTIAYRTKMKRFYAGIRRAPLLRAPPHLSWLNVKLVKERVWSEHSRPNRRKELPFLFMASEPAEQCEGSWALLSSVSCVHKLCQSAPSSKCLHYPRTIAMDQLPSAASVKMKVQSDQNTSEAPQKERNYILHKYNGDLNVLENELMASAFIVSYSNGP

SEQ ID NO: 924725 - protein, 149 aa, Homo sapiens
MAISQKPWTKTGSSHFKRVWGNIQVTEAAKLKMISGACMVMWRDRERPVWLSVNGEGQRGGQRVGQAVTWGTDICVSVEYISRSGNTGSKGVADTNSNHILLAFTSTVRKWLAENTGISLLRDFYLAIVEYLAHTSPEEYCYRSKLFHS

SEQ ID NO: 924726 - protein, 128 aa, Homo sapiens
MEFHSCCPGWSAMVRSRLTARCNLRLPGSNDSPASASQVAGIIGMSHHARLIFCILVQTGSVTKAVECDSSILSIYSSAVQQMYNIRHIDNFESSHSHILKSKYIIELRSYSLTHDRVQWCNHGLRQP

SEQ ID NO: 924727 - protein, 140 aa, Homo sapiens
MSRSWLLWRKLGLEGTQFPVGKRGKLGFPRGDGIPPRGKLVFSVPNSRASYVKVKNTFGILNLCVWMQNMCEEKCINTPTAATIRPRNRRLPAPRCILPNHKSGVPQRPIQCLLFNACCLLFRHCSRNTAMNKTEKNSSS

SEQ ID NO: 924728 - protein, 160 aa, Homo sapiens
MELWCGRDRNCPRPLMILKLFPELPPSTAAGCAELNMLPYGKSVSSSVTVPTAGGHRQAQEHNTYLISKLNSSLNDMGGLCKQVEFETFSATSLHEELSIDYRRVELLVNTSFPGVSPGKHKRFSAERRKDRHKEEHGMLEDHPNFNLHHYDSDYRGLAA

SEQ ID NO: 924729 - protein, 285 aa, Homo sapiens
MNSTDNGKGVSEKKKEEEEEEKKQQQKREKEKQKQKKQNQKKQKKKKKKKKQEQQQKKQKKNSHYKTADISSLGLAVATVGDGDVVLRPMELCSYGDCGCLCCITQVAREVMESQQRQASIKAHTDRKASLTPTVFSNSTEFISRQLVSRPEILTQASSLLIEKASTAFRLRPSPPLLLRLYLHFPFSPQLPDSALENSHMVKIITNFSWKFPSLCGLSPVPLTTLPKGPSEIKSEMDSLGFLRGWECQRPESPWQTTGVSPRVQKLKNLESDVQGHGASSMAEK

SEQ ID NO: 924730 - protein, 143 aa, Homo sapiens
MIASEVVPIVWMRRLLLLCCLIPTCCGRGLEGGSRIMRASLSSAILMIVNKSHEIRWVYQGFPLFLCSHFLLPLPCKKCLSPPAMDLSPPKPCGTLGSVGVLIDGVLAGLLDFPRFDFSTTLRPHCPRHFFTLGFWEQVVSVT

SEQ ID NO: 924731 - protein, 178 aa, Homo sapiens
MLRTTRVPGGPSLKRAGFFLMQDPSLFHWPTLSTFIIIDRETRPLKTLVDVTLENSNIKDQIRNLQQTYEASMDKLREKQRQLEVESSQEANAEVMREMTKKLYSQYEEKLQEEQRKHSAEKEALLEETNSFLKAIEEANKKMQAAEISLEEKDQRIGELDRLIERMEKVFLQRKEAR

SEQ ID NO: 924732 - protein, 121 aa, Homo sapiens
MEDADGPQELPSTGVSCLPNLRSLPQGKPESRDWLTVLPSSLQDRESPKSTPQKPYCTQVPTSESVFQGTQAKTGMETHSTFWKVEIIRSSCFPPIEMKINAEATEVTLRAAHPLSAPVQS

SEQ ID NO: 924733 - protein, 165 aa, Homo sapiens
MRGGLLPYTCESNVTRFLGMDFSSLLNLNDLHCHPDSEFYVCHFSHFILVKNYCWGASAVIWSLGAAGAGTLAVAMVEGLSLVSWVSAPEKRRATANQNNQPKRNAELQRIEVIRQGLGSCAGGPEGRHQNEQREDTEARLKQEEAGSPAWGYYAPGLIPGPQKL

SEQ ID NO: 924734 - protein, 215 aa, Homo sapiens
MTDHLCTGSPSTPVENHSSCSKAESGPSAAGLLEFAGGPLQTLFAWISAAEAAEQRILLNSKCCCLIVPLEALSQRGTWPSSLPPCGWISDCCASNERGSMGVGPSEPGAGYNLLVCHLLRLLEKLSIRVGVTRFSRCYPSPIPLARKGNSLTPCTSRAPLLQVCWSLLEVHSRPSLPEYHQRRLQNSKDCCLHLPLEASSQRGTCQDASWRSPV

SEQ ID NO: 924735 - protein, 163 aa, Homo sapiens
MRPPRNIGGNHMRSLDFQLTQQQGNILPFLVGRCQRRPGRESRLSPTPTSNEITLTKVSVQTTWRARTLTPVQQLQKVPYLGCQQRPGGGTVRRGPPSYRPQNVRSTDSLNHVPAKATDTQHQPVKAARMSVPCKATERLNSRSESQITALLKITSQVWHCRP

SEQ ID NO: 924736 - protein, 179 aa, Homo sapiens
MGPAEDTEDLPLNTIPNAGMDSSADMDPVCRGETGKSYHLGTLLPTFWLLQLQPWLKGSQVQLRPYLHRVQAISLGSFHVVEHSGTGDEDSWEIIIEELVNSRPQGMGKFLEGHLLFWGVVSHDDFQIIAFWKLTEPTQNCDSWLNWSCGPYPEVDSVHEECFPYPCDFIPNQPAGPIP

SEQ ID NO: 924737 - protein, 140 aa, Homo sapiens
MADTGCPPPSLSVAGQLQTAVLAARISSQWILVCWAPWGRESSLAFVLKLAVKKFSGLTCLLPHLCMVVNHAYQTKSIAIESPRGQDPKSFQIAEHLRFLEEQPGNKVTCNGLRGSFWKEAIKRSLRQRHMSSYPRVHSS

SEQ ID NO: 924738 - protein, 234 aa, Homo sapiens
MPESYTDSVQCSHPISIFTIPIQRIALSSVLHSRCILPTLVPRDVLCAKQLLLGVGIPGHTPLNTFLYQTLWALQRLESYTSLQAQVSMGVMGSIAAMIPEVHSKNKSFLDCEIHPLPVVIGDHEGILSGHSATSLLEFAGGQLQSMFAWVSSAEAAEQQILQNGKCCSLILPLEGSSQRGTWLYEVSDGPYWEVSPTTLAVDWIVGPLWIDVDPSTVQSWRWGLMGGDWIIGA

SEQ ID NO: 924739 - protein, 143 aa, Homo sapiens
MVTIKKQCRYLSLQHTDFNSFGYTPRSGIAGSYNSSIFSFLRHFHTVFQSACTNLQYHQQHVWVHFYPHFHRYFLYYIFLIIANLIVNSAVNPSGPGLFLVGKLLIIATISDPVIGLFRDSSYSWFSLGRVVGKDYESELWLP

SEQ ID NO: 924740 - protein, 139 aa, Homo sapiens
MAIIFKRQKISDAGKDSKKQDIPREDQGPTTKNLDFWPQLITLMVTIIDEDKTAYTPVLNQGCNSEQDSPGPHPHQDCRGGLQECKQLQCGVVRTYDDGVSGEAPTADMGLGDKAGLLWELPLRKCNFDKDLKDRVTKR

SEQ ID NO: 924741 - protein, 170 aa, Homo sapiens
MLGSLELPRDLQNCFEENADSDMDNEFQAEVASYGDEELVENWSKGDSCYAKRLTAFCPCLRNLSKVFKRKQSIKVLKILQLDDEIEKDNPFSGQKFKPAAEICISNEELNINHQDNGKMSSGHVRDLHGYSNHHRPGDLGGKKWFHGPGAGTCSSVQSQGLVPCVPIMA

SEQ ID NO: 924742 - protein, 255 aa, Homo sapiens
MWDKHSDNSRSVLGSYVRDKHSDHNSNVLESWVRNKHSESCSSVLESYVRDKHSDHSRRVLESYVKDKHLDTRCSVVESYVRDTHSEPKSSVVESYVVDKYLDSRSSVLESYMRGKLSEHSSSVLKSYLREKHSDQSTSVLECYVWYNHLDSRSSVLESYVREKIPDPSNIVLESYVREKHSDHSRNILESYVRDKHLDTYHSSNVLEYYVTDKYSDHSWIFLESYVIPLDPRRSVLESYVRDKHSEPKSSVLQF

SEQ ID NO: 924743 - protein, 218 aa, Homo sapiens
MVLESYVRDKYLDPPSSVLESYQRLESYVKDKHSDPRGCVLESYKKDKDSEHNSNDSRSPLKSNVRNKHLYHSRSVLECYVRDKYSETQSSVLESYVRENHFDPCICVLESYMREKHSEPNRRSVLESYVKYKYSDDSRSVLKSYARNKHLDHSSCVWEYYMRDKPSHNSTSVLESYVRFSHSYSRSSVLESYVREKHAEPCSNVLESYVRDSHSHHS

SEQ ID NO: 924744 - protein, 599 aa, Homo sapiens
MELYVREKHSEPSSSVLESYVMDTHGEPSSSVLDSYVKDKHSVPGSSALVSYVRDNHSDTHPSSSVLEAPVRDKHSDPCSSVLESYVREKHSEPITIVLKSYVRENHSDPSSSVLESYHCSGIYVRKIHSEQRTRDLESYVLDKQSDPRSSVMESYQCSGILSEGKHSDPSSSVLESYLRDKHSHHSRMVLESLVRHEHPDHSRSVLESCERVNYSDHSSRVLESYMWDKHSDNSRRVLESYVRKKHSVHSRSALESYVRDNHSDNSWGVLESYVWDKLSEPCSIRVESYQCYGIIPEGQTLRTQQQYSGILSELQTFRLQQECSGILCEGETFRTQQQCSGILHHRRIVLESHIRHKHQDHSRSVLESYVRVNHSDHSRSVLESYVRVNHSDHSSSVLQCSMRDKHSDHSRCALESYVRNKHSDHSSSVLDSHVREKHSEPSSSVLESYVRDSNSDHSLGVLQSYVRDKHSDPLSIFLESYVRKIHSEYSRSVLESYVWDIYSDPRSSVLESYVSYEYLDPHISVLESYWRDKHSDYRRNVLESYVRESNSDPRCNVMESYVKDKHSDPSSSVLESYLRDKHSDHSRNVLESYVRVNH

SEQ ID NO: 924745 - protein, 188 aa, Homo sapiens
MFWNPISALESYVRNKLSDHSRSILESYLWDKHSDHSRNVLESYVRENHADHSRIVLESHVRHKHPDHNRSVLESYVRVNLSEHSSSVLESYRRDKHSDHSKRVLESYVRNKHSGHSSSVLEFYVRDNHSEHSWGVLESYVWDKHSDPRIIVPESYVRKNIQNTEGVFWSPMCMTNTHTLMVVFWNPM

SEQ ID NO: 924746 - protein, 159 aa, Homo sapiens
MASSGPSPPDPFKLFLLPGISKEICGSRVCLLILCSLVPSSNDGINPLLVPGWALELLCLISAVRSSQSVVSYELCGGVMGSRQDDNDNKQARERGNEGLWTTQGYQGICSPEAPPFSSRLAQVSYPLVSPFCTSFMLPRIIPHHYLSNGCVLPGLQIR

SEQ ID NO: 924747 - protein, 159 aa, Homo sapiens
MTRVLISRGPCKDTHRGYHVKMEAGARLRHLQIKEHRELIGERKGTDSPPSELSRGTNPPKTLNVCFLPFEDPAFLHSERGSLLEAENSLHQMLALNLGLPGLQNVYPVALADMWSWVLCLSSSLCLIMTSLIMDTQMLSMEAVLNIGHYTFPIPYKFS

SEQ ID NO: 924748 - protein, 139 aa, Homo sapiens
MYRASRLLADGLYGKFGKLQVNYTRNMCEKERLNNPAKIWYDSNSSSIYNELFGNLGDDPWVLMRVSLGNPGSKTSPRHSEQPAVESSMVHSHTTCLLEWFESRCSELCSVYQQLFINSSRGYGHSGFPYFRYIRRKYL

SEQ ID NO: 924749 - protein, 137 aa, Homo sapiens
MPLERSMAQNVPWGIWLILSKNPKEYSEQCSFQDRHANGCRSDTAIIVTSQSLQTAGTCFSCFTFTFSMFSNSATPEIARSTLSPSQPSQCEGDEDEDLYNDPLLFNKYGNSPQISAFFSFFSACMWKFFCFLQNLL

SEQ ID NO: 924750 - protein, 139 aa, Homo sapiens
MGKLQGRTRMKMSRVEMSFTDVFSANVKTELENKILSGIQRAASSALGFRYQRAPGLNGQDTVKWTNQHTVKWTNQQDMGRKNKGIRAAYPSQQRQTAQQHENGLITGGMADWVVIHSISFNGQVSNFPELPPPQSVGP

SEQ ID NO: 924751 - protein, 2269 aa, Homo sapiens
MEWFVMEWTQMEWTVTKWNGIGIGTECNGMEWNGLEWNRVEWNGVEWNVIKWNGIKWNGIELNIKEQNGMGCYRRISNGMEWSGIDLNGMDWNGMESNGMDWNGYGMISNGMDSNGMDLSGMNSNGMETNGMELNGIQWNGIGWNGMERNVKWIRMEWTGVKWIRMEWTGVEWTRMERKRVEWNGMEWNGLKWIRNEKNVMESDGMELNVVESSRTELNGMASNGMETKGMELNGLKCYGIKGNGLKTDSNVMDCYVIDSNGMESNGMQSNGMECNAMEWNRMECSGREWSGIKWNGMEWNGIERNGIESNGMESNGMDWNGMDSKGIEWNNMECIAMQWIRMEWNRMEWIGMEWTQMERTITKWNGIGIRTECNGMEWNGLEWNRVEWNGVEWNVIKWNGMKWNGIELNCKEQNGMGCYRKISNGMEWSGMDLNGMDWNGMDSNGMDWKWNGIVWKGMEWNGVEWNRIECNGIEWNGMDSNGMDLNGIEWNGLAPNGMEWKGMELKWIRMEWTGVKWIRMEWTGVEWTRMERKRVEWNGMEWNGLKWIRNEKNVMESDGMELNYGMESNGMESNGLERNRMERNRIDSNVMDCYVIDWNGMESNGMQSTGMECNAMEWNRMECSGREWSGIKWNGMEWNGIERNGIEMEWNAVDTNGMDWNGMDTNGMDWSGMNTNGMEANGMDWNGMEWKGIEWNGIRIRTECNGMEWNGLEWNRVEWNGVEWNVIKWNGIKWNGIELNCKEQNGMGCYRKISNGMEWSGMDLNGMDWNGMDSNGMDWSGNGIEWTVKEYNGMECNGKISNGMEWNGMEWNTLEWNALKRNGLQWNGMECNEMERNRMEWNPNLFQYDGIQWNVQKWNGIKGNGIDWNRPELNGLEQNYGMESNGMESNGLERNRMERNRIDSNVMDCYVIDWNGMESNGMQSNGMECNAMEWNRMECSGREWSGIKWNGMEWNGIERNGMESNGIQWKGMEWNQNGMEWNAIIWNGVEWNAVDTNGMDWNGMDTNGMDWSGVDTNGMEAKGMEWNEMEWKGIEWNGICWSRMEWNGDYGMESNGVKWNGMNVKGIDWNKMKSNSRNHTEQKEMERNGMHSNGKESNGRESNGMKWNGMELNGIERNRMEWINGMDSNDMDSNGIEMIGVTSNGMDGNGIEWNGPKLASNGMESNGMDRNGLDWNKMDSNVKHCNAMDSNGMESNGMEWNGMRRNALDWNRTRMQWIAMDSNGMQWNGMEWNGLEWNRVEWNGVEWNVIKWNVIKWNGIELNCKEQNGMGCYRKISNGMEWSGMDLNGMDWNGMDSNGMDWSGNGIEWTVKEYNGMECNGKISNGMEWNGMEWNGMEWNGMEYTGMECTEVEWSPNGMQSNGMECNAMEWNRMECSGREWSGIKWNGMEWNGIERNGMESNGIQWKGWSGIKWNGMEWNGIERNGMESNGMDWNGMDSNGIEWKNMECGMESSGVKWNGMNVKGIDWNKMKSNSRNHTEQKEIERNGMHSNGKESNGRESNGMKWNGMEVNGIERNRMEWINGKEWNGTHWIRVQWNQLEWNRMEWIGVEWTQMEWTGTKWNGIGIRTECNGMEWNGLEWNRVEWNGVEWNVIKWNGIKWNGIELNCKEQNGMGCYRKISNGMEWSGMDLNGMDWNGMDSNGMDWSGGMEWNGVEWNRIEYNGIEWNGMDSNGMELNGIEWNGMAPNGMEWKGMEYIEWNGMEWNGMEWNGIEWNGMEWNTLEWNALKWNGLQGNGMECNEMERNRMEWNPMELKGKECRRMEKNQIEWHRTEWDGMEKTQLMEWTVMGRYRMGWKEMDSIGMDWNGMDSNGMDLSGMNSNGMETNGMEWNAMEWNGMEYNGMESDGTEWKAMYAMECNGIIWNGVEWNAVDTNGMDWNGMDTNGMDWSGMDTNGMEANGMEWNEMEWKGIEWNGIKSNGMASNGMDSNGMCSNGMESNGLISNGMEWKEMEWNGIEPNVMDLNGMESYRMDSKAMNGMGCYRKISNGMEWSGMDLNGMDWNGMDSNGMAWSGVDSNGMETNGTNGIEWTVKEYNGMECNGKISNGMEWNGMEWNGMEWNALNWNGLQWNGMECNEMERNRMEWNPMELNGKEWRRMEKNQIEWHRTEWDGMEYTQIMEWSVMGRYRMEWKAMDSVGMDWNGMDSNGMDLSGMNSNGMETIGMEWKAIGMEWNGIDRNGMESNGMDWNGIDSNGIEWNNMEWYRMELEWNAVDTNGMDWNGMDTNGMDWSGMDTNGMEANGMEWNEMEWKGIEWNGISWSRMEWNGD

SEQ ID NO: 924752 - protein, 199 aa, Homo sapiens
MFSSRGAVLEGRTPAALTLLPLASHSHAVALTRDSERLLEVRKRINVLPLGSGAIAGNPLGVDRELLRAELNFGAITLNSMDATSERDFVAEFLFWASLCMTHLSRMAEDLILYCTKEFSFVQLSDAYSQGSSPFSASTSVPSTGSSLMPQKKNPDSLELIRSKAGRVFGRCAGLLMTLKGLPSTYNKDLQVRGRGRPG

SEQ ID NO: 924753 - protein, 142 aa, Homo sapiens
MLAPGFLHSLQSHEDLSYLLESDTNITTADKIQIFTGTLEERKYIVCGFPKNGVRSVTVWKDSFVEEYVEAAREDIAASHSQLSEDHGEHQLREFLVSNEKYSKAFPSHHYSTKENVEASQSLQRALSLIKAKARMPSIYFR

SEQ ID NO: 924754 - protein, 150 aa, Homo sapiens
MGSTSSGLNGLYQCHPDISPGNSAFSGLSVSTPFPTETTLVSQQHLISVFIGAPADVREDLFQFYSRLKSPHLPETKVLCSKGKRRPVLQKAHKGVAYWKLRLGALSDFLRSWEEVYYGNKEGIIEQMTVNFISLLIIFDCLLFTKNWGG

SEQ ID NO: 924755 - protein, 139 aa, Homo sapiens
MVVRILLPQGWAWRVSVEHALIILRLQPHLGPWRKGLSDGQVIPKGSMAAAVRSAGFIPIDLAAKKTVRPRGIKTVYDSHRQQSHEQCGVRSLGPYSTGRLKQKGQVMAGLSVYLFLDDVFVLLVSYLRNHCLTQGHED

SEQ ID NO: 924756 - protein, 147 aa, Homo sapiens
MTIKQKVTLIFIFLLCGTSCCIEAINHNIVSFIKLQFYVVYVCLSCWRNFYGPGAVAHALTFDQRTVVPVDVWIPVGRGCEVNSHIEVRGTIDGQRSDTAAGQQRLKRRCLDHGPGGGSERPLRASLGVSFSHSPYSAPLVPDQSLL

SEQ ID NO: 924757 - protein, 174 aa, Homo sapiens
MNGKDKVGILQHSDGTALKQLQPPPRGPREHTVYAADCSDGVLLELRKYLPKYGICYDIQNQHYGRSLTKGTTKDGVSGFFHNGYCLRKDAVAASIQKIEKILQWFENQKQLNFYASSLLLVYESSSQPTTTKLNDRTLAEKFLSKGQLSDTEVLEYNNNFHVLSSTVNGKIEA

SEQ ID NO: 924758 - protein, 211 aa, Homo sapiens
MRSHSATQVGVQCCHLGSLQVPPPRIPSMLLRWPEISTARGAYTGLRRGLWTTGLALPTRPSRQRLAAATGPGSQACRRSVLSPQLARTCRTSFHLECRGLNKEDAAAPENGDASNWRAPRGVTSFAQGVSRSEPAGSVTALSRSCHPQLSEWGVSQLLWSHCPQLTLQRSLPWRAGIPSANPRPQTLKGTYRILDNTQWNKWRDRNKWLL

SEQ ID NO: 924759 - protein, 134 aa, Homo sapiens
MFPFLCPCVLIVQFPPMSESIRCLVHMILLKVCEGTKTTGPFAAGLLEFAGGPLQTLFAWVSPVETQLEMQKSPTFWVDLALELHTGAGSLKKWLISKCGHGECKIVLEHLAVPESETVLKREWGHLKKAQKPT

SEQ ID NO: 924760 - protein, 231 aa, Homo sapiens
MRIYLIPDDLRWSSFIPKPYPFRPVCGKIVFHGIGPWCQKESSAAKLILKASFLLLYFSKNFIEQDCCQKGLFALTMAVAVVMRPFNGISESSLTLSCQGFWRLSSLIFKGIFTKNFHPKFWNPCKHLIYFRPLLWDCRQKCDKGLKAGKQQRNINNNRGNYEAFAYGAIWFDLRGPPYLDIEIFCIDEKKNGKMQPSALLAPSPGKNMSVSLGTAEAEGRICYQLGSLSH

SEQ ID NO: 924761 - protein, 141 aa, Homo sapiens
MKVCSFTPEVSKTVNPPEGRNSGHVGTSEGTNSRHTIFRNCNTHCEDISTGSPEPQSKHNIHCEEKALPTLLSQIYKALHTPHHSPTLPCPTLLQPHWPPDHSWSTRCPSTVGPVPWLPTLPVTSFPRYMMVNCFIFQLLV

SEQ ID NO: 924762 - protein, 151 aa, Homo sapiens
MHIPVALYRQQTLGIFFRMLFAVVGHCRQGSVRLRDFTLHFQVAPPEFCLTEQTSYVKNMKNRTCTWEFLYITSLLAVQCIMFLRFLYIVMHIDQKPRQTTQNKPGDESTPRKHKDATELLSCFKCANFSLEKSVIFEKGPMLLEEEALPC

SEQ ID NO: 924763 - protein, 137 aa, Homo sapiens
MHMVHKGTSGPRGHKHLFSLSSLGALHSIQQNLFWTVFHPTKRSYSSGSQESRCKFWPVRFKCKWMQLAEMFLERRKYDIFHYFIHTFDQNSNEMAGLLAATLDYEEEVFYQGISLHSTWLQSHFQVLDSSALSRLT

SEQ ID NO: 924764 - protein, 346 aa, Homo sapiens
MALLAQEADKLTLGQNLTVVTLMNTKGHHWLTNARLIKYQSLLCENPCITIEICNTLNPATLLPVSESLVEHNCVEVLDSVYSSRPDIRDQPWESADWELYVDGSSFINPQGERCAGYAVVTLDAIIEAKLFPQGTSAQKAELIALTRALEFSEGKTVNIYTDTRCAFLTLQVHGALYKEKGLLNSGGKDIKYQQEILQLLEAVWKPQKDFYISHFSVLAKAVAQRCVTCQQHNARQGTSVLPGIRAYGAAPFEDLQVDFTEMPKCGGDCVWIKDWNVAPLQPWWERPQTVILTTLMAVKVEGIPAWIHHSRVKPAAAETWEAKPSLDNPCKVTLRRRQALLQSHL

SEQ ID NO: 924765 - protein, 159 aa, Homo sapiens
MSVTSVAFQWVRCTVMAEGQPEIVLMSQCGTEDLIAARPVKASTWTDNWLPCVLSCLGFWFLLIFLGEFQIEIVWSEETRNCMNVMICVKIIAVNEPPYCFHKWLQQSAFPPTGYRRSPFFTPSPTLAISCLFDTCNSHSNKYKVIYHVVLICVALMMI

SEQ ID NO: 924766 - protein, 163 aa, Homo sapiens
MDIETQRPSKTPHLPFASESTKHPCLPLFDIHPLSPYRSENTSWSPISETYSRTHSEVLSLKRNKEEEEEEEKEDEEEEEEEEEEEEEEEEEEGEGEGEGEGEGEGEGEGGGGDGGGGGRKKEERGRGGGGRKKEERGRGGGKRSKKEGGGGRKRKKEGRRKE

SEQ ID NO: 924767 - protein, 142 aa, Homo sapiens
MSWGLGNHLKFLAMLAQETQSVGEAVLDSDENVGTSRASVKITALMKQMKQAIKDVRHKSCRPSGVIIHLFMSLPVFTEQVRKRNCYCLSGCVIATWVGLDNNSERCVKKIAGPLILKLPNQNTKSCEHTEYLSMNKSEGGG

SEQ ID NO: 924768 - protein, 158 aa, Homo sapiens
MWQTSEATFSCSFIHLCTYQAAGTIGTCHHIQLIKTRDLVSTKETMFPSLAYFTLRTCSFCPLWLRARTLSLKKQNKTKQNTATRTIKLLIKAEDRMAYCLGHSKQTSHHVYKTKRSAQLVTVSPADYGKGSYPFISVQSSVKVSRNQLNLSQSTPST

SEQ ID NO: 924769 - protein, 134 aa, Homo sapiens
MYYMQHYYFTRNQTVITVPICEHKLQSAHIFWTFVIGPSGCIHRHHLTWQCNVKSGVGWGLNGLCHTMIQNVPTLGSEGFGSHEELRNQQFCLERVYSPWIWWIWRFCMVILCLDKCLNMKSRENHYVFLCITL

SEQ ID NO: 924770 - protein, 140 aa, Homo sapiens
MYHNTVIRPGQLASWLAFPAQQVWTAGPLQILSSSGPQMPIFFNKVRLSAQQVLPAPWHVVSLLLVFSRAEVPHWSLSFISSTVGNFYSLALSCQQYSNSANFPNIQETVATPSTSRSVISALVMGGLASKIIPSLCTQT

SEQ ID NO: 924771 - protein, 180 aa, Homo sapiens
MNDIIKFKRDSMVSVIIILLKHLNKKFEVEEVKYHMKRVVKKKFMREYILLCAGSFPKLISGFVNHGTIDILDQIILCCMACSVFCQIFGIIPGLNLPDANSTFSLKTIEIFQDVAKCPSGLKVAPNSNHCFEACHHREGCLRLNVCLRLIYTPKSNSTVTLISRKAGTLTSYYVNFCLC

SEQ ID NO: 924772 - protein, 225 aa, Homo sapiens
MLPVGLSDTEPLLEPAPGSSQCALIICFLSASTDNENLSKAGPCLHCPVVSRRKMFGDRQGPTHWANADVGPAGFWGWSRSRELLLPVLLQLLLPPLLLWLSLPPLPPQLSLHHRYRGCHCHHCYCSCHYHHCHHSCHSTTATAATAAVTTTTATAAVTATTATTAVTATTATAAVTTTTAPMASTTTTTATEAITTTTATAVTAAITLAVAMVTVVLGRGVLGI

SEQ ID NO: 924773 - protein, 151 aa, Homo sapiens
MQRGYWGCMGTLTKVLSLEDCPGKLEKEATFLPSCVWCEERCLTSKCLHGEDKLTGSRKKHNCKNNNGEKAGSKYFESQSQERASRLSVAPGKLSHDAVGVGSHLVCTVHMAMSCLQRQKASYCVGGTQRVGGVAPQSKEKALTRWRADFR

SEQ ID NO: 924774 - protein, 135 aa, Homo sapiens
MRKAAGEGEDAPIVFVCDNSSDSPSFPQPPTPVSLFLAQVDGCQVTCSQALQYQAFPWAKACMWYKTANAVNYDNALGPWKDKSSCPDFKEIPERHSCCYISRTPASTNQENGFQVQTVSPSSPLTLKSSDCSKL

SEQ ID NO: 924775 - protein, 143 aa, Homo sapiens [sequence omitted]

SEQ ID NO: 924776 - protein, 161 aa, Homo sapiens
MVSCLDFNHSSRCVVISCRFNFIDNKRPPAEDNSSGKKQSHLMGQCEPEEYGDLGLWALMKLETNSQQTNTETENQTLHVLTRKWELNNENTWTQGGEHHTLGPVVGKQAAQPEVSSESITFWAPPPVRSAAALDSHRIHRIPSPTASVSCTCKESRLRAP

SEQ ID NO: 924777 - protein, 178 aa, Homo sapiens
MEANASLVIAPECQSHLMCVFRPRCKEETQSLRSLHTSLHWGSFGVMIPQEVNTLDLERGALVKLNHDGTLIDLGHPASRTVRSKFLLLVSHLVYGTLLEQPKLRHMLTDLGLSNTKTRFKARSGVGTKTAFLSSSQLIQLLLVWPPLLGSSGVYAADVSKVSVVLSAAKDESFLQIK

SEQ ID NO: 924778 - protein, 159 aa, Homo sapiens [sequence omitted]

SEQ ID NO: 924779 - protein, 155 aa, Homo sapiens
MECSLRLCRWNRHGRRIYYVGIAELSTWLGGLTIMAEGKEDQVISYMDGRRSKESLCWATSSLKPSDLGRRIHYHENNTGKTRPHNSLISHQVPPTTCGNYGSYKMRFQWGHRVKPYHSAPGRFQISYLHISKPIMPCNSNFSAAPHSAGTNLLY

SEQ ID NO: 924780 - protein, 213 aa, Homo sapiens
MKRILDKFHWGTFTEYLTSTLLRLSKTSLKNSYSPGELKERHHNQMLCGILDGILEQKKGIRVIERSWRHHIIQLQTILQGYSKQTACYWHKNRHIDQKNRKENPEIKPLAYNHLIFNKVNTLRARAEADFIVVDKFFDVLLDAVCQYFIEDIRFNSGPFSPSLLQFAEISPQTLFAWVSPVEAAEQQRLLPAPSSGSFIPEGHWPDARGSPV

SEQ ID NO: 924781 - protein, 136 aa, Homo sapiens
MVNEEFELMILKIISSVLVSQGCHNKTPQTGGFQNRNLFSHSSGGLFSHWLSLHQGSPALRPWTGTSLWRVRNWAAQQEAPASCDQPIRTQGPYPCLRDSYLFAWKLSEQRIRTNLAGSWALQHQELDRCTAITFT

SEQ ID NO: 924782 - protein, 199 aa, Homo sapiens
MLAKIWVHDPGRQHEEKDLTAIAGFKDGRDPWAKECNQLLEAGKGVKMDSPTGPSESHAAMPTPSFQPNESHFKILSVLSGNLTEDVPHVKNKDGTMSRKEEIRHESSKKNHWAYTSWMELEAIILSEVTQEWKTKNRYVLTYKWELSYEYTNKKFGVQGVVGSGTADQQVELFSLIIYLPQYHQQQPFPPPLYREFIG

SEQ ID NO: 924783 - protein, 135 aa, Homo sapiens
MHFESLSAPVKKPIHRRDHLWRPLWSHCVQSYEEAIAFSSSSILTQHQKDIKSFLNAFRENPGLAHGLGGEAQKADDKQVGKAAPSLQSCITYAILPLESRSIPSNSMEIIPSNSVESTFHYGHVPALPNNVSNK

SEQ ID NO: 924784 - protein, 179 aa, Homo sapiens
MTPPFFNSLIATSPIEGNPWPYHVLSFAGITSMVGLISSDWCPQKKRRHRYKGKKVLYKQKQRLNFCYHKPRNAGGLPDTERQEESVLGTSEEQGLADALISVFWPPELYIIAVLKAQRENKHFSEDIGGGEATTSSMRAEGLLSIFPMQKNIVFEKKMIECIIMQLFNTWDLRVLKVK

SEQ ID NO: 924785 - protein, 140 aa, Homo sapiens
MRASSFGACGSWDLQYPFPWFSGLQSWAASYISSPPKFSSFGLGLDYTTGFSGFPACGQHIMEVLGLPLNANIKKLDRSQINTLESQLRELENQEQTNHKARRRQEITKIRVELKEMEAQKNSSKKSMNPGDGFVNKIIK

SEQ ID NO: 924786 - protein, 165 aa, Homo sapiens
MGTHLLHQHDPDVRHGIKDDHFGPLRFGCPAGFLTCMGPVDTLFWLIFPIWNGCIYPMPVPPLYLGKFYFIIEVVARKTLSMAVLSGKTRLYDNGKAKDPKYVDEWAQQNACGLGSVTDPAERIADARHYALLYKILSFAVETWIPLLAFSEKWVPGRPVFSMCI

SEQ ID NO: 924787 - protein, 168 aa, Homo sapiens
MTMYTISQQIVTFTGASKLTPSAFVQFFKIMATSRQKDGKEKQHNDNLHILWTTEVPFSISLDKERLVQPCVFTMALEALHNDDKNCDGEKITIIFNEQDDSEYEGTPKETPLLHFTMLYVFFRAGPQVLVRKYIRTSSPTLCCPVPLHSDRLHNQKVSEFDKNVLFS

SEQ ID NO: 924788 - protein, 172 aa, Homo sapiens
MEELKQVIPIHPPEFLDKIKRSFLQSTKEMHLSKREKRSGSLQMFKVREETSEEKGSRSMWCLGKQLRTMFNEEGAINCVKHNLIDDPGDSQMKSGRYPQVISILVRKECKKILSLMFNKEEQSWAKLSKRLPPSPATRLWSSTFAMSPDIFQLQQLSVSHSRTSYAVPFTF

SEQ ID NO: 924789 - protein, 137 aa, Homo sapiens
MVVTSFLRNLHSDSSCTYLHPHQECIGVPFCLHPCQHLLFSFLFIIAILTEAKHRVCAIAGGKATSHSPTQVTLRLWKARALDLFLPGAVFLVYCTVISLGSSISCGLEYWGPHSTFRSSQYCEDMEAVLSRQDAVP

SEQ ID NO: 924790 - protein, 141 aa, Homo sapiens
MKVKRMHSQAALVLLYTEEPKKGREEEPSPTLPPPPSPSALPLLGKDTKEKMEISPEPPPPINWKKDKGYTTAMGPCLRQAALEGELLACLVMQDQQGNQKVLPQGMLNSPTMCQYHIQALLPSRKEFHNCKIIHFMVIFY

SEQ ID NO: 924791 - protein, 136 aa, Homo sapiens
MAAFFWSCLQISLQAEQEQPLVGARTSSTISTPLSLNAITDGQRDAKCRVSLPQVQNQLKDEYMKKLTDIKLLALLLIIYVHRAVKTTQDGNVKGNIGKRWKNLYANISSAEYNNLLRKHHGLDLNHDEDESEKKI

SEQ ID NO: 924792 - protein, 197 aa, Homo sapiens [sequence omitted]

SEQ ID NO: 924793 - protein, 130 aa, Homo sapiens
MPALKVDKSGAISCKATGAELPKAIGLHLLHQCDLDVKHGVKGGHFGALRFDCSAGFQICMGPVAPLFGPISFIWNACIYPIPVPSFYLVKDSDETISHPTLWSYLLRAHRDQLLEEYTLVEFEEGSIII

SEQ ID NO: 924794 - protein, 146 aa, Homo sapiens
MCQIPCELVLSHTADKDIPKSSLNKGGSLLTSPLDIAQVGTLCRGSNPTIPLCTAPVEVLHEGSVPTAGFFLDIQAFPYILGNIGCTEQQGSAPGPQNHSVLLGLQACDGEGCHEEEVLTLLVVPYEGWSSLNCFFNQRYTKCNIR

SEQ ID NO: 924795 - protein, 172 aa, Homo sapiens
MLINSGLDKENVIHILHGIQCGHKMNEIICSNIDGAKAPDWGCCFSFRDALPREQESKEAVWQQGISRAAVSSVQSKLPRSLVYTASGKLLTQASVMTDTPSPTKLEHPRLTSDSYAGSQNFKPVDISFLGSMVVGSTELDHLAPCLQPPFQRNEKFYLTDVPVTIGVGGGA

SEQ ID NO: 924796 - protein, 153 aa, Homo sapiens
MSCFPFTFYHNYKFPEASPAMLNFSIVIQNERIPPCYWTEVPTETSGLYMGSMMVKALFILSVDESPDSLPSSDTAHVERDKGENRFKGKLEANGSVMKTDSKVKEKMIMEEPGGSDVNFRLNDKDFESIHLWVINLVALPPREPSCLPMIKG

SEQ ID NO: 924797 - protein, 183 aa, Homo sapiens
MGKGTTGHRAKRVNQVLLERDPFPVLMVNTKSQLDWIEGCKVLTLDVNSLDLGSADMIGSLIPVSAFRGWAFTVDIYGPKPKNQKSDVQGQEERKKTSITGERRKPEDSASQLTPPSSLLYSSLMSKGRKRERRHPSGEKDGSRKTQQASLSHLLPCFIVAVLAVDWMVSTHIKDECLSLPVH

SEQ ID NO: 924798 - protein, 146 aa, Homo sapiens
MVPASAFGEGLKLLPLMVERDEAHLIMVDKLFDVLLDSQTGPSAAGLLEFARGTLQTLFAWVSAAVAAEQQILVNHRCCCLMVSLEVLSQRSTQLYLKLRAGRTTTLFKAVREGHLSLQRLLLSFCLSVPCPQRWSLQRQAGLLEL

SEQ ID NO: 924799 - protein, 136 aa, Homo sapiens
MYYNHLPEFWFLLRCFFFVWIVVKFSVPVGRTISGEKEEKMKKNLKLSRNLLNRCDQKVDSDMDNEVQAEEVSDVNEKPTGHWSKGHICYVLAKSLAALCSCSSNLGTMKLKEMFKSSLMERTCLVSDILDFGLLS

SEQ ID NO: 924800 - protein, 149 aa, Homo sapiens
MGETAPLIQIISHCVLLTTCGNYGSTIQDEIQSNGIIVSPGRNILLLGAEISSQQENKVMKARSKSFHTTERIPGESPTHPTSVCVRCYCADEAAGSGACLGVPKTDSGARLHNGKVGWSHWEFMPCAGRRSLASAAPPPCTRWPGIQS

SEQ ID NO: 924801 - protein, 137 aa, Homo sapiens
MSELLKIYIFFEIYKDFSSSSRRPIPLAMFSCSGIGEEKYIVRENQRRTFFQVNAMKELFLVSSRLHRQCQWEDLGLKGCCSDSFIPWGAPWIWVSRLFLSESPTAVIVISLLDLAIQWSYHAPGRYWRVSTKSPVM

SEQ ID NO: 924802 - protein, 129 aa, Homo sapiens
MTIFTSPASPSKEFYLSNSEKERYGKEFSQERQQEILRRAARALPICTTPVSKTIRYCEKCQLIKPDRAHHCSTCDSCILKMDHHCPWVNNCVGFSNYKFFLLFLLYSLLYCLFVAAYSFRVLYKILDE

SEQ ID NO: 924803 - protein, 160 aa, Homo sapiens
MPSQSPPTCNSFSYPFIVFMTLNRLKISAQYTEDNRRLDKVRIKMKYNITMCYRQKFDLVEGDWKNLHGNGDIPNDCSIMCSLQKKIACEAIRSRAFLYHGNEKNGKKWFESGLDTIERICRNPSSLNIHTEKYCIGFLKMEGETTKLYSLDDINYRVKC

SEQ ID NO: 924804 - protein, 166 aa, Homo sapiens
MSLLIFLPNGYFHFREKGIKVSNYVCYTGIHVPWWFAAPINLSSTLGITPNAIPPLDPTPQQAPVCDVPLPVSMCSHCSTPTYDFPSNSQDPLLQVCWSLLGVHSRPSLPGYHQQRLQNSKDCCLVLPLEALFQRGTCQMPARALLYEVSIDPCWIVFQMALLSSH

SEQ ID NO: 924805 - protein, 134 aa, Homo sapiens
MLHLPLFHSSLIAVTSLTDFCCYLIFFEKHAYKSHTLTCKDIKESRPSSADVVLTEEIGQLTLAKDPSSDPIGAAPWLWQKPNPFMHLVTSMQYANLTGDSETEHCPVVNPSDQGSRVNFMCSGTKRIHAGLSP

SEQ ID NO: 924806 - protein, 174 aa, Homo sapiens
MAEDEAVSASCDQNGRKTESRGRRCHTLETTRSHKNAIKGKALKWEICPHDPGDLSSDYPWVGLATVTVRDGGVVLEPMGFRGKCGCLCRQGSGGKPVAVGLTQLPHSWCGRHCPKNLPHFQGTRIAGEISIAETSGDGLQQRRRTRAISISHKRVPPWSLVTCSAQDASGLHH

SEQ ID NO: 924807 - protein, 181 aa, Homo sapiens
MEDSMDMDISELKANKDDHFKVDNDENEHQLSLRTVSLAAGAKDELHVVEAEAMNYEGIPIKVTLTTLTMPVHPMVSLGGFEITPPVLLRLKWGSGPVHISGQHLVAGEENAESEDEEEEDLKLLSISGKPSPPGGGSKFPQKKVKLASDEDDDEADDDEDDGDDFDDEETEEKAPVKKSI

SEQ ID NO: 924808 - protein, 144 aa, Homo sapiens
MPQHLLSQNKCHGLGKAGFLFQGVTSMDEQRLPHAQHLVTSLLSVHVDCSRYSVIQQPVEESYFDGNFEQHCIIAFHFAEDLSAGHTRACPHGIDMQRCDLQPRRLGPVLSPPSVLPSCGDSSRLSRMKRPCLDCTLLPTTRTF

SEQ ID NO: 924809 - protein, 145 aa, Homo sapiens
MAFLLTRLVLLFPSSLFHCLGATSWLSWPLPTCEGSLDSALKGIRRFSDPGAQRLEQLCQGTIWAQRHESIWKYTKAISVDVIQTVSNSSIPANAVFILPSPGLMVIKSPQWDKYCISCENHWITKMLAAPWTSRSLSLVRKCAI

SEQ ID NO: 924810 - protein, 147 aa, Homo sapiens
MAKIHVCLSECYKVPSQINNSNKVFGNTERSRNFDVVIMKMHPKTSEKTVACMKELLKSMEEDVERSEPDNKGPDGACDSRWHLQERLSGIELHERPGRLLEFLLLIKPILEKEEEEKKPKHFYRLVEKQKAAAESSQGPRPMRTST

SEQ ID NO: 924811 - protein, 164 aa, Homo sapiens
MGLGTVEQGVALVGEARAAQEPMERVGGSGMAGCRSRALPRGKAAKARTPSTAAGPGAKSLIARGQQGWPAALSAGPAKPMPTRNSSWPASAAHSPGSRWRLSLHTSLQAEGVGSGLGQPRKGLPQRSGGLEGSSSAAKVGAHAEEAPRASEGCEDCQHAVTSQ

SEQ ID NO: 924812 - protein, 125 aa, Homo sapiens
MQRINKVNGVALEVVEGDDDLRVSGFPIAVDREKLNQLKKGTMEENWVWWGEDHMDNFGDVELKRTLDIEEMLSTQQEKGESWREVEGFSPKILGDDVASAVAYSAQARNCPLQLKHWNRNEEDS

SEQ ID NO: 924813 - protein, 164 aa, Homo sapiens
MDRHQWPSKGLGWGNGGSGLGCRGRAELLPKLNAVSPTQVRAGSAYALQSRQDSPALLTPRRNPTAQPPAPPCPRDRPSWSHKPSIPLGIFNPKDPGGITRGDPTERSVRAPISRIVFLALSKLLSPAIREIRHLFLTLHHHVEIIENGNPGGVSGRARLCRGA

SEQ ID NO: 924814 - protein, 159 aa, Homo sapiens
MQIASIHFFSIHAQFGGIKDIHVVVQPSLLSRSRTFSSWKTKTMCPLNPFPLLPSSSPSPPPPTVSLNLTTLGTSFWWSSIRGVAIPTACASVSLSQRRFISQIQMSLSCCRRTEPPSPKVQAGALTAPETLSVWRKWEGGSCTGGEPSEVKENSIHAA

SEQ ID NO: 924815 - protein, 139 aa, Homo sapiens
MPDLMILRQCCKTERADFLKHPRTLEHAGKSLNWNSSLESRLESRSTRVSKGAVIVCSCWDLHLHPEHPDNFCQTVQLSPTMYECGPRCPVPRKSFLSPLVNQTLLSSGMYSAFYVPGYGVLVNVPHELEKDAYSAVVG

SEQ ID NO: 924816 - protein, 143 aa, Homo sapiens
MRVSCYTPGEQAVKLPRAFSMGATGIQQVETRDAAKYPPMHRTAPPTNKKLSSPQSAEISLTGGCTKAQLFSVNGCQLPTTSHTDGSHLNVCEISCPSFSIPSRHPLPMTDGYRDTKAQTPIFQEEKTLWWCHLCSRATAGSS

SEQ ID NO: 924817 - protein, 186 aa, Homo sapiens
MTSSRINLIPSLIPRASSGVTGLLCCSSGVAVLRNGPETVTGHSAERIGLTLKPVYEELELRERERERSQGLIVSLRAFSSWLLGTAPANWSWLLLLVTQRGLYDMPGTQALLTQWASCHQHHCAAPSSSWVLTDTALTIPRAGLNLAFTLTKLELSLKSSEHQGGKVISAWFSCALDWPFPLFPA

SEQ ID NO: 924818 - protein, 162 aa, Homo sapiens
MTLSLPYNPYQSCCDEKIIESKEHIFLLHFTGKLLHSLFPVCKRIVYTAAAAEDRDTPTFPNLPLKLRFFQMQILRKGFMRGLLIWEVQTLKAGAVYQGLEMSYVFKDIGSLPVLRAKQNTTALSSGGGFRVSLCPTYKSRYVADQSAASSTTISTLPLLPC

SEQ ID NO: 924819 - protein, 142 aa, Homo sapiens
MPPDLFCLLDIVPQLQVCWSLLEVHSRPCLPGYHQWSLQNSKYCCLILPLEALSQRGTCQMPARALLYEVSVGPYWEVSPSQATRGDALPTEVESREAVGLAELRWAPPSSKFLAALFTLLSQLTLARKRKSPDPLHFPGLL

SEQ ID NO: 924820 - protein, 156 aa, Homo sapiens
MQGRLSLLKLCPQPPLPSGALSQGDGGFILRQCPTLLRLALHGLHLLSDQSQDEADLIVMDKLSDVLLDLQSSSTVLGEPSLSGSTALFRAGRQKCLSLVKLRPQPPLPPGTLSQGDGSFIYKLLTGAAAFLSEMPFPVKRNLERKSGHSCFAVLC

SEQ ID NO: 924821 - protein, 160 aa, Homo sapiens
MGYSVHCLGHQGPALWLGVQRVMPGPAPTLPCPSGGGRQGHRVGPLRMKGSSSSEQEQEQEQVTQTQVREVGRRQEAGPHRSRASRPWGTSPIVPDFTYRTKGRITVLRISRWCPWSLEAQVGGPLRAWGPAGVPRHTPVQRVEEVPVVSYITSPNRDAH

SEQ ID NO: 924822 - protein, 170 aa, Homo sapiens
MHFILGSGHPQKSFKKLWGGEDGGGRWSGRKVGSGELAAATVALKTHEKEEMTCGKDAMLWTQSMWPKFLLSQCAVLYLGWQEKPARKSPKVLRNDEWDKCSFSWLVEQAVRMGEHLPLVHQGPLDGRLSQAVHNSLLVGIRSFEGSDSTYLDKERDLKEYFYIVRKLKK

SEQ ID NO: 924823 - protein, 151 aa, Homo sapiens
MKNATTLRALSAVRCACKAAIPLQMPTALIPGGIVQPELQAGEISVEANVDVMRNGGAYRGIECIRKVSKFETSKKAVEEETNLKDQLSLQSRKGIEVAQRKNSQGHPKESTCPCSEGVGGWCMEAHLAVGVRFIVTVLFQPWPCCLVAHR

SEQ ID NO: 924824 - protein, 199 aa, Homo sapiens
MGCSCSGGTTQMIWGTREAQASLLPTDGPSQRDHQRGLAAAFNFACLSPDCPRWVGFLWLLWRMGVWFSGQWSYDSREIMPASAGSRRLPGDWGKAGSDRPYPMPIQPARPVSLPPCPPNSTRGTCPRLQASLLRKQAGLSGFTPPHLQQLLCAYLYSQITSSPDSVQETAQIVSKFSWKFPSPCDLSPVPLAPLPKNS

SEQ ID NO: 924825 - protein, 335 aa, Homo sapiens
MVKVKARVDRFGHVRCLVTRAAFNSAKVDIVAISDPFIDLNYMVYMFQYGSTHGKFHGTVKAENRKLVITGNLITIFQERDPSKIKWGDAGTEYSVESTSIFTIMEKSGAHLQGGAKRVILSAPSANTLMFVMGVTHENYDSSLKIISNASCTMNCLAPLAKVIRDNFGIMEGLMTTVHAVPATQKTVDGPSRRLWCDSHGALQNIIPAPSDAAKAVAKVIPELNGKLTGMAFCVPTANLSVVDLTCCLEKPAKYDDIKKVVKQVSEGPLKGILGYTEYQLVSSDFNSDTHSSTFDAGASIALNDHFFKLISWYDNEFGYSNRVMDLMAHMSSKE

SEQ ID NO: 924826 - protein, 196 aa, Homo sapiens
MFPSLCSLCPYVLVIQLPLMSPSAAGPLEFAGGPLQTLLAWVSRAEAAEQQKLLPVPSSGSFVPKGHPPDASWSFPNSLPREEESREAVWLQRLCSTEVGSAQFKPPSSFVYTVRGKPPTQASVMADAPSPTKLKGPRLTSECCAGSENFKPVDLSLLGSVGMGSAELDHLAPWLQPPFQGGEQFSLTGDPDTTGI

SEQ ID NO: 924827 - protein, 145 aa, Homo sapiens
MPFRFRLWRRFDHYGRKFPMILSSVGALATSVWLCLLCYFAFPFQLLIASTFIGAFCGNYTTFWGACFAYIVDQCKEHKQKTIRIAIIDFLLGLVTGLTGLSSGYFIRELGFENGYDRVCQYNTDDVFRSITKRSHGRATLDGGI

SEQ ID NO: 924828 - protein, 147 aa, Homo sapiens
MKYRVYNYFPMSPHVVFIRITTQVLGVIAKPAASSTMFYNNRDWDETVSPVKGDSTQQLLKTLRRYRRCNVSVIVLGKDFMEKNSKEEITKAKIDKWNYIKLQSFCTVKETINRVKRQLRQLEEWEKMFSNYSFNKRLISRLKKELK

SEQ ID NO: 924829 - protein, 141 aa, Homo sapiens
MSGACQGCQAWGIKRWKRKGECLLSLSITLQVFTERGKGNFLSFRISNQLSSPSPAYTPLEHILNHGNCFDPQNLKEKCLIALCTKVWLNYEGLVGLRKEPFISIKPGSWKFSVMFDPCQPRNTEVPGALQEINRVGVRRL

SEQ ID NO: 924830 - protein, 143 aa, Homo sapiens [sequence omitted]

SEQ ID NO: 924831 - protein, 134 aa, Homo sapiens
MGKDQQLFVRLWPFLPPPPDHLLKGEMLKRTTFSIPQSQTNTESRLSLSKSVTARGVLSTGSARYVLPCPRWGQERKFCSSSKAQLSRPLLQRLPPSPRTDLLLICLFPQYFFENLFHREPQGSTRWPQGFVNS

SEQ ID NO: 924832 - protein, 138 aa, Homo sapiens
MLGKPLTVVLLGLSQAVVRAVLLSGGSRENPFTFPTFRCCPYSLDHGTIPPSLKPVMWDVYGVLMLHLPETRNTVSSHGGRQESKRDELPPWSPFMRAPKPIPEQNKYVLVSGIIEALKMDLSTSNQWDIFLCGLLPC

SEQ ID NO: 924833 - protein, 163 aa, Homo sapiens
MAQTENLQIPLTDDTGHLEHTLPTDKLLQFLSRTPVIMPTKVVPSPIPNALTLFTDAQLSQKHFAKTSQDIKPAVLWKGVNTNEWCGPNDLLTWRRGYAFVHTPSGPLWIPAQCIKPYYGMARTQPSTRNEENDPIGPAAPDNAASVDDTGPRQNAEEDNSEG

SEQ ID NO: 924834 - protein, 138 aa, Homo sapiens
MPAPGAAFPEAAAGVSDCAVARPYNHSHPPPPPPTAPHLTCSLPWRRGIQASSETLEVVHTILIKHAAVYKPQKTWHLSRKLPEKTCLLSNRNQAFQFCRNNCSTLKDLHATFPTELWLSTHCLGCVVVIGEQRFINN

SEQ ID NO: 924835 - protein, 175 aa, Homo sapiens
MGREDFAKLCSENWIFTCRRIKLDPRLRCHPTSCLSNRPSGDADGPRMTLSKSAPRGCAYAEVSRRSCLSHKKPGEEAYDFPAGKGSGKLNAQVVLPFLPINGKLEGGAGGLFHSVQLSWCLLPICSGPNTAKYMDLWDPGFFCLVVSLDMAFLLKELHHPKWLQELQPSDPHSS

SEQ ID NO: 924836 - protein, 217 aa, Homo sapiens
MKLPEERSGSIICRSAIFAALQPPLVTPRQTGSGVDLQQTPTDLQLRVLTVRRKTNKQKGHPQQNPINKRLNRINSVEKTLNDLMELKTMAQELCNACTSFSSRFDQVEERVSVIEDQMNEMKREEKFREKRVKRNKQSLQEIWDYVKRPNLRLIGLPESDRGKGIKLENTLQDIIQENFPNLARQANIQIQEIQRMPQRYSLRRATPRHNCQIHQS

SEQ ID NO: 924837 - protein, 153 aa, Homo sapiens
MVTLACSEVAFGLRGNNLEDSVHCPSQKDPGARCHGFEGVAKVTSSRKPSRASAAHVGLALHREKSLTPTRMDEMLPYLNQAPALAAPAQHPEELPDSYLPIKGSLIMEAEKSHDELPASWRTGEARSMAQSKPEGLRPREADDVTLSPRPQA

SEQ ID NO: 924838 - protein, 149 aa, Homo sapiens
MTLLIQMANKDDEDAVFYLYFFEDAPNGSLLCECYTWVESPLSSFTVESQQLETVNNDLRTRNGKGQNAQPQERSSVPMNVIKTLRSLGVDSYIELDALHDSLQTRYHGPLIPAMATAVFPGDHWLLSSECTLLGMVPHGPGTHRVAMP

SEQ ID NO: 924839 - protein, 143 aa, Homo sapiens
MITKKNPNKAEIGEQEEINIIPLLLLRQKQRQEMMTLTFQPPVCCLQGAFWFENECSTYWPVRQCYSKCGPQAGSNIIGEYVNNADSPAPAPDSVLTVYPVLLLQQSGIYEVPRWPLQPMNHCDSIHFCECLDPGRRCPLGKD

SEQ ID NO: 924840 - protein, 285 aa, Homo sapiens
MLPWSAPSAAGLLQFAGGPLQTLFAWVLAAEAAEQQILVNSKCCCLIVPLEVLSQRSTRPSSSMVGAPPPTSLPPCSLISDCYASNERGSMGIIPSEACTGYNLLVCRLLRPLEKHSIRVGVTRFSRCHVSPLSLTRKGNSLIPCASQIIQGYCEHLYAHKLENLEEMDTFRKTYNHPRLNQEEIEALNRPIASSETESLIKKNCQQKSPGPDEFTAEFYLTFKKLVPILLKVFSKIEKEEFLSKSFCEASITIIPKSRKDIKENNRSISLINIDAKIFKKILDN

SEQ ID NO: 924841 - protein, 157 aa, Homo sapiens
MMVFGDGARKKLSMLYDLERDFCINRSLRQGLPKHRTGSINITWEFVRNIQPEASSRTYKIENSERGTKKPLQGVHVQVCYTGKFHVTGVWCTDNFVTQIYSAQNAFPLVFLSSSHRLPGKYLFILQEEVHLSSILQQAEHVASFSLLLQHSAPGLL

SEQ ID NO: 924842 - protein, 144 aa, Homo sapiens
MWIICRGRDIHTVLCSGSVVLKVCSLNLQLHCHLGNVKSENSQIHFRPAESETQEWDLGICVLTRPPDDPDATEAREEVHIRRTSLFVRYCESSSYMKKPQRRKFTVNSGGKRKDETLRDLPLTSSRMHHLHESLNMQIEAPEG

SEQ ID NO: 924843 - protein, 142 aa, Homo sapiens
MGNENHILIFSIGVQIKTCKRLTQQWEKWVGQVCKWECLQAFGAGSAPDEMLKVLNMCSSSGSMVAINPFIKKKICPTKTSVLRISRHWLQMPEKNRKIMRVGNNQGSRQGYHISGVHLLRELQGCKHFKAKNAAFLDKLDI

SEQ ID NO: 924844 - protein, 140 aa, Homo sapiens
MQSGYRGFGELWWAPPSPNFLMALFTLYRVHLTGACRTVGAGEWMQPTECQPKKGKALPHPGDEAFRGMIRQQHLLFSNIRCSAASAANTQAKGSGVDLRQTPTDLQLRVLNVRRKTNKQKGHLHQNPICTSPSSKTKGR

SEQ ID NO: 924845 - protein, 149 aa, Homo sapiens
MGKMSPGHVRDLHNSLSHHRPRGLGGKTGFMEQGLGLSCCMQPRDLVPCFPAAPAMAEMGQSTTQAVASEGASPKPWQLPWGVEPACAQKSRIEVWEPPSRFQRMYGNAWMFRQKFASGVWSSWRTCARAVQKGNVELEPPHSPHWDTA

SEQ ID NO: 924846 - protein, 136 aa, Homo sapiens
MPVLPVCIEQAHFPADPDPLDTSLLSCKASSLLASTFVLPIIRATSYMNLGQVWKNSVSKMLSLPFRICTTEYISNSCQDLSGWTHGNDSFISGAYAGPAKRQRSCYGPNVCVSQSSYPEIPTPNMMMLGDNVLGR

SEQ ID NO: 924847 - protein, 157 aa, Homo sapiens
MHKDEEKCPKMLKIPKTRMPLLQNLTTPHQQGNKTGWRMEKNINDLMELKNTAGELHEACTSINSQINQVKERISEFEDQLNEIKCEDVIREKRMKRSEQILQEIWDYVKRSNLCLIGVPESDGENGTKLENTLQDIIRENFPNLAKQANIPIQEIQ

SEQ ID NO: 924848 - protein, 145 aa, Homo sapiens
MRFQVKSSFSHILQEALEYKVNGRAHLASDKGPQRLQTYMENHLEKVVEMTRYPRYLWQVGIKNKNQTEEEDSGDLGKASTMSTKVHLLHHSGPFAFHVSEQFGGIKHIPTVVSHYRYPFPKLFIIQTETLSPLNNNYPSSLSQP

SEQ ID NO: 924849 - protein, 405 aa, Homo sapiens
MVLPAWGRGHIAMANPQMLPVGSSSFQGGLGGGYGRASSIGGITAVMIIQSLLSPLNLEVDPNIQAMHTQEKEHIKSLNNKFASFIDKVQFLEQQNKMLETKWSLVQQQKKARSNVDHQFESYINNLWQQLETLGQDKLKLEAGLGNMQGLDDEINERAEMENEFVLLKKDVDEAYINKVQLESGLEALTDEINFLRQLYEEEIQELPSQISHTPVVLSMDNSRCLDTDSIITEVKAQYEEIANRSRAEAESMHQSKHEELQTLAGKHGDDLQCTKTEISEMNWNISRLQAEIEGLKDRRASLEAAMVDAEQRGELAVKDANAKLSELEAALRQAKQDMVRQLPEYQELMNVRLVLDMEIPPTGSCWRARRAGWPLALAGGSSSFSRTSSMVVKKMETRDGKLVS

SEQ ID NO: 924850 - protein, 161 aa, Homo sapiens
MVCLFTGAIISGSGRHWMYSCALAGIQPPAPFLPCPGGPLPPLRTSWGQEMGSALQSLWVALPGVSRDGRRATWVQYLQQGGGRAACGPCSGQPGAAEQSTAPRLGQRAESVRIQATLWGCNQAPFRVQLGSLGKNSEKGACFGAKSGMGAQPLGLRTEKI

SEQ ID NO: 924851 - protein, 148 aa, Homo sapiens
MQRPKEGSEKSSLNSTVCLILNLSMRTQREASLSKTDRVLEALPQTGRQQSLLPDESNDVRRTTHIGSKHNRGPKQIPADTICSHMTGVDRDPGGPCDAEEYGLRDRREWQGEGLVEEGSHLQTKQRALTRNHQPLDVRLPSLQNCEE

SEQ ID NO: 924852 - protein, 155 aa, Homo sapiens
MRESAVYMRRHHGQSWSSDVSEKIGRCCFTLAPGLLGGPASIPELPERKTKSHPRSRGCLGIGRHQAPHSKNRSLICLGENNDEEASQQRRPWRAVYTLCLSPHSLGSDVDVAKLPADLLFPFILACSGHQGPSWDVGCLGTKFQFLIPQCHTVP

SEQ ID NO: 924853 - protein, 192 aa, Homo sapiens
MASAKNICGARRWCPRSEMWLLHTWSRTSAPKTASSSRRSSLVTAKRMAPTMCCASVGRAQWVTETCSIQGKLATLWGHGALLLSWSLRPPPPPRLCTRHPPSVSGDLTLAHVSFNALKDMTSSLHPPASRPAQPPSSEGGAVWTFARLTPGRGLGLQPSHPHKGCELPPQRGAREVVPRQREDGELPKCVL

SEQ ID NO: 924854 - protein, 180 aa, Homo sapiens
MGLGTVEQGAVHTGEAPAAQEPTEVGEAQAWRAAGPEPCPAGRQLRPGEKLSTAATGPHAKPLTARAGGLAGRSECGAAEPMPTQNSRWPASTRHSPGSCSRLSLHTSLQAKGTGSSLGQPRKGLPQCSSGLKGSSSTARVGTKAEEAPRAREGCEGCQHAVTSQKQEKSRPRENKNYTH

SEQ ID NO: 924855 - protein, 304 aa, Homo sapiens
MLQKPRNRGRSGGQAERDRDWSHSGNPGASRAGEDARVLRDGFAEEAPSTSRGPGGSQGSQGPSPQGARRAQAAPAVGPRSQKQLELKVSELVQFLLIKDQKKIPIKRADILKHVIGDYKDIFPDLFKRAAERLQYVFGYKLVELEPKSNTYILINTLEPVEEDAEMRGDQGTPTTGLLMIVLGLIFMKGNTIKETEAWDFLRRLGVYPTKKHLIFGDPKKLITEDFVRQRYLEYRRIPHTDPVDYEFQWGPRTNLETSKMKVLKFVAKVHNQDPKDWPAQYCEALADEENRARPQPSGPAPSS

SEQ ID NO: 924856 - protein, 140 aa, Homo sapiens
MSPLHLTPTTTKPQCHTPFRRHGCFFIIHPAARSTFPATRQSRAAATVRHPSQEQMVLTVGTLSVPKDTQGPAGFPPASSLPRQCTCARASGATSICQEQIMFPCECLLSITQIRPPCKDNHWSIYHLSFPVPKYKSSSC

SEQ ID NO: 924857 - protein, 125 aa, Homo sapiens
MGNFRPVLRRVIKLTTANHSCGSVRFDQFVSLPFQLQHSAGLVIKLVKLFCGPWLFLITVEAPAGQAYASPMGLSQSAMLCSFAKSPSDHQAISSVPPVTIWVPGDASPRRSGLHFLQVEECEYT

SEQ ID NO: 924858 - protein, 751 aa, Homo sapiens
MSLLLDAFQKETLHCVMRAVPQATLQDPEKRQSQGEGNGDCHIIYDRCGDRGCHGGCDRDCGVDCDTHRDKVCDTDCDRDYDRGQAVIETVIETVTETVTEAVIEAVTEAVTEAVTETVIEAVTEAVTETVIEAVTEAVTEAVTEAVVEAVTETVTEAVTEAVIDTVTEAVIETVMQTVIEAVIEAVIETVIEAVTEAVIEAVREAVTEAVIETVIEAVTEAVIETVTGAVTEAVIETVIEAVTDAVTEAVIEAVIEAVTEAVTETVIEAVVEAVVEAVTEAVTETVTEAVTEAVIDTVTEAVIETVIQTVIEAVIEAVIETVIEAVIQTVTEAVIEAVTETVTEAVTEAVIEAVTETVIEAVTEAVTEVVIEAVTEAVTEAVIEAVTEAVTEAVTETVIEAVTEAVIEAVTEAVTEAVTEAVIETVTGAATEAVIEAATEAVIEAVIEAVTEAVIEAVTEAVTEAVIEAVTEAVIEAVTEAVTETVTGTVTEAVREAVTEAVTEAVIETVTGAVTEAVTEAVTEAVIEAVTEAVTETATETVREAVTEAVIEAVTGAVTETVIEAVTGAVIEAVTEAVTRAVTRAVTETLTATVTGIVTGAVTEAVDRDRHCDGDWDRNVTKSGTTIRVGTTVPGARAHTPTVDRAVGGDSSNTANTEAQPGPGICGDASRLKLPREDSEREIPESDITTCPMGSLLASRISLLSTQGCLSPRSKAFAKQQEGEAPSLVPTTLLKIPTMMVKETQFISDS

SEQ ID NO: 924859 - protein, 203 aa, Homo sapiens
MGLTAGRVSPIREHLYRAAFLSQDASAQQGFYYTKSKDLKYSTRTTVIKTKSFSKYNINPPGFLVGVRQKMKAVGAFSEKINLESVKGSRGGRSLRNCVLQPRYCTFPMVFTTHRPADSLQCLPHQGPEFQAQNWADTKLAAEVFFPNPSGTSNVSETEPFTPLERGAEARDPSGLALWAPCHGAQQTKIHWLEILAASTAAV

SEQ ID NO: 924860 - protein, 137 aa, Homo sapiens
MLLTQSLFAMKHINEAYQSKLVEEILLNAQVQALPYRRSTWDTGVNGHRSGGDTKQRPEQQEERGARNMQPRSLKCTVHNRVHAPRESNAATDLTGGGAQAVMLAHPPLTFCCVAQFLTGHRLDKCSGSENKEIGQT

SEQ ID NO: 924861 - protein, 154 aa, Homo sapiens
MILESQGNLALMLFNKINAKGWRNEGWGTARGKVLMYDKTWCLLSGKESVSYNTFNGLPLGFHSTQRFSNSMDDEQLSKDISLVHHWENLSKVLKIEDPSNYDLKTVLPGCLTRGNAAMLADLGMSVHSENGALGGGGANEHSIPWIVNCTEGL

SEQ ID NO: 924862 - protein, 161 aa, Homo sapiens
MGTPGLIYNSQDPLMELEQDGHPNTTEVLLERRGHNNCSSCKVELLYSLSGSKKGSPEEQYSFLSPLSHLIPSHWSTGRQEQSLEEKQEVDESRWQQSRFSSRKHTHDPLNSLKGTQTKTQVLVLLTGERHQSSEVISQEDKNELKLKHYKNPRSVRNMKE

SEQ ID NO: 924863 - protein, 134 aa, Homo sapiens
MTVKTRSDLLVCKISSLGYSWMSDPWINKETRSLVVCVPNFLKLISLKQLLSAAIQKQIPICYHEYWGGDENMGRYLEDKIIEFSELNIDLNYVNGLKKKYWLKAMMFIWGRKIFGYGRLLPSLDEKGTEMFPS

SEQ ID NO: 924864 - protein, 149 aa, Homo sapiens
MTVLSVFWNHVNDGSITRLQEFRAIFQLFTRMAINLFFSSANLHASKVATTKILDRHILDIEAHIVPRKSFTQIFMVPFDRFYFSCNVDWSKDDHHTRFENTSLHLANRNSTNTINFVDILEKQGLSVGRVGGRMQSRASSSVGPMALQ

SEQ ID NO: 924865 - protein, 172 aa, Homo sapiens
MHLEKLQTLNANCESSQEGLLEGECGAELSQPSQPPDLCSPNQQPTIPQSREIPSPGSNAGSRRGVLHFPTEYGVALMVKVSIASGEMPCGHHQSVPNRRERRPVGEAMPEEVMCKGITELGVLEPGEGKTVATAMLQLAQFFPEHVLPDLGDQSGFRAFVTKVSDQQCLSK

SEQ ID NO: 924866 - protein, 142 aa, Homo sapiens
MPWTKVIEAVNGLDRDFNWDKNKARSPSWGAFLLERLPKASWYEQQNPKLEALCGMRTTDCYHWELLNQDVLEVAQPVSWCNWDLKGTLTYSLSLNSSGMQTNSQFFTLMSKLLADLYQALGLFRGESDSSTQCSLGFRGNV

SEQ ID NO: 924867 - protein, 172 aa, Homo sapiens
MRILKCLLSGYPPFSEHRTQVSLKDQITSGKHNFIPKVWAEVSEKEVVGSGSKGMFYNRRSLKTLWLQGLGLPLLNADLIWNCQELEDEDMKRKFQDLLCEKNESTALLQVLAQGPLESSRERSIARLGVEFVETGWLAADIFMRTAGTLVHNNRPGYILILALIKIQVYSL

SEQ ID NO: 924868 - protein, 317 aa, Homo sapiens
MDTAASQSVERHRGVTARLGWLVGCAIWGCAACTGGWFGGPNRGCTAFGGEPVGGTIPDCIAGNSEKMATETDSSVVRVVGAGHQRELLHAWLLGARVCGPLACLTVVGGGGIRYWRHWGTEVGGAIEGRTSRGVGDEFGAIRLHCWWRSTELASKEGVVLLSLTPHSRGRPTLGHTGMRQGTQRFSGFARPAAPCQEEEETPRACNTTARLATGPAPAAALALAWNLVLSRTCPDSAMALALLCLVPGPDPDPDPFLALHWPFPGPELAVMNMGLPLPLPCHGNGIGQSVVLTLALPWRCHSLGPALALALPRPQP

SEQ ID NO: 924869 - protein, 300 aa, Homo sapiens
MTLRGLPVVAIGESARQCFNIVTALLSLMLSKSISLTCDRLPIPNSLQKCSRPDLGLAPWVQHDRGGQGLALGQRTLSDGLQLLAFQGRLINLTRVIRWEYQVETKDTFLEELLFEPALRTGGDRTGEEKGVPYEQRLATTQSNTPTGPLWHPCPVPVTTQFFPLDPGIQSKQGGPLLQLAAYNYNLEPKQHFGSWFGTMKRLDPVVWQCLGYPDLTLDRPWEGALEPIDFRIEHWDSLSTKGGKLQTELKVQCAKKNIKDKSTTKIILSVEKVKDFTVNKKKILLEQEKDAYSHQSYFT

SEQ ID NO: 924870 - protein, 1141 aa, Homo sapiens
MMSVSCVVAFVSVILEQPASQASQASQPARKTSQASQPGKPAKPANPAKLPASQASQANQPAKPASQPSQQSQPASQASQQAQPPQPANQPNQPRKPSQPAKTGKPASKASQASQPSQPSHSARQVSQASQASPASQPAKRASQPAKPAKPIKQAKPASQPGQPSHLASQASQATQPAKPAKPHSQPRHPASQACQPPSQPSQPCQPASQDSQPAKPTKPPSQPSQPASQPASQAAKPVDRPASQASQATQPAKPAKPLSQPSWPSHPNSQASEANHASQPAKPASQPSQPSNPAKPTSQPSKPSQPAIQATKPPKPAKPAKPPSQQSQTATQPAKPVKPPSQPSQPRQPASQASQATQTAKPAKPPSQPSQRSHPASQASQATQPAKPASHPASQACQATQPAKPPSQPSQPATQPAKPAKPPRQPSPPATQSAKPAMPASHTRQPASQASQASQPCKPAQPASQSSQATQPPKPAKPAKPPSQPSQRSHPASQASQATQTAKPAKPPSQPSQRSHPASQASQATQPAKPASHPASQACQATQPAKPPSQPSQPATQPAKPAKPPRQPSPPATQSAKPAMPASHTRQPASQASQASQPCKPAQPASQSSQATQPPKPAKPAKPPSQPSQPGTQSAKPAMPARKPRQPASQGSQPTQPTKPASQARQTSQPAKPPSQPSQPSRPSQPASKASQASQPAKPAKAAKPAQPASQPSRASQPASPASPASPAGQASQRAQPAQPVSQPNQTTSQASQPPSKASHPAKPAKRAKPAKPPDSPASQPAQAAKPDKPANQPDSPASQPAQAAKQAMPASQPSRPRQPASQPSQASQACQPAKPAKPPKPASQADQASQASKPAKPAKPASQPSQPSHPARQASQATQPAKPPKQSSQRSQPCQSASQASQPAQPAKPASQATQPPKPAKPAKPPSQPSQPGTQSAKPAMPARKPRQPASQGSQPTQPAKPASQARQTSQPAKPPSQPSQPSQPSQPASKAGQASQRAQPAQPAKPGKPASEPSQPSQSASQTRPPAKPASHPAKPASQPSQPREQSQPSRSVKPAKPAKPANQPDSPASQPAQAAKPDKPANQPDSPASQPAQAAKQAKPAKTASQPTQPSQPSLPASQASQATQASQPSRPSQPSQ

SEQ ID NO: 924871 - protein, 116 aa, Homo sapiens
MSLKPGSGFLRGGSSLQPLSLRWVGWGAVTVVPSGAPEFGTLKRQCPNYLQGPIRMLEADSIRRIITPPSGAGPGHIEDVLYEEQALIDTQSTDALFVDFSASRTMSNIFLLFIYY

SEQ ID NO: 924872 - protein, 813 aa, Homo sapiens
MMSKETRQSKLAEAKEQLTDHHPQTNPSVGTAASDTKKKKINNGTNPETTTSGGCHSPEDEQKASHQHQEALRRELEAQVQTIRILTCQKTELQMALYYSQHAVKQLEGEARDLISRLHDSWKFAGELEQALSAVATQKKKADRLLLCLLYPDLTFLYLQYIEELTKERDALSLELYRNTITDEELKEKNAKLQEKLQLVESEKSEIQLNVKELKRKLERAKLLLPQQQLQAEADHLGKELQSVSAKLQAQVEENELWNRLNQQQEEKMWRQEEKIQEREEKIQEQEEKIREQEEKMRRQEEMMWEKEEKMRRQEEMMWEKEEKIRELEEKMHEQEKIREQEEKRQEEEKIREQEKRQEQEAKMWRQEEKIREQEEKIREQEKKMWRQEEKIHEQEKIREEEKRQEQEEMWRQEEKIREQEEIWRQKEKMHEQEEKIRKQEEKVWRQEEKMHDQEEKIREQEEKVWRQEEKIREQEEKMWRQEEKIREQEEMWREEEKMHEQEKIWEEEKRQEQEDKMWRQEEKIREQEEKVWRQEEKIREQEEKRQEQEEKMWKQEEKIREQEEKTREQEKIREQEEKIREQEEMMQEQEEKMGEQEEKMQEQEKMRRQEEKIREQEEKIREQKEKIREQEEKIWEQEEKIREQEEMMQEQEEKMGEQEEKMWEQEEEMQEQEEKMRRQEEKIREQEKKIREQEEKIREQEEMMQEQEEKMGEQEGKMCEQEAKMQEQEEKMRRQEEKIREQEKKIREQEEKIREQEEMMQEQEEKMWEQEEKMCEQEEKMQEQEEKMRRQEEKMREQEVRLRQQEEKMQEH

SEQ ID NO: 924873 - protein, 174 aa, Homo sapiens
MHSGQPVALPTSLRHRSGVRQRQAHGPWLSATPDTSCKAREPLGNRTARMLALEQELKEMKKCGKAVKGICKFTQKSNRYKSLKDTTYRYFISSHMPNPAKPNFGASPASRPATGGEAAQTSLCSENATLCVLLTPSPLWKWPHSVLAENRFPHTTLSSSPQDTLDNSVPGKSL

SEQ ID NO: 924874 - protein, 156 aa, Homo sapiens
MMAAPQFARGLQPVSTCDRSRTRARDLCTYVRMHSGQPVALPTSLRHRSRVRQRQAHGPWLSATPDTSCKAREPLGNRTARMLALEQELKEMKKWICKFTQKSNRYKSLKDTTYRYFISSHMPNPAKPNFGASPASRPATGGEAAQTSLCSENATL

SEQ ID NO: 924875 - protein, 461 aa, Homo sapiens
MEWKLEQSMREQALLKAQLTQGPFPLCFGQVCSLKKEKKHDKYRVEKLERSLSKLKHQMAEPLPPEPPAVPSEVELQHLRKELERVAGELQAQVEYNQRISLLNEGQKERLREQEERLQEQQERLPEQEERLQQLAEPQNSFKELNNENKSVLQLEQQVKELQEKLGKVKETVTSTPSKKVWEVELKSQEAQSLQQQPDHYLGHLQQYVATYQQQERLEAASQQKQQLTAQLSLMALPGEGDGGGHLDSEGEEAPRPIPSIPQDLESREAMVAFFKSAGASAQEKQAQLQEQVKEQRVCCQRLAHPVASAQKEPEAARGPGAPGPGGESVSGETHRALQESGFMDHLEEKADLSELVEKEELGFFQYYRERCHQKVYHPITKPGGSAKDAAPGGGHHQAGPGQGGDEGRVCNISAGVGVAVTVSAGSSVTAEHPSLQVKLLELQEMVLQLVATTRDTANSW

SEQ ID NO: 924876 - protein, 115 aa, Homo sapiens
MDMSLDNWGCFPIILSAALLIFTPSSFLEILDFIFFFFGKFKYVFARIIEHVYLLNHIIRNRKSVQILVLSCSDFLNSKNSHLLPDTLMLEDKAYLKFKDSALVKVAKGLFVFPR

SEQ ID NO: 924877 - protein, 118 aa, Homo sapiens
MLLSFVVKTMGSLSSAYVFTCRPETWEEAGEKMPSESLCLAAQARLDSKWLKTDIQLIFLPKVICFGSKYVYGSYPVSDVNRKNNSAEGKLFLLQKLKDAGLVSVATEQVTKHKFGSL

SEQ ID NO: 924878 - protein, 180 aa, Homo sapiens
MDWTWRILFLVAAATVKVSCKASGYTFTDYFMNWMRQAPGQRLEWMGWINAGNGNTKYSQKLQGRVTITRDTSSSTAYMQLSSLRSEDTAVYYYKCTVTHVDSFLRQTHMSPRGLFPQTTTYVLTFTLSSENRHFLMWTLVSDKQTCLHVNSIQISTHMSTLTVSLHKHIYPMSNCSVAK

SEQ ID NO: 924879 - protein, 134 aa, Homo sapiens
MNTYHRPNQPSPQKQGTSRQEKNDSSLSHNSEVIRAATPTTGPECKGSKEITISERPPAPSGPWRAMGPGREPLWWQGCPEPLGQTLQEPSELNSYPARLQRQDHHLSSNTVKIKLSHSFSPCTHGSQGDKRPL

SEQ ID NO: 924880 - protein, 171 aa, Homo sapiens
MAPPSRVLSLRWMVSSVLPNPTSAECWAALLHDPMTLDMDAVLSDFVRSTGAEPGLARDLLEEDNHPKWVQTTNSKFLQDLCGLWLLSCIDSTLGRLEEGKCLAHLQLCGTSNCGLLSASAPPTVIHLPEPGRCCLHAVQGSRLHPVGQRVAVVSAHSPHPLLGPALGFHR

SEQ ID NO: 924881 - protein, 166 aa, Homo sapiens [sequence omitted]

SEQ ID NO: 924882 - protein, 149 aa, Homo sapiens
MGSLRLYLCLWLLLHFLTDLYDRTAAPSHELWADPVAGSLSCGPESVFGWGSCCRGPAVPAARASPACSEQLGHTEHLPCPAWQKRALSRLRPKLSYGLRIQRRSPGEQHAEPFGFEKEGDEGQGAGATASHEPYLPSTSHDPHLPTLD

SEQ ID NO: 924883 - protein, 141 aa, Homo sapiens
MTACLGQDRAAAQRCQCQPGHHRRYRSRAYGQDVACVPCKFSQISHICNLGKSQKSLLFWELRKCPFLWGPWLEPCLKKGAVLLPLAHEGAQKGPHMLKAGPERQFLAPRKLRMAAWSTAWHLGDTTHVQIPVPLPAGLIL

SEQ ID NO: 924884 - protein, 147 aa, Homo sapiens
MPSSSICIAAHYASGTGKYPQDGFKDPLDQLPIYLVTKNAASFEWGPEQEKAMQQAQAAAQAALPLGPHGLVNPMVLEVSVADVEAVWSLWKASKASSCGTMPLSGTAIKDSSEGKSSQWEEMARCAIVYQILGCSLWVGWMVRDLE

SEQ ID NO: 924885 - protein, 142 aa, Homo sapiens
MTQHNKGSSINSQFYFGWNASWLDVGTQQPSINLQSLVLYRKCGAGIFLVSGEASGSLQSWHKAKGKLVFHMARAAAREGGEMLHSFGSCKNSLTIVKTASSHEGFARRTQTPLTRHHLQHWGLHFNMRSRGDIHSNHINGL

SEQ ID NO: 924886 - protein, 168 aa, Homo sapiens [sequence omitted]

SEQ ID NO: 924887 - protein, 143 aa, Homo sapiens
MPRLQAISRQEGGARGAQLSPTRGPGSSVNHPGSQKSLPKKAGVKLVLLPSCPVRGGLELRRPGPSKCCILPEKLELKKIKSTIQCKTMKKKHDCFRLCSVRAQSLPWEFTTDEGRGASWCWFDMSSRTQEIPAPIVVACKVV

SEQ ID NO: 924888 - protein, 181 aa, Homo sapiens
MVPAPLYLWQNSAVNLSGPGLFWVASLQWVRTCSFSLEKFLIADLLKPTSVNSSKSFSIQFCSIAGKELRSFGEEGVLCKAPQLQVCWSLLEVHSRPCLPEYHQQRLQNSKHCCLILLLEALSQRSTHLYEVSVGPYWEMSPSQATRGSGTHLRRQSIHSQSLNAVLGEPVLSSEVSDRDV

SEQ ID NO: 924889 - protein, 153 aa, Homo sapiens
MFQLERQMETTQNLVDSYMAIVNKTVWDLMVGVMPKTIMHVMINNTKEFIFSELLSNLYSRGDQKTLMEESAEQAQWRDEMLRMYHVLKEALGIIGDINTTTISTHMGARGQLLPAGAERPCRMQEPCHTRTCTLYSLALPQLLWHTCKSIPS

SEQ ID NO: 924890 - protein, 158 aa, Homo sapiens
MSHIEKNGLGPWRTTAIKQSIGSIHQIPDGGKKGKTEAHRGRYHERQFSRTQRGILTNSASFCTKILCSRQHFLHLKRELEEQYKKCDKPHNGYTTIFDQFYNCYCSPLNAHQSLTGMHQEKRISSRRPRGGRGRDAKKQRRLEGTGEKWGQRECVCS

SEQ ID NO: 924891 - protein, 134 aa, Homo sapiens
MEDAGESPSKPVEPKEAEFPISSRHQFFFPKALFWIAGLGQDGSHIELGPRHMTSFNLNCLFKHSSSKSSHVLNFEAPKGWLELQHLNLGGMQFILQHPRWFLHPFSASDVLSPGAAYVACLRAELTASLVLHS

SEQ ID NO: 924892 - protein, 153 aa, Homo sapiens
MVQAKHVQACPAARGLGVSPAECPEELRIPPTALMMTMEGYACCSPVHGAVSKSAIAQIYAMWKLPSKHPLPGRLCCCSHSSNYIQTSDFSRESNMPKWTLNQRAPSRMTLLQKPEPLSTPQSQRALGYEVVAAGWSQAGGPLPPRAIFLPKA

SEQ ID NO: 924893 - protein, 148 aa, Homo sapiens
MIVFSYSFKPCKYALMNRRSGIFNTEIIRKFEVMFDTLLSLCTPKPISHEVTRSYSPNYFLSIIITDLLLPLLGPSASGQYCCRHPSPGLQGHPHHLPYPARFPCSVSPCQQCLPVHSSIEGLCHCASRLRTPLQSTYQSVRKTHSLT

SEQ ID NO: 924894 - protein, 167 aa, Homo sapiens
MSHIEKNGLGPWRTTAIKQSIGSIHQIPDGGKKGKTEAHRGRYHERQFSRTQRGILTNSASFCTKILCSRQHFLHLKRELEEQYKKCDKPHNGYMTIFDQFYNCYCSPLNAHQSLTGMHQEKRISSRRPRGGRGRDAKKQRRLEGTGREVGTAGVFLVFDDTDKFEE

SEQ ID NO: 924895 - protein, 137 aa, Homo sapiens
MEDAGESPSKPPDFRAKVWFNFRDPEVVAVPYQFQTSVFLPKSVVLDCRPRSDLPLKTPVTFVLFGIKLIHTGASLPYCSSLSEICLAASNSVQCSFSDKGRCLTNPEISVRKMLLWHYAPSEPIPRYSAETMAQRH

SEQ ID NO: 924896 - protein, 134 aa, Homo sapiens
MRSGFLGLRCCSVYFTRTLLYHLYEKIFSNIESSGAGRPVAYRREKGPLKFCTVVEKPDAKSVPKTGALKKMAADFTTCFSQIAKPQRVSKILAGLHQTLHFIGAREECALLSNEMWAFSLTSTVILEKHLFPH

SEQ ID NO: 924897 - protein, 166 aa, Homo sapiens
MKRCKSQGEPGRSYRSTRQPTRLEIKTTGCLLLPLLFNMILEVLVCALRQEIARKACIIFKCQNNENAQKSKKDGAYQRDIKDVDQNANLLHKISSQRVLGESGSKAQHCFLLLSRHGPVAFGRASLKVRGGLEHAGRGQAASERKRGGTSDLDATRPGPGGIGYS

SEQ ID NO: 924898 - protein, 148 aa, Homo sapiens
MSSGNYQQSEALSKPTFSEEQASALVESVFGLKVSKVRPLPSYDDQNFHVYVSKTKDGPTEYVLKISNTKASKNPDLIEVQNHIIMFLKAAGFPTASVCHTKGDNTASLVSVGRPIAELPVSPQLLYEIGKLAAKLDKTLQGSLFFIA

SEQ ID NO: 924899 - protein, 139 aa, Homo sapiens
MVSVFFLFLIQELLPDILLYHSFLNAFHKEGLNTSYNPEQLPGSGQRSSKGAVPPCRLHIPEVMAAVITDKDVPMLVGLDRRKWKTSKCSMCTLTFEKSFSGAQPRTKEQQVKNNKKKKKKKVWWIGEQLSQILCTFLI

SEQ ID NO: 924900 - protein, 138 aa, Homo sapiens
MGPCTVERKNAPCSPAAGLTEQAIRTSWDWVTGVPTLGGPASRKKQSILLHTQEPEGRPGEPGLGQSSRLTLRSLPNPHSLGLMGRGRPEAPLGELQFQHSAEFLQKSYNPHIHPPNSWIEETETQKGATTCPVCTAS

SEQ ID NO: 924901 - protein, 383 aa, Homo sapiens
MSNKLPATAYHWQSQEAFQIQQPCTCPRSHPGPGHMLGPLSGHPHPLVASMSVPTSTSCGRGPPLHPALEDWNAKQVPPAFWLRDILCFQAQTYTCCHKPLRLFRGPMGSHTHAGPACWAHLHPGDSSLISPWAKYPKQRPGQGVFIRVPKKHMQKGSACPLWPARARSHPRAPVGVLTVVVLMFTDVAGCLRQHVALAQHLAAPLCLLCQLLHQRVLVPMRVQMRLLHCFNLKICVPTAFSHSDGDTEVQRKSHLSKEPSLATRSLPVLGHPHPYIPWTAAVGCSDPESRFGQWELRCWLRPCQASWRRCQEEPRRVGVALASARPFPGTAGRPGPSHTAGPCMVLQRLLVSGSRLWMRVKHVQVVVGVLKHKRLHPRVCLC

SEQ ID NO: 924902 - protein, 123 aa, Homo sapiens
MTECNLSDKQNLSGRGTLLVLGSEDLLAEVGYERGWGGGKGLGRALLELALFLAGAQAQCEYVSLNGELHACSSLIRLSPIPVPKAEPQEGWTEGPGGNRKQLGFGFQVKLCHDLLCNIRQYN

SEQ ID NO: 924903 - protein, 198 aa, Homo sapiens
MIWFCSLIQGTALKSLFVCGRHQTSIVTGSWTLKAPRRSTVPVAVDDGSWYTLGAAGVFDLVQAPFKDFITLESLTSGRQWPSKLFYPLPDTQFQSYFHIFGYLFSNTPLYSYQLTVLVCFHMADKDIPKPGKKKRFNWTFSSTWLQRPQNHGEYPYCPGKDKNSKFEVQFLLNAYCFHTIIKVEKSEKSGTICINKP

SEQ ID NO: 924904 - protein, 135 aa, Homo sapiens
MPISPPGPLLIQKPLGSTGPGSGQRGAFEDAQSFEDDFEDQQPEARHPCASQTGAQSLWPLLADDCGPQQWFKHRRKHHVDAGGSQRGASQLAVFLPPLREGLLGEDIPVPKEPELGAHLWIFSLPIDELLPLAT

SEQ ID NO: 924905 - protein, 132 aa, Homo sapiens
MGRNQSRKAEISKKQSTSSPPKDRSSSPATEQSWMENDFDELSEVGFRRSVITNFSELKEDVQTHRKEAKNFEKRLEEWLTRINSVQKTLNDQMELKTMAGELREACISFSSQFDQLEERVSVSGDQMNEMK

SEQ ID NO: 924906 - protein, 444 aa, Homo sapiens
MPLFGWKDRNGSSGTSHIPGWELPQFSPLAIEWSRGTGLCENWESKLVQFEPLAVREVLQGIPVGKGDSKEIWHGWCLLTAYKLMCQDRIPILVATIKKLALAQCQAYVLTDQAQSYQAIADKTAVWVAWYKYKNRQGKVDRQKVQMVWRDAVEDFTQQEITDILQTFRQKGGESVITWLVRINEQGANGIRVDSGNVLKFVTLSWVPKIQLALRNWATAPHPTNDEGNVLDEISLWQLAINVARQKYSTEDAWPDGGKPWHTLKEYAMRLKEEAMETAVVLGMADNIEATPLSPTIRNKILKIAPPAYRMVLTSLLFSHTDTPTREVLEQLGQLQDLGDRMPCGEERIKEWGRQTRDQSQVSQKDMFADLLKAGVPREQIDGKEAKELWKLYQQKVRNVRQITTGGPSSLGPGVTPGVPPLSTPVTQPSGGSYQELLDSLAGL

SEQ ID NO: 924907 - protein, 155 aa, Homo sapiens
MRKFSRLEKQRTHVLSCSDLQAVRRFRGVVSEGSFEMGEKVYKRKDMFQGRSMLKKRIQRYFSHLLLKEEKYDSVLRGSPAPQQLGMCWVTSQANLSLSLTQGPQRNYESRRGKEEATESQEQCPATQRGKRIQRFGRTQVLVGIIAIAGFYNTD

SEQ ID NO: 924908 - protein, 149 aa, Homo sapiens
MVMQGSQAWQCNRITGKLQKSAEIWASSKNHWEGQRKELEAKLLGKMPQTTLQAWLDELNSTLLLRHETSVPGACPHFSRCCRQHGAHYATGSSTLQPLPPKPATSATDTSTFSWGQWHPAPSTIPVGQSELSPTTSAAPSARSRMGRM

SEQ ID NO: 924909 - protein, 269 aa, Homo sapiens
MTLVLSIGFYCESNGRRAVNRGYVTSLLGLHQDWHSHDTANAYVQIRRGLLLCLRHIAALRRHGSHWMANLGALDLVMLFQLPFANYAAVAAAAAIATASDSDDNVNEAAAAEGGGGRGREEVGEGEDSYFELLLLIHPLAVLAIYADSPILIISKAFENCLDDKSMEPVISVVLQILRQCYPTSPLPLVTASSAYAFPVPGCITTEPPHDLPEEDFEDDGDDEVDKDSDTEDGKVEVGTPAHASNDVHSHIMHRKILLPVFAQAQCKF

SEQ ID NO: 924910 - protein, 142 aa, Homo sapiens
MGLNGCDQVAAQSEPPGGVGFTPGFLIHHPAVLRKWPLMGTGAEQGQCGSPAVPRALLEGATGVCCPRMSCFLQGNQEVPHPGLQHCGYHHVLVPEGHANPRVTQKLGWAGLCPLWAWSCEPGSADRVRNKHLNFKMLPSFQ

SEQ ID NO: 924911 - protein, 376 aa, Homo sapiens
MESGRVSAFQLLQNTSLPGMAQCRHFISCRTGLFRRWPSVDISARAEQAIRDASPRSCSSSFLPISPVSIEHLPQILKHSHPGARCAGDETYPKSRLGCASVTGPRVCLMHLPLCCVTAQGEPPGARPAPWIRLHILSFSVNSHHARHRTRDFRVDPSDLESLDACIQRTLSALYPPFEATAATVLWQLFSVAERCHGGDGLHCLTSFLLPAKRALQHLQQEACCTCSLLGLTIVRKVSTNTKEFISKGHSAIKLEINNKKPLHLENVFTHLCLMFHYWNTKLVGVIYILLLNVIAKSQRTDVSSYNVEEHEDLYHQNNKKPLEEPTQLHRPSKPPKRYGYGRHLKGPNCGETEARHHLTEEGGKLHASGNSKNDR

SEQ ID NO: 924912 - protein, 182 aa, Homo sapiens
MSSNIPQTAQKALCLCGLGGSSSTGGGNKVHEKPEEVTAGQQKRQQHQASSSFLEVSILELPFCELPTQHPGQDTLTTLGILCQNEVGVHCQKVGILCQNENKEQNGREIAQGQTEKKKHFRKVYVSSLEPKTAWGSRSDCFSMPNLTLMRKICMSDDAPKKLSEGSPEADATMLPGQPAEL

SEQ ID NO: 924913 - protein, 143 aa, Homo sapiens
MLHFPPSSPVVDFFLLAGSISSQPVKAGNGMSLYVSGMKMKAIGLPSECGGHYGAFHPGTERNWDVITRLPGKQLGCDRVATTATRATEGVSASGRNLRLQDKAKSFKMAPSKRFFGLDLGNFEKMCLIGRHVNIPGASNQRP

SEQ ID NO: 924914 - protein, 153 aa, Homo sapiens
MGLGVKAVGRQRVFSTDILGKISHLLPENSREPTRAYNSRCSKKAEILGCTHSPLSTHDLLCAQGAEPANERNRKTHTERMHIFSTHGKIDNGNTVFSNSQCTAPLLQTNSESEVKREGVGRNKAPPSVKLPDDLGATRCRCYQQVAGCMAGL

SEQ ID NO: 924915 - protein, 144 aa, Homo sapiens
MYTIQIMDTRKARLHHCAVYPKLMCSQKISLGKSILSSTSTKKLKRNSQMEMEKPSKDKVENFHKGGVSNNGQLCGTELLPLLQDGSELAPPCEDVLASPSPSAMITYSLSQEQHGKDPHPHDSITSRWVPTMTCGNYGSCNSR

SEQ ID NO: 924916 - protein, 160 aa, Homo sapiens
MQGRQAPTWGVADEGSSLCQERIQGCSNPIETREFPDPTEGCVTGVWLVFSLTADAQIPYGRKSTQTDRCRSPSGRVLQRGLLALLSVDGLSVNQLSGPSNFLKGQRASLQVSRLESEAFAGELPSSTQYFPVSCPYHYGRKSCLSPFFDFPMCWLWAPE

SEQ ID NO: 924917 - protein, 169 aa, Homo sapiens
MQETDGQTLAPGLIRTNLRPVGGGTKGLFLGALTLHTLAQTQREAEPLHVRFTEKHGRARGLGRLLPGSSPHSAVSQPPERPNHNENVAVVGEDKNHQGLSGSYEDVQGLEVEGCELKQHRTGEQKKRPTNLLLLNFMCIGASWKEVNTQRRGGQMGHVVACDDVWVWR

SEQ ID NO: 924918 - protein, 138 aa, Homo sapiens
MECEGRVTANGHWVHFWGYGQIIRKALLFGSLNFSPTQPCLTVTVTTPHGLQQCIRLLGLPWQCTTDRGLQQQKFIPSQFRRLEAPDQGASRMGQMGKTCEMVKTEEGRVRRVAGKPRGTETDWQYRCSSEINPQAVD

SEQ ID NO: 924919 - protein, 148 aa, Homo sapiens
MSHTRWVCATAKIPGRTNTLGKPHQGILSYENQRKAKRKVLKDATGKKNHLHIEEQELELQQMYHQKPSKQEESGVKLDIEGIKRPIYNYIQRNGSSEVKEKQAFLIQNLREFITSRPPLVWSQVVFKLLETLGLKVFFVEGSVNGLR

SEQ ID NO: 924920 - protein, 136 aa, Homo sapiens
MWVFTTVVEEAQLRGEGPLMVTAHVVMLVVVLAAGDWLWVHGKLQCGEGACRIVCGHKGCPDGALHWMGIVYQGAGGMMRVRRVSKAALPVQLGEPHSKPRRERSHRATARMFRIQVHPMPTESLGMKGSVDSQPS

SEQ ID NO: 924921 - protein, 180 aa, Homo sapiens
MSGLLDMEIFGGCYSAKHKCLLGINREKSRKEAVPMSLGSSWICNPDLRGRPHSEGSGGGEDSLFPAHFTSKQTRLLGETSWTSARDTGLCEKRAPLAEISDNTVPDSEEWGMMSCLLLLSMMLDEEKNSLRKCESPLWASGCPGPLYLPASCVISIITRLELQSQDLSVCVLEGIPGMI

SEQ ID NO: 924922 - protein, 136 aa, Homo sapiens
MWLLSRVVYTFLTAFIPKNISWRQSFLGDRSRSGCNRCDKLPSYNLMGFVVLWTNERHQAAENRFQLEWCMDVSPVCISHQVNSHDSCNGCGRRSKNAINVPSVDQGREAVTQVDFNLFSFVPSQTALHKLAAVAV

SEQ ID NO: 924923 - protein, 145 aa, Homo sapiens
MPWVVLFSWCGLYGIPLTDRTFVQSPRSSTPFREDSNLNLLPSSRHTKRCASKIVCTNNVIYAEHLLSSGNLEERYLLVRGCFCDHTPIKTLDADSIMGSPGRDIAHSTVLSVAGERNMLSCVPSQEGMGIRKPGIDFSACVFPL

SEQ ID NO: 924924 - protein, 141 aa, Homo sapiens
MQISPTKDSFAGFLNSHLKIHQIQNENFWCSSRAINTMKTQLQGPSPNYYDGLSAGSLRRGNPVVKNNVEKLIISGSICHSLENIHQARQVSPPPDPCICISHHYLGVLETMTYQWNSGLLDTINLLLEGGTRQKPEVTSV

SEQ ID NO: 924925 - protein, 256 aa, Homo sapiens
MGLPRQLGSVSLQLLSREDLGRSQSESLMPEFQGLWEWLPAQTLTLDTPPPVQTWCQLPMNDDIFTLAVTMPPRDDMEIWNHTFYNKLHMAPEEHPMLLTEALLNPKANCEKMTQIIAILCLDLAGWDLTDYFTKILTERGYSFTTTAQQEIMRDIKKKLRYIALDFKARSSPSATSSSTALASPPAFLPGHGTRDIHETTFNSIMKCDVDIHKGLYANAVLSSGTTMYPGIAQQDAKGDHCPGSQHDEDQDYCSC

SEQ ID NO: 924926 - protein, 157 aa, Homo sapiens
MWGAGCVFRPVAFLCASMFQDSKAEENGSDSFMHSMDPQLERQMETTQNLVDSYAAIVNKTVWDLMVGVTPKTIMHCPYLSEKRAVGRQIFESKRCRSRVCKAILRAPSPAHCPSTGIRPAHASGPNLLPSLPPLRPRSSYYQSCCPTCTCMGTRTR

SEQ ID NO: 924927 - protein, 309 aa, Homo sapiens
MAHQKRQSAGSSMLDHRARPGPVPHHQEPESEDVELPLEDYVPEGLELVTLRPESPTPKKQECHNHSPDGDSSSDYVNDTSEEDDYDEGLPEEEEGIPYYIRYCPEDQSYLEGMDCNGQVYLAHGAHPMDTDGCQDAVDWTAWAGLHPHGHGAKGSQDYPDGQLPITEDVSSVLEAHDQEEDGHYCPSKEGYQDYYPVEANGNTSASAYPLRCGDGDLEDQEEDIDQIVAEIKISLSMTSITSTSEAIPEHGPEPGPADSAEGCPPIKASCSPSRQEARPKSLNLLPEAKHPGDPQRGFKSKTRPQKRG

SEQ ID NO: 924928 - protein, 133 aa, Homo sapiens
MARVRSFILEVSETKNTPIPDTMVQRIQMKRCIGQAVQKVSEPSPLGFSRKLYYVRMGDEIIGHCGDGGNLDYRGAGGDNDKWSLPDHSRYDLDLEPTELSDGFTAQWSTFPTTVEVYLAVIISSNTTFLAVC

SEQ ID NO: 924929 - protein, 161 aa, Homo sapiens
MSSGIIFSTMTSPVLKACSETLSCPVAWLETGSTKRIRDCKVSRVVSRRQVVIMELHQDQAGVQKHPSTDLVMIDSASRQALAPSARQDPKCWAKPGGPPPPEHQSCLQVQFFSGEEPWAPPGGHEAQQALCWAEHRCPSPPTEKEGFQGVMTSTPTPALQ

SEQ ID NO: 924930 - protein, 137 aa, Homo sapiens
MGDHTHVPSALRAIPPFNKIILCPPHPSVVSVTSFFLNAGKNSGPTERERRYQLKCGVHTGTQVRLQKSLADKNSDCLGRLALPIPSSQLRETTGCGLGFPALHCHLQAFSRQHAEKLNPLQLLHLDQKWKPIIHLM

SEQ ID NO: 924931 - protein, 146 aa, Homo sapiens
MGPWVDVSVVPMTTLRFDDLLEGLTGLRRVIVCDCERTQIKISKEKRHTGKVAVSETVNPPGGTDSELDVTDTSTVVRWDGVVKNQDFHHCPRVIITEHLLLHGATGCHVGSSKGTLGSSQGAISSLLYPTISNKDGVLPSKTNEG

SEQ ID NO: 924932 - protein, 154 aa, Homo sapiens
MVRTQAKVASSSHQPLWVTGFEEARISETGKEYYRGALLCPYKLMCCKLVTSEDAGEGCLRLLQPPPLPLDTSSLVHPAQRAAQMHLLLDVRGFHVQISYGTFGRMLHATSSVHLWGFIMQQLTSDSEEALNPTVACVSFSWMCPQPRQSKPLN

SEQ ID NO: 924933 - protein, 150 aa, Homo sapiens
MDSLRRPSFKEKTGWLKQQNLFLAVQESGIPRSRCQQIRCLGMRKSFMEEVCLVQDSKTEKGSGSLKREGRKSQKKSVSMKTQMREGPGSWEDIKGPPTQICQLEKCFLGTAKLTLKDVRKQVEFIAIGLGMRGKKQLKPGAKGPAFAMG

SEQ ID NO: 924934 - protein, 222 aa, Homo sapiens
MQSSGTEHSDRDCHQLRATSSGSSGQPWAPRARKLQQSISGFDSGVVPVAMVCPAEVLHGKLLPAVDQVSPSSSGTLDCELTQFLVLDDTKHLHSKSADNTTGTTQAADVAVNQLLVMATVRAGHSLHTISASGNAESHRQLWQILLEMPKLPEPGVNHYSRKEKEKNCLFLLPSNLPSMIPKAKLTVPAIDKVQIDGENLSEHVLFSQFNIPRDDYQLQWS

SEQ ID NO: 924935 - protein, 140 aa, Homo sapiens
MSSGEFHAHPGSHSSASPAPHCRSGSSAALWMGTRGQQACSCTAWRNAILRLRAKVLESLAAQTRPGADQALQKGLANTQVRWRGSQAVTLTVKLHGFILEGRETESPLEGTNSGPNVMYLLAHALVSCVPNCITNQKNA

SEQ ID NO: 924936 - protein, 147 aa, Homo sapiens
MCRHGNKAGGRRTSHVCVNIRASDLHTTEYQLWKIPINCHLFQRYTLGYVKHSNSWGSKELLPVCYVGELVPMVGLWELKGSSQYVYPCAVTGYKSQPGASIATTNSVTFENTFSPLVAYFLPHKAVNESIIILISMHTHQLGTDRS

SEQ ID NO: 924937 - protein, 146 aa, Homo sapiens
MSPVGWRAKWPLVENHWGKLNLQFGQGLVGTAVSLPLDINWGSLRPRGWNHEKAPSLPCLVADAGWTLAGAVSWTTSMCPLYMALYFLTIDGWTPKGNIQNLDLPFSSLSWLFCLCPPGTSAVTAGTSTKDTPPPPALIHKEHNLV

SEQ ID NO: 924938 - protein, 151 aa, Homo sapiens
MIASVLFHWSMYLFWYQYHAVFVTTTYVYGHTTVNMPDLIFDHIFNSEQMEVCGPEEVDTPELGVRLRSGVSYLKPSCLNQPNSTVPSYYNAGPGIGGHVELEVILEDSCRAELSVLLSKAQSSLFTCATSYSCCLCKNSAPRISSIGQFL

SEQ ID NO: 924939 - protein, 154 aa, Homo sapiens
MLGPSGSRLSLPELVGEFLEAGAAEISVVSLTQYTSLLVLGSPGSPEKEGPPPTQNTCFARFGPDLFLKWVPRQFLLTGWGLPAGGLQSLRPGLHGQNLPWEAAPGGGMAAISVVQLTRLFQPSGSGESGLSRQGRVPPNAAHMFYQKTARQLL

SEQ ID NO: 924940 - protein, 261 aa, Homo sapiens
MLFSGEHDYKAWDLRKSELYKPERTYHPPTVKFGNSTTFQDDFVPQEIKPRQSFKPFSVVKRSTAPFNGITSNRLDYIPHQLELKFERPKEVYKPTDQRFEDFTTHRVTQNARFEGSTEFRESFQPWEIPRPEVKKVPEYVPPTGSMLLNSTSHLDYVPYQANRVVPIRPVSRRRSNSFPFQGKSTMKDFPAWESCRQGLIKKQQQIPNPSGKFDEEEPAPAGGIITWFTSSGVKISDKVKNDARHQSHCIKAHPDNLTLT

SEQ ID NO: 924941 - protein, 379 aa, Homo sapiens
MILTRRVLQQGGPVTGVPQEIKSEMKTKLGEQGPQILSVQRVYIQTREEKRINLTIGSRAYLLPNTSVIIKCPVRRFQKSLIQWEKDGRCLQNSKRLGITKSGSLKIHGLAAPDIGVYRCIAGSAQETVVLKLIGTDNRLIARPALREPMREYPGMDHSEANSLGVTWHKMRQMWNNKNDLYLDDDHISNQPFLRALLGHCSNSAGSTNSWELKNKQFEAAVKQGAYSMDTAQFDELIRNMSQLMETGEVSDDLASQLIYQLVAELAKAQPTHMQWRGIQEETPPAAQLRGETGSVSQSSHAKNSGKLTFKPKGPVLMRQSQPPSISFNKTINSRIGNTVYITKRTEVINILCDLITPSEATYTWTKDGTLLQPSVKDR

SEQ ID NO: 924942 - protein, 152 aa, Homo sapiens
MRFARGDEMIWWHVGSWGPCSATCGVGIQTRDVYCLHPGETPAPPEECRDEKPHALQACNQFDCPPGWHIEEWQQCSRTCGGGTQNRRVTCRQLLTDGSFLNLSDELCQGPKASSHKSCARTDCPPHLAVGDWSKLLNISTRSGWNYYGARW

SEQ ID NO: 924943 - protein, 131 aa, Homo sapiens
MDRLPPQEHSSSPATEQSWMENDFDELREEGFRQSNYSELKEEVRTHGKEVKNLENKLDEWLTRITNAEKSLKNLMELKTKARERDECTSLSSQFDQLEERKLYKPEESGGQYSKFLKKRIFNLEFHIQPN

SEQ ID NO: 924944 - protein, 171 aa, Homo sapiens
MRDSEKQRKTEERGQRTPVKQINGAPLIQVSTLQGKVQETVSQPHPGPWESDKSPLAYATDKDSEPLVESRTCHTGQPAETIQAKKRDCAMEQTQKRQLRFLFNRMNIHGGSPKGKKVFWEQHDIAKMQSLIFALTKVQWKTTFIHNGLSFPLLSHSANLQGIVRITFPIS

SEQ ID NO: 924945 - protein, 134 aa, Homo sapiens
MVLGIISRSFRNAEPSLPRVDITTKQFQSWICALVQKGSQATMPSTLVTVSVGGEKPTEQVDPENPLITWNEMDRRKDHGCSPGEETHEEDIRVLPSDLNPATEDPEGGFSLGPVWKAVLRAGPKLGSTFAYAR

SEQ ID NO: 924946 - protein, 151 aa, Homo sapiens
MLLHQGPRERKDAGGSSPPWRVARGVGWLWHQEDSVFTYTPCLMSLLSKPVIPNARTSRSISCLRLWFSVKTEPSHLRGRKQQQHPCPQQCPAVGDGALCAPKSEVVPAWPPPAGTGMDQSHHVWEVGVSSLDSLQHVWEEETFTVTFLQT

SEQ ID NO: 924947 - protein, 147 aa, Homo sapiens
MYAILLGAELEEKTHDCEYSSAWPPGARRLQAQRPCHGPVLLNMGCKEVERAGRGKRKKEEQMEPAAAMFCIHSYTAAHPHLSNTYPPVLFRQGNRYLGGVTYQDPLHREQHWAQCRQVYFHAPSMIFHLQGERGWSLLKFVMKWTV

SEQ ID NO: 924948 - protein, 142 aa, Homo sapiens
MVAAVAAVMVVNRHASCNDMQREQWRAQRNMEGQPLQSCPLLGMMLLKHEGLLPMAPEPWAHGRSRWQLERRPPPRIRGPQWKEATSFLPCRPEGVDLQVEAPQAQRPGNGARCSAENCSPWEDCAGVHQVESCPCEEAGPL

SEQ ID NO: 924949 - protein, 150 aa, Homo sapiens
MGSLFLLPNDGNGLLLLELSICPLWIKTHHIHFLSASMGWKSGVGLCSWWGWLAEHHASALGCRDGSSHCGPVAPEDSFTLKDSLHCPHWGQLWLNPPKSVQVKALEDEEANVDNVISNVPTTSNIQCDVRTWHMFNGYIPLKVTEGNKS

SEQ ID NO: 924950 - protein, 149 aa, Homo sapiens
MKSLVWVVRECIFERETFELIPAYCDTAPVKCMGIKLFKKREQQQVFEPFARYQEEEESWCWCCYPNNFRCERKEVIDFRITPSRTEILLKITGRLHDHLLFRVFEGLKASVTVYRFDLQMKFSSLLGSYDYLIYLTWKLTLDRGVYFI

SEQ ID NO: 924951 - protein, 151 aa, Homo sapiens
MQQESSGWHLMGARLGRSFQRKANRVWRGPPADLHRRGLTVRRKTNKQKGMASTSTKKDIHAKTPSEEHWRQRPKVAREQNWMENEFDKLTEVGFRRWIITNSSKLKEHVLTQCKEAKNLEKRLEELLARITSLEKNINDLMELKNSMRTS

SEQ ID NO: 924952 - protein, 192 aa, Homo sapiens
MVSLPSLPLGRRGTGASPCGHHHHRPTRSTARLLRVFSYGTRALQSSCGENYLAWGSSFRAEVEYPQPQPFKLKGSSLHFLVDKGANRIGYSYPGLGAIKEKKYQPPRHRNGGADSHAETVSIAQCVQHQQQCPVQSHCDITVAMTSCPAFLRVCPYSEFSSLTFIPSVSYLINHHYHHHHHHHHHQQNLSA

SEQ ID NO: 924953 - protein, 159 aa, Homo sapiens
MGSGKVKESLEGKEIGCSHWVFLKDNFAGYRILGGHFCFLHNLIITSLSFTSIVSDEKFAIVFIFVLLTFSFFFPDSFLPQPPDFIDDLQQFDYDVSSCDFLHNSSAWDLLRFWELRVYHFHQIWLFSKFIFLFILPLILDSYYMVVTAAFNGIIYLHY

SEQ ID NO: 924954 - protein, 140 aa, Homo sapiens
MPKTHLPAVYTGVWLLGPVWSVSPSPRRRLWHASPPPAHAFCVCLPSIPQDRNAKGWARQIIWSPDNGCTHGEKPRRVHGTFHYRGRQRKPKGVREGRSLNGNAKKRHKERHITKERPKENGSMTTVHLKNEGVPSTKEQ

SEQ ID NO: 924955 - protein, 179 aa, Homo sapiens
MPFSLELSFSSCEWLAQPLSPAMGTQGETYMRANTGEQVKTDTIREMTKLAYDKNSQELSSLPLLLPPVWALHSNLKEKEKYYTARLIKKQKIQINTIRNDKGDTTTDPKEIQKPLRDYCEQLYAHKLENLKEMDKFLQTYSLPRLNHKEIESSNRPIMSSKTEPVIKSLPTSGSGLQS

SEQ ID NO: 924956 - protein, 143 aa, Homo sapiens
MGSNVETGQIRSGLTITSGFGYKEVIGVDSKGTRGSKLEIDLRCRIWVSLLVIQGPRAFHLAGDECCQDWVLSFKSLLQQYEIKTRWFKLKQYTSRTDCVWQWRCCKRQAKSEVGGGNRNILSIFRKHTSQSVTIRTIKQPCH

SEQ ID NO: 924957 - protein, 145 aa, Homo sapiens
MAVLWSRKGGKVGKGLRNRMVAMSVRRERACGDQPGESSPTQDQGAGSKPRTGKAARRVKEGKEERLAQSQRVRELIVYKIRCLKGSHIGLQPHRESGDYWSFSMCPCEDHSIAIPPQASSAVCASDLCAHLFPMIPTGPQGGAV

SEQ ID NO: 924958 - protein, 282 aa, Homo sapiens
MPIVLVDWSDIQQCSKKAHDQFLADLASILPSNTTPLIVSDAGFKVPWYKSVEKLGWYWLSRVRGKVQYADLGAENWKPISNLHDMSSSHSKTLGYKRLTKSNPISCQILLYKSRSKGRKNQRSTRTHCHHPSPKIYSASAKEPWVLATNLPVEIRTPKQLVNIYSKRMQIEETFRDLKSPAYGLGLRHSRTSSSERFDIMLLIALMLQLTCWLAGVHAQKQGWDKHFQANTVRNRNVLSTVRLGMEVLRHSGYTITREDLLVAATLLAQNLFTHGYALGKL

SEQ ID NO: 924959 - protein, 191 aa, Homo sapiens
MSRRTAAEWKTDTGKTSRKHKGKRVEGFLTDARVRKWIQVMREAAEISRIIWVSSSHCRPRIRDPDGGRAQQVAGKVKSISVPLEAVVLVQELQKQDCKEPKQHTAHTHFQRSSPGKCHSLQSPGPRIELNLRPRRSKQFRLKNLFSKASLLRVRATGPQYGHHWMPVGSAGSQPRPRPSESASGFYKTHR

SEQ ID NO: 924960 - protein, 162 aa, Homo sapiens
MHRYTNKYISSLFPISTQLSAYWTHCAHCTYFKKRIIETQKYGNCCFLKLACGPVISSYFDGYTYSRSLWAHLDPEYLQKGQIGSQLHAGFFTTQSFRKPGSCLDISPLSETTHTCYISHLGIQTDTERRKYLESNSIANCEKLVVAFCVKIMCLCKPWVLW

SEQ ID NO: 924961 - protein, 154 aa, Homo sapiens
MHLPYNTPEPNTQILCLLGSLTGAVRCGPNSQKPLPLRPKSIKENLYSKKGNEAGGLKWTVSEGKAAPAHESSREGAVSCKATGVELPKTMGAHPLHRPDLDVRHGVKGDYFGALRLNDCPVGFWACTEPVAPLFWPISPFWNKSIYSMPVPPL

SEQ ID NO: 924962 - protein, 135 aa, Homo sapiens
MEHGARPAEMILSTGFAMKLTQKPTVISQMLSLICVLADPLAQLVGNLLALPSFDVESHQDGNISSLPSCTCSFSNVPTLADLGGLIWNVNFREPSAQQQACSVLSAPYFCITAPNCLKYPQWRFVLRSEDWSAV

SEQ ID NO: 924963 - protein, 136 aa, Homo sapiens
MEQSWMENDFDELKEDVQTHHKEAKNLEKRLDEWLTRINSIENTLKDLMELKTRARELRDACRSFSSQFDQVEERVSVIEDQMNEMKKEEKFREKRVKRNEQSLQEIWDYVKRPNLHLIGVPESDGENGIKLENTL

SEQ ID NO: 924964 - protein, 151 aa, Homo sapiens
MCSHRVTLTTSHSISPPPSLSYHHLSPGLQQLPTCSTQIHSLPCSKTCSHASSPPPPYPTTTIVTGPLLMVYCMPRDSPPPIHTHTQPSSYLLLILQTYITFPDPGHVPSLETCLQSCSGHVYLRFVITLLHSLNSSLLSTYFVPGTVLGN

SEQ ID NO: 924965 - protein, 144 aa, Homo sapiens
MHSGLVDTLRTTPWDAIQSQKGGKKSLCLETLLRCKIWVAEAFSPSEECLWKEDVFWLTGLITPSVSERTCPSTFDDLLSIDSGHRELLLLLQQPPVQLEPDIPSSAVLPFSCPHSQASVSTALVHAHKTQEIKKKNDKSSYLC

SEQ ID NO: 924966 - protein, 150 aa, Homo sapiens
MSLGALVNWNWGLGAAGLVELPLLGHLNPQQADDRLQEKLHSDSKGPSPAPFHDALNDPASKALRKYPEEGPPFGIYTSSPDSCFVFISTVGPFQFGAFIHYISKYLLKDQARDENLEVSFSSPAHAPGSDSILPLALSRCLCLEKASSP

SEQ ID NO: 924967 - protein, 176 aa, Homo sapiens
MFTGYNSVPEAAAEQLLQALPLRKQAGLSGPTLPCLLQLLCLYLLPILSWAESPPTPEFCPGKTVFGSPVRMCVWRQTFPPHAVGPQFFVCLVELAGASHFFQRVCGFFWFSWYVPVVVLGAEVHDMSLHTLFHLSEWELQVSSCLLVTIFLGNPQLSCMCISQGIGQHGPHIQKG

SEQ ID NO: 924968 - protein, 182 aa, Homo sapiens
MHHILPLHYVHHTLVLPTLTSLSLVFLITTQDKTPVTAPSAFHCSVDSELLLRAGSTANAALLSKSYLDVASPRKPSPASPEQTQASFCSTSTLQPSFANYRMISHLGASTPALSRAFAQIARHNAVGTEEKKPEGVWEQASVDSTSATSSSYSLNSRSSALYPYSSSRTVGLQRIVDLVIT

SEQ ID NO: 924969 - protein, 143 aa, Homo sapiens
MESSWEDLPLALATGVYSGTGCGRQGQGSLQVTGEMLRGWVEVACGSSAFILAVAAVGSGSSMVELLLPLGIPVFNWGFCQKSQNALNLLFPHETHSFGSSQILQILAVLSYSPVLSQHHMAFDKVRPQLQPKQLNIIESPAH

SEQ ID NO: 924970 - protein, 139 aa, Homo sapiens
MGCQENVAVTARTASPKEASSFIKGTQATLGREKSLHCADESSGLQQCSRNESKGTVHELEKSRTVELSTAKQLGSVLDVHAELETGLRENSCGDKEVAILAFSQQQFTDGPERAFMSTPIADTFQLFSAELPLFPTLG

SEQ ID NO: 924971 - protein, 149 aa, Homo sapiens
MVWYCVLLNMLAQNVPTHIHLSYKSSPHRLQLVSPSNAALRRAGVCINISLRICQFQLHRIVCLQGPCQHCLDLKIKSKEGTSMQLIHKAGLNFRQSSYPVLLAELKLPSKICVKVLTFSTPECDCVFVETGPLKRYLRLNEMTGVTAN

SEQ ID NO: 924972 - protein, 129 aa, Homo sapiens
MAPLCGQMDTARNGCVRLMTPIELRVGYSWEKELCFSLCEQFFPPREKQEELARKHARFVLSLNQTMEKKATTTVYINETYTKINLKREDIALQKKCIQEAEELMEKERAEYLIRKQELTAQLMIKRKN

SEQ ID NO: 924973 - protein, 152 aa, Homo sapiens
MADNVNVECILALDLVVATTEPWIVCRRLNVLCTFTPHSSFYPINDSGINPENYVGNPEGANAAPCKTRPTAEESEKSTQFLTTSTHLDCKVSKAVCCPPGVYSTLSTAVMKDNEQKIQEGESAVRIQVRECLFLLVGQGRISQRNWCFMDG

SEQ ID NO: 924974 - protein, 136 aa, Homo sapiens
MRILRISYLSIGIFKGQLQDHSDLKSAQYCLLPKARSYHHLATTNVHSRTNGSTISRWQIQPGLCPSLQGSEFPQPWEGPEMSSESQGLELGSLGIYPVLYSTAYKMAPKLQEKALSTLPSPFLNQRLGVISKKNA

SEQ ID NO: 924975 - protein, 177 aa, Homo sapiens
MPKYRNIHSVPENYSCGLNLGSSVEVVADEHMVGQEGSDTSKLEMFFLGYPRIVGLSLFPNLTSLTIVAQDIKEISGLEPCLQLKELWIAECCIEDLNVKPNIKTLEHHLGNIILDIRTGKDFMTKTPKAIATKAKMDKWDLIKLKSFCRAKETINRVNRQSTEWEKIFANYALTKV

SEQ ID NO: 924976 - protein, 141 aa, Homo sapiens
MPRNWKTTELFLAAAATSSFQELPGQSCQRGVWCPVSNNQAQCQQWQALIRPQWQWQRKDLEVQVVFGYMDELYRGEVWAFSSSHETTVKVLAMACSHLKARLGMGPFPSSFRWLLAGFRFSHVVAPRASVPHWLLARSNP

SEQ ID NO: 924977 - protein, 137 aa, Homo sapiens
MDNEAQAEEASDADEELIGNYSKDHFCYALAKNLEALCPWPKDLWNFGLVSRDLGYLAKEMSNQQSIQDVALLLLTAYAVICPWLKGAQVQLRPLLQRVQAISLGGFHMVLTLQVHRMQELRLESLHLDFRGCMGKP

SEQ ID NO: 924978 - protein, 190 aa, Homo sapiens
MHPFLPFSVAAHLENCSFPIQCVLVEAVKQYLPLPQPTARDEADLIVVDKLFDMLLDLSGPSAADLLEVSGGPLQTLFAWVSPAEAAEQQILLPDPSSGSFVPEGHPPVCGVCRPLLRGVSQSGYMGVRDPLKEAVCPFLELERRAERTTALFSTVRQGCLSLQKLSGAVRRSCLLPFVLLCPAPRGGIY

SEQ ID NO: 924979 - protein, 139 aa, Homo sapiens
MTPPLGPETDPQSIASKKSVPSVIQSQGNEVYQQLEELGNGFFPKNAAIMTQLFLEKHHQEPHAFPAWFLLPDLLSTYASHRKSVTVNMMKSVTGNMMKKRSSLPHCESFTNKRPSISVWFLPWVIEQKEVFLKACTGP

SEQ ID NO: 924980 - protein, 172 aa, Homo sapiens
MGNTLGVFQHVCFSLLPARNMKNLLGFLLSAVKDKKQEKENWRAQKKAGRCGKVWNFLETCEWLDQSADSDMDNKVQTEVVSDVNEELVGNWSKGHSCNAKRLVAFCPCSRDLWNFELERDDLRYLAEEISKWQRVQEEAEHKSLENLQPDDVIKKKNPFLERNLSWLQKFA

SEQ ID NO: 924981 - protein, 124 aa, Homo sapiens
MDQSAHSDVKPICPGGGGRREREKKQLAHSGSINHWKGEPLPGEVGDSTWKLPDGALSRGVVNHQGSANGSPAHWPIEKGLVVLLAADAVHCPRKPGTGQGCVASCVHPCPFDESQVDKLPIGP

SEQ ID NO: 924982 - protein, 170 aa, Homo sapiens
MRQALTPAPILLAFKALTQVTSLLVVVVMLLVVVGVGGGSGEGSDDSGGSGGGGGGSGDSGSSGGGGGGDIEHTVEACKPRKAGPRLSGSSGSGSGSGSGSGTGIERRSAPSEENTGCGGDSQSSQRPSAPARPGQRPRSLQGEARRCLGIPAGSPACRSPSPDLTEISH

SEQ ID NO: 924983 - protein, 134 aa, Homo sapiens
MIMRQALTPAPILLAFKALTQVTSQKLCFLIWGGGSGGNGSNGSTGDSRNGSDDGGSGGGNNGNNNGSDVAGVGGSGVFVGSAGCGGDVIGSGEHLIASLLFFLLLHPHFLLLFVILLFFLLLPCLQINLSRES

SEQ ID NO: 924984 - protein, 166 aa, Homo sapiens
MKKIIINKKSDSVACGQDLGEYNSAQKRENLTSLSLKKVEKFSPSSFRESQGDSTLMSGINALIKETPGEILHPFYHVKTQQEGIIYKPESRPSPDTKFAFILDIPISRTELLKTHVSVKSLVRGCFLACRWPPSYYVVTWTSLSGHGGERESKLLVSLLIRTLIL

SEQ ID NO: 924985 - protein, 161 aa, Homo sapiens
MRSSKLCFNKLHWRVPYSLKFGNHDPEPGGLLPSALHFSGKFKRTQEPLQKHTPRPYKEVLQLHHCEMTLDDYISKLMEYPVFESHFRIIENKAHGDMEVSLPMPVFPDDLYCCLQEKVDYQMPVTVAPESTKPLSYSRTSGVFWQLPLPFKSPGGQDMPS

SEQ ID NO: 924986 - protein, 155 aa, Homo sapiens
MVRTRMQVRPNTPGPHQTYAAALILDFPASRTVKNVCHSQVTQSKVFCYSSPNGLRKIPDTTQGVAANKDQSHLQEYDEAWQMSTHVCAPLQLFLHQTFWAPSCSGPGISSGAQQAHAEIPASSQDLSPPPVHSQYLLSKISLKCAGLLDVDIIA

SEQ ID NO: 924987 - protein, 170 aa, Homo sapiens
MPVKLEFQRVQSLKPWHLPRGVEPLGAQKSRIEVWELPPRFQKMYGKAWRPKQKFTAGAGPTWRTSASAVWKGNVGSKPPHRVPTGAPPSGVVRRRPPSSRSQNGRSTDSLHCAPGKARDTQQQPMKAARSRTIPCKATGEELPKAVGTHLLHQYDLDVRHGVKDIILEL

SEQ ID NO: 924988 - protein, 136 aa, Homo sapiens
MWVFMGSSITPHPSDMHSSLYHCELLISSTLHGYHIWRLLLGSDLASGNGKDDAAEGGSSGGWKSKIKVSEGLVSSEASLVGLRMANVHVCISPWCLFLIYEDTSHAGVDPLHLMTAFSFNYLLERPISKYSHILR

SEQ ID NO: 924989 - protein, 205 aa, Homo sapiens
MPMICLVFLVLSICPKDMRADICVHLNRKVFNEHPAFRLASDGCLRALAVEFQTIHCAPGDLIYHAGESVDALCFVVSGSLEVIQDDEVVAILGKGDVFGDIFWKETTLAHACANVRALTYCDLHIIKREALLKVLDFYTAFANSFSRNLTLTCNLRKRDFEEKTIALKTLHATFESEQSVDITLITSIDHQDCKFTPTYWPCWQ

SEQ ID NO: 924990 - protein, 167 aa, Homo sapiens
MEMEMEIWRWRYGNGGADGDGYRDGDGNGDGDADGDGDADADGDGDGDADRDGDGDADGDADADANAEGDGDGDDADGDGDGDGDADGDADGVTDGDGDADRDADADGDADGDGDADADADGDGDGEQIEMEMEMEMDVQMEMDTGTGMEMKMEMEMRRHPAILNLL

SEQ ID NO: 924991 - protein, 153 aa, Homo sapiens
MRWWGKVSCIPFLPDRLTPSHLSRAQNWRKERGWIGYQFAENRTLFDVEQKTKKESSFLLGNAQIVDWPVVYSNDGFCKLSGYHRADVMQKSSTCSFMYGELTDKKTIEKVRQTFDNYESNCFEVLLYKKNSSFWLTSNSERIIFTVCKPFKV

SEQ ID NO: 924992 - protein, 147 aa, Homo sapiens
MEHAGDLGLFLCFRIFTKVPHGPGILSPESMVLTTTFLCLLIGGGTDGINKKPGMRSHADVNLEINILIVGVTGVEDATGEKENTQREWASQAEGGVSQTRTVDSVKASRSLKVSAKQKPMIDITRIKSNGFKHTMGEKSCNHKGRQ

SEQ ID NO: 924993 - protein, 153 aa, Homo sapiens
MLICRSQGITSRHHKLHWELSRHPLATSQGYCSYSSPHYLQVKNHPAQNVKLLLLFFSSNAHGNSRKPPTLILCSESHILTTFDWTRNFELTLTDPRLCSGCSIKWRQCKNESLTCHFAQPSLPLRKSERRMTEAQSQQGQRQKGLSAFPSYG

SEQ ID NO: 924994 - protein, 141 aa, Homo sapiens
MLSIGAIGEVTNLVTSGHVTPEQQGVGNYAYILAEFKHSRVQAPPMILFLWPFISLTKKGPPGRGAPPPPGRGGGRAEAGPPPPSRTGRLAGRGLTPTSLPDGAAGRAGADPPPPSRTERLAGRGLTPHLPPGRGGWPGGG

SEQ ID NO: 924995 - protein, 347 aa, Homo sapiens [sequence omitted]

SEQ ID NO: 924996 - protein, 140 aa, Homo sapiens
MGSGESEVLVLVPVLPYISSVTLGKSFIWQTFIEGFIHENHGNESKVPLKLTYEKEEVPGVPPQMIDGASSCTPKSPTVYRIQGEKRTWIPAPFLSFTCQHQLAFVINLRFPNHVDFNKPPDPTCDGSKNSSQFLPRHPG

SEQ ID NO: 924997 - protein, 141 aa, Homo sapiens
MGPTEEEEKSNMVVEMMAPAAHLEPLLQRLWLQGARCVCAWDSTVTPAFCHLSPLWTLGADEHGREAEVEPKIAQCRPAGTPQHKHPRYCGRHVDGGRRKSCSWTEKGRSLVKPLPSSQGWPEAWGPGCQFWGESVAQSEN

SEQ ID NO: 924998 - protein, 158 aa, Homo sapiens
MPGNSPHYGRWPQHDFTSLKKLRPQSVTSRIQPGSDVIVCAEMDEQWGYVGAKSRQRWLFYAYDSLRKTVVAHVFGERTMATLGRLMSLLSPFDVVIWMTDGWPLYESRLKGKLHVISKRYTQRIERHNLNLRQHLARLGRKISAMSTEKNVHSVDLG

SEQ ID NO: 924999 - protein, 153 aa, Homo sapiens
MAPKHLSPLPPQVKKPRPPPALRPEKTLTSAGLLKKGEEEQEAIEHIDKVRNEIDRLNEQAREVIKDDIWPNLLQYYLVSDMDDEEGEGEDDDEDEEGEGEDDDEDEEGEGEDDDEEEEKGLEGIDEEGDEDEGEEEEDDDEGEGEEDEGEDD

SEQ ID NO: 925000 - protein, 170 aa, Homo sapiens
MPRKRFWEDPKDPSVAAMLRLMQEDPNCHKQHLSNTATYLGTDQEAVTDGRRKPEESGTTSHNDIYHNESAPTIKANCPQKPICKQDWTWPEKMNVLVKEDCIAEQAEVLRNDSYGIIIDWPPKGMFSLNCTSQSACHSHTVFSWSEQNGQMVEMARPSPDTENAVLKAT

SEQ ID NO: 925001 - protein, 154 aa, Homo sapiens
MPMDSQYWILPVTFPFYSALPRAGLAAAAVGDGGVVPSPIRVIFPGEYGASAESYKSPGKWRKASSHRPHPTHTQPTVRKSALTTTVLPINSTESISRELHFREPAAVTQFLQRVFGFSRLFWYVPVVVLGAKVHNGDADWCCEKWILRSSNFE

SEQ ID NO: 925002 - protein, 178 aa, Homo sapiens
MFLCCIPTSPGSGFRNGRSSYLTPDASGHLAEAPPPQVPQDRSHQGAIRPQIDTKVPDVQQAPTEPQTHVDIRPQVDTQSPGGQSGPRHTSGLKWTPRPQVDIWLPGDHQAPGRHQAIGEQQDAVDQKATAGYQSLVITRPQWDIDLRQASGPRWTYRPEVEFTLRGTFGPRCASGLR

SEQ ID NO: 925003 - protein, 164 aa, Homo sapiens
MGMPGQGTTALYHPQEGVPCILALLAPALVQRAPDELRPWPQRVQTISLGGFHVVLSLQDSAKWKCGVGGPTRGPDWGGGGCLVELWEGGCCPPDPRMIEPPAAHVFSVEKLWEQSCPRPWEPTLCILGMLYVPRMWDMVSKEIILELRDLMTALLGFELVWGL

SEQ ID NO: 925004 - protein, 149 aa, Homo sapiens
MFPAQASFRGKLPEEWIHPEEQGGRGNEPIARILRLLKTFARILLLKAAPFDSQLLKKLWDIFKAFYIKKRHNILLWVCVQGPGRAQLPRFCAEVTKCQKHPVPMCTSLQQGQSCWRNLRSSLFQPTFLGPQQDDHCWALVCPFQQLMS

SEQ ID NO: 925005 - protein, 176 aa, Homo sapiens
MELAGQASPVIPPGPHLHIVLFQPEPLELIETQAHAAASGAEIQLFPVPAVEPVPAPGADSPPGTALELEEAPEPSFCCPGTAQDQPSEELPDFMAPPVEPRASALELKVWLELEVVERGDQHSSSQKLPHCSQSWAQAAALLLKSLLLLLLGVFACLQEVLESKKRSLFAERGIM

SEQ ID NO: 925006 - protein, 149 aa, Homo sapiens
MEPWNGERRRSSFALVQGIVRPRSCTEAVCSSTAVGKNCTISGKPNPAAVLKRFPVESPQGGLPLILTISAQALFITAFLAPGLAHEKWVRLRAKCVFMVTCFLQASFLCANIFGFLVKVFSSCMRFHFSYQMFVIFYLWFKELPALPR

SEQ ID NO: 925007 - protein, 253 aa, Homo sapiens
MAWGPKEHLKRAAVPKHWMLDKLKGIFAPRPSTGPHKLRECLPLIVFLRNRLKYALTGDDVKEICMQCFIKIDGKVRVAITYPAGFTDVIGIKTVEEAKYNLCKVRKVTMGMKGIQRLVTHDTGTIHYPDPVIKVNNTVQIDLGTGKIINFIKFHTGNACMVIGGASLRHVGVTNREGHPGSLNVGHVRDANGNSFALRLSNIFVTGNGSKPWISLPREKGTRLTIAEKREKRLATKQQNWFQDLLQIPKSKS

SEQ ID NO: 925008 - protein, 394 aa, Homo sapiens
MWLPRVSSTAVTALLLAQTFLLLFLVSRPGPSSPAGGEARVHVLVLSSWRSGSSFVGQLFNQHPDVFYLMEPAWHVWTTLSQGSAATLHMAVRDLVRSVFLCDMDVFDAYLPWRRNLSDLFQWAVSRALCSPPACSAFPRGAISKQDVCKTLCARQPFSLAREACRSYSHVVLKEVRFFNLQVLYPLLSDPALNLRIVHLVRDPRAVLRSREAAGPILARDNGIVLGTNGKWVEADPHLRLIREVCRSHVRIAEAATLKPPPFLRGRYRLVRFEDLAREPLAEIRALYAFTGLTLTPQLEAWIHNITHGRGSASQSKPSILRLGMRATSPRPGATRCPSLRSCACRRCAPARCSCWATGLCTLRTSSVTSPWIWCCHEAQTTSAGHRLTENSGP

SEQ ID NO: 925009 - protein, 151 aa, Homo sapiens
MSSKFTSLCALDQSIYPIGSVVPSRGWTWESPRSPDPTPRHSDIIGLRYALGITFILLIIECQFPAQHQSQTDTQLVVEWKDAEQQGVQSQGRCKVVVILKQVSYTKWLFIENDIYAICADLTDCQISEKGLAGTVEDADVEPLNEGVPQP

SEQ ID NO: 925010 - protein, 153 aa, Homo sapiens
MHREGGHVKRKSEIGMATDGTSGIAGHQKLRHEELESGEGTWKGVRVAWLCRTGPVTGQVLKPMWIRLCDPGREHVTQASQSQGPYPLATAMGLVDYGVSRQWGPLELNPTGDSGSHCGAHLRVPQRGEKAGTLPQVPVHSESAHAEEHMYWR

SEQ ID NO: 925011 - protein, 187 aa, Homo sapiens
MEQRFTATHTLTCSLELLKSENETSVHTRSSRSPPEDSVAIKRAGLPQLKSAVLTDTVLLSLCGQICQMPQPSHQSQQLQEQDKQMRLLIRATEKDTVSPLRYLPKVATWVTRFAALRTWCAPSSLENVASPLIGPRLRAPDPHDWTSIHMQTCQWDGPFGSSGCGRLHPRHLLPKLGAPAVTALGT

SEQ ID NO: 925012 - protein, 323 aa, Homo sapiens
MHGAYKQTITEDSCFVSGCSGNSRAREATGADIPGPAGGVGRGAIWKFPDLREHLCNWFRGEVWTMDSLKDQEQTEPFPGQAGPLPPTGILSTPQGPSQPQRVPAVKARRADDGTEALQGQGLHYYYYYLHYYGCCHDCHCYQYSYYYYYDTSTDLEGQHRDDDEQNGHEDAHSQGPDVHMLGGGGIGLGPVQVVNHLPVPRLHGVGKCYEAQAAGVHEEGVKQGPDDMVGHRGLAVDVDHVDFMVSSEDQLWLGCWDGSPLMTIMITTAVPTIIISSIITIINITIITRIITTDIGITTTTTTYHYYCYCRYRYYYRYYYYY

SEQ ID NO: 925013 - protein, 156 aa, Homo sapiens
MSPVITYRPYRDSFLYCLSPAARTRGPPGWGLCLFHSRFPGPRTMPGTAVAQGVIVRGSSPRKRCPDSPLRDKKAIKGKGEGWGEEKGCHGENHGNVRFRLRIAAGYSRVKSRARKESCQETYNHGQRGNKYLLQMAAGETEKARGKLPPLNHQIS

SEQ ID NO: 925014 - protein, 139 aa, Homo sapiens
MKGCVCAQEHLTILSQEPAALFILRLTSRFYFMKAPLKMVSPSQILLGRWESREANGSARLWQGRGPAKGVAPQSQEGNPSSRSPGSTAGNGLVAFVWQVLAPLLCRQERAPYEMSVIIIRTLYSRGNCGPERKNRNGC

SEQ ID NO: 925015 - protein, 274 aa, Homo sapiens
MVRQWTHLLQGKKGKGSFLEEEESGRPHGYNYTEQQRKSIESPTSQTTPQCQAIWDSWSPYEELMSPEQPSSKEGQEQKQWTLEHNSPHTKQTGPRGVCESRLTAAATSPHSRQNSSLPPASPDPGPCCWELQENLSSFSSNSNERKAIKTPGRMGQLRPVSPTLPSGLSAGRSCRCRPWCCPCAACGVPEPTHPCTFEHSPFPERSLNYPNSSVTSGPALPNPLPHPGSKPELQQLLSAAPSRLPAVSVPHRRGFLLLLPNRDPDLSGSASSP

SEQ ID NO: 925016 - protein, 301 aa, Homo sapiens
MVIGELSVLYCPMDHSKLSLTSRKEERRVPCGVSMQVVTVGPVVEWHPVEFLISLGWAPGSGWLRIIRQGSSVTVLRKAGWPGPLAYQDPYPSSPGPAMGHPQKHRWSCNPTWQNEAWEATLTRAQGSVSGWSGPGWVALWGREKEKSRLFGVRESGRESPDWENSPLCGKGERTISEEAFGGQQRSNPRAEEMRGPASSEAFPEETSPTDLQEVELMSWILSPSQDLCFNPFCKVPFVRESFGDGQRSALSSKIYGQVRTEEHVQPSSTYYSFNTHDNPVRQSRCLCPSKLAAESVFFFY

SEQ ID NO: 925017 - protein, 155 aa, Homo sapiens
MPLHSSLDLVTGHTSPQRWLGNESNCSSVCFITNRTVRGVGEWCWQGPGTVSGTVKTRSERMQNMFGSNASRQFRECCSPVATAWHPSHFLQPHPCPVSSSQSGVLLPASPDTLPGTLELAHSFSKDPRVSNTNTGIQHARVCVRLPRQDGASDH

SEQ ID NO: 925018 - protein, 281 aa, Homo sapiens
MTDDESESVLSDSHEGSELELPVIQLCGLVEELSYVNSALKTETEMFEKYYAKLEPRDQRPPRLSEIKISAADYAQFRGRRRSKSRTGMDRGVGLTADQKLELVQKEVADMKDDLRHTRANAERDLQHHEVHLPASAACPAQAPHLYPTERYLEWVHVIVGALEETQAVKREKPVVAQSKSESFKTREANGAAFGPWPKALEPPGSCWYKSEGLKAKNLESDAIIEEAEIRWSEVSREVHEFEKDILKAISKKKGSILATQKVMKYIEDMNRRREMDLGLL

SEQ ID NO: 925019 - protein, 318 aa, Homo sapiens
MCLLPLCGHKYVSGPGWHSGPSPVGLRDMDGPCWLEAAGGTDLEKHRDLLMVENERLRQEMRRCEAELQELRTKPAGPCPGCEHSQESAQLRDKLSQLQLEMAESKGMLSELNLEVQQKTDRLAEVELRLKDCLAEKAQEEERLSRRLRDSHETIASLRAQSPPVKYVIKTVEVESSKTKQALSESQARNQHLQEQVAMQRQVLKEMEQQLQSSHQLTARLRAQIAMYESELERAHGQMLEEMQSLEEDKNRAIEEAFARAQVEMKAVHENLAGVRTNLLTLQPALRTLTNDYNGLKRQVRGFPLLLQEALRSVKAEV

SEQ ID NO: 925020 - protein, 162 aa, Homo sapiens
MGNPTEGRELVMCVARAYSNAFPASYWVIWLYSRHIWGQHHSDFSLHVMEPPTARKPVFPHSTQGLIQPCGKAWNGGEMPQPPDLHGNNPGTLRGLGGPKGTQSSVPTAVTLTMPMNWVSTSLPHQLCCWHDLLDILPVPKSLSQAHSSFLPCRFVGAIYVF

SEQ ID NO: 925021 - protein, 395 aa, Homo sapiens
MVVKEVEKMKAVMEVEEVMMVLMEVEEMEVMMVIVQVEEMMVMTEVEKMEEVTVMIDVEEVMMMIEVEEMEEVMVMMEVEEVTMVMTEVEEMEDVMTMVIEVEEVMMVVTEVEEMEEVMMVMMKVEEVMMAMIEVEEMEEAMVMMEVEEGDNGDDRGGGDGGSDGDDGGGRGDDGGDRGGGDGAGDDSDDGSGAGDHGGDRGGGGGDGVDGGGGGGDGGDGGGGGGDGDDGGGGDDDGGGGGDDGGDGGGGGGGGGEGDDGGGEESGGGGGGGGGDDDGDEGGGGGDGGGGGDHGGEEGGDVRGGGDDGGDEGGGGDGDNGGGGDGDGGDGGGGGDGDDEGGGGDDGGDRGGGDGAGDDGDDGGGGGDHGGDRGGGGGDGGDDGGGGGDGGDPVV

SEQ ID NO: 925022 - protein, 129 aa, Homo sapiens
MLAQSRAIPQGSWSVWGIQEVEGMVGNKRADPSLLYLKWQLLPGPAHCHPGGMLGGHPQHGPLSMVSVDLSGILTEWSWKEERLYSFSEIRWYVCEGVAKGEQQLTQWTGRGRPTLNLGGHNLISCQHG

SEQ ID NO: 925023 - protein, 200 aa, Homo sapiens
MPTWNSSWPRSAGCSPGSRSRLSLHTSLQAEGAGSGLGQPRKGLPQCSGGLKGSSSAAKMGAQAEEAPRASEGCEDCQHAVLLSGEPTSRRWLITLPVTSRSNSIGHLKGTPGKSKEEIKATVCAPTLKNGFWIAERVMTVSGHEGAASSRALREELRLLFSSCAHTVKELLCVREKSTELLLERSGVDCSFANIPPLAR

SEQ ID NO: 925024 - protein, 480 aa, Homo sapiens
MSSTVSYWILNSTRNSIATLQGGRRLYSSPEQINEVLRAGETTHKILDLESRVPNSVLRFESNQLAANSPVEDRRGVASCLQTNGLMFGIFDGHGGHACAQAVSERLFYYVAVSLMSHQTLEHMEGAMESMKPLLPILHWLKHPGDSIYKDVTSVHLDHLRVYWQELLDLHMEMGLSIEEALMYSFQRLDSDISLEIQAPLEDEVTRNLSLQVAFSGATACMAHVDGIHLHVANAGDCRAILGVQEDNGMWSCLPLTRDHNAWNQAELSRLKREHPESEDRTIIMEDRLLGVLIPCRAFGDVQLKWSKELQRSILERGFNTEALNIYQFTPPHYYTPPYLTAEPEVTYHRLRPQDKFLVLASDGLWDMLSNEDVVRLVVGHLAEADWHKTDLAQRPANLGLMQSLLLQRKASGLHEADQNAATRLIRHAIGNNEYGEMEAERLAAMLTLPEDLARMYRDDITVTVVYFNSESIGAYYKGG

SEQ ID NO: 925025 - protein, 165 aa, Homo sapiens
MLDIISHQGNANQTNIRHYYFTPTRMARIKDQPTRPQLQHLEGHPRHKGTFWRGRTCSLKASKLGCESCLCSHCVASGTVLPLSDSNFLICKVGSSRNPRGRPRGLRERPGGLLVLAIPNLVTPPRYTPMAALWGPPSGPEEEASLYIQCGPHQTPDFRVHSCLP

SEQ ID NO: 925026 - protein, 421 aa, Homo sapiens
MLSASSPCPCRPGPARPIITVSSLQFRRFQEVTWTHLQNIASNYNVSYNVDVRFRSLAEESQAVAQAVNRSQASVQGELAQLKAWVRKLQRRGRKVDTRLRALDLTLGERSQQRARERKAHKAQRDALQDSLARLEGLVHSQGARLAALEGRLPVAHPGTAALGPALDPATPEYGPHVQSSRLWNWGDPIKRVKETLQGSHRQGQRRVICGVGPTLVFPNASTRNVVFLSPGFVTALRALSFCSWVRTASGRLGTLLSYATEDNDNKLVLHGRDSLLPGSIHFVIGDPAFRELPLQLLLDGQWHHICVIWTSTQGRYWLHVDRRLVATGSRFREGYEIPPGGSLVLGQEQDSVGGGFDSSEAFVGSMSGLAIWDRALVPGEVANLAIGKEFPTGAILTLANAALAGGFVQGANCTCLERCP

SEQ ID NO: 925027 - protein, 137 aa, Homo sapiens
MICLIPPPAFLEMQCWQGGHRRIKIPDSSFTCLEAMGREEPEKLHVDQAGYDRLDPTWCWIPPRFLPGPRYMLINILNHTAVSVSTVPRIPYLVEVVNYQRWDDWLRVSQMKEGNHLPGWYNSRCEDLEAGQNRRLV

SEQ ID NO: 925028 - protein, 155 aa, Homo sapiens
MIKSQSFSEPVSLGFELHKRFSVLSFSLSAPGFREGPLNSHVFWIVAQLLQRGMALNLKNKEKRGEVLVSLKIIRPREISLKSTFKKKQTKLNAFPVIKSVLHNLSIGAEERAGEKGARIFTLHQESCKLRNFCMVERISHFSLLSWVWMACQNC

SEQ ID NO: 925029 - protein, 623 aa, Homo sapiens
MVASQAYNLTSALMRILTRSRVLNEEPLTLAGEEIVAQGKRSDPRSLLAPANLSDVVQLIFLVDSNPFPFGYISNYTVSTKVASMAFQTQAGAQIPIERLASERAITVKVPNNSDWAARGHRSSANSVVVQPQASVGAVVTLDSSNPAAVLHLQLNYTLLDGRYLSEEPEPYLAVYLHSEPRPNEHNCSASRRFRPESLQGADHRPYTFFISPGTRDPVGSYRLNLSSHFRLSALEVSVGLYTSLCQYFSEEDVVWRTEGLLPLEETSPRQAVCLTRHLTAFGASLFVPPSHVRFVFPEPTADVNYIVMLTCAVCLVTYMVMAAILHKLDQLDASRGRAIPFCGQRGRFKYEILVKTGWGRGSGTTAHVGIMLYGVDSRSGHRHLDGDRAFHRNSLDIFRIATPHSLGSVWKIRVWHDKGLSPAWFLQHVIIRDLQTAHSTFFLVNDWLSVETEANGGLVEKEVLAASHAALLRFRRLLVAELQCGFFDKHIWLSIWDRPPRSCFTRIQRATCCVLLICLFLGANAVWYGAVGDSAYSTGHVSRLSPLSVDTVAVGLVSSVVVYPVYLAILFLFWMSRSKVAGSPSPTPAGQQVLDIDSCLDSSVLDSSFLTFSGLHAEGVRA

SEQ ID NO: 925030 - protein, 141 aa, Homo sapiens
MVMNLKKPGFVLPGMVAHALSHTLNVLTDFQKDISLEKDSIINPRITCSKQESENSEGKSTIFSWPAEFWCYQQSNQYCSALLEATVKGIQDLTSRQRDIMKLNAKETREKPSHESWDSIKKAEVPLKRFMAAFSVFLKES

SEQ ID NO: 925031 - protein, 151 aa, Homo sapiens
MGNITKSTDLNPEFKKVLFWGSEVVVVQASKGKGVILEEAKDCVILWMWKLLDVFEELKESRCRLNLMMINQGFQRGDLLIEHIIELFRFIRTIISEGGMKESAFEQVAFENHYHGLYCYGRKNVLCETLNFHLKSKLGEVRNGKTGHDTC

SEQ ID NO: 925032 - protein, 156 aa, Homo sapiens
MCLNLGTGTQSYRKEPGIGALFLSLRGCTEARQQRVCKPESMCMALHTQSATLIIPKIVLVILVPRISKKCNGCFGLVLLLDALLQKPEKVITGSMGSIRPQFVDTKGGMQFGGNLRWWMMDGLLMIGAVGYQDHETYKSEVKQTGLVAPLTLWGP

SEQ ID NO: 925033 - protein, 200 aa, Homo sapiens
MTLRTSFVEDNFSTGRGEEQKDGFGMKLLHLRSSGISEILIRSVQTGSFACAVHNRKVTVMVNIECQLDWIEGYEVLFLGVSTPSFSAFGLLDLHQWFARGSRAFGHRLKAALLLRFGDSDWLPRFSACRQSIAGLHFVIVQAMVSLNQIDDRWSNDKWSKSGYTLKENVARFVIDWMVKVRGKHQRRVTPRFLEDQVLK

SEQ ID NO: 925034 - protein, 149 aa, Homo sapiens
MSSCAIWLFKNVWQFSLHSLGPRSGHVTDYKFLEGSPKAEWMPPCFLHCLRKHKPIKPLFSINYPVKRKLRDLREINALCSVAKGPRAPGKLLVEAEVGLDCCGTALQCGVLAIVLCWDSGSTIWFLCMGALVVAGWPYGAILTHVFWE

SEQ ID NO: 925035 - protein, 206 aa, Homo sapiens
MSQRISSSDRQQHISCIITSVSSQSQHTRHHHRDRQRYISVSASSQQHRRSVQHLIMIIICISSDLNQRQLSSASVIVVISNSMCIIIISISVIQHRHHRVISTIIIISIVCISALIDIASHYHINDQSASSSISSSIISIIIVVSMSIVIMNSVIIVCIYGVVIVVMIDIMVSSSADRRQQHVVSSTRHSSSSAQQHVTTSHRTS

SEQ ID NO: 925036 - protein, 172 aa, Homo sapiens
MNSMIKRSIRHVKGPTVPSVVRLEEGHRDQQNCSQNKTNHDTGPSSMSTTLQEIFQAENTIMLLERSIMAKEGPLKVAQTRLECRTRRPNMELCRDIPQLKLVNEVFTIDDTLQTLKLRLRETQDTLQLLVMTKCRLEHELAIKANTLCIDKEKCMGMRKTFPCTPRLQFHS

SEQ ID NO: 925037 - protein, 181 aa, Homo sapiens
MLVEKMNEYYSGCIQFNGSEMRNCVIPRLDILQWPLLDTPSHLMEEPVAYQTEIYVNYALGIPLFYQLSNTIENYNAHTPFYTFCGTQGTFTVIKGTAELAKVIPGTWQSLGRCPGVLAWTPSSIASEMKPKVKIKPYQTPRKAAPLTEEMLPWPCTLSDKGKRMESRNSCPGVHPLRQCH

SEQ ID NO: 925038 - protein, 150 aa, Homo sapiens
MTSILGKADSSAHAAGIPGCQDSKVVESSLIWNSLREQWQAFSPVGSGNGSLAGSGAQWTPCWIQRGGSQPRVCDGSKQQWWMERAHNACPVRRCSVDRLVSHRNCYWDLRHEGSQNLNTGPRNSWSKKKLFRPVDFTLCKNSSTALFMK

SEQ ID NO: 925039 - protein, 149 aa, Homo sapiens
MWKVMGALHENKRTGMRVTVRIGNEIRQGKQPTKRLLSNQLSMWITRTESCWITDVAGNQHSQQTNTRTENQIPHVLIPEWEVNDKNTRKQGGKHHTVDGKTFPGEKSLLAILFLAVAVHSFTWKALEELKKNLKIYCARTSLILLNQG

SEQ ID NO: 925040 - protein, 144 aa, Homo sapiens
MRFRRGVSKCRVVQQGVGGPEHWVRLRLQEASRSRCPQLKTATHGAFGEFGGKSQDSRTGAWGIGDRLYYHPHFTDGDTELEKRKDLTRTVQQAGGNIKIPYVAPAEFPLGHFFLNRERQRGFGCHREPLQFCDEGRGMMKRKC

SEQ ID NO: 925041 - protein, 124 aa, Homo sapiens
MTVVGVFSNLGLLECSKLCHSPAEYLGQNREKQGVTMSERGCEPLALEPDLYLPGLQQVPEFLCISKDKPFRCLVYGSALAFNAQEIILPYQAYRKWTQVQYILSTATLIKSTEKIVGLLGLTH

SEQ ID NO: 925042 - protein, 156 aa, Homo sapiens
MRSACSHLCTSEISGSLSAGKQRSEARPGVLAAAGGTPCAAQGPVVSESTPIQSPIASLAGVGTWSELAACKWVDKSQGRAGPGRVRRERDRECLRVLGMSVEFLAGVEAQHDQGDCSPSLSTLLAVLLDRHPERHSTQIIASGVRVMQRSDTLQL

SEQ ID NO: 925043 - protein, 280 aa, Homo sapiens
MSGSEDDRKMWEIWELPRVLEGSEDRNMWESLELPRDLLNGFGQNAYSDTDNEVQAEVVSDKDKELVGNWSKGHSCYAKRLAAFCPCLRDLWNFELERDDLGYLVEEISKQQTIQEEADHKNLESLQTEDAIEKKTPFSGEKFKLAAEICISNKDPNINSQDDGENVPRKMYGNAWMYRQKSPAEAEPSWRTSARAVWKGDVGLGPPHRVPTGALPSGAVRKKPLSSRPQNGRSTNNLHCTLGKAADNASCDSSQEGGYTLQSLRGRTAQGHGSPPLASA

SEQ ID NO: 925044 - protein, 161 aa, Homo sapiens [sequence omitted]

SEQ ID NO: 925045 - protein, 156 aa, Homo sapiens
MRNKCDNLCRACQTVAYICFSLPPSYRSCSQLSSLVLPHQEQTPTSKPQPITWNPAGFLLLILFSAGHMAQLWASGFSHGKTEAGKWLREEQERRLPSAVEMRSTQLPGPSAGRGAGKPVVDPFESPNLKRRETHSAAFGLWPKAREPLANHWCGN

SEQ ID NO: 925046 - protein, 148 aa, Homo sapiens
MSHIPIGIFQETQADLYGLQSKGTLCHTVNVLASIEFGHWDSGRRSGEEEGEEGGFLQAPRCWVTLPKLGHWTEGHSSSPGGSLYTFPTSPQSLTKSFTCPFKPRITSRFLVSTGGPGTKPPTDTEEQLYTHNLSQSPSIACTSSSDM

SEQ ID NO: 925047 - protein, 175 aa, Homo sapiens
MGSKPCCKSLLALAHKGTCKEVHHSPLLPGPCQCLSKGRIPVEARGVQGLSFLGHGGHSRRGQKIDLGTQRTSPHTTRGLSMQKKRRRHWRRDQKGIGGQALSCMGKNIAAGGNSKGKGRWQVEWQGDWWVWSKEREGEHCGALMQGHKNAYQGLTCERDLNEVVTAATGNNRAG

SEQ ID NO: 925048 - protein, 136 aa, Homo sapiens
MSTHGHKDGNNRHWGLQKWEGGTGMLVEKLPIGYNVHYLSNLPDLSADQTCLHSWACMTVAVIRQNDKHKEKEERHPIHILWPFRKHTVVPLATYMRIYKKGDIVDMKGMGTLQKGMPHNVPVLRGKATPSRLWFM

SEQ ID NO: 925049 - protein, 554 aa, Homo sapiens
MKSNPPRSSLEACKAAGQGLAQGLSQGLHQSLVPFQGLDWGPKLFQDLRRVLVLFRGLVLFQGLDQELGPYLGQELGPYLGQELGPYLGQELGLYLDQELGRDLELGQELGLYLGRELDRYLGRELDRYLGRELDQYLGQELAPQQKTQAKPTKAARQKVLVTGGGGYLGFSLGSHLAKSGTSVILLDRRRPQWELSPETKFIQADVRDEEALYRAFEGVDCVFHVASYGMSGAEKAWLPGCRVKGRACGQRILRALQTSPGPCMVCVRRRVPRLIYTSTVNVAFGGKPIEQGDEDSVPYFPLDEGRCSPGAGQALPAALLTLSGGSVFPGLWQHVDHYSRTKAIADQLTLMANGMPLPGGGTLRTCVLRPPGIYGPEEQRHLPRVAVRHPRLQDPSQRRILAEVYTGRALPAPGRCISLEAKCPEPGTLSSTRCSCPHWSTGPLELLAGTELSECTSQAKARGHIKKRLFMFRFGDHKARMNWVHVHNLVQAHVLAAEALTTAKGYVASGQAYYINDGESVNLFEWMAPLFEKLGYSQPWIQVPTSWVYLTVR

SEQ ID NO: 925050 - protein, 150 aa, Homo sapiens
MSLRRRLLLCLGFLCRHISVMTEAPRPQSLRMLNIEPLSPALLTETWSHSALAISSTPYLAHNRSLIKFAIRINAQKLYYYILSAQLPGKETFSFYGYYKRPRLVFHWPNLDHMLIPEPINEAEGMKYANWPGLVMCPFLEPGEWGGLFS

SEQ ID NO: 925051 - protein, 143 aa, Homo sapiens
MGALKASERRNGSRRSLMTVEMMPDSNRAELTTTQGAKLELRVCPSQRCDSFYGKFLPSLSFRCLLFEVGFKLCPPLCLAHQLLGRGFESHQDPVTLGGMLPFPRGPLDVGEEPGELPGVPFNHCSAICAWSGGHRPGHGQGQ

SEQ ID NO: 925052 - protein, 146 aa, Homo sapiens
MSCNTHCEGLQLHSRSQRGHEPTERNEELRTRRLETCDTTKVFSFTSEPARPRTHQKEETPNTSDHQKEQIPDTPPLRTVTLTARVCGFILEVSETKNPPIPDTKGPRRVYTSNWASPSGHLKKGLGLWRPLPLVGCCLLLLMPGG

SEQ ID NO: 925053 - protein, 123 aa, Homo sapiens
MTDRILYIVSNMSSVPWEGSAAAAVPATSPPTPGHYHVLYRGCGETQVGWHGETYCLVGGYRVHGDAPLATPTKAEAEKPAPRRAPKRRQATIESDKDLGCSSPKIRRLEHRGRRLTPQKLAG

SEQ ID NO: 925054 - protein, 181 aa, Homo sapiens
MGGQPEESGVEAQRGGVWPQARGSGWGSLNLEYRVLPATQVEPVLPGPCMEGCMPLQSHGKWPDRWTLSPQASAGPQRREGVLGFQCVRERSRLNEPLPLAFLMATKHFQHQTWVKLGPHWGTAQGCGQCQTQDSGGRKKAHSWYYKWICAPRGATMDGQRNSQHLVLPEPGVTQQLAHHR

SEQ ID NO: 925055 - protein, 178 aa, Homo sapiens
MVLAKASLRKVHLNQDQKMERDQLFHKSTVAPRDVHVPITRTCEHVTSHGSKDFLDVIKLRIMRPLWLLCDDGGGGEAVVRTRKSRSVEFSLEAVKIIQEGNTMASIKAVGIQGSGRENECKQRKCQMLIKPSDLVRLTHYDKNSMGETAPMIQFLPPGPALDTWGLWKLQFKVGIEQ

SEQ ID NO: 925056 - protein, 142 aa, Homo sapiens
MIQDGSSHEAITSAFQPAVGRKDQRSSPCHLGFYSLVAPWPWALHGAQTNWIISEVFPTVRKDEDKTQRMEDVEAEKFAGGAVEALSSSYYVSDECFLSALNPDGLSNAEYSCTPFMIHPLPPSPPNTHSKKMQLFKTSYIY

SEQ ID NO: 925057 - protein, 134 aa, Homo sapiens
MATICGYCALEIWQVCVSTLDDVCTMTKSPDIAFIRVTRANPVVNCGCEGSRLHTPYEDPMPDNLRCSFTQESSPNPAPVHGKIVFHETGPWCQKDENVYRGCRERVEEEIELANNEERSPVGKEGGNGIFSYL

SEQ ID NO: 925058 - protein, 150 aa, Homo sapiens
MLKAVALKARKGEDVSAHCHWSISTHCPLEQDPREGLSPELLTLCQPCPNHLQLPHKPPSPNRDQGAPATEIPQLPPLCNQILEHLPALLPDLSERGKQISVLIPGAMYPVLMLVSVSLCVPRTLPGGKVVSSAPSLALHNVEDLRLGAT

SEQ ID NO: 925059 - protein, 173 aa, Homo sapiens
MGSIAASASGEPQEASNYGRRQRGSRHVTCQRQEQEKKNWGRSATHFCSARSCENTLTIIRTSPADGAKPFMRNPPHDPLTSHQAPTPILGVTFQHEIWNSVTCDCRAEVPVTLLAVSWSHPYLTDGIPWSLHMPPLYTKPAMVPPIFLILQISLIYPSAASLRKLSALNGLM

SEQ ID NO: 925060 - protein, 141 aa, Homo sapiens
MVRAEITYADKKQMQGGPVVKNKDESEAILILEHKLIQTSQALNLRSPMGLNSSRDGGYLPINTTYVGFLPSSMSLLHAFTKVSTLRGSDLSFAELVQPFTNLPSALIILGSSFPSVPLLTELLSDNTNPVCICQALPEKL

SEQ ID NO: 925061 - protein, 142 aa, Homo sapiens
MAVLVVVSASEFQLVTVAVAVLERIGFNGLGMALISQEDQVATDGCLSQGGNVVVFINKQLFNPNAHNDGLDKENVAHIHHGILCSHKKKEFVSSAGTWMKLETIILSELTQEQKTKHQYCESKKVFIFSMKVASENGIKIH

SEQ ID NO: 925062 - protein, 151 aa, Homo sapiens
MSWRSSSSGSIRQVINFLGTVGIEQVRGVTFLENQEVLIASRSSTEVRINQDNMITYLAKRFTPHILYRPHILPYSQKENEDAVGPEGRKEPVHADAATFTSQKRKAKETKICVPGKLQRFMNSPAINLSSLTIGFIYSIPFSCILPASNI

SEQ ID NO: 925063 - protein, 142 aa, Homo sapiens
MVLGDYLVSLLHVTLGGIEAQGREGNFPKPHRELMLDLALNPGPLTLGIVLSGYNKTGRRPGESDFWNQPKGLEWFLEAAGGRMSKDSSLRSNCRLPSTLCMWLLLPPGTELRVESDEIAKRLGGSGLREAPSSVESGSISS

SEQ ID NO: 925064 - protein, 157 aa, Homo sapiens
MHMGLPNLYWAASHRGSSRIISSLSQMKPLPILMGFSETASCVHHLSQTFVFTKIESTITLSVPFSIALLPVLLRTATSLLHDFILFVGKEQMFAVQSPVKKSPGNRSLQISQRAPVLQNGIYQLSLHYYQQPHGVPGRVDLDDSLNLMQSTTTKNY

SEQ ID NO: 925065 - protein, 134 aa, Homo sapiens
MTSAVMNIHPCHKFPRSIGSVAQSANDWVHCELGPWLFDPGDLSLTIKSKFLTDDKVLYSVPLVYVHISIPVPCCLGDYGLMVYFEISVKRIDTHSSLNVWQDSAVNPSGPGVFLLVIFKLPFQSHCLLLVCSG

SEQ ID NO: 925066 - protein, 140 aa, Homo sapiens
MARLLNLLKLPNSDTSTPSLVTNHAPLTISLKSNHPYPTQRQYPIPQHTLKRLKPVITCLLQHGLLKPINSPYNSPILPVLKPDKPYKLVQYLCLINQIVLPIHPVVPNPYTLLSSIPASTTHYSVLDLKHAFFTIPLHP

SEQ ID NO: 925067 - protein, 158 aa, Homo sapiens
MKNFERFLSSLPSGLPGAGFTTPFLAFKQANEHNLAWLLWPLGRGCSDTDMPDLNQGWQSLYNCLLSLCLTSCCKTKHLVNSTTLRVLALIAAFLKCMVQEPPALESPGFLLNNINSWAFQTSQNKMRLGSLHLEQELQVILVYANVRQSLLQGKDLW

SEQ ID NO: 925068 - protein, 144 aa, Homo sapiens
MGVGQAIGYMIIPEPMTVDRQIFIASNTQNSSSPPYSQTGASKDIQVGKDWRQKESIITWKMYIGSVRKDGTTGSGELPGLIKKQEMFCVRRSEEYRGKSFCFVHKTYLTLNPSPSVSQLCNFGKVMQPLYASKFDGAYLKALL

SEQ ID NO: 925069 - protein, 193 aa, Homo sapiens
MKDVRAQPVGGCQGTALPILQVCHRKQLPKVILSPQCCAWSQGIFSPDPGHALGFQGNANKLRLCLGANYKSFPLINGSTTCHVPVEQGDIHWIPHRGRRWSCLPVPRRAPALLSPWVVNGTGHCGAGGGARRGGSSRTGAHGGGEAQAWRAAGPEPCPEERQLRPGEKSSAAPVGRHCWGTQYTLRSHWPRC

SEQ ID NO: 925070 - protein, 477 aa, Homo sapiens
MPPRPGESPQAASQELSRWRQFSREHEAPFSAFLTDSFGGQHSYLRISLPEKCNLRCQYCMPEEGVPLTPKANLLTTEEMLTTKEILTLAWLFVKEGVEKIWLMGGEPLIQPDEVDIVAQLQRLEGLRTIGVTTNGINLARLLPQLQRAGLSAINISLDTLVPAKFEFIVRRKGFHKVMEGIHKANEPGYNPVKVNCVEMLETVWQLWPELEKLSEQESRTAKAFKIPGFQGQISFIMSMSEHFCGTCNHLQITADGNLKVCLFGNSEELLRIIGAAVGRKKQQHAGMFSISQMKNWPMILIGHQLNSEQLTHVDLEGREAMVDVGRKPDTEWLAVASAMVILGPVAFKLVQQNQLKKGDALVVAQLAGVRAAKVTSQLIPLCHHVALSHVQVQLELDSTCHAVEIWASCQARGPHQGGNGGPDLCCSPPPLKRDVNTWATALRTPDRPHSPQLALLMAVPPTPLYSGAYQGKKSAL

SEQ ID NO: 925071 - protein, 177 aa, Homo sapiens
MVCELGVRGRRRAAARCPSLLLALALSPSPVSSAAQAPAVAREQRGPSSRSGPQGHCLPWGANPLSKSQQARKQTLLIFCPGNPMDLTETLSEAGGGRKRTQIPWAKDSPLLSTLFSQRPTSKAQPNILQSGLPVPTSTKLSTLHTGFQEALNEERSLWQPWDAPAGPVTRAGCWGI

SEQ ID NO: 925072 - protein, 137 aa, Homo sapiens
MGKKQSRKTENSKNQSASPPPEECSSSPAMEQSWMENDFHELREEGFRSNFSELKEDVRTHSKEAKNLEKRLDEWLTGITSVEKSLNDLMELKTMARELCDKCTSFSSKFHQLEERVSVTEDQMNEMKMLSRRTSPI

SEQ ID NO: 925073 - protein, 146 aa, Homo sapiens
MRASWEQALHWVTSEDWMMPTHTGEGHLLCPVHQLKYQSFPELPAQTCPDIISNQLLGHPMAQSRWRVKLTITTSQNNLSLEAESWRGPFGSGVTHLVTGLQMDPGGQWGPDQWLKRSEGMRALSDFTKPGPLTNIKQWDELRMFP

SEQ ID NO: 925074 - protein, 168 aa, Homo sapiens
MTSQSSGATSVDTKGCHTGPLPSLAESSRGPTKLLTLKLSVDGKAKKSTIESQLPPTNRRGQAPAPYKWYELPWLHPSAHYSQCTGQSEVLLGPLYTWLSQYHHLGAYVPTDEFWRDTHIQTTAIGMREMDLGDVCMGKQCGSGNSMPGIDQCKAGPIPHFTDEEPEY

SEQ ID NO: 925075 - protein, 159 aa, Homo sapiens
MLALALDLADSCCHSWPLAHIANPAPRLELAQGKERGQTTGADTSEPTGIGKPFLGPEDTGCRDAQALLLGGLLQQHSGSFCSANSEGAGLPLVPSSCILCGMGGPGLQPWVGHPGGQIPPTTGSPQEHREARIHSHSLGGYSCSLGLQPVVWAAAAVP

SEQ ID NO: 925076 - protein, 203 aa, Homo sapiens
MRKNQCKKAENSKNQNVSSPPKGHNSLPAREENQIENELDELTEVGFRRWVITNSSELKERVLTQCKEAKDFEKRLEELLTRITSLEKNINDLKELKNTAQELCEAYTSINSQTNQVEERISEIEDQFNEINHEDKIRAKRMKRNEQGLQETWDYVKRPNLHLIGVPESDGENGTKLEDTLQDIIQENFPNLARQANVQIQEI

SEQ ID NO: 925077 - protein, 135 aa, Homo sapiens
MGHILFNGGRRYFLAESSAWKDNYASGSYLSGTTGVGLPESFPFSAQGQRALLMTPTPERCKKKDFYTKENQTYGKKNGPQDRACDNCIWTILSLRQASIFTESCILAKGPRKIYFKLNIISPQAIANNIFHHML

SEQ ID NO: 925078 - protein, 166 aa, Homo sapiens
MNSELKCALQLPCGQNLAFLDGAFETYSEVLSGPAHSHSTLLTPSKSQPWKALVSNHKIPLLFFFLFVCLFFAAGMQEEHRLGVLSAPRRMDEAPVELINRSNLALGMHREKWKVMLQSWVRVRSQRRLGWNPHYHLVFGDMGKFPNLWSSNLLTCLMCGITVPTS

SEQ ID NO: 925079 - protein, 202 aa, Homo sapiens
MVFQQGGMLAWRLRRAEWFGPAPDPWQPRDTAPCILATPASAMAQRGPSTALVAASEGVSHKIWQLPCGVKLVGAQSARVESWEPLARFQRIYGKVWMSRKEPAAGAAPSWRTSTRAVERRGNVGLEPQHRVPTGTLPIGAMRKGPPSSRPTNSLHPVPGKASASQCQPMRVALPKLPKALGAHPLHAWMWDMESKEIILEL

SEQ ID NO: 925080 - protein, 241 aa, Homo sapiens
MPYSSCTLFMPRSIVPLLGAQVLSLAAAGAVNPSCSPLSKSLMAAAAPLGFKHTQLRSVLTAGGCQKYPTGSSGCCWQQREGTYPSDKRALGTHSGDTVSLDAEIVKEAEVPQAALGVPAQGTGDNGHTPVEEEVGGIPVPAPGLLQVTERRRKYCSLPSARYGDPVSSPKRQGSRVHLLSKHSLGGLEPLSSVSSLEVHFDLLDLTELTDMSDQELAEVFADSDDENLNTESPAVTSEGH

SEQ ID NO: 925081 - protein, 189 aa, Homo sapiens
MGAQDDLRKVTQSAYAQVVQFGVSEKLGQVSFDFSRHGKTLVEKLYGEASAQLLDDEVRHLVSATYRCTLDLLTRCREHVEKVGQRLLEKEVLEKADMVELLGPRPFSEKSTYEEFVEGVGSLEEDTSLPEGLKGWNRGQEEEDVESSLCRGLCVACGGRLHLLLGGVGVTATYLGPWQSSCGISPKTN

SEQ ID NO: 925082 - protein, 135 aa, Homo sapiens
MDLTSFQTNSYNPEVLLGGLTLGGCLSTRSVHSDEQLKPKLSRASETHGPEIPQTAGQCPEAHSEDSEGTCLAWTQRSPGTHDVTFLPTDLWFGLTAINKVWGRQGLGSAHRKEPGQCGSFCRGRGSASHSPSGF

SEQ ID NO: 925083 - protein, 134 aa, Homo sapiens
MKYSTDDGRSQPELLDPGQPAGSPLAGPEIVIERAAGGELLLGKLLLETGFLSSATHNCGNTEASPRSRNYQGKGRPGLTFETPYGLVQSFSKCGSQTSSIGITRKLIKHAELRYIQSTPSESGTLGVGPSALF

SEQ ID NO: 925084 - protein, 190 aa, Homo sapiens
MNTSERLLRRNDAATEMCSFMGVNWAQRRTTSSCSLPLSGPGLQNPAAESGVADTQAAGPFLLHLFTSWPLSGSSDEPGCLVRFPLGKNGGKLTYSADKEGDLLPRPQPLAGPLQDFPGPSEHRGEMRVDVQLWLESLKARGDFIVIGKEITQECMSESSAFGNKFPWGPSRECTESDSDSRAWVMIFHS

SEQ ID NO: 925085 - protein, 149 aa, Homo sapiens
MLLLLPGSQYLTLRTAAPELCLSKRILRINSIGMSWELGRHAESQVPTRPAELEPEFYHDSQGPDDRALKTTCEDSEGAEGGSRDEMGGTIVNGHTCSGFHRVLQRSLLLPLRNTEEEVGSSQSNRRRQAAALDNKCVQAWLCGVGSIG

SEQ ID NO: 925086 - protein, 149 aa, Homo sapiens
MPAPPLQNSLITHCLSVDFVVVKILFYQGQTTISAGPSPVYWTGSRTATSVDFVRGVRTLVLPSSYRGPSSVDTLQGKYKVETFNRTQTWNEKERIVLVFFPWLPGNSKINVNALNILAPYPWLLVKLLPLTPPPRPPQLPLIQFTFPT

SEQ ID NO: 925087 - protein, 141 aa, Homo sapiens
MGCLPASERCYLYRKITGSEVEMPGLTPGSTLYCQCQAFLGAPNDKVSQFAFSYHECTTEKCAYSLTRNQTQSGGLGDILRLRFCSGRDRTHHSWKVTSEASGSETGPFSKLYVPLFPINDKLSKLTGFLCECNISPQFSP

SEQ ID NO: 925088 - protein, 163 aa, Homo sapiens
MSKNTVIVTITITICTGQTGFWAVYRITSKASYCYCWPGPASGSSPAVGPPVSVRHRCGSCFPKTHHQCLGASSLNLQQQQQQQQGPEKGLGEGYLQVPHPQTLLYSELLLTSDGNCIPEPDGFSGTTEGPLITFPSLTGEHPQPETVVYKFLRSVSSIMRSF

SEQ ID NO: 925089 - protein, 122 aa, Homo sapiens
MLYNIQPLLSAHVYVRQFCFYANCCVILSSSKTSLLLNPPGPPIPLTVYTSHPTAKRSMGISPHLELPNEIYHEPSGLRILHTVPGSNSDGSKGSQSESLLGRKAVLFRFGFMPITFYKACK

SEQ ID NO: 925090 - protein, 144 aa, Homo sapiens
MAEAQSMNHPIAVGVKDAQLHHCDSGTSIIQVLETVVSANITSNPGKGLGSPGGPGWGPEHGPPAHCWLYHCDSGTSIIQLLMKASWRWGKVSQETGRAEVDNDEGKVSLDSGSRWSWVAAGMEWRPLATFINLTSWGNAKAIV

SEQ ID NO: 925091 - protein, 168 aa, Homo sapiens
MVGRVPRTLHGPDSGLPVTFSVRARSGPCLPWGSCAASAPTQCWDVCLSLSSDFGVPLLRPGSRRCDRGKESLRLPRSTPPATFLKRLKPHTFPQHHHRRLQSSSPFGCTAPGLLQTCSLIPEHSRLPDFTSPSPIGTQLRAWPVAHDHMPNPPTFAELRVSRATTDA

SEQ ID NO: 925092 - protein, 145 aa, Homo sapiens
MCPPAVSQLHEFVVHSQVEAVSTLHSGLRPPGSFFSEFKQDGQLEQAGERAALRGLSEDHMGNTAHSAATPAPLVIPNHTCSNPCFNLLCWCNARAARAVLGAPSFLLLMTRHSPCMLSCRRSKNPLLGSGLGPLSCNTDTILPL

SEQ ID NO: 925093 - protein, 138 aa, Homo sapiens
MNKRCDNLNYLVVLRARRQLLLKRAVGKPGGVSLAGKMAAPSHSRIEMSIFSITGLQTRPVSCPQSISEMELSICTRKKSACRLNAVAPNELLSAEVGKHDSISIDSGIGKSKTWETTSKKRIGWYVAERYAAIKKIN

SEQ ID NO: 925094 - protein, 131 aa, Homo sapiens
MDKTCTGDLREGLEFGLGGNERSSQGSGPAPIILKLSVGSVSHIIGLEDGEKSSYYQGLPVQQNPGCKGAQQATGKVTLTHAHRESPTLQLHGGHLMALMNAKACKQANWSSLHSCLQNPMHTSSLHSKLP

SEQ ID NO: 925095 - protein, 158 aa, Homo sapiens
MEEEEEGGGGRRRREEEKKKKEEEEGGGGGGGEGGGEGEGEEEKKKKEEEEEEEEEEEEEEEEEEEEEEEEEEEEEEEEEEEEEEEEEEEEEEEEEEEEEEEEEEEEEIGTRSHFRSLAAFSLTCLSPHVRTLRVTIINANRCQAGNVNEPHGLDVRY

SEQ ID NO: 925096 - protein, 118 aa, Homo sapiens
MNGWAEQRGHCSPCGRVLRTGLKLESNKRRSKCHHVQMSSRVSKGSIEHRGRPGQGFCQAPGHGKFGFQRTDGKCHLICSGRTAVRTVWDDDVHIDTLHHGSSQCIPEYIFSPSVKLA

SEQ ID NO: 925097 - protein, 162 aa, Homo sapiens
MTFWKPYYTTYLCSNLTWRAHLFIQEQYGEQEIQFGRGTVCFSILSLNLITHARAFQTFEWLGMQMEGFLQHKVVEKTHVLEPGPTGWNSSSAAHCCVALSKSPDHPDPQFLIWKILFSHSIAHGFFHSINTLVIKESYAGDNCCEPATGTRGGIDGQPCLT

SEQ ID NO: 925098 - protein, 146 aa, Homo sapiens
MAIALFVNLWLWRPTVTCLGSSLSFSTLLITHSASTTRASLRQLATPRLTPPQGLCTSLHYACCFLSRHCLMETTAPPSTSCVSFQIFNNELIFPSRLLQVVVSSCTAAAKPGLNTKESGWEKGGGGSPGLPLNCRGPAHLLAPRG

SEQ ID NO: 925099 - protein, 136 aa, Homo sapiens
MTLPEDIRAPSNSPEKGRYFLKVKGKQQPNKRRCREGPGVKGLLLDERPKSRCHQSGDASESRRDQRMQHPKTHGNVNTKSLCSPAPQEGLPLKLERGCLRTNKSKHDLCKIVLGSLATTSPNKGIVICPSCVEMA

SEQ ID NO: 925100 - protein, 149 aa, Homo sapiens
MALAHSTQEERGGGAAYPGSCQPFQKSPPLSPLLRPWLYQSYLLVNEVLSEEQGLFKGAFGKEHKTQEEEKTNVGEDGEIGTHVPGCCGKQYDGPLEIKHRITIGPSTSISGYIHKRIGSKDSNKSLYTHFHSSIIHSSQKMETTLNVH

SEQ ID NO: 925101 - protein, 137 aa, Homo sapiens
MRSMIGMKVQQHVHIKSDELVLTEKEMTLDTVCVITLQREEEEEEGNVLPSENHELSEIPAFPPTSLMFPVSTTLTGLRSKYIEFGKGVENKEDSLLLIPMRAIAVTLLGDVLIRQPLRFLYPPDNRMLKKDLRGRS

SEQ ID NO: 925102 - protein, 152 aa, Homo sapiens [sequence omitted]

SEQ ID NO: 925103 - protein, 134 aa, Homo sapiens
MASDISVQRLTGRLRTLNPARYEPNNLVGVIILEVGSRKSRCRQGGFLLRTLRKDVLVDSDAANKDIPETGKFTKKKRFSGLTVPHCWGDLTIMVEGKGGAKTRFTWRQARETISLTSLDLKSLLNSSLHIPSA

SEQ ID NO: 925104 - protein, 155 aa, Homo sapiens
MCKQIVLLYILGCLSFCLGILLLLSLHYFHTNPDGSILRVELSKWKYSTDFLDAANSIYPLYANSLKPPCKVWFLGDSGIQHCDSACDIFYISPVVMKQPFKSFLAEQLRGNLFEVDVDGIGSHRVSEALSWRKTLARGSSDKFLADSVILITTP

SEQ ID NO: 925105 - protein, 136 aa, Homo sapiens
MGLFIWELGCLSSLCSHIELQRAANLAEATHVKVIVTMEQIAWHKEGRKQQLCLSKEDSNSQSPQGLPTTEEREKENRVTELQIDRSSTLTKEDFWKVSGNEPRPLLPWGSRKCLDSKFQADKEKNLFSSASDQVP

SEQ ID NO: 925106 - protein, 137 aa, Homo sapiens
MPLCISPHGHEMAAVSQTLIPGRNKKEEDTERMILVSGHKKFSPDFLAYVSLAITDSCAYLKWPEVSTPRLERVSDLSSHSWYVAEPGLEFKSATIIPRPVQRCIHERCQCDFKELNEEFGMKCSIYYLFILTFAYQ

SEQ ID NO: 925107 - protein, 151 aa, Homo sapiens
MALTQGLVVTTAWLLLMFTQGPRAFQSAGAEGLPLATTAPGSCGLLPGLGPGPEMPSKTKPGNGDSNSLLGVLPHRGHAGAQVTRPSPLYSLFSFAQAEGVSTHGHQSWECGESHLKPAWPWIASKSRGKYLACLATVADYAGAMGPLVSR

SEQ ID NO: 925108 - protein, 149 aa, Homo sapiens
MVLSAPPSISCCDNCELRTKGTSEVSLWSYQGTDKTIPAPGGLFNGAPKVGRLVMISEEWKVLSVQVWNKEKPLISEVLTMDLGPEKAAKSAKKESSVAFEGEIQKEAEKNETRPLSLTIHKNQPKWIKDLNIRPETVKPQEENAGKCF

SEQ ID NO: 925109 - protein, 169 aa, Homo sapiens
MLPGQNKSSFNRGKKKLPSSRLLFLLLCLENSWSSFKTQLKYHVLVKHSPCLARIMQPSPPQGLLSNLHGPFLHHVSVVGEEHGPFLSTVSWCQTCDMYSVYLFIYSLKYLLSTCKELTFDDPVFKNVTCYLCVEGIEQSDMPLTVLPNHNLMASLFREGGRKRKGEIL

SEQ ID NO: 925110 - protein, 135 aa, Homo sapiens
MATQPVGVQRKEGEQSVGGKKLKGCGESPVNDPLSYNVLWLECIISQLNCSETWSCPGATKLQESIQIYVPCTHQSPDRQNHNSACLINITSRVCRRHLKSTVLRNNPNSVLSSPGQNGTSIHSVAFIKFSQIHS

SEQ ID NO: 925111 - protein, 170 aa, Homo sapiens
MLVNVGMGMLINDSMGMLIKANISMLINASMGMLINASMGVLINASISLPINASTDVLTNTSMGVLINASINLLMNASMSMLNNANMGMPVNASIGVLINKQREHMLKSRALTITFGLNTSMDVNHLAHTKCSMNDLQGLFYLPQIIKAHLKPVGPESREEFTAWPTMER

SEQ ID NO: 925112 - protein, 137 aa, Homo sapiens
MCLQADLRKPELKKVSPQPVRQEITNPLYRGEEEAKAQRTRVQAPFLCCLTRLCPPLSTRSAHIHCPLGLFQRPKHAKGRSRQRSPFQWADSPPRCPWSHPSENLAFTSTILPVWRWCMLICNIPISYVAINKNKQH

SEQ ID NO: 925113 - protein, 171 aa, Homo sapiens
MVQGASEAIGQRQSSAAKLRRSGKESVTEPWARVPGTLEVAASAPYYLLEMQNVNTEVTRLHVVIDNDHNCNKNKGCPELLDPQVTRRLSWPVNISELSGARAHRRTVTIGYDVSIMQMSAPESGQSRRGRIKSAWRRGQQGHPGPVTCVPSLAAAMIANSLGILPEIFYA

SEQ ID NO: 925114 - protein, 648 aa, Homo sapiens
MLLVAFQSMETIDRAGQTWPQRTLLGLLLGVGDVKFPQCLAAPAGPTREAPESHAPQRQPLGEVLGSFSSPAQGSLSPLYSSGVHFASFRNASLMSLGSARVLSRPLSPLAGRVPGSTLFLGPLGLAMRLPLLQAKAWPMHLPRTSRSGVGGEGDRSSNRGSRGPRAALSLPCVPNGHRRRILPAQRQWPRRRSGRGRGRGEGVQTPPPVPPRARSQAAGPPGAEHKPGTHGLSGARAEMRARLLPPLPGLERRDPMAGSGGLGGGAGGGQGAGAGQGAALRASRAPMLLVALVLGAYCLCALPGRCPPAARAPAPAPAPSEPSSSVHRPGAPGLPLASGPGRRRFPQALIVGVKKGGTRALLEFLRLHPDVRALGSEPHFFDRCYERGLAWYRMDVGVRQPQLKQPALVAAHPQAWTQRLQRGPCPRPVGESVGVAGPRRFSRSLMPRTLDGQITMEKTPSYFVTREAPRRIHAMSPDTKLIVVVRNPVTRAISDYAQTLSKTPGLPSFRALAFRHGLGPVDTAWSAVRIGLYAQHLDHWLRYFPLSHFLFVSGERLVSDPAGEVGRVQDFLGLKRVVTDKHFYFNATKGFPCLKKAQGGSRPRCLGKSKGRPHPRVPQALVRRLQEFYRPFNRRTIHLTVKILGPK

SEQ ID NO: 925115 - protein, 146 aa, Homo sapiens
MLSAGPLGPLLFLYTLSLCLISFLSLSSHPTGNTHSPHQDHHPCTAVAEIPRRQQASSHPATGLSLVDSPGDKTLHTGAQFAGEGQSALGPESTLGETLAPAAPSLPQQSRLPQDLPTEPFPEPLLLLQGEAERDRCGHRGPELAA

SEQ ID NO: 925116 - protein, 145 aa, Homo sapiens
MAPVKALRLEEQRKNLCQSQPESAGPGTSSTDVQGQEKMDVPAQAEREVEREREKERGECRRRPRKSPFKRELLSSPVLTPSLCCIPSCASASTLLCEVLHGSRPHHPCIWNSLEQGSSMLPIKTVFILNEESAFHQRDYRRDWK

SEQ ID NO: 925117 - protein, 131 aa, Homo sapiens
MGGPPWELLALALIHKGTTRSNVRVGNTTWVLTCGAPKILPKRAKAQRKKVQTVQPPSPSNSDHPRNMGYAPGNAACSNLLALAARFAQHCRTRHALLWLSAAMLMLPCRCPRLNGTLICVYRGKGVEKCS

SEQ ID NO: 925118 - protein, 147 aa, Homo sapiens
MKVWRSPDFDPTAISLASLCLQVTGMAQRPWPMAAQEKYNDFSIASLKCNCVIHQHYWRKLLDKIKGEKLVFAKTRLLGMFYRPQIPATSLKTPIEEQDEYEITASSSPFHDFTLHPALFNQSIIATLWPTPKPLKTLAPNSLGRYI

SEQ ID NO: 925119 - protein, 178 aa, Homo sapiens
MSLLSISFGIMLLLSAGLLKSPFLVSVDKSQPQPNLLKPVKRMKRQNLMNAFTLVDIKVGGLDNSESDLFANSNTTLSWGNIIPLNARDCITYKGLKDVFHTEGYKQVNIASLEENVSPYGGFPWLGFQGHPESSEKCTNLDDAMKIPFSWLELEDDLGGKDYRTPRSDDNRGYSTCQ

SEQ ID NO: 925120 - protein, 286 aa, Homo sapiens
MPEKKNPEEHIDGENEPRVEPASTVSLRGSVEGMELVVIVCLWLRTHTGALIIIITINIATIITISITATIVTNVNTITTNINTAIVTTIIIIIVIITIIIVITTIIIATVITINISTAIVTGVTIITISITTVIIVTVTTIITITTAIITNVTVITMNITTAIVTNVSTITITINIIVLINITIITVINSTTTIIITIIFIITTAFVTSVTVIIKIINNTIIVITINVSTSTIMVVIIVITITTTTIIITIITPFLCLNCLWSQRYYPWLGNMMEPPFNSILISV

SEQ ID NO: 925121 - protein, 134 aa, Homo sapiens
MRRAFHFCSVVPHNSKPQANHEKHISQTQTGCTGRRTVSSSLAVVPRSWRLFQGPKVSLQSPGFHGNRSIAMLSPERLGKAPSFIKLFMKLYLSLQFQMQQEQLKQLRAKPNWIWHCLLCIRDTMIISILQMRK

SEQ ID NO: 925122 - protein, 243 aa, Homo sapiens
MELIQDISRPPLEYVKGVPLIKYFAEALGPLQSFQARPDDLLISTYPKSGTTWVSQILDMIYQGGDLEKCHRAPIFMRVPFLEFKVPGIPSGMETLKNTPAPRLLKTHLPLALLPQTLLDQKVKVVYVARNAKDVAVSYYHFYHMAKVYPHPGTWESFLEKFMAGEVSYGSWYQHVQEWWELSRTHPVLYLFYEDMKEARKKTIPVLTHRSQAQLMMGSQGRQQFILPQGLGSQGSRSWLYGF

SEQ ID NO: 925123 - protein, 1029 aa, Homo sapiens
MRPRTPNRCPFWLLLQILFFSFQIPDSLGTFVSYLLGDAVPTVEREAQAAEELGVVAVGKTGKIVEEEAQEDLEGLRGSQNEGAGRLRGPGDDRRHEVGSSAVEQTWGWGDGSSHGSQAERQDSGAGETAKAARCQEPSAHLEARKKSKAGSGACQDRSGQAQERQESHEQEVNREERLRSWEQEEEEEEVRAREPGMARGAESEWTWHGETEGKAGAVGPKAAGDNREMEQGVREADAGETEEPGAEGAGKGEEVVVVEKACESTRAWGTWGPGAEPEDWGILGREEARTTPGGDEAWTTSGKEEADLLGVRQTEYGAVPGERLLEATGKVWVLEEEGDEEREAEVSPFPKQPQVLGTERTEEAAESQTAGREAVGGQEAGESFEGQVDLRGKEAEMRQDLGIRADRARMEELVQAEEAQEERGSSRDPVAELPSDGEAEGTADLEATPEARPEEELTGEESEAAQTSCGLLGVEWGGLTHSVTKGQGPELMGGAQTPTKQPEEREAGEVELMGVLALSKEEQERSLEAGPRHAGSVKPEASEAFPGAWENRTRKDMERGNTQEDAADGEQREEEETAGGQTLAAEAEGDRESELSEVPEAGGEGLTTQDAGCGTEEGEASVSENQELDGSTGADAGPCPSLGEAYARETEDEEAEADRTSRRGWRLQAVAVGLPDREDAQTGSVAAGIMGGDVVPHISAAGAGEALEGALGQGWDSKEKEEAAAGEHAGGQEFGLEGSAEEEVTGRGSQVEAFESREGGPWGGRVEAEESAGAEDSCGLDPAGSQTARAEGMGAMVEAGGLLEKWTLLEEEAVGWQEREQREDSEGRCGDYHPEGEAPRLLDAEGLMVTGGRRAEAKETEPESLEHVRGQEEQPTHQAPAEAAPESVGEAETAEAMGSARGGAANSWSEVRALGGVSGGTSGIPKPAPWSSVPPFLQAPLPGSLLDVSVPRSRVHLSRSSSQRRSRPSFRRTPAWEQQEEPPAPNPPEEELSAPEQRPLQLEEPLEPSPLRHDGTPVPARRRPLGHG

SEQ ID NO: 925124 - protein, 139 aa, Homo sapiens
MGKKRPLHPPPQTAFPATPPLRCPEQTGSNHGENGCVCVFGLDTHIYRRDPQPKALTRPRSALGTCVPCLCIHTPWAPVLATHSSPSGNGNVSLIHGDSSAAARPEDEARCGRIIPCEELLQQGCQAPAWEDVRMEESP

SEQ ID NO: 925125 - protein, 171 aa, Homo sapiens
MGLGITAFLSITYHLLTYFVIYLLIGLLIMAFSFSWNVSSIKAGIIASDLSKYLEQHWQGVDTEDARPVVVWKGEEDQEDTIQALHNGQFHSGFQRANKSPAVHVTHPHVGTELPEAVTMCLGTGDWPLHRIQVTTISGAMQQDSALTRAALCQERGVSPTVKVMSNRAAR

SEQ ID NO: 925126 - protein, 118 aa, Homo sapiens
MATVHRRRALRCLKRGTECPSGSRFADEFAAWQPLGGVSIPDAEQYSCSQSSLRREIAVTDPELNIQGIPELAVQSNGHNRPGAQHSEDLRGDTREPTTHWPLIPPFAGGYPVSLPVS

SEQ ID NO: 925127 - protein, 139 aa, Homo sapiens
MYPKPPPTCNPCPGPDHCALTSLSCFHACSQIYICFSSAWKTLLPDLHRTSPFPSSKSQFRLSPPQKGLPQPSCLRLYTGFLPRPQCNQNHFKRVIIYCEKLPLLKNTGALGSNPSFAIHQLFGLWQIAELSDLQFSHP

SEQ ID NO: 925128 - protein, 319 aa, Homo sapiens
MEQVADTGFPSCSHNCPVTWCLSCEPITSQASQCFLGQILGSFTGDCPARVSAVRSPSNPPTELCPRALTVGSRPSLSPGPRAGTSTCLTNNILRIDCHWSAPELGQGSSPGLLFTRDHIVGVTWLILGAFELDPGFIHEAGLRVQMAMLEDDGAQEERYTGQWSECSQPVCFQAPQRQDGKSEAQECGSHKVLQQVTQTSKAHHKVLQQMTQTSKAHHKVLQQMTQTSKAHHKVLQQVTQTSKAHHKPSTLAQGTKGRTFASKAWSWMSWVPDLPDESCPFWENGLKSPEPLSGTEPPENGPLAVVGGPVWMEAQGQL

SEQ ID NO: 925129 - protein, 171 aa, Homo sapiens
MLSAQERAQIAQVWDLIAGHEAQFGAELLLRSVEAGSPGAQGGGDEGFGRVGRQRHPRSFGLFTVYPSTKVYFPHLSACQDATQLLSHGQRMLAAVGAAVQHVDNLRAALSPLADLHALVLRVDPANFPLLIQCFHVVLASHLQDEFTVQMQAAWDKFLTGVAVVLTEKYR

SEQ ID NO: 925130 - protein, 257 aa, Homo sapiens
MALSAEDRALVRALWKKLGSNVGVYTTEALERTFLAFPATKTYFSHLDLSPGSSQVRAHGQKVADALSLAVERLDDLPHALSALSHLHACQLRVDPASFQRSPQLLGHCLLVTLARHYPGDFSPALQASLDKFLSHVISALVSESSLLAVLSRGQDARGRRRPSPRKGEGLGHTPSAQIQARLFPPPAGLGPRPWGHRTACSLTLPNGVVGEGRGTPRAAGCEDGRLCPSRGRLASPSPLCAEHAARTHRENSAPAA

SEQ ID NO: 925131 - protein, 151 aa, Homo sapiens
MFLSFPTTKTYFPHFDLSHGSAQVKGHGKKVADALTNAVAHVDDMPNALSALSDLHAHKLRVDPVNFKRRRRLRAWAALTLFSAQLLSHCLLVTLAAHLPAEFTPAVHASLDKFLASVSTVLTSKYRPLGPPGASASCAASNFWKRPCPRC

SEQ ID NO: 925132 - protein, 146 aa, Homo sapiens
MGIEVLTLVMGSIQIWQLSFQALYYLWFAATPLTLYVYKEEIGAMTAAKERMKENVKGKTGGSSADTIMGCQGLESVLVSLVILDEPNCYRIPSVPLHLLEISLATMTSIWDLAQACQAHSTRSAQQAVLGLHPGPDPIPDQGLCT

SEQ ID NO: 925133 - protein, 139 aa, Homo sapiens
MTPFKTLVTSDVVAEKNEQKGSSQPELFFPNSLKIKGSPFALLQLEYKWASSRVQGLPPQSQEGTFSRSSPWKTNLFNDVMEGTLDLRAGAWAMWSSLLLLGYKPVPHVTVLSAVDDCNTKIILVYLNVAKHRKGYIPT

SEQ ID NO: 925134 - protein, 162 aa, Homo sapiens
MSSVYSLLIPSVFGWLLVRSVWILQLYEIQNSCPVFSTVTLISKHGICSFFSENILSLYQVPGATKPAVTQPESPNLRSGEADNCSLQSMAKGPRAPGKPLVRAGSQLDGAHPHCGWVFGRQDSSNHAEDDLQLSSFHELWLSPALFQKSSKISVIYTSVFE

SEQ ID NO: 925135 - protein, 188 aa, Homo sapiens
MGEETEKKDLDSTPENLTLNPRPSDRIKERRIKVRFLKRGISNNLWTYFQTTRILEEDFRQSSDIDLQQEKVNLKTGFMGWLLAGPLVFQYLAGLIHIKSSGFPQQPKEENSQCTIYFQASNCITFAKVEDDMANSLTRKLYYEFFVFVFVLHKRKEEVDVLDPRYLIPVGDSWSSGVVILVSRTASA

SEQ ID NO: 925136 - protein, 169 aa, Homo sapiens
MKTLSWKQKHISKYFMAQRETIMDIRKYLELHDKISHANVRLVGGQWFQHHLLKRAVIHYSRIHSPRKTHRIALAFHRQLTHGCLSEPDSGAWRVAQNGDDNLPSSSILWLEGGQLHAAASRNGNDGGEWDSPGLTRWEEGFSPFSLSFPFLVQLWEEERTSKIKFHTG

SEQ ID NO: 925137 - protein, 184 aa, Homo sapiens
MKAQDIDWSIFSLVTFLPAAVLGAIREHFSVQLKRKFQDRIKERRIKVRFLKRGISNNLWTYFQTTRILEEDFRQSSDIDLQQEKVNLKTGFMDSHSSQKRKTHNAQFIFKLRIASRLLKIGCIGGPRCTSDIGKAEMGYGCQRDAAVPYSWMEKFDDTQKDPNVMVQVEEGSPTLAHVMGVTC

SEQ ID NO: 925138 - protein, 386 aa, Homo sapiens
MCQQIPYTGELQLASGGCPSGTKLPEEGAGSNLCCSAASTGDTQANRKRKYQCKNAENSKNQNASSPQKDHNYLPAREQNWMENVFEKLTEVDFRKWVITNSSELNEHVLTQCKEAKNLDNRLQELPTRITSLEKNINDLMELKNTARELREAYTSIDSRIDQAEEKISEIEDQLNEIKREEKIREERMKRNEQSLQEIRDYVKRPNLHLTGVPESDWENGTNLENTIQDIIQENFPNIARQANIQIQKIRRTSQRHFLRRARHIIIRFTKVEMKEKMLRAARKKGQVTHKGKSIRLSADFSAETLQARREWGPIFNILKEKNFQPKISYPAKLSFISEEEITSFTDKQTLRDFVTTRPALQELLKEAVNMERKNQYQPLQKHTKM

SEQ ID NO: 925139 - protein, 141 aa, Homo sapiens
MEAVRDYALRNRAFQPRCYAFPTVFTTQRLGGDSLGCLHNQGPGFQTQSWVAIWADTELAAGVSFHIPVAPGMPVRENRSLPWKWGRSQGAECSCSADPTSTWPSKLRSPGLKFLLPAHQFEVDLGGLSLVWEGVPAITEA

SEQ ID NO: 925140 - protein, 181 aa, Homo sapiens
MQNSGISSDHVFHYVGEALADEKWRNIIIPDTVLPPHFPASSKTLMQPLLRDSLQRAEFSSKLHFPGSRVSWFSEWIKLMKGNGRRLEHRGRQKLGYFSPFLSALSDVSSIFSMLSAPARQALLQLLFPPGRPSPWIPETLSPSSLYPTSKWRLKVVSVLLVEPDRYDPFLHSQPIRYKGS

SEQ ID NO: 925141 - protein, 158 aa, Homo sapiens
MRNLNRYREEEMEDMGVFAEDKQYFHGAQRFWVDGAQQDHLGTETTCLLGCTGCHTPAGASFIFKSSSESRLPLSGPGLRFIVADLEPASQAVHICPLNTCWLPADISWGLGATAQQAVTGCILSDTHSQSLKPLSVKSTWDPEEWLPEMERLKAYSL

SEQ ID NO: 925142 - protein, 209 aa, Homo sapiens
MHQQIQQQMQQQHFQHHMQQHLQQQQQHLQQQINQQQLQQQLQQRLQLQQLQHMQHQSQPSPRQHSPVASQITSPIPAIGSPQPASQQHQSQIQSQTQTQVLSQMQVQADKGSLVPESENKSLNAFVQHNFCNILPPDGGSEQAKIKVILVDVEDISRQGESRENPFRLKTQAPQNSRRESNKIGQTAFVEGVSRGHRKLKEKWNKMTT

SEQ ID NO: 925143 - protein, 132 aa, Homo sapiens [sequence omitted]

SEQ ID NO: 925144 - protein, 1166 aa, Homo sapiens
MVDLKKEGAGPAGIWALDWLQGLVKQCSLVVNGDDDPQLSWVASSPSSKDVASPTQMIGDGCDLGLGEEEGGTGLPYPCQFCDKSFIRLSYLKRHEQIHSDKLPFKCTYCSRLFKHKRSRDRHIKLHTGDKKYHCHECEAAFSRSDHLKIHLKTHSSSKPFKCTVCKRGFSSTSSLQSHMQAHKKNKEHLAKSEKEAKKDDFMCDYCEDTFSQTEELEKHVLTRHPQLSEKADLQCIHCPEVFVDENTLLAHIHQAHANQKHKCPMCPEQFSSVEGVYCHLDSHRQPDSSNHSVSPDPVLGSVASMSSATPDSSASVERGSTPDSTLKPLRGQKKMRDDGQGWTKVVYSCPYCSKRDFNSLAVLEIHLKTIHADKPQQSHTCQICLDSMPTLYNLNEHVRKLHKNHAYPVMQFGNISAFHCNYCPEMFADINSLQEHIRVSHCGPNANPSDGNNAFFCNQCSMGFLTESSLTEHIQQAHCSVGSAKLESPVVQPTQSFMEVYSCPYCTNSPIFGSILKLTKHIKENHKNIPLAHSKKSKAEQSPVSSDVEVSSPKRQRLSASANSISNGEYPCNQCDLKFSNFESFQTHLKLHLELLLRKQACPQCKEDFDSQESLLQHLTVHYMTTSTHYVCESCDKQFSSVDDLQKHLLDMHTFVLYHCTLCQEVFDSKVSIQVHLAVKHSNEKKMYRCTACNWDFRKEADLQVHVKHSHLGNPAKAHKCIFCGETFSTEVELQCHITTHSKKYNCKFCSKAFHAIILLEKHLREKHCVFDAATENGTANGVPPMATKKAEPADLQGMLLKNPEAPNSHEASEDDVDASEPMYGCDICGAAYTMEVLLQNHRLRDHNIRPGEDDGSRKKAEFIKGSHKCNVCSRTFFSENGLREHLQTHRGPAKHYMCPICGERFPSLLTLTEHKVTHSKSLDTGTCRICKMPLQSEEEFIEHCQMHPDLRNSLTGFRCVVCMQTVTSTLELKIHGTFHMQKLAGSSAASSPNGQGLQKLYKCALCLKEFRSKQDLVKLDVNGLPYGLCAGCMARSANGQVGGLAPPEPADRPCAGLRCPECSVKFESAEDLESHMQVDHRDLTPETSGPRKGTQTSPVPRVSAVHLILLPAPLLGAPLVPTGATYPECRVSKKRRYRAVAKQNCCAVDSLSLNLSTAIAFPAM

SEQ ID NO: 925145 - protein, 288 aa, Homo sapiens
MLVTDWSRVFLAEEGINHECKLCNQMFDSPAKLLCHLIEHSFEGMGGTFKCPVCFTAPIHAPGCRGQGQLCRPSSQPPDWLPAQANGCPSPRQVSGALPAPSCCPDGSRCAWESLAFPASPDICCLPRQEAHPGEDAWQEGISEVLTSQTHSCSGPPPGCAQGWGHLRTPATGKPGLDLLHARPRGVHSGANPPNTHPWGSPEPLSTLMPSSPSSQEPPPIFFVQANKLQQHIFAVHGQEDKIYDCSQCPQKFFFQTELQPPGLCQPSVLKRTNCHWLSPEQESEAYI

SEQ ID NO: 925146 - protein, 236 aa, Homo sapiens
MPQNQSLPGTAPWVRGLGAVPYEQMAVIAGNPETLQESRVWVFTASWSRREHQNGRPSGAQPIQGGVGAARFPEKGEGGPLLLLRRVLPSAHGQPEGAMKSSVDEAHSFIQQMCTEHLIFVRPCSRCWDGSMNQAIESPVFLALPFMWSWIVRGSYKEHGAWGLHGQFLGPAGSQEPDYKLSPCLVSFPHQLNLRPKFMGPVGVKGGNSQQLPPRAAARSIRHPGVSRVHHQLLEG

SEQ ID NO: 925147 - protein, 153 aa, Homo sapiens
MCMQFCSFTPNPRKTFSLALQVHLVSERFAMSRCGFGISSFSKGIDVPSFGDPSQKSSGWKISSSSTPVNYETAHICMEFLAVTDCAPCFTCKLSCALHSTPAQHILSLNPFYRRGNRGTERRKTSFSYAGSDSDVKDQSYGSTMITQPRLVF

SEQ ID NO: 925148 - protein, 131 aa, Homo sapiens
MCAHVCMYVSHSHLNQIGTFTLMIVSQHTASLSCVMAMIQNCHISIDSVPIVTLEQGSANHDPWVKSNKSSPLPIFVWPKSNLTVTIREAACSVKHGDFRDIQPGSQNGFLPALWAFCSASKEASRWHGSV

SEQ ID NO: 925149 - protein, 120 aa, Homo sapiens
MGVAVIVERAEHEKVTAPVNAAKCQSLSKLELLTAMAGSSGLRGRPVGSDGWTPRMAFQRAGHGHLITSRVNILVIYFTTTHSLVPSQRVLYAALKRARVISLSLSFYIKFKECITMKVV

SEQ ID NO: 925150 - protein, 156 aa, Homo sapiens
MLTPPKTSITPSQSFSFSVSYLGFISVNLYDKCMTELLLFTDTGNVQIHRILLFCHSLQEEATLTDIEHLGSGGNLRDRKLYVLNKSRSLQFNKSWNSNDVVRHEQGRRGDPQPPTRNVRLPSGEGSCELFQERMDLSVVKLFDVQSFTDLMEDLF

SEQ ID NO: 925151 - protein, 151 aa, Homo sapiens
MFGSAVLNPIKYEWLWIQATVQTKPNPTLNKSDAPAHFLVDRFTLGTGLHSQRSVAALDSHRSTNPIVNCICQGSRLHAPYENLVPDDPSLSPVTPGWDHLVAGKQAQGSHRFYITVNGTIVFHETGPWCQKGHSEKAAVCEPGTGPLPVT

SEQ ID NO: 925152 - protein, 149 aa, Homo sapiens
MGLGRPTRQPPAWWRIEGEAAVGQNVIGQGRLSTDTLGKLASEMTLVAPEIKPGKSVRGSVVITKSKADSHGSGSQKQHHSHQSETPQVQIRALPQKGWDLPPPQHPAARSVLFIPAVFSPGQPEHCPCAPPSERGIHPAGAQQASFML

SEQ ID NO: 925153 - protein, 446 aa, Homo sapiens
MHVPKEFADLLFLLASEHQKTTTPDPMDDPCFSHRSRRKLAKIQLPEYILDFGYIILGEVRTHIIKIINTSHFPVSFHADKRVLHETGFSTELDRVKNLPHCETEIFEVRFDPQGANLPVGSKEVILPIKVVGGPTVHICLQAKVTIPTMTLSRGKVDFATIQCGQCLVETIQLSNHLQVPCEWFVQSQKPVDKLEKHMPKYLRQKLRAELKPKTRIFEIQPISGVLDPGEKSNVQVKFMPKEEKFYSQTLVFQIAQSAQKLTLLARGQGLEPRLEFSPSVLDLGPLLLCAPGDEAEVIVKNPCNFPIEFYSLEFDQQYLIEEKQILRKLKGYDSYNTLLLPPRNPGEKLPPELYEYFKEIKKSKEEQMRAKYLENLAQENETGALKAGGGHSHKQKTSPSIVLRPNSNRRAVLCSQNCALSGPPPLSYPIICPGALVCLAIKVPR

SEQ ID NO: 925154 - protein, 155 aa, Homo sapiens
MSLSPSLPTNILLLLQTHFLENFPHHPCWNPFIPKSLFQRSWYFCCKIIFLCSDLLSFLHGLLYGSPDAELTGPDPWDVVAVGHSFQHNGKLEETRKRIVPQILQEGTQPCSPILDFCPPDLWEYKFALCEAMKSVVTCYSSNGALILTTHRLIP

SEQ ID NO: 925155 - protein, 262 aa, Homo sapiens
MQEKKLQQELERQKEEDELKRRVKKGKQGPIKEEPPMKKSQAANKQVPPLTKVDVKMETIERKISVREQTMSEKEELNKKKRNMGDVSMHGLPLVQDQEDSEGDISKDPDKQLAQKFKTYELTLKDVQNILMYWDRKQGVQLPPAGMEEAPHEPDDQRQVPSGGRRGRKDRERERLEKERLEREEAERERLEKLRDLEERSDWEGEGEEDHEEKKEKDLGVPFLNIQTPDFEGLSWKQALESDRLPKGEQVGCNLYCCDNGY

SEQ ID NO: 925156 - protein, 607 aa, Homo sapiens
MKEKIDQVFESQKDKRHMALNRKVLSGEPAGTISQLSDTDLDNFNGQHSQEKFTRLNHFRWIVPANGEVTLQVHFSSDEFGNFDQTFNFEILGTCCQYQLYCRGICTYPYICQDPKVVFPQRKMDMKTNEVIFKKYVMSTETYYFGPLLCGKSRDKYKSSLFPGNMETLTILNTSLMVVEASFYFQNDVKANTYFLEPNTMVLKPNEKQILNVWAYPTSVGVFEDSIVCCINDNPEPAIFQLSCQGIRPELELEPRQLHFDRLLLHRQESRVVLLRNVTLLPVAWRITSLEHLGDDFTVSLMQGTIPPEAEYGLHLYFQPTKPVNIKKAIRLEATCSFSHLDFYRGFLTGFPVGIRHSVQRDLYNVIQTVAGSWGVQGFLWWGCTGGRQQGDIGEVIMTAAYQLVLDAENLLGVVQIENIMVFAEAYDIALDITFPKGAEGGLDFGIVRVTEEAKQPLQLKNRGKYEIAFSFSVDSVGISTPNINSMISVQPKKGSLTPTEKPRNVQVFFHAKKEVKIEHQPVLRCQIIEPNISEGGEIIASIPIKFSANAVYSKYNITPSSVINFGALICGTRKSTTFTIENQGVTDFKFALYKLTGESPIHQKKA

SEQ ID NO: 925157 - protein, 147 aa, Homo sapiens
MDMKTNEVIFKKYVMSTETYYFGPLLCGKSRDKYKSSLFPGNMETLTILNTSLMVVEASFYFQNDVKANTYFLEPNTMVLKPNEKQILNVWAYPTSVGVFEDSIVCCINDNPEPAIFQLSCQGIRPELELEPRQLHFDRLLLHRSEF

SEQ ID NO: 925158 - protein, 263 aa, Homo sapiens
MSQPGIDIDESRHRTDPLPQDSSCDPFVATPFPFPQATPPHPLESNTFLCVYHFVISGMFPIDIFFTPKQQGDVNFNLICNVEKKVHPVTLNVKAEGYTMNVEIKCKDRTGSITLLTPNQTNIINFYEVELNECVQCEFNFINTGKFTFSFQAQLCGSKTLLQYLEFSPIDSTVDVGQSVHATLSFQPLKKCVLTDLELIIKEQTRSSFKNLKGETGKKIFMGGSEKLQHIPWNLDSHACVRCVYLQAVTAQERPEKALSSYL

SEQ ID NO: 925159 - protein, 166 aa, Homo sapiens
MCGEEKEGEGGSRDDAGGDGGGGGDGGGGGGGGGGGGGGGVVVVAAVAAAAAVWWCGDVVVMVVVVVVVVAVVAVVAVLWWCGGGGSGGSGGGCGGGGYDVVVVVVMVVVVMVVVAVVVVMIVVVLVVMVVVVVVIVVVVVVIMVAARMMKTVMLMVKVVMICWWS

SEQ ID NO: 925160 - protein, 351 aa, Homo sapiens
MKTTPKAKMGKENTHINIVIIGHVDSGKSTSTAHLIYECGGIDKRTIVKFEKEAAEMGKGSFKYAWDLDRLKAEHECGITIDISLWNFETSQCYVTIIDAPGHRDFIKNMITGTSQADCAVLIVAAGVGEFEAGISNGTTLLEVLDCILPPTCLIDKPLRLPFQDVYKIGGIGTVPVGRMDTGVLKPSMEVTFALVSVTTEVNCVEKHHEALSEALPGHNVGFNVKNMSVKEIRHSNDAGQISVDYAPVLDCHTAHIACKFAKLKEKIDLHSGKNLEDGPKFLKSGDAAIVDMVPRKLMCIESFSDYSPLGRFAIRDMRQTVAVGVIKSVDKKAAEAGKVTKSAQKAQKAK

SEQ ID NO: 925161 - protein, 146 aa, Homo sapiens
MPQTQGYFVSLAVHGNGGVGFPGHRKLSPGQRTVHRPPFPGSTDAGHRASPLSFGLHQEFRLFQHKSQRLAVSHKPISPESFSATRETRLGLTEWRLKAGDGVSTFLYHVRCGTQSRIEVNSRLPSAEFASSANEKRWYWIQREEA

SEQ ID NO: 925162 - protein, 165 aa, Homo sapiens
MNGKMGDLGFFGSQGQKELYGHLVQLLLPKPSAECLIMSCLAFSNSGKEFGTPDFPVLELSGSIGKGSSPSPEATLPCIVKKLSGLQAKHLRGDFDVLKAFSCKRETEHKSLENLQTDNAIEKKNPFSEEKFKLEAEICISNKEPNYNLQDNGEKVSRACQRPLR

SEQ ID NO: 925163 - protein, 149 aa, Homo sapiens
MRSRKELHPTQMQKRPTRISLPVQQSRGSDGPLMRELVYSKPRERPHAEPRCLSQQLTPAARHVTGKFKAFEFMKEEDFSRTILGGRESAQQRAPSTRKTEAAAPPRGQQGGAAAGVLSSGGELSFLQQAFIEHLLDRDAYTEGREREQ

SEQ ID NO: 925164 - protein, 165 aa, Homo sapiens
MIFLFLFFHPVLPSTLIISRHPQPSEFGEEEEKGKPEKLTTWKQKNEQEADEQMGVIFKKRQQKVVGGECYRQESSGATGIPSLAMANRAELKFYCLTADVSVGHYSQYRETTLYTKLLVLENKLMVNLHKSVQLLLDDRSLYTLPLGMFHKNMEEQISSLLRTP

SEQ ID NO: 925165 - protein, 155 aa, Homo sapiens
MDTKIFLGNSHAGNNCRNITFSGPPAAGLMEFAGGPLQTLFAWVSPAEAAEQAVRQGRLSLQMFLLPFVHLCPAHRGGTIEAVGLAELQLAPPSSSFLATLFTYSSLSNGRRPFPLLGCSFAGRSQTAALAVSKAPWAWDPQSQAQERISWSAHC

SEQ ID NO: 925166 - protein, 154 aa, Homo sapiens
MLQVHYPWHLVLLSTPVFCCQEGFSSRLPTNLFDDLSWLLCNGMSPLSTHPLKTAYLKKDDLGLESIKSGGKPFFSMFGLQQVGWVARETFFTDHCLLVSSASLRDALWLCMQKAPSDLKFIMLEVSYHQRGTFQAVHRRVQSKVAGTWGVGGG

SEQ ID NO: 925167 - protein, 203 aa, Homo sapiens
MQAAELMSTSEFKKAKGWLVLITGDKDDTGNDDGMGFIKRALTVMVNTECQLDWIEGCKVLILGVSNISSPCYLWQRRHRALTEWRKKSFKDCCWGQAAILLGAVHLLGGANSGPCLCLPPHLPFLPPAVLCSQHSASPAVSVPGGAETPSPSYVSISHSPGERYDKIPSPQCPGNPTPVSHVYFLPTLGHAVNVIKMPYLSE

SEQ ID NO: 925168 - protein, 135 aa, Homo sapiens
MLMRPLSTFPSRTNGNSRKVNTALPEPPEAICYNVVWNAVVISGKYFKDRWQIKPDTSNQQLQLPAHLRMNLHLQKVYKRDKEPGNLKMLHGEVRKLFGPKVMVRETRDYCFRGGTNADDDRKVHDEIQVEANLH

SEQ ID NO: 925169 - protein, 147 aa, Homo sapiens
MSQVSVSIGVLQLGRCSSDIFICPHLPWAILSGPRDSCYMMYVSDRFPVHASSRQGRDWAPSGCENQGLVTVMSQCHIGTPHGQLAPSQHGGLVPRSSVPRGEDGTFRSFKTWSCSYTSPSYHIVLVIRGHRANPDLRQGSTDSTSP

SEQ ID NO: 925170 - protein, 165 aa, Homo sapiens
MLQDHSVNHPCPIEGYNLMEAGTESFIMSCGHRHQSGREELDLGLKKFMMRSQRRLGSAAVGEGKVRGEEKGGPAGKSGGLHPEVYIRRSTSGGLHPEVYIRRMMWLGKTQFFLCFYLTTVNPEEVCDPTCGFSPTHQASKQASNSAVDTNCTTTNSILTPSTWR

SEQ ID NO: 925171 - protein, 225 aa, Homo sapiens
MPKRKAEGDAKGDKAKVKDEPQRRSARLSAKPAPPKPEPKTKKAPAKKGEKVPKGKKGKADAGKEGNNPAENGDAKTDQAQKAEEQAKLYKDFKLIPIEMSQIREPRPGPQEGELGPSLVPHFWELLNDLYPSLSLVLPGAGSGGALCLGFRFSSSAHSCYLKSLPNPSNMPKAGSPALNGTGLAGPTATSITSIAMVLPSVCSVDTHRHTSSIEVRREHVNCFS

SEQ ID NO: 925172 - protein, 176 aa, Homo sapiens
MGHTVCEDYCQLASATGSRLPTKLEALKVGSQNVEHGNDKVVEEELVPKIKWVLLDRKIRESRCWARKYKRYSQQQQNNNNNNNSEKMLRCLEAWKLRPISRAYYEISTSIKSASMVPNSQSWQPSPFLSQTYRFLSELLTLMMDEGTGEQESRGSPLRPLGQKQGLPIARLARED

SEQ ID NO: 925173 - protein, 182 aa, Homo sapiens
MFYISGYQAGGAEGLSYSTPIESGEGRSVKLKAMRARTRNLGPSAADMLEFAGGPLQPCLPRYHQRNLQNNKDCCLFLLLEASSQRGTRLMPTEALLYEVSVDRCWEPSPSQEAQGASRWESLSPLKLRPQAPCPPGALSQGDGSFIYKPLTGAADFLLEMPCPERRNLERQSGYSSFAELW

SEQ ID NO: 925174 - protein, 138 aa, Homo sapiens
MGDVEKSKKIFVQKCAQCHTVEKGGKHKTGPNLFGWKTGQAIGFSYTDTSKNKGITWGEDTLMEYLENPKKYIPGTKMIFAGIKKEAERADLIAYLKKATNDQFQEREWVKTILVHKRFWRIYICILERSYWLQQETS

SEQ ID NO: 925175 - protein, 134 aa, Homo sapiens
MDEPGSRIQKGLKASAASWALRISADGTQDFPLFPCLAGSRVGVSAGIQEGPLLHLNRYQWPYMPLAWRCNHRSIPNWPYSVDNRTFTVRTKKIDMSRAQEKNLNAGTLSEEKVPLSPSQKGSVGQENPVLKFA

SEQ ID NO: 925176 - protein, 148 aa, Homo sapiens
MVKMKEKTFKNIDLKLPARLLVTAIYKKVSNSHKALSIAPGPQALKKEGLRDPQDSTRCSGCWGHKPLSARKSPDPTQTSGGEAFVMQRGPDEKPLSCEQQLTMFSDLFTIVIIVAVQEHLEAAISGLNIVMLRLATGQVGFGRGWPS

SEQ ID NO: 925177 - protein, 206 aa, Homo sapiens
MAPSPIDHPRAEECGTRFTPEASETTNPPGGMNNSRRTALRAVTLTTKVCSFTPEPGRPRTHQKEETPNTSEHQKEQTLDTPPLRTVTLTTRVRGFILEVRVALEFANIQFCRGGSCWLNNGDKTGNLSTQVADTLAYNDSLKMIFPQALRRITGLFWEGKLAKFKVKDEHLQPQEEAEDCHEDRKGTVCHQMEKTSHVLHIFFTS

SEQ ID NO: 925178 - protein, 136 aa, Homo sapiens
MFTAEQQEGHWTGRHDQIMKGLRGKGNGEPVEIVERGKTWSLGRHLSKDEGFELTAQQSIDGRTYPGTLSSPWVSDGGCHHCESDAGGRPHCGVDETVNLLVDELKAMNWDLGEKGWKKGDIKDAEERKEEGARHP

SEQ ID NO: 925179 - protein, 156 aa, Homo sapiens
MVTGFQILVKLEDNCHSRTYLARRVYPGVSPMKFSCHLHCLVGSGAEIEGSRLVADCNKALVFAALLWEKKDETDLTVAMPLQALQFSVHLIDLLSILLRCNRFPGIQKAVVDQTGSRPANSKVQSALELLLSSTIELVVFSCHMTSTFHCMSQSD

SEQ ID NO: 925180 - protein, 133 aa, Homo sapiens
MSEPDIDVDTVRMGSTRAPGPLAIVPAVLQPREARYVHVSCPFYRRWSSGLGDRLTVFGTNSTPAFFHLATLFTRSRQQHGGSVLQEDWGSPPSTTTAIEPSAQETEACDSNSSLFALEPWLSLRSIRAPGGC

SEQ ID NO: 925181 - protein, 218 aa, Homo sapiens
MGMMAVMVMMVVMMVLVMVMMVDGDGGDDGDDGDGDDGDGDEDGDNVSDDGDGDGGGDGGDGDCDDSDDDGGDDGYGDDDDGYGDDDDGDDGNDDSDGDVMVVMVMMVMMVAMVVMIIMMVMVVVMMVMMVIDGDDGDNGNDDSDDGNGGDGGDDSDGDDGVGGDDGDDYNDYNDGDGGDDDGDSDDDGSDDGDDSDDDEDYENGDDGSDNDSDNCYM

SEQ ID NO: 925182 - protein, 203 aa, Homo sapiens
MGIGCINSLAGLVADGRDSGTTEKAGALPRRRQRPKNGLLQPDDHMSSLAVNTLPWAVICLQLPARGVVGGDVYTWGPGHSECGPQTSSISTTIEMQSLGPLTDFLDQNLHSNKSPGDSDACGQGREGTEQRRMDAGERPHKEGSANRNLTGCPNTSEDAGHPHISEDAGCPHTGKDAECSHTGENAGWTPSHRQGCWTPSHW

SEQ ID NO: 925183 - protein, 139 aa, Homo sapiens [sequence omitted]

SEQ ID NO: 925184 - protein, 163 aa, Homo sapiens
MPLEGFKKTFAPKDWKRPSAGDGLNRLRTPPPPRPLWEQRQARLGGRRFEAAGPCFLLAGGWGPCQVTAPARVAASYYDLSPGLLPAPCWRRLVQARASLTPARCFRTQSCPALRGISSSGQNAGEGFGGEVVFCRGPYNPPIFLLPVSKWLTLPPLQGPSMM

SEQ ID NO: 925185 - protein, 127 aa, Homo sapiens
MELPEPRPRLTGSALCLTQEESSEENCCARGFAVVSAGAVGIPKTWTEEAERMESKHSDPVVTPPGSTQQRRDTEQGPPGLAASRKTALLAFPCMRVKRLQRAHRPPSKPEVSNPRATAEGEQQGSH

SEQ ID NO: 925186 - protein, 128 aa, Homo sapiens
MTRTPRLLSTGWWAEAAVIPGCCYPAAPALFVVILLHYSPFSITKCDQEEAGEAVYPWFPAVEPMAGPDGGHLRNRHVVHNILNPQRSLGSCAVIITRMNTSFRPALAPSRLRWNAPHPVSLLMVSSS

SEQ ID NO: 925187 - protein, 138 aa, Homo sapiens
METSKCSPEKKVSESGSLVDSEAVAPQHLLFWKPENYFLIDKGGSPVHHRSPIVDCMSVAATSYYNQNCVSKLPQDAEAAPDDNRKGLTEVEKHQQEDWVHHHSNKWTHGEPPYYLRGGKTLRLQEGFIPNNYIANQD

SEQ ID NO: 925188 - protein, 141 aa, Homo sapiens
MVPFSLGRLLERGWFYEGGARADGDSLEHAQEAGGADGEAPHHPVHAEECLTLEVILKIQHQMKFWYFHSTSLFPRPSPEKSATQTILLLVSIFVVIYWVDFIILFTSTLLWAYDPVVLGVQRLVGNVYATNIYCAFTFGD

SEQ ID NO: 925189 - protein, 142 aa, Homo sapiens
MEPGHLCAPSSEIHGWLCRGDVRVGHMPTAVTLHCTHQGSGARLTSDSPGAQLLCLHPGILAAAQCSSEITALRRILLLLLWEKNVGGQCARHLPASTAPPEGALPSLEQASSTAALLPCDDFSRGLGPCCETSPHRPMICP

SEQ ID NO: 925190 - protein, 137 aa, Homo sapiens
MLAPNSLMSQEICHLKVLTGWLWMSNLSASHTEPEAGVVAPLNGCKPVQSFDSAYTFHMSNKARTCFKKFFLSKKQLINCGTPEQKRFSISMAKCQRGEKSRILLALSWQLSLELILLYLEFPSCKLYSGSIDKIIV

SEQ ID NO: 925191 - protein, 136 aa, Homo sapiens
MGCPPFWGPDKTDTIILNGNVNSIEFMTAEGPECFWPLDFSYAPPAVTIAEEDVIVPRSFPVSRPCRSGRAISCPLACCPQPRLAPGKCVRASWWEPQQPSWRSCLSMPAFPWPLGSPTVHYGPRAALLTLPVKGM

SEQ ID NO: 925192 - protein, 149 aa, Homo sapiens
MWKVGPVFHLSALPPGAVAPAIEPGHEVWHPQTAVAHLCDGEQVQQPSVDMHAGHLGEGCDTWAGGRKRAPWSSGNASAWEGTGYLADRQRESPFPWESWGRLCSTTSCGRPDMSQARPQSSRGLNLFLWCCASAVTLLVHFHVPPSAN

SEQ ID NO: 925193 - protein, 145 aa, Homo sapiens
MAPQGGSSQPARRAEGSTVVSQGQGDSRNKRWLWIPLAPWVDGAGAGTGPSACGPALGPAGGPGGIHSHLQWAFQETSVDRALETPFPAGTFVRLEFKLLKTRCRKKNWKKPECKVQPKGSKRKCLACVKLGSEDKVAAWMVTAL

SEQ ID NO: 925194 - protein, 153 aa, Homo sapiens
MSARSAGFHYLCEFIENIFNVIMFLLQLRTFSINILNLRLWLSIPFVLEIRFLWCNSIACNNIYENYKHQHTISILYSVAYVCLPKLKLNQSFHSYTILPQALSFLPPHLLQHHPTFVAVSNFRMNRCRSTISLESSFTSNLLTMSSNCIFIF

SEQ ID NO: 925195 - protein, 151 aa, Homo sapiens
MPTELWAEVKEPGNVSFSKLTLVCAWFSPLPPALSTLFPGARRFSKVPCPLPGPGSSPVAHSHPSTLLWPILSPHWVSHTTTPPPYCPRSPSLVLALSLFPDCFSISILNLPAPVGCPPIPGPRQNQQNYLKWEYLNSTEFVKAETHLVIF

SEQ ID NO: 925196 - protein, 169 aa, Homo sapiens
MPRQGHQRAPWSSRNASVWEDAIAKRTWCSGSICVKEKHPLLSRPGKGVSLSPGEFREDSTPPPLVPAVIRRPILLPVMLCFSGRNPTDPVGLLPTVQSCPERASGQDKVTAQGRDRTMGSLLPAQPPSYVLLLLPQVGLGHNTAPPPFSGWVGFVRLRSGPWANSDPL

SEQ ID NO: 925197 - protein, 147 aa, Homo sapiens
MPGKSLHHSPFLINQGYNALRRATGTFVQESLCIVQDQVGMGSLDGLVSQETLVMQFPADSTLPIAKSIFSLLQLLGQRGPMGSSAGHFKVREMQKKRIKLSLCPSVLLPPANLPPLSLVSLRCLAVPWALLSSGFQPTLSSSTSCL

SEQ ID NO: 925198 - protein, 183 aa, Homo sapiens [sequence omitted]

SEQ ID NO: 925199 - protein, 135 aa, Homo sapiens
MRRRCEQVTLPGPSFLGAFSVSASETVDANVSIPNVNLPHGEKQMPRSPTMLGHGTMDILDWKIIVGMSCALQDAEQYPSCLRFRCQGCQGPVGDQYRIYCYNQYRLFTGQFDAVYHNLKWASCLTCQFYSSDAL

SEQ ID NO: 925200 - protein, 213 aa, Homo sapiens
MQVAMPHLSPIMQARGPPPCQGPNGSYNLEVKCSRELLELMHDSCIQAAKVRLGPACCGSEEQTLEQERWMRRVRSTCSRKRRDEDSPGVEKNKEILKMFIGLAVEGWPHTLLTLLLPYLPWMHVSATCRLEAKDVGQHSWEQTEMAQATGPGCPLENAAWKVHADVAAENQHPFDHEKVPCLLFTFHHDCKFRKASPAMLNWILNITSNFIS

SEQ ID NO: 925201 - protein, 272 aa, Homo sapiens
MPDSRAPPGVSLWDKLLLLHRVPRDDCSFAALYTRAAARGELLVLTLETGSTSGPSDLGVLLPDALFGRTEAEHLGVPGRRCPGGPTSVESQRSSGYANPVFNSDTVLKVADLPHGPRMPPDFTDNREGEDLQDAILDFLQIKTTGIKQGHVCLYNDDNDNCNDDGDGGGDDESDKDDGDNDKHEDEGDDSDEDGDGGDEDGDDGGDGGDDDGEGDDGDEDGDDGGEGDDGDDEDDDAGGDGVTMIMVVVRVMMVMVMMMLMMVVMMMVIIR

SEQ ID NO: 925202 - protein, 117 aa, Homo sapiens
MGHLCTWLELVHLQRSVVKQSDVDGDHEAVPGITVKANSLRACLSTTFFVKYSLCAADVEDRKMYIDNSARDQGAAPGGVLSQMFPSTGMASRSHIMGQSPGPQLGLSCDGVRDWHF

SEQ ID NO: 925203 - protein, 261 aa, Homo sapiens
MVVRALSCEFRQQIPCSHCSYRLCDYRLYDRRWYYDCSHCSYRLCDYRLYDRRWYYDCSHCSYRLCDYRLYDRRWYYDCSHCSYRLCDYRLYDRRWYYDCSHCSYRLCDYRLCDRRWYYDCSHCSYRLCDYRLCDRRWYYDCSHCSYRLCDYRLCDRRWYYDCSHCSCRLCDYRLCDRRWYYDCSHCSYRLCDYRLCDRRWYYDCSHCSYRLCDYRLCDRRWYYDCSHCSYRLCDYRLCDRRWYYDCSHCSCRLCDYRLYD

SEQ ID NO: 925204 - protein, 146 aa, Homo sapiens
MLVTTSGWGLETGLGKTVIPDSCACSARARPRDSAKEQLRSGRACSSEGPGEAAAEWAWGNHLLPTFRLAGLAPNTRNFSPAKRRRWWEGSLTADISPILTSRLESLLHCPRCILWYDCAITDPLSHGGAPAWFPDFGCHCGTCMS

SEQ ID NO: 925205 - protein, 224 aa, Homo sapiens
MKDKEMSASSRREKPSPVEHRSVHLSRETGTSGPNGSYNLEVKCSRELLELMHDSCIQAAKVRLGPACCGSEEQTLEQERWMRRVRSTCSRKRRDEDSPGVEKNKEILKMFIGLAVEGWPHTLLTLLLPYLPWMHVSATCRLEAKDVGQHSWEQTEMAQATGPGCPLENAAWKVHADVAAENQHPFDHEKVPCLLFTFHHDCKFRKASPAMLNWILNITSNFIS

SEQ ID NO: 925206 - protein, 168 aa, Homo sapiens
MLFLFPFSQAGAAPAGVVPASVGSPQGSTAPARWPPGLCPQVPTYRPGHTDVGGSFETPTPKNTYTQKHLRPKTPTIKNTYTQKHNQNTCNQKHLHPKTPTIKNTYTQKHLHPKTPAPKNTYTQKHLHPKIPTPKNTCNQNHLHPKTPAPRRIPSVGRAGARLTLGPG

SEQ ID NO: 925207 - protein, 239 aa, Homo sapiens [sequence omitted]

SEQ ID NO: 925208 - protein, 144 aa, Homo sapiens
MSRGQNKFIDQKEEEEEEEEEEGGGEEKEEEEEEEEEEEEEEEEEEEEEEEEEGEEEGEGEGEGEEERRRRRRKGRERGKKENKKRRRKRRRRKKEEEEEREKKKENNEERRRRGKEFLTFFFSVWNLAAVLKELLFNVPNFNE

SEQ ID NO: 925209 - protein, 155 aa, Homo sapiens
MSWLSLLRKFRPQNIDKDEGKPGLQTKNLGTVEKESSTKSKAEKVKRCFREVGGSVGVKEEPTRKSTESSPLIPQAPGTCPAYTPSTDSKIFLSSAPRLLCCIEQLIHQLWPISPQKTQVCPEIQGHDPCLTTGFFRSNAYMHTCVSSEHCSSHS

SEQ ID NO: 925210 - protein, 153 aa, Homo sapiens
MNPPAQLCCVQMFTGLAGILNRHSKNPGGFWADNGITYVSGESWMEVEFEGADKEFRFGPADFKYVVDNGIWRASAKKNGPYILEMSCNCNHTVFTLYDSIYMKPRKDTSIVTVDQGYQGLEVGVLWGGCLTGKRHKESFGMMKIFYIFFLWR

SEQ ID NO: 925211 - protein, 184 aa, Homo sapiens
MQADLTEAVETASSEGLHVNAEIEVLQQALLYMKTMQEKRETLQKDQEKLEEELVNLKSHMEMNMLECGQLEHYKQESQKIAHDQLQLKEESNATMKSQMELRIKDLEFKLYKARTSQADCNTTELEKYKELYLEELKLRESLSDELNKSQQNTYSKRSLKNSYLKLIVFKYQNGERLVKDVND

SEQ ID NO: 925212 - protein, 134 aa, Homo sapiens
MGGQAETLPSSQYPLLDFLALALPVSPVPHIKLLLFGGRGCGRDTVTARDNSQHQEEPECVGFYQTSPPQSFPKHTQRIPDAARTLPPLESSGPSIPLVAAPVITDFLPFTEPNLSTGFQEEEAWSVPLPGKAP

SEQ ID NO: 925213 - protein, 175 aa, Homo sapiens
MHSLITEYLEDAGHGGKCGEAHSERIRHRLSPSRGLYLHFKLGFFNPKKALRSKNAAQMVDFSGTYHTRLQLSVCVYHQTVEPIPIHLCSSCLWHIVPYQRHEVNIYQMYKDVHNSTLVTHTHIIVIITIIIVVVIIVIYCIHMEKAGPSSAPLRGAWHEYLLLQHAKKEGFIKP

SEQ ID NO: 925214 - protein, 180 aa, Homo sapiens
MDWQPTGLWGMAAPHEHGPSHCTEEVGGGERQFSEKRKRRRRKEEEEEEEEEKRKKKKKKEEEEEEEEEEEEEEEEEKKKKKKKKKKKKKKKKKKKKKKKKKKKKQTNKRATVQKSNVGLLPSEQSPFSLSPNCSRVQLGMGKLEGVGLELVGVFSIMTDPAEKEADKGKPDQAWGKREF

SEQ ID NO: 925215 - protein, 549 aa, Homo sapiens
MKLAWGAAPRGPPPCIHSVLDWSDSLAQLAQARAALCGIPTPSLASGLWRTLQVGWNMQLLPAGLASFVEVVSLWFAEGQRYSHAAGECARNATCTHYTQLVWATSSQLGCGRHLCSAGQTAIEAFVCAYSPGESPYLTQLPDSLAWPQELKGPGRGNWEVNGKTIIPYKKGAWCSLCTASVSGCFKAWDHAGGLCEVPRNPCRMSCQNHGRLNISTCHCHCPPGYTGRYCQVRCSLQCVHGRFREEECSCVCDIGYGGAQCATKVHFPFHTCDLRIDGDCFMVSSEADTYYRARMKCQRKGGVLAQIKSQKVQDILAFYLGRLETTNEVIDSDFETRNFWIDGKGVLRAWSPERGQLLTPFPGEGPGREHMGAASAGKRGQKGSWQQTPGSEWANLDYPGPGLTYKTAKDSFRWATGEHQAFTSFAFGQPDNHGFGNCVELQASAAFNWNDQRCKTRNRYICQFEDALLMALYLWAPEPRGAMTGPASYSKATQEGLELQLCRGFLQGPSPVMKAASWEPVGFLGVPGSPMNCGGGGDPVGQRSFPVA

SEQ ID NO: 925216 - protein, 172 aa, Homo sapiens
MVTWMKRDTNYLLHMGGEGVSWAVAARTNITYKILYNDAPENYAQVKLPDGVTVHHRSELDVIQRDLRVIPGVTVLVYDQTCAAEKRRRRKKNKPGKTVFPDPARRMVINPAVCEGCGDCGVQSNCLSILPLETEFGRKRQIEQSSCNKDYSCVEGFCPSFVSVLGGSLRNY

SEQ ID NO: 925217 - protein, 167 aa, Homo sapiens
MVRPPLVHRQHQEKQGLAESRCLENGEGKQTPETWHCVLHIVHPGKHKQAEFMEGKACMAGRLLISPPFVGVHCQPGRGLEDSACGSGLSDNTVLKPVSLSPSGMRGLSSSNPTYGTICVPDHVNRPLDSHSSIVANCPLLHTNAQGCGTLQRTLLPLGISLSKQDL

SEQ ID NO: 925218 - protein, 148 aa, Homo sapiens [sequence omitted]

SEQ ID NO: 925219 - protein, 142 aa, Homo sapiens
MYIFGELSSNSHGRSLGVIFKMEYVALSLSERTRKFLWCHKTSLNAEKTMNTAPRGQTWCLYTLNAGAWIYSLRRQLHHYFKAFTSTDITKGLAVTQEGQKCCGDIDGTVYMEHFLQAWFHLSLPQTGRWMTTESLILPDVR

SEQ ID NO: 925220 - protein, 143 aa, Homo sapiens
MLSGSQGLASKPSAIYLMFSCTAAKLAHKPQYKLLSTLSSPFHGHWSLILWPSPPLNSPLRVVDSPLAQCRCRNAVQKPTPKLGDLKSLLIALTRCGQAAKNLISSIALVPIIKKLNCCTIFLFCFMKNSFMYHFNAIVIVSR

SEQ ID NO: 925221 - protein, 173 aa, Homo sapiens
MLSCWPQESGVQNGGLDTAGGDMKKAVLSLPKKKEDKWSYVKTVFRNKKSKLKKRKGDKRNKHKKKTIHLSLWESSGSQSKAEESDLRKDSSQELGQVGDLRELITLGIALKTSIRSLEKAKRRRLTNYTTWDSRNSTVGSSFSFLFASYIPTLRGEEASKSEMPFSTEEKIL

SEQ ID NO: 925222 - protein, 143 aa, Homo sapiens
MNFICKPTSRQSLPSNYPLYLVLPHQTSMSPALSQPRVRYQRTSTSIITIQENMTSPNELNKPPGTNPGETEICDLSDKEFKIAVLKKLNEAQDSTEKEFRILSDKCNKDIKIIKKNQAEFLKLKDAIGILKDASEFFNSRTD

SEQ ID NO: 925223 - protein, 136 aa, Homo sapiens
MADECVFLDFVHHGNQDLRAAAALHGLQVAADERIGLHLVPPSVEDSWLQLVVPAHRALVLVVDNDLLAPGPQLPQRQHLLLYKYQLIWSELTNARWIAFWGKSTLGSTSWSSSRECGGRGMAQTEKAKKLQGPPW

SEQ ID NO: 925224 - protein, 179 aa, Homo sapiens
MEMMLDKKQILAIFLFVFKMGCKAAETTCNINNAFGPGTANACTVQMLFKKFWKGDKSLEDEAHSGRPSEVDKDQLRGITKADPLTTTGEFAEELKVDHSKVVEHLKQIGKGKNKKNLQWLHPDEAPKHFPKSNLHQKKVMVTVWWSAASLIHYSFLNSGETITSENYVQQIDKMHQKL

SEQ ID NO: 925225 - protein, 179 aa, Homo sapiens
MAHMNILTDALKGINDAEKRGKCQFLIRLCSKVIIRFLTLMMKHGYTGKSEIIDGHRAGKIVVTLTGRLNKCGMISPRVDAIEEHLLLAHGAVGIIQFRRGGGKGVQGFPAACKMKGHSLLSLANSPSSIFKVTNSKSTFFKPAKRIGKGTLELRAVCTNESPDTVPSDGHGRIPSIKH

SEQ ID NO: 925226 - protein, 126 aa, Homo sapiens
MWTGVTLGLAAMWTGVSSGLTAMWIGVSLGLSAMWTGVSLGLTAMWTGVSLGLSAMWIGVSLGLAAMWIGVSLGEIRCQLTSGKASGILSQHISSDGILVSSQVSSESSVFPLGFLSDSCFLKQFW

SEQ ID NO: 925227 - protein, 165 aa, Homo sapiens
MSGWGAWLLLLGRGAAALFRREPDAGCSEGGHAGTGEHDRAKAGGAFGPCKAIALLTLSRQPAGHGRRLHGFSTARLAGLGVRGEWEPGAYGAKQPEITQQAWQAWLGLTLARLSGLLRTLRPCHLPAFPPPLKVSDQPSLQHSSEPFRIKSILYPPTPHPPSSQ

SEQ ID NO: 925228 - protein, 190 aa, Homo sapiens
MSVTWINDITAQKVYLGMNAGSHWTLPLLQRVRRSHWHEEGSSDVTCSKEPPQTTLAPLTLSSSEAPCFHKSTPRWWALESMLVPTVRRWPPGALQGLNEVTGGGMCHVANHVACRIDFILLKRPPTFLFRSDTARLSIAVLGSGDIGKQMTYWSVTLSQKRRGLGTGDRRPGSELPRSPRLRDLAKPCV

SEQ ID NO: 925229 - protein, 223 aa, Homo sapiens
MAEGPEEGSVTLWGLPKLMTHEFRSSPKTAAAAAIGCGVICYMAIVTAVRQHWAGMVTRAENASSASPLPMIETDNVSSTSPLPVTGANASSSSPLPVIETENVSSFSPLPVIGANASGSSPLPVIETDKVSSSSPLPVTGANASSSSPLPVIETDKGLAYMRGSVKFSQVVERLEARKHSLLRTDVAPAMTVRVTGTGIQADQYRQYKSCIWVEKIIQTVLL

SEQ ID NO: 925230 - protein, 143 aa, Homo sapiens
MSNTPGMTLCCWHSTLRASQASDGDGSEGCGDDGRSSHWWHLFCARRSSEPCTWMDPLTARGLHDTPQNPPPGNAIAPLGPDPRWQSSTSLVVFPLGFLSSGQTLDTVPQGPSLTQLRSVSVADPACRDAHVPAKKSFILIDF

SEQ ID NO: 925231 - protein, 149 aa, Homo sapiens
MRRFMWGRGQDTITYSCKWELAARQGHAGGCTQGWVTVSGCSQQLICGQRSVLNQVLWAPVDQFEKFCGLQSIGLSLAVRYLALGRQWNINEIFTFSFSYEAFEIQCVTYSEGMSQFQLCFRCSEATEDKHIQEPQGFKIGQIIKGSIS

SEQ ID NO: 925232 - protein, 141 aa, Homo sapiens
MYTPSATIKDLKDAGVVILITSPFNSPIWPVQKTDGSWRMTVDYCKLNKVVIPIAAAVPDVVSLLKQINMSPGTWYATINLADAFFSIHVHKAHQKQFALSWQETDLGLLLGLSIIETECLIMGHQVSMRPELPIMEKVPI

SEQ ID NO: 925233 - protein, 156 aa, Homo sapiens
MHRAHGRVLHPRQGRHCLCGCAWRGLGKHFGPFGKEDKHPHVSMDLSAKKGPEKENFVGSETGVGKGKRVLLGYQSLGPGIASLPSPQPETEPPRSLVESMGPDIKALLRLAGLEEKGPKIIKPHMDRAEIPEWPLEENTAVDKDGHGPGSHETHS

SEQ ID NO: 925234 - protein, 227 aa, Homo sapiens
MSCPLQFGELLGQLGCLQNSEWLLLDQHMLKVHYPKFGVSEDCLYLNIYAPAHADTGSKLPVLVWFPGGAFKTGSASIFDGSALAAYEDVLVVVVQYRLGIFGFFTTWDQHAPGNWAFKDQVAALSWVQKNIEFFGGDPSSVTIFGESAGAISVSSLILSPMAKGLFHKAIMESGVAIIPYLEAHDYEKSEDLAENVVRHLLTMCLAFLSDHAQGTSCWPKVNLVPP

SEQ ID NO: 925235 - protein, 157 aa, Homo sapiens
MWRWGSCCLCLLTPTLCSAHSRLGCPQESRCPYQPCAPGYDYDGKSEPREVKEFDQGHTASKHSTGTRIVDSFFCSCCYLFHGWKMGGDHSILMLCGQLSGCGCKKDALRPGFEGIYRHMELLEGSSACPLEWFSEVDDAAEAEMLQLSFQVPVENP

SEQ ID NO: 925236 - protein, 145 aa, Homo sapiens
MDLCREIREDLTGKNDMNRVLKEGRESVMWMDIWKKRIPGTRSSKCKGPEAGTYLACCRRARTPVKPESSVLEREVDQTPEKGGLGEGVYTMSGLSGHCKVFLYKKAGKVDRFFTHFHCSHLFFYSTYIHCSSHSVPDSVLIPVP

SEQ ID NO: 925237 - protein, 126 aa, Homo sapiens
MGAVCRTGIPEYMLGTHWQGQMVEPYLIYVHLLLGPVGSPRYVPMTMTGEQEGKPNHTSTFQASAGITMANITLAKAVIPVTTRGMGYTVGPLAFNGKSRKLGLGLSDFEEGKWSDTAHNVQINGN

SEQ ID NO: 925238 - protein, 150 aa, Homo sapiens [sequence omitted]

SEQ ID NO: 925239 - protein, 134 aa, Homo sapiens
MSGSSVDRELSGQWTNFVVVIYVCTVLYTKSLVANNSDGHLCTQGKQSNSVKKQKGLFCPQKHCPYGFDGVCPICELLGHSTYLVTVIGSDWATQPPTKENQRFCDSVAPITGTIYLLLVLPPSVDTAFILEVY

SEQ ID NO: 925240 - protein, 172 aa, Homo sapiens
MVTLKVLLTLGQDTDGHRSGCLLCAPHAGVVTQGGEYVLCTVLIQGWGTCRGGAGWLCAHQISVYNGVWPAVAWSGLYYHTPEGQEKKNPLTQTRASKAMWGVAVVLGDHMLQYGKGVCGLVRGHRGHHAGEASRPRGAQVKLALCDGQDHPAEFRSDSSPRSKVSYGTGAS

SEQ ID NO: 925241 - protein, 410 aa, Homo sapiens
MNTKGIIIEWNRMESSNGIKRNHHRMESNGIIIEWNRKESSSNEFEYSNGIIIEWNRMESSNGLEWNHHQMELNGIMECTRMESSSNGIEWNHRMDSNGIIEWIHQMDSNGIIIEWYRMESSNGIKWNHHGMKSNEIIEWSRMENHHQVESNSIIEWTRKESLNGLKWNHHRMEPNGIIKWTRMEPSSNGIKGYHRMDLNGIIEWPRIESSLNGIEWNHLMDAKGIIEWTQKESSPSGIEKETNGIIKWTRMESLSNGIEWSPRMQSNGIINEWKRVIEGNHQMDLNGIIKWPRMQSLSNEIEWNHRTDSNRIIQWTQKESSNGLERNHHHIELNGTIKWTQMESSSKSNGIILEWNQMETSNGLEWNHHRMKSNGIIEFNRMESFNGLEWNHHRMECNGIIEERIPVIQ

SEQ ID NO: 925242 - protein, 169 aa, Homo sapiens
MESLNGTERNHRLNSNGIIIKWNRMESSKGVEWNNRTDSNGNSIEWNRTESFNMESNGIITEQNRMESSNGLQWNNRMDSNGIIEWNRTESSNALEWNHHQMESDGINEGTQMESSNGLEWDHQGMESNGIIEWNRMESLSNEIEYKHRMESNGIIEWNQTESSLNGIE

SEQ ID NO: 925243 - protein, 702 aa, Homo sapiens
MESNGIISKWNRKETLGNKIEWNHQMEWNGIIKERNQRESSNEIEWNHLTESNGIIIKWTRMELSSNGREWNHRMDMNGIIIKWNRMESKKGLEKDHRMDTNGIIIEWNRMESLNGFDWNHHRMESNMIIIKRNPIIIEWTRMESPSNGIIIEWNQMESSLNGIKWNHRIESNGIIIKRNRMEPSNEIEWNHHRMEANGVIIEWNLLESSVKRIEWNHRMVSNGIINNGIIIIWNLQMDPNGIIEWTRVESSSYGVFEWARMESSSNGIEWNHQMDSNGIINRMESSNELEWNHHRMDSNGIIEWIRMESSLNGIQWNHRMESSLSGIEWNHRMDSNGIIMELTRMELSYNGFKWNYRMDLNGIIEWTRMESSSNGLKWNDRMDSNGIINWTQMELSNGLKWKYRMDSNGIIIKWNQMESLKGIKQNHRMESIRINHRMKLNGIIIEWNLMESSPNGIEWNDQQMESHGIIEWKLMESSSHGTEWSHHGMESNGIIIQWNRMGIIEWELTESSNGIEWNHHMDSNGVIINCIQTESSSTGIEWNHHMYSNGVIINCIKTESGIIIEFNLAESLNGLVWNHHRMDSYGIIVWHRMESSSSGMECNCQMDTNGIIIKWNRMELKRMESSLNGMEWSHQTESDGIIIEWNRREASNEIKWNHQRMDLNGIIIEWTRMESSMESSNELEWKHDQMDSNGIIEWIRM

SEQ ID NO: 925244 - protein, 463 aa, Homo sapiens
MFNVNAMAILKEWSPHRMESNGVIIEWNQKASSSNGLERNHHQMDSKGIIEWNQMESSLNEIEWNHHQLEWNGIIIEWNRMELSSNGIKRNHHRMQLNGVIIEWNQNASSSNGLEWKHHQMDWKGVIIEWNQMESSSNGSEWNHHRMESNGIIIEWNRMESSNGIECNHHQVESNGIIIEWNRMESSSNGIEWNQMESSNIFGWNHQRMELNGIMEWIRMESSLNGNQWNHRMNTNGIIIEWNRMESLNGIGIIIEWNRMESLNGLEWNHHQMEANGIIIKLNQMESSSNGIIIKWNHQIESNGMIIEGNRRETSNGIERRESSNGFKWNYHQMESNGIIEWTQMESSSNGIEWNHQMDTNGITIEWKRKESLNGIEWNHHRIDSNGKIECTRMETSNGLERNHHGMESNGIIEWSRMESSGSGIEWNHRIASNGIIIKWKSSNEIEWNHHQMESNGVIIECN

SEQ ID NO: 925245 - protein, 170 aa, Homo sapiens
MSKDESGRWGRWQKAPSFQWRNYKLIVDPALDPALRRPSQKVYRYDGVHFSVNLDEFYIGQIPLKEVTFARLNDNVRETFLKDMCRKYGEVEEVEILLHPRTRKHLGLARVLFTSTRGAKETVKNLHLTSVMGNIIHAQLDIKGQQRMKYYELIVNGSYTPQTVPTGARP

SEQ ID NO: 925246 - protein, 252 aa, Homo sapiens
MSFQMQTQMLTRLHQLRQGKGLIAASAGPPGGAFGEAFLPFPPPQEAAYGLPYALYAQGQEGRGAYSREAYHLPMPMAAEPLPSSSVSGEEARLPPREEAELAEGKTLPTAGTVGRVLAMLVQEMKSIMQRDLNRKMVENVAFGAFDQWWESKEEKAKNAAKQQAKEEDKEKTKLKEPGLLSLVDWAKSGGTTGIEAFAFGSGLRGALRLPSFKVKRKEPSEISEASEEKRPRPSTPAEEDEDATMAWKLAH

SEQ ID NO: 925247 - protein, 198 aa, Homo sapiens
MVNFPNYHSAGLDPEQEKEAGEPGRPGTKPPKRDEERGKTQGKHRKSFALDSEGEEASQESSSEKDEEDDEEDEEDEDREEAVDTTKKETEVSDDGENDSTSDSESSSSSSSSSSSSSSSSSSSSSSSSESSSEDEEEEERPAALPSASPPPREVPVPTPAPVEVPVPERVAGSPVTPLPEQEASPARPAGRCHRAVG

SEQ ID NO: 925248 - protein, 193 aa, Homo sapiens
MKEAEHRYRVNNLSQRDLAISINFWVPVLLNGVAVWDVVMEAPSQDCSIADCLQFRCDVPSFSVQEELDFTLKGNLSFGWVRETLQKKVLVVSVAEITFDTSVYSQLPGQEAFMRAQMEMVLEEDEVYNAIPIIMGSSVGALLLLALITATLYKASLGFFKRHYKEMLEDKPEDTATFSGDDFSCVAPNVPLS

SEQ ID NO: 925249 - protein, 374 aa, Homo sapiens
MFKTAPEAWGRVLLPDCELVATGSLSAAEAPQLRQVRQSLPYSYSLSGHLRSPAHEKPPLCPDCGKRFSQSSYLLQHRQIHPGPSALQVQGLREGTGGSTATGERPCRCPQCGKTCCGRSNLIKHQRVHSGEAIRLRECGKGLAASSAAGSPRSTHWPKPCVCPQYQQVFGDRWKLIGHQRIHTGECVPSAAAAAVTVSMRRPPSPSASFRTQGRRPAGVGAWRASASHPAQSPRTAPLGSGPVGAPGPSFNICPHPHSCPDLPSFILAPHSVSSLWFHPAFPQCLQCLWEAWKLPSPEGLAAQSGRTARRGQGQASATVPSSSTALEPTLERSPTSVSGVEGLQPEVQPGPTLKNQRAAALGGIVAAAGGLWI

SEQ ID NO: 925250 - protein, 147 aa, Homo sapiens
MRVTRDLRTYVTWSEQASPPPGYVLRVQRVFSRVGGGRAPTALSPVDSGHTAYTAMPLRRATHPPGCPERHSIHCAAGVTAPQFSRCAQFSLCADAAPSTRLGCAASGTVVCRILDPRRLFTDYPWAVEAARAVASLRVRRSALALE

SEQ ID NO: 925251 - protein, 314 aa, Homo sapiens
MVLDSAGSGPHLHPLTLPSRTRAPGKGAPGSPTPLTCQLLCDGQGLSPTLAVHAAFVQDPIHAQDVHLGLLDGPGPGLGSPRPDLPPNFVLLTILLDTEVLELQPLLFPAAGQWVSSDLETLYPRAQDGPQGPGQHRGKTSISFSLSLGLEDVSLQEQGSQAPEWPPCGAASLRGAHPAHLICCRCKYSQLLALAGRSRDSRWALRMVISCLLEDKGTAGAVGGVLGQQRARLPPLQEAFPAGGRRCRLRSPPSNARSVHSIEVEGAPPKGISGPLIITGRGTLGGGTHGPVIISTGRSQEMHFTRLNSFLKGT

SEQ ID NO: 925252 - protein, 134 aa, Homo sapiens
MNRWGFPAQQLGPAKVTQIIQAELKLEDGPEGFPGLHQPGLPRRCPTRGTSFSNASREGDTGLREPRHTHAHSHRWPWQSSCRAGLAQRPPHPGGSGPLLQWPPPPRCLPAAAPLHNYVWYFPVCPALGGCLEL

SEQ ID NO: 925253 - protein, 147 aa, Homo sapiens
MVRKCKLVFLDKQLRIFDPRTKPRASQGPGAFLLAAPAPREGQERHYLALSGRCPESTQAHENSRDSRLAWMGTWEHLVSTGFNQMREREVKLWDTRFFSSALASLTLDTSLGKKGPHPGPLPPPTARHDPRPASSLLVPEPSAAAN

SEQ ID NO: 925254 - protein, 138 aa, Homo sapiens
MQTANKRMYEKMLIAPVTGKMQIKTTRCHVVPIKMAAIKKPQKTASVDESVEKLEPLCTVGGNVKWRSYYGKRPLSQPALHCLAACHIQFRARAFILPWSCVSPNARFWDTGPGLDRLRFPQSRARCLEHSSVSVHGG

SEQ ID NO: 925255 - protein, 141 aa, Homo sapiens
MGSSITIACGSQPTAFQLAVRGSGKGTRPRGFKEEEVREIPDKRSNQRAPKEMSTTGEEGLSSSRESGYWTLMAPGKPTAHTAPSWGQSPFSSSSQTEMDKGGLHSRLTDDEKKEWVSLLPGALNLIRSLIHSSYVEFRGY

SEQ ID NO: 925256 - protein, 143 aa, Homo sapiens
MIGPCDFWLGRLEAATAQHQPIVSMCKIWVQSYQAVQFLRDSGHLEYFMRNPLSCEYKQTVVHPNNGIQLANNEKQTINMHDICNNNRDESHMHSANSGCETVYICDNLQNCPLKRIHFTACTLCIIKPDIKNAKAEKKTGAY

SEQ ID NO: 925257 - protein, 540 aa, Homo sapiens
MGIWCILAPVARLGPALRRGAAHIFTSGSPLSGTMATDSWALAVDEQEAAVKSVSSSAPGEEDMTNLQIKEEKVKADTNGIIKTSTTAEKTDEEEKEDRAAQSLLNKLIRSNLVDNTNQVEVLQRDPNSPLYSVKSFEELRLKPQLLQGVYAMGFNRPSKIQENALPMMLAEPPQNLIAQSQSGTGKTAAFVLAMLSRVEPSDRYPQCLCLSPTYELALQTGKVIEQMGKFYPELKLAYAVRGNKCEAGFAFEIPMKITWVSTVERGQKISEQIVIGTPGTVLDWCSKLKFIDPKKIKVFVLDEADVMIATQGHQDQSIRIQRMLPRNCQMLLFSATFEDSVWKFAQKVVPDPNVIKLKREEETLDTIKQYYVLCSSRDEKFQALCNLYGAITIAQAMIFCHTRKTASWLAAELSKEGHQVALLSGEMMVEQRAAVIERFREGKEKVLVTTNVCARGIDVEQVSVVINFDLPVDKDGNPDNETYLHRIGRTGRFGKRGLAVNMVDSKHSMNILNRIQEHFNKKIERLDTDDLDEIEKIAN

SEQ ID NO: 925258 - protein, 195 aa, Homo sapiens
MVELLASPAPCARTPQPLGGRWDWAPWSRERRSSGRLWRHRSPRRGWGGSGMAGCRSGALPRGEAVKAGREIERSARSAGYSECGPAKPTPTRNSYWPASTAHSPGSHPRLSLHTSLQAEGAGSGLGQPKKGLPQCSGGLKGSSSAAKAGAQAEEARRANEGCEDYQHAVTSHYHVLSTVLRPEDTMVNKPNILL

SEQ ID NO: 925259 - protein, 129 aa, Homo sapiens
MGTFPKSKFAGDSQGPALQIGFPKESGQACCVLFCPMTNLQIKEEKVKADTNGIIKTSTTAEKTDEEEKEDRAAQSLLNKLIRSNLVDNTNQVEVLQRDPNSPLYSVKSFEELRLRLMWKVTKLAPRYV

SEQ ID NO: 925260 - protein, 388 aa, Homo sapiens
MGFNRPSKIQENALPMMLAEPPQNLIAQSQSGTGKTAAFVLAMLSRVEPSDRYPQCLCLSPTYELALQTGKVIEQMGKFYPELKLAYAVRGNKCEAGFAFEIPMKITWVSTVERGQKISEQIVIGTPGTVLDWCSKLKFIDPKKIKVFVLDEADVMIATQGHQDQSIRIQRMLPRNCQMLLFSATFEDSVWKFAQKVVPDPNVIKLKREEETLDTIKQYYVLCSSRDEKFQALCNLYGAITIAQAMIFCHTRKTASWLAAELSKEGHQVALLSGEMMVEQRAAVIERFREGKEKVLVTTNVCARGIDVEQVSVVINFDLPVDKDGNPDNETYLHRIGRTGRFGKRGLAVNMVDSKHSMNILNRIQEHFNKKIERLDTDDLDEIEKIAN

SEQ ID NO: 925261 - protein, 327 aa, Homo sapiens
MLGGRGLGKEWGVGAPRDSEGGGGRRGLAVHCPFQPEPQVQQQLGSLLGVPWQPPGPPIQHSPADQETSTVTQQQWHLQGLDEVVVRQKRAPQGSWKVGTLFHGKRVYAVAISGSTHHVYTCGSGYIRVWDESALHAGEKAPRAQLDLQDRVVTCKLFPDERSLITGGASQAVTLWDLAPTPQVRAQLTSTGPTCYSLAVSSDAHICLACFHGFVEIWDLQNQILIRKHEVPVYGSRCVDITGNIFWTGGEDTILYSWDLRSYQRLHQHNLQNEILSITHDPGEEWVLAGLRTSDIVFLHTRRNEQFKALMKKYTRHHSLKFASCGE

SEQ ID NO: 925262 - protein, 158 aa, Homo sapiens
MTSDQLRKSCLPLSHFTPAHLLSTAQEPLNPLNTSGPSAAGLLEFAGGPPQTLFAWVLAAEAAEQRILLNSTCCCLIVPLEALSQRGTQPSVVGSTQFKLPGCLVYLLKPQQWWVPLPQPCCRLAVSSQTAVLAMSEAPWAWGPLSQARDIISWCAIC

SEQ ID NO: 925263 - protein, 181 aa, Homo sapiens
MACSFLLFFAYRFIWRLVLQTCLFFLASAAASQPSSSIWLHSRMSGGCGSLTSVARWKPVCFLQCGRWSRVFRKDGGDTEQTLQWSADDTTEKSDEENIIRYFCPRLAESETLGVDAGIWVVTVLWVILTNVQGKQPGAMHGSQIAERRSCALGISELTSRTFSLSLTFVQGLSPCSDPAS

SEQ ID NO: 925264 - protein, 251 aa, Homo sapiens
MDYCIDELICFHGFPTLIQGQKWFYFMAASLSVIITITTIITITIVIITIVITTVTIINIITITIVITIFITIIITTVVITIITITIVITIFITIIITIIIITITIVITVFITIITITIVITIFITIIITTTVITIIIITIIIITITIVIMIFITIITITIVITIFITIITITRVITIFITIITTTIVITIFITIIIITIINIITIFIITTTMFITIITTTITTVIIAIFTIFIITGTTTIMIIIIIDIII

SEQ ID NO: 925265 - protein, 156 aa, Homo sapiens
MVYVPFVLATVMMMMMPSLRLHCEHRSQLSVADAGSTHCIRGWMKVGPWKRSTQELSSPVGARLEGSRSVEGAWNLAAWGFLIKPITVRKGNCLISAACVSVCLPETEQINALPEVLRILTRGPLVLGWPDPAGINSRVARVSGTNSGGSGVAFYI

SEQ ID NO: 925266 - protein, 157 aa, Homo sapiens
MWCSLLVLFGPGVLWNLKIKLAWKLLYPKILVHSLHWITYWGKQSTQAILHIYWKPVTKTRLHSKGVESWSSSFLVVCIYLGEFDLEVSSRCVLAPPWNLGCPRSMGPGMGPLYMQRLYVLKEKCRNGNLSFRNAARKGRVANIFGFAGHIISVAVT

SEQ ID NO: 925267 - protein, 134 aa, Homo sapiens
MIDTQDHPLIIYTSGSKMVPKAGLQCGHRVLGAFLSSQVQGWCLMLISGRYKTAYDTRFFPKHWCHKWGHTSNPLIFYFRDPKSHTTLTLSAPAVFICQTLFWAPGISIEHNGQSLFSLGADFLTRKTRQTLNR

SEQ ID NO: 925268 - protein, 153 aa, Homo sapiens
MLDPSFSLWCHHPPITTPIFLLKHSSPLSYAPPCEDFLELHETTNRNWATALPSQPAYSQTKSWLRGGPIAQRKPHTATWHATPIPTLRASPVVGPLSKRAHYTACQPTTPADTWPDNHLYALGPRNIMLPLSQTPIAKAPDTIADIADKDYS

SEQ ID NO: 925269 - protein, 152 aa, Homo sapiens
MRKIFSTAAGTDCDYGEDIMSEGYPCQLPGTCNCDSIWKQGIRSVPRSSVNFRRLGSNTVSKCISAVLRHSVCRYYSSHKKLAQGPLLWAPCEIYFAANGGSWQEGRLNFGYCGSAERATLPTVTPSVPTFEEMVVQLCRVNAPDSNSLSIP

SEQ ID NO: 925270 - protein, 210 aa, Homo sapiens
MELGGTTREVMRKKVLPVTVAEEVRISLTPLPPLQTPTAKRGPTQDMGSKRDFSACCGLQILQIAGGGPHQGVSDENVQLDVASLVPLNALRDRGVERCSLCLKVFLYSKHQAEKRKTQTTSRLSNFDITHQCQRSLHWDRSAGATSCALRKDGHGGDGDDDIDDEKDKASLSGGQKSKIEVSAGLRFLSRLQGRILLCLFPCLVAAGNP

SEQ ID NO: 925271 - protein, 152 aa, Homo sapiens
MPKMKKPFLSEYPLGSKRIPSNSQGEFGVSQIVDLESTALESLRLVLHEKAPSVKNADSQSLPPKWPQPDFLWIGSGNSNFTCFLRDVMLIHNDNRGPWGRNTKCPITNARDPLQITEALLVEAPLVEAPAFRKWGRRLLVCFKLSSLSYRA

SEQ ID NO: 925272 - protein, 186 aa, Homo sapiens
MLFSEMPAWLIPSSPPHLYSHITLLRPSLTTFLEHCNLLHTLSMGMMPIKPSAQCLAQRKRWLNGAICNDNNSDEEEGPTLLGSEEGAVGHNSHFPGRGNCLHSLETLSPVFLECRAGRQEALDEGGGRSHLGGPFMNCSICPVVNENPGRDFNLGERRSSLHLRMVTMTRCVMREPVRSWLQESG

SEQ ID NO: 925273 - protein, 148 aa, Homo sapiens
MGFVQSFSMVYDYYHHHHQGYHHYDHHHHSTTIITSTTIIITTANAITITTSVLPPPSPLPSHNYQHHHHHHHYHQPYNHHHHHHYHQRYHHYHHHHCPATTTIIITTTNTNTKTIITTRATIIIAVTNTILLYIQYAKLSPSKIQQY

SEQ ID NO: 925274 - protein, 154 aa, Homo sapiens
MAPSFIFKASSRASSSLPLNRILLSPSCKDPCDYIEYTEFLELECGHPWSIIMSTPKYLLWSKTCLFIITISFYCLLKAPIEDFPKKQWAKLPDSLFISMAMVQGCQTPTMTFQGLIDSDSSHLHLDSGGPFVGLKKFSATNRGMGLHQYLWIK

SEQ ID NO: 925275 - protein, 143 aa, Homo sapiens
MGPLPRVLSSSKLCACMVVSVAGRGGGIEEDSPPCVQVNATRWPQGDSSLCPWEENYYHSKGVILNSLDNSNTRIKIEAPEGFSENKMKPESPRGNPGFAGEAKHSAIWWTPRSRAGSIIAGESLGRGLLTWPRGGQKARRTT

SEQ ID NO: 925276 - protein, 179 aa, Homo sapiens
MSADARRYPVRIRCPMPGPVRSPFRRPRTARSVAARRFRDPTETVPSQSWSSASAPVSGPLRRRPALSRHLDAIPARPDPFRRGRHGAGYPPRPRPSRPPGRCSRSVPPSPRAARPPADRPVPSARARTHLPARHPSLGRAAFGAAPPPTAGGWSHQHPILWLAPAPRSEQELPTEPLR

SEQ ID NO: 925277 - protein, 210 aa, Homo sapiens
MEEVWKIVRKLLIEGLRLDPDSAAGFRRKLFKRVKCISCDRPVEMMTGPQLITIRKAHLLSRLRPASANSCEYLQRQQMREQQWLQLQDLGIQEDCQQDWGDGPQNATSLKCKSCNLLTLYPYGDPHVIDYDSAEVDILGVDGILYKGRVNSQRGAQPLAVAKELADQQLTRERAVATGPWPVTKDDELGKVLGWCQGTPVHGGRTGQLP

SEQ ID NO: 925278 - protein, 153 aa, Homo sapiens
MPGGGRASAPPRVPAPAPPGPRSSACLAVRAWGRALTGLRRVAIGRVRLDVDVLHPRDAAAENGAHGARRCRAEGQGRNGSGDSGGVLTRTWPGPGRTDARPRPRRRLEPPPPARPGARRHGGPPPPGPGARREMESSRRRRRREAAREAPLH

SEQ ID NO: 925279 - protein, 172 aa, Homo sapiens
MALQPSGTAPVQPGPTLAVQTFLYPNKTIKPSSMKKSLHDCVGSEQPETTTHITGVLAPGEAFGTQEWLFKYIKDESKAEHPGAAVSHQVSCLPVTLPDHSEGQGKRAKPSHVWSVPRVHPWGITCEARWMDRQANQNHLSGKMMLDPNRYISVYKNACLTTKEILPTSTQI

SEQ ID NO: 925280 - protein, 218 aa, Homo sapiens
MDLHRAAFKMENSSYLPNPLASPALMVLASTAEASRDASIPCQQPRPFGVPVSVDKDVHIPFTNGSYTFASMYHRQGGVPGTFANRDFPPSLLHLHPQFAPPNLDCTPISMLNHSGVGAFRPFASTEDRESYQSAFTPAKRLKNCHDTESPHLRFSDADGKEYDFGTQLPSSSPGSLKVDDTGKKIFAVSGLISDREASSSPEDRNDRLKRGATDVLK

SEQ ID NO: 925281 - protein, 146 aa, Homo sapiens
MCFLGAEFALDLSLVILLWGNLPLPSGLLFVMTAPRVGWSGVGQLGTGSRSRTLAFGRLLTHKPLSRQPSDDENSDNSNECVVCLSDLRDTLILPCRHLCLCTSCADTLRYQANNCPICRLREFPGRLFCGRFWKLGTGHTTVVLG

SEQ ID NO: 925282 - protein, 125 aa, Homo sapiens
MYSFSHSTDGYQGQPFSKNTGIIVNKSLCGPHLDLPMGVKLLPEYTHLDARLSFLGEWWVPLINMFILAVGREDSLSPWSSASASLTWWPSPHALSARTFGLLIATHQDPLGRAEWKENPCVRDR

SEQ ID NO: 925283 - protein, 160 aa, Homo sapiens
MKVERKTNKNHKYALALAFSMDEINRNPDLLPNMSLIIKYNLGHCDGKTMTNTADFLDRKKYKRIPNYFCNEETKCSFLLTGPDMTTSLYFQMFLDIFLSPHFLQLTYGPYSSIINDIEQYPYVYQMAPKDTSLALAMVYFILYFHWNWVGLIISDDDEV

SEQ ID NO: 925284 - protein, 300 aa, Homo sapiens
MDQCVNCPEYQYANTEQNKCIQKGVTFLSYEEPLGMALALMAFCFSAFTALVLCVFVKHHDTPIVKANNRSLSYLLLMSLMFCFLCSFFFIGLPNRVICVLQQITFGIVFTVAVSTVLAKTVIVVLAFKVTDPGRRLRYFLVSGTPNYIIPICSLLQCVLCAIWLAVSPPFVDIDEHTLHGHIIIVCNKGSDTAFYCILGYLACLALGSFSVAFLAKNLPDTFNEAKFLTFSMLVFCSVWVTFLPVYHSTKGKHMVAVEIFSILASSAGMLGCIFVPKIYIILMRPERNSTQKIREKSYF

SEQ ID NO: 925285 - protein, 214 aa, Homo sapiens
MNPKMILLLMFETGITSFFLASRARARIFGIFVTQVLLVTCLMFECNRNLALQSLSAEGARPSTLQQHMLCCAQTPLLSMDNVMILQTSYGLLRHQVTYTIGDTPMNTESREAIQSEKKNCIRSNSGKTFTSTSHLNQHRMIHTGEKPFKCREFGKSFSQKVFLVKHFRIHIGEKPFSFSECCRTFKHNCLFVAHQRVHTGETPLYALNVASHT

SEQ ID NO: 925286 - protein, 146 aa, Homo sapiens
MLRHKSRALRGKFTLLVEPSMIYPGYARNWDVKRLQQIEAELLDFGQKCSPTLGSKELEPDAQGSIRASKVSPEHQPLQPPTGCLRRIQGWAWTGAGQLQKVGLSGSIYGAHSLCLWPILLSILILISTLEEQIISVSGCAPTTER

SEQ ID NO: 925287 - protein, 147 aa, Homo sapiens
MRVYYVPSNVLSMTLAGVGIQNLGVAPDSSHSPAASWPSLLRKCLWILSPCSLTLVQALSALSLTLCFCSQALAGIHLSSLMWRLYPDLHSLPLLALPGSLHMGSGHHPLCLPDPSALLRSQDVDIWPKLCQSDALLVYSEEQVARG

SEQ ID NO: 925288 - protein, 137 aa, Homo sapiens
MIYNSFVFIGSAQKLELRIRLFCRNVLLDHWTHRSDSAFWLTRILKPWPMVNQARLLYIIFGPISPQDGQVVWQEMIEEPTDEFSLKGLADAIKLLYDASTKEWTADDVISLVDELSECGKCICMCYNGNAAINYVW

SEQ ID NO: 925289 - protein, 154 aa, Homo sapiens
MQAFFALQGNLDLGQHCSIDSTLLVATLGEAGRVNPRELGKQTSEDLGQIKRDLDKYSEGPDRYIETFQVFELFWKDVILLLNQTLTTVEKQATLQAAGNLGDELSISYWAREGNESYLIGRIAISLEDSKWDPNDEIGEWKRKHFQMWILESL

SEQ ID NO: 925290 - protein, 163 aa, Homo sapiens
MGCQQGQFAPAGKVWAVASLSDLLIFYFALLLKDKGWLESENVGKHKLEKTCAPVAEKKVNAKAVMQELAWQALNFLGSSGLRAISRSCFPTSEFEGFSTKKFVTGQSRNIVVLGPGGNQEQQKVGRASVRTLRYSGSCLWESEVPLKRLSNTYISKVKLEVN

SEQ ID NO: 925291 - protein, 221 aa, Homo sapiens
MSCPLVEEQPGAWSFGSTSGAQSKRLEQHPLRGPGQQYGHHTHLLRAPGSCTSGRGSAWGHPGPHPQVPPHIRVTTKPDTPDGQSWNLQFTPGGAPTRQGHEPGKVEPQASPEHQGHGGELMAMSPLPQTPAQGQQGPGFPTPGCEEAQLKLHAPWSQREPGTNRSPTPSKLLQLPCRGSTLERVCTLSLQGPGKVPPVPTGSTALIHRRHGPVEEVSNLH

SEQ ID NO: 925292 - protein, 116 aa, Homo sapiens
MEYSSATANDSMSSFRSENEKPVDLKEGEENIVLKSLLEAKCGQLPRKHFQVALEVGQRTQGTSSDNEKVYIKVHCYANAAQNSFQISNMNLTWKNKIDYVNENVLEHHMVVPLPI

SEQ ID NO: 925293 - protein, 168 aa, Homo sapiens
MVIKKKKLITIIIIITANIVIITIIITTIITTITIITVTITITITIIITITIITIITITIITTITVTITITITIITTITVTITITITIITTITIITTMITTINIITVTITITITIITTITITIIITITIITVTITITSPSSPTSPSPSSPSPSSTSSPSSLPSSPSSS

SEQ ID NO: 925294 - protein, 135 aa, Homo sapiens
MAIYTGHCKCRETYSLPGEQYGRNHPHDSVISHQVPSTTRGNYGSTIQDLGADTAKPYQLPTHCHCYQGYQEAMNSATINSPGPPLALAVLFFVTLMQGSQDGAKVIEGFAIIFKGKNRNCFCTNLIPYFADEKT

SEQ ID NO: 925295 - protein, 170 aa, Homo sapiens
MCKRGVSLLLQERGRFAVSNNGWPMADGFQALGALTSAPSNNGTWGEPFFRAYALGEYALVPSSTGSGKGETVLKKCMVEMWTAGDLSLALSLHWGASPDSQPVPSEPAASHPYLSMHQVFPVTYLLNSSVLSQMLYFKCGNLLAILALLHGGGEYQTFLAGHLEASSPR

SEQ ID NO: 925296 - protein, 124 aa, Homo sapiens
MVGIIPELGPKGWEGLLKCRNGKNHIKEMEMLKISSEMEQCPACLNMSVNEMQLKGIKPNADKVKFCELFKVEMEFSDFVCAQHHNFQLLYQQKDMRITDLLSFVKMASANPGLGSWRSSEPLT

SEQ ID NO: 925297 - protein, 140 aa, Homo sapiens
MGCKLLVDLPFLGLENHGPLLTAPLGSAPVGTLCGGFSPIFPFHTALLEVLYESFAPAANFFLNIQNNSVAASFQYGFDYSRPFQKTHACSDFSFSWCSNLKCVNYDAEVQGESLGQRVNLDEHLDSNSTSIFAVAAFNH

SEQ ID NO: 925298 - protein, 199 aa, Homo sapiens
MADTPPPARLLPRRSISDCCASSEQGSMGGGPAKPGVGYNLLVCRLLRPLEKYNIWAEVSHFSRYNLSQLPLARKGKSPDPLRFPDEAMPYPASAHPPWAAPTVQPVPVRRTRYLSWKCRNHSSSASVTLGAADRSCSHLANLERNPCISYKILGYQSMGPSVMMMDLWVKRYLGRRYASLDIGTSSFSVHSSTVVHDM

SEQ ID NO: 925299 - protein, 185 aa, Homo sapiens [sequence omitted]

SEQ ID NO: 925300 - protein, 172 aa, Homo sapiens
MHLLDFFRDLVDMDGSGSHYPQQTNTGTENQTPHVLTSPHGWKPATLEGSRSSWTTGHHSEQWLQPKSFVGLWQQNLCSFAHASSSDSTAGCKFISWEGALAGPGLLASMIYPVWESEAGLQARMTRIRPWERPADRRALRSDWPHLIGKITLLSSGLTVPQFTSDSSSVHV

SEQ ID NO: 925301 - protein, 168 aa, Homo sapiens
MDPLVLVLRAPGSPPEEAFTSSQPVPRAALTPPVAQLSLGQEAVDLWLPSLTSRGGQRPCRDHQLPELPWGRAALGKGLVLATHNNSALNDKGHLLVHHLALRLPELTRYHPLKDELSRLHRLPRPKSDRNGQDQDWAPRLTNITVSLITRRKRPFEDVLSHGLRNIC

SEQ ID NO: 925302 - protein, 149 aa, Homo sapiens
MPTTLVLYVLLTESITFAFIKIRVWFLAIKRVLINMEADLVTKGACCCVDITLTHRGSVSFIDELHHEKRAEDQVVKGQEYLPWRIGAGYLQAEEQGSQSKSQNLKNREADRAAFSLWLKALEPLANHWCKSKSPKAEELGVQSTLAAD

SEQ ID NO: 925303 - protein, 256 aa, Homo sapiens
MGSSFKVARELQGCPQAHLDVRHEGSKQLSSIPWEGRGAVNSDSWVLYWGQSLQTPSNGDAPFPGITGKSGGTYLVSEIPSPKRRGGRRRKKEGGGGEEEEEEEEEEEEEEQDEEEEGGKEGKDEEEEEEELEEEEKMIIMIMTDDEEKEEEEEDEEEGEERKRRKKKTMPVLAAPPGCSRAFALAVPSAWGAVTPDIHEFPPLMTDAIKAQADGALRQWILAAVTLKRAVPAWADWQEKPQVNKGWEISMFERSH

SEQ ID NO: 925304 - protein, 195 aa, Homo sapiens
MDTLVSVVYQYFTNALVSAVYHCFTDALVSMIHHCFTDALVSAVYHCFMDAWVSVVHHCFTEALINVVHHCFIHSLILPVLVSPLAAGIQLLLHAWGLLSLCPGPEAPKGRELAPCLSLFSPCNAWYIEHPGSSSQGSLSGPCSAQRGAGASSQSLSFLRVPCLSWLVVTCGAAGRSLKNEVLGKVPSIRPADSK

SEQ ID NO: 925305 - protein, 132 aa, Homo sapiens
MLGGKFYYPILQMKRLGLREVKELVQGNTAEPGNVICMHIPEKRSYPYYSTNLPNVKKMANNSMGNKFDCDYDGVMLQLCKFGFWWFVWKMVPGNASKGIGACGAHFERVAFVPAYSGRPQDNGGQAYRGGQ

SEQ ID NO: 925306 - protein, 133 aa, Homo sapiens
MIVETAVVGFSISTATLACVSREQKLDLFICVLSEPDIMSGTAQMSLIVRKPPLARLVQDASDGASGQFWCGLSGEELDWMLGRANFSLDSEDLPLPKAPEESGISVSHSRFQRDTGEEDCCEMYGPWTEFVL

SEQ ID NO: 925307 - protein, 176 aa, Homo sapiens
MEWRLLHRFFLPAALLKPKFNGVEKIKTIGSTYMAAAGFSVASGHENQELERQHAHIGVMVEFSIALMSKLDGINRHSFNSFRLRVGINHGPVIAGVIGARKPQYDIWGNTVNVASRMESTGELGKIQVTEETCTILQGLGYSCECRGLINVKGKGELRTYFVCTDTAKFQGLGLN

SEQ ID NO: 925308 - protein, 153 aa, Homo sapiens
MRVSIMLAMGLSDPHVLLHIVIDGPEEGCSWCKLTGVQKGDLGGEKQHPTDPRYGSGISHLHLRGSFLDTWGSGGDTEALTTDIANHSPIPKHPVLTWKPLEARLFCKKAGAAQIQVGVITGKAELWPARSEVSAAWAVSSEPVLFVSTKLNH

SEQ ID NO: 925309 - protein, 133 aa, Homo sapiens
MTQHCGWAPLFGSQPMHREWKGPGPLIAFHAENVEAVKQDSEQDLSEATVTGRKHQGARVIPWRAAVQERHLRASVCDGTQCQQQSPDANPEHWTSSVFHFFHVSKFLAASHLMIFPLDLWISLDCIICPLST

SEQ ID NO: 925310 - protein, 160 aa, Homo sapiens
MALDIDQREWLVFPKSVRMGPISRISGAVTQLFLCGYHLPDMAPMGYEEWPGGNQGDITQEVAFALDPEEVKCKDFREDLRICTFSRHAESCGAGGSTVIIEIGSEGQLLFPKQEWACCSWRVCPAPWAAGLPHKAVDWPHFNDMDCLVHECTSDFQVCY

SEQ ID NO: 925311 - protein, 1061 aa, Homo sapiens
MAPEIQPPSHHFSPEQRALLYEDALYTVLHRLGHPEPNHVTEASELLRYLQEAFHVEPEEHQQTLQRVRELEKPIFCLKATVKQAKGILGKDVSGFSDPYCLLGIEQGVGVPGGSPGSRHRQKAVVRHTIPEEETHRTQVITQTLNPVWDETFILEFEDITNASFHLDMWDLDTVESVRQKLGELTDLHGLRRIFKEARKDKGQDDFLGNVVLRLQDLRCREDQWYPLEPRTETYPDRGQCHLQFQLIHKRVEASLQRATSASRSQPSYTVHLHLLQQLVSHEVTQHEAGSTSWDGSLSPQAATVLFLHATQKDLSDFHQSMAQWLAYSRLYQSLEFPSSCLLHPITSIEYQWIQGRLKAEQQEELAASFSSLLTYGLSLIRRFRSVFPLSVSDSPARLQSLLRVLVQMCKMKAFGELCPNTAPLPQLVTEALQTGTTEWFHLKQQHHQPMVQGIPEAGKALLGLVQDVIGDLHQCQRTWDKIFHNTLKIHLFSMAFRELQWLVAKRVQDHTTVVGDVVSPEMGESLFQLYISLKELCQLRMSSSERDGVLALDNFHRWFQPAIPSWLQKTYNEALARVQRAVQMDELVPLGELTKHSTSAVDLSTCFAQISHTARQLDWPDPEEAFMITVKFVEDTCRLALVYCSLIKARARELSSGQKDQGQAANMLCVVVNDMEQLRLVIGKLPAQLAWEALEQRVGAVLEQGQLQNTLHAQLQSALAGLGHEIRTGVRTLAEQLEVGIAKHIQKLVGVRESVLPEDAILPLMKFLEVELCYMNTNLVQENFSSLLTLLWTHTLTVLVEAAASQRSSSLASNRLKIALQNLEICFHAEGCGLPPKALHTATFQALQRDLELQAASSRELIRKYFCSRIQQQAETTSEELGAVTVKASYRASEQKLRVELLSASSLLPLDSNGSSDPFVQLTLEPRHEFPELAARETQKHKKDLHPLFDETFEFLVPAEPCRKAGACLLLTVLDYDTLGADDLEGEAFLPLREVPGLSGSEEPGEVPQTRLPLTYPAPNGDPILQLLEGRKGDREAQVFVRLRRHRAKQASQHALRPAP

SEQ ID NO: 925312 - protein, 161 aa, Homo sapiens
MICFDRNLFSSIILASCTDRGDGGRLAEGSWCGTDCRGRSAGEDPRQAEGCKDIPYCAPFRHFEAWPHDYWAITPTEKVCGFTPEVSKTTNPAAGSNSGHIQTSGRTNSGHTIFKNCDTHGEAVCRALHKHTCGCVAVGQCYSAAHAVSHDSEHHDLSLEL

SEQ ID NO: 925313 - protein, 162 aa, Homo sapiens
MPGASPQVFSRAPLEKEEKDYAPPRPTSVRFYNCKPVLQSPLKRFLVEDVLRKDHPAPSLKSSGWLWRVPSEEPCAGTTVMPPASQKSPTSAYRLVSRTSLLHHQIAGKRPQQGLLCLGFQTKYAWCCPQDAHSMGIKTQNAIGATLQNRWTGIEATATIIG

SEQ ID NO: 925314 - protein, 166 aa, Homo sapiens
MFRKVTKNTGLENTEQITPGGITVQLVSCKPLTSDGLLSFSPHFCIQETAWTIIQHNGSDLTRVRNTNPENPYAGFFEYVASMEQLQATINRAEHCEQEFTYYCKKSRLVNKQDGTPLSWWVGRTNETQTYWGGSSPDLQKCTCGLEGNCIDSQYYCNCDADRNEW

SEQ ID NO: 925315 - protein, 140 aa, Homo sapiens
MNAGESYSAIVLCPFLNDWQLNKARNGRINVVDIGSTEHLPDFSRKGDLLTYEDERNGQEGGTYRGRLVSAQNRYRCGSLTGHISCNVMDNQIKAFNNEFIHLPWVPAVYYYVTGRVMCIQNTMVKIPRTGEKKLLLPPT

SEQ ID NO: 925316 - protein, 151 aa, Homo sapiens
MTLDFHQQASAGPSASGALELPALGVDVGFGVAVRGSRGLAKMPVHLSALERTGEQDGAAALAGVHGQLVENFTLLDHLGKGQRWPVGTTHKQPLQHNLVECGVGSSGQKTAQLDQQPQVDILALGLLAPNLSVLVVADVSSHDGVSCSAR

SEQ ID NO: 925317 - protein, 147 aa, Homo sapiens
MIKQFEKEKVNGTYSTVFLTGEIALPQFAMLLQSVISVEFSSYPTEPIPLMLQLLLGSANADRKRGDTTPFLDFLVRSTWDIARNDGGWSNCEIAGRAVFWVSAQAAQLQLWIPRSTVLCAPDNLCPPMNHDWFLEKWLKILRFKYG

SEQ ID NO: 925318 - protein, 350 aa, Homo sapiens
MINVSQSLLFRDPQANGEDKKGAGVLTGNVLRGCALTAHPGLKLSFATSWSCRKTAQCGILGDPSQPAFPGMNFPLQFSLGQSYLNVKDVLRVRAWRKDCLNKEKSRSHSVAAMWRLPCDKNPLSAPEGIPITAVLKDVPHIGLPSCHSSAWKAPILHCGLPVSHPGTQVKSKVKKNGSMKDAEKGWSGKFRKKPKKLPCPIESQKEELARSDRILVMTSDLDVFADEFSLSSFIDVEGYSTDALEALLYYDSVDQYTLGTMNCDRWPDNPMKGLIGAGGWSPLVSNKYQWLQIDLGERMEVTAVATQGGYGSSNWVTSYLLMFSDSGWNWKQYRQEDSIWIEHKIPQHL

SEQ ID NO: 925319 - protein, 146 aa, Homo sapiens
MRGLFLRGTLGLLSVTRSSVETHADSLQHVFRLRSPCKFTALCSETEGGKNHTFKLLLFAKESSQSIEKHTVELGPLSCPGLRDPSCSPSKQRLETHQTFEAPWHPILSPESKGNKGYGHEIAHDLCYKPSLQICGHIIDPVLKSG

SEQ ID NO: 925320 - protein, 134 aa, Homo sapiens
MYQEHVQRLLVIKEKSWVRRRGTGGSRVNPRVGRSSGPERPGDAERHPRNAQKPRNLATEEGQIQINGGVSLHKLPLSSAATSDMRDCETCPDTWNWLYTQRGCLSQAAKQRREQLLGGGPGPEHEGSRNSSVL

SEQ ID NO: 925321 - protein, 145 aa, Homo sapiens
MFTVGFALLRGSNAAAALTGGAAQAVTLARPPLTPAVWPGPWRGTSPLPRELGPCGGRSSPQTVPSTVVAGPHRRRSPSTVVAGPHRRRSPPQWWQVLTADGPPPQWWQVLTADGPLHSGGRSSPQTSPQQWWQVFTADGPPPQW

SEQ ID NO: 925322 - protein, 161 aa, Homo sapiens
MRTVYTGCDEYKLSGQVEMELRNLGAAHQTTGTEQQICSLGWQHVYQLRRVPVPCSTWQHQSTHGHVPTWWCQHGMPPRAHLVLLLLLLLTPGPAWLTSGHGPGTPSPQVSLDHQRARAGHTIPPTSVLPHARTSLAHQQARARHTIPPDQCAASTSRRLG

SEQ ID NO: 925323 - protein, 154 aa, Homo sapiens
MEIHGTVYYESQRPPEVPAFVKNHGLLPQPEFQQLLRKAKLFIGFGFPYEGPAPLEAIANGCIFLQSRFSPPHSSLNHEFFRGKPTSREVFSQHPYAENFIGKPHVWTVDYNNSEEFEAAIKAIMRTQARDSLEVESPVTEGGALMALLQGEVV

SEQ ID NO: 925324 - protein, 249 aa, Homo sapiens
MLLRVEDYITDYITAWPWAGHETSVSIYLPICEAEIMTASVVNSGNSMKGEFPRAQRSQPVDPQKIEVDRESKMGLSKAVYQGFQLEQQGGQYRKRPAAGSPKLKHLHGEEMAVAIRVVEREPYRPRFVCQGKEMGVFLADQRENHKGLPKDPTSGAVWKGMGQCPEGCSGGLLLDVTWDYSGFEEHPPGSQGPRAQQGTFQEPLEAKRGSCPGEQTEGVQSFLHLLLLNCPQLNSLMPKGAHFGAAHF

SEQ ID NO: 925325 - protein, 161 aa, Homo sapiens
MKGYNCIISLTGVNRFVNNASGFRQALGSPGWSRSRVPQEGSLQVSFVWVIPVSTTWSGRGTFLKGSRGEGVLDRRKLQASTTWPYLCPLVVALGGAADHRRERMNPPELGGLQETEIHISFLARCLLHHRPCQQVLALLPERMCFYLVSMSSAWTSVSKC

SEQ ID NO: 925326 - protein, 135 aa, Homo sapiens
MDSWESCASVPRAPGMCSLYAAPIKASIHQMRGDNRQPGEFMSSKDTSGPLITEAQELSYFSFCYPSFGSIDPIPLDTVGEQGITSLSWFSFHLSAYQHPSLVLVHILTLNRILDCKPIRAFTVCLNKFLKKHLL

SEQ ID NO: 925327 - protein, 181 aa, Homo sapiens
MQARYIDLACRGSPRQQIQGLLNQMNPKCMPKDSRQVYENTCSDMRGRGPQRSLEGTQVLVVTLAHSQGDGRDNGGDDSWDSNSDSQLQGFVMMPTTRTALAFLQIARAVRNLLPLEYIAGSSLHILADRALERAFGERVTIPGISPVCHYQQCENGLTPTLSGSGQEPTTPLAVVRQLCF

SEQ ID NO: 925328 - protein, 159 aa, Homo sapiens
MKPGVTVKLLLLLLLLLLLLLLLLLLLLLLLLLLLLLLLLLPPSFLLPPPPPSSSSLLLPPPLPSSSFFLFLFLLFLFFFSCFLLSSSSEDEDEDKDEDKEEGGGRGGEEEEEDKEQEEEEEEGKEEEEEEEWQQQLVVKFVADELIKCNERQEASVST

SEQ ID NO: 925329 - protein, 404 aa, Homo sapiens
MCRGWGHKDSLGMIVLPMRLLVLQRRSRGNGIIAGGLCEQELHSKSKGDAAVLPVWGDIHPDTYYHRVQPHGQGTPTQIHVTIGYSPMARGHPPGYMLPSDIAPWPGDAHPDTCYHRVQSYSQGIYTRIHITIGYSPMAREHPPGYVLPSDTAPWPGDTHPDTCYHRVQPHSQGTHTWIHVTIEYSPIARGYTPGYILPSSTAPWPGDTHPDTCYHRVQPHGQGTPTQIHVTIGYSPMARGRTPGYMLPSGTAPWPGDTHPDTCYHRVQPHGQGTPTRIRVTIGYGPMARGHPPGYVLPSGTAPWPGDAHPDTCYHRLRPHGQGTHTRIRITIGYGPMARGRTCRYMLPSGTAPWPGDTHPDTCYHRVQPHGQGTPTRIRVTIGYGPMARGHTCRYMLPSGTAP

SEQ ID NO: 925330 - protein, 126 aa, Homo sapiens
MHGLQVPSIHWPGTAVSDHIPNLPLKCSLWKGKNSMMSESTLVYWCGPHLLGFPYIHTCVGLDDHALNNLALNSTSGSCSPGPLRLLWTLVRKCVFESLLKSPSSQGGWEHCPPILSSMGWDLPFP

SEQ ID NO: 925331 - protein, 141 aa, Homo sapiens
MVEQAPDRALGLGPWLYTAHGWHWPEMMGSEAGRLRGLCQQRSAGIGFSAGLSGNPGCRALQVTAKLSASVGGPSPYPHQPAASGRFPDWVSSPPPREPAVEPRFRNDDVFLAPWLGLVQFLFLVSALCLMFSWGSGNTEH

SEQ ID NO: 925332 - protein, 137 aa, Homo sapiens
MPWAGGQLRGENRDGLRERALALGVGEWMRNKTGESDSYTLMGTPQNPLATGSSASGWHDFAPCMGLPWLGTRQLTRVAGVGSGKRLLTLGILTPLSRILLCNIHFLLPISLKGLLLVGLLCTVLQVSSAKGASRGK

SEQ ID NO: 925333 - protein, 149 aa, Homo sapiens
MLGRTFGGILTRGLLSPLKSTHFLFLFLLELPLLLSMLGTVLWALFKYNYHRNKEKDLGHESTISLVCWLVKPSSLPQQLVSRLTGCCLASSLSFGLGYTRRTQNSEKLLYAWLWFITLKGYGLKPVKVKSAWCKLPAVLFQRDFADSV

SEQ ID NO: 925334 - protein, 259 aa, Homo sapiens
MHAWCLQPDCAVQGLWWLKYVPHPCGMALGPQQELCNSGPLVPPQPVEATDDAFWDQFWADTATSVQDVFALVPAAEIRAVREESPSNLATLCYKAVEKLVQGAESGCHSEKEKQIVLNCSRLLTRVLPYIFEDPDWRGFFWSTVPGAGRGGGEEDDEHARPLAESLLLAIADLLFCPDFTVQSHRRSTVDSAEDVHSLDSCEYIWEAGVGFAHSPQPNYIHDMNRMELLKLLLTCFSEAMYLPPAPESGSTNPWAIQS

SEQ ID NO: 925335 - protein, 338 aa, Homo sapiens
MCHVCHLIGLAPPSAAVLMPPARVARLSRAWVASARSRGARVSRTLTPGAGVPRRRVTPPRPAPPRLHRRHTPQSSSPPCASGPSPQSPWNPRSRWNLRSPWNLRSPWNLRSPWNLRSPWNRRGRTCGGEALLRELEVLVQDVVRTSSWWERHGWTAPSSRSASSPCRQVRNAGTRRPGRLRVGAGCGGGGGAGSATAAVGVQPAQWTGGGREAEVVGAPHPRMEGHSGTCLTPASGSPQSLAHFSLGSQGFLCLRWENALVFASGITILGVCHYTLTVKGSHLATHGALTESKRWSKIWLLFFVEADKPKFANKGSNPSGQLLLLLHSEEEVGPGGR

SEQ ID NO: 925336 - protein, 315 aa, Homo sapiens
MPIVLVDWSDIREQKRLMVLRASVALHGRSVTLYEKAFPLSEQCSKKAHDQFLADLASILPSNTTPLIVSDAGFKVPWYKSVEKLGWYWLSRVRGKVQYADLGAENWKPISNLHDMSSSHSKTLGYKRLTKSNPISCQILLYKSRSKGRKNQRSTRTHCHHPSPKIYSASAKEPWVLATNLPVEIRTPKQLVNIYSKRMQIEETFRDLKSPAYGLGLRHSRTSSSERFDIMLLIALMLQLTCWLAGVHAQKQGWDKHFQANTVRNRNVLSTVRLGMEESVSYRRRKDAEWKEQKDQIHKKESVRHTGEMISVYQC

SEQ ID NO: 925337 - protein, 117 aa, Homo sapiens
MQCNAQSRSHIPSLNSLLGAYIMTRRCLDDQIWLCHFYPPPPKDLDTHSPWWAFAKKAKQSAMHRTALKSNKCCTENANSTSFDNTRECQERDVFASVPRGCCEDSVGDLPWQELHQ

SEQ ID NO: 925338 - protein, 157 aa, Homo sapiens
MKSPIGENLTDSPRAPHCTAVTVQWGWEYPQGLLEREQVPPHRDLRVQKSQTVRITGPCLSTCSRPLLPSGGSMQPYSIITALAGTVLEAEIKSENQGGLEREKLEEQCKVEYVRFSYRFCKGILRSTEKMYRNCPIGQEAGAFITSFHSYGLTLPL

SEQ ID NO: 925339 - protein, 156 aa, Homo sapiens
MHDRRESIMVALTAWPGYCTENGLEGANMGRGRLVRMPWQMIHTRDNSSFDQGGRSGSVITLGLKPQKTTLHRKGIFWKKQMGVKGLENDQETGLRQRTREQEDNHYFSAEAIWSGCYYQCHHRVPLLDTTIPVNDAQLFVFVPLVQDSVPQEGEK

SEQ ID NO: 925340 - protein, 424 aa, Homo sapiens
MSIKVTQKSYKVSTSDPWAFSSLSYTSGPGAPISFSSFSRVGSSSFRGGQGGGYAGASGMGGITIITVNQSLLSPLNLEVDPNIQAVHTQEKEQVKTLNKFASFIEKSYINNLRWQLETLGQEKLKLEAEFGNMKGLVENFKNKYEDEINKRTEVGNEFVLIKKDVDEAYMNKVELESCLEVLTDEINFFSQLYEEDIQELQSQISDTFVVLSMDNSRTLDMDSIITEVRAQYEEIANCSQAEAVRPCTRSSMRSCRRWLGSTGVTCGVRRQISEMNGNISRLQAEIEGLKGQRASLEATLADAEQCGELAVKDANAKLSKLGGCPTAGQAGHGTAAAYQGLINFKLALDVEIATYRKLLEGEESRLESGMRNMSIHSKTTSGYGGLTSYCLSSSFGSGAGSSSTKAVVVKKLETRDGKLVSES

SEQ ID NO: 925341 - protein, 167 aa, Homo sapiens
MPRWRRVRPQALLTATHSSTLVEVVVALLCTLHSLTQWNGLINKYINSQLRSITHSFAGRPSEGAQLEDYFPDSENPEVGGLMAVLAVIGGIDGRLCLGGQIVHDEFGEGTVTGITPKGKITVQFSDMRTCHICPLNQLKPVGELVLSYCMIREIGFTLGPSTNIST

SEQ ID NO: 925342 - protein, 176 aa, Homo sapiens
MVENRYTDDSVKPSGTKKEDLDDKEKKDETPAPVYRAKSILESWGCSRNARHQKARSMPLQDQHLALAILLELAVQRGTLRESFFTVQNCRNNEEVTLICKADLENHNKDGGFWIVIDEKVYDIKDFQTQSLTGNSILAQFAGENPVVALEAAFEFEVTRESMHAFCVGQYLEKRG

SEQ ID NO: 925343 - protein, 158 aa, Homo sapiens
MAGQGRALAQPLLSPGVPACSLCICPFWLHREGRETAWECKVGNGRGCDQGDLENRPTSPGSPGRAHHPPPPRFFTGPGPVELGLCGRGGGRAEAGGQKELGREGGQESLSQHPDDQTGLHPHPFHGQGVEKDVEFLVLLSGPAQFKPLWCKGHLYSH

SEQ ID NO: 925344 - protein, 162 aa, Homo sapiens
MSTWLRLINLPLRQVWLKLYEKRWGLCQALDVGEGGRVRKQKQYHQRCCCEACGQCLEKSQGLSVSKLYEKRWGLCQALDVGEGGRVRKQKQYHQRCCCEACGQCLEKSQGLSVSGLQHLWEAALDRLICTFLIEDDIDDEMSYNDHLEVYFEQLAIPGMME

SEQ ID NO: 925345 - protein, 151 aa, Homo sapiens
MPYVTVLRLAAAACQEHGDGMPMLHFTKLYHHYRSFGVAYERQNHVIIQETKSSRAAELTRGSALAGRHPSQHCHPGLFPLDTNSKMPGRRDQEHSVVRSKTDARSNHLEIQREHFGPLLWAALNFGAHFLTSVTVSELHPASGVHMGSRW

SEQ ID NO: 925346 - protein, 165 aa, Homo sapiens
MNQPYLPPIKSCVCLPLVNAGIKDKRQRGIFGKRGQGHLASSEQVSPKVTELSRPTNNNFLWEPGASHPLDTTKPSPTPPVCSLCSQVQSLCGKGPGMVFCKIAKNKKDFYFGENYARHSVALTSATVMGARTVTLSFLSCRFLCSCHMHSHDEGLIPCALWFRH

SEQ ID NO: 925347 - protein, 147 aa, Homo sapiens
MWRPLWEAQGPQPARRCSSVGSSRSLWAAPEAYPHLHWQPAPVAQQVRCVQGPHPAGDTDPGGKGVVDPGWARGAAQTPPSVPKFTPGRVASLSPSRPVGGFPSLLHSLMRQPEDPGPALTLGRICGAADIPLPPEFPSGPALSSCG

SEQ ID NO: 925348 - protein, 261 aa, Homo sapiens
MRQARSVCVGILSTAEPPHPPWFLGLCTLGFSGFAHPAAPCQEEEETPRACDTTTCLTAGPAPAAALALAWNLVLSRTCPDSVMALALLCLVLALTLSWLCTGLSLALSWQWSTPALAITLPCCALDVSSPCPGPTLPLTLPWPYLGPHPSDPGPAPALVFALALALDMSVVLTLALPWSCHCLGPALALALPRPWPCPGPSHRPALPWIYPDSALVLPSHLYGLALALPCTGHALPCMSQPGPSPCPTIFLTPPVPLFWP

SEQ ID NO: 925349 - protein, 341 aa, Homo sapiens
MTFASPPRLTLNLGVVLGTLTVAANPKVREQVRLELSFVNSDLQMLKEELEGLNISVGVYQNTEYDSLTGVLVSQQNLLLEKASVLFNTGVLYTQIGTRRYRHTQAGLQSAIDAFQRAAGVLNYLKETFTHNPSYDMIPAMLSVLVKMMLAQTQESVFEKISLPGIWNEFFMLVKVAQEAAKVGEVCRQLHAAMSQVLVKENIPYSWASLACVKAHHYAALAHYFTAILLIDHQVKPGTDLDHQEKCLSQLYDHMPEGLTPLATLKNDQQRQQLGACPSAPRCGSHLVTSWSCSQTATERSLKRARERGVFQVIVATLGSEVMRHSPEPQRASQAVFSWVP

SEQ ID NO: 925350 - protein, 162 aa, Homo sapiens
MAWQWEIRFQVKLRLQRWREQKAAAAKIRGGRGKNPRRREQKAAAGKKPRRQKAASAGWGAKSRSEAKSLGGQKAEAGWRQKAAAGKEPRRCGGPKAAAAGGGKKPGRAKSRGSGGQNSGDGVEGRHSLALLECDVIGNVQPKTKKDVSRLDSLQLRTQMLS

SEQ ID NO: 925351 - protein, 154 aa, Homo sapiens
MTAVACMPPDVSFVPEQGQVAGAREGDYIVSIQLVDCKWLMVSEVMKLLKSFGEDKIEMKAVSLLDSTSSVHNKSATYSVGMQKTYSMICLAIDDDDKTDKTQKISKKLSFLSWGTRKNRQKSASNLCLPSLQAAQSLQCVNVCHNCSQRAPSC

SEQ ID NO: 925352 - protein, 179 aa, Homo sapiens
MEGSHHLPVSLTAARTLGNLCSEPKRTPESLVEAGQTWWSLGQEGNQSLSGGGHTAQPGPDCSSLLQGPPGAAICQPCFPVEDPTHTSPRNLGKARAPQEPPGNRSTDNGCKKKGSDSFRCERKGPWNPGLHPAHRHETWACRKPSSVLSAPLRVNPKNTLGEIFQQEKGTGEYAARLR

SEQ ID NO: 925353 - protein, 143 aa, Homo sapiens
MTAARELVTGHEVGRKVKPCCRVKAKLCFSLSPLCLELLSIFLLPNFNVGKSIILLQRSCSRQAALTSPKNLLQMKNLRPAESERAASRSHTPAPADLFGEEKFFSILTEHDIKCVLQNYLSQIVVHPLFLWLYSKQNLSRHW

SEQ ID NO: 925354 - protein, 138 aa, Homo sapiens
MWQKPISTKNTKISWAWWCAPVIPATWEAEAWELLEPGRWRLQKLKLDPFLTLYTKINSRCIKDLKVSSKCVKTLDENLGSTIQDIGMGKYFMTKTPKAMATKAKIEKWDLIKLKNLCAALFGSVRGVPLSCKNEEKP

SEQ ID NO: 925355 - protein, 518 aa, Homo sapiens
MRRKHLLWPRHLLVTTQDDQGALQMDDPYIPPDCYYLSYLEEVPLSMVTVDMCCGGLRGIMKLDDLAYEIKPLQDSRRLEHVSQIVAEPNATGPTFRDGDNEETNPLFSEANDSMNPRISNWLYSSHRGNIKGYVQCSNSYCRVDDNITTCSKEVVQMFSLSDSIVQNIDLRYYIYLLTIYNNCDPAPVNDYRVQSAMFTYFRTTFFDTFRVHSPTLLIKEAPHECNYEPQSYCCRSDCRLTPGSICHIGECCTNCSYSPPGTLCRPIQNICDLPEYCHGTTVTCPANFYMQDGTPCTEEGYCYHGNCTDRNVLCKVIFGVSAEEAPEVCYDINLESYRFGHCTRRQTALNNQACAGIDKFCGRLQCTSVTHLPRLQEHVSFHHSVTGGFQCFGLDDHRATDTTDVGCVIDGTPCVHGNFCNNTRCNATITSLGYDCRPEKCSHRGVCNNRRNCHCHIGWDPPLCLRRGAGGSVDSGPPPKITRSVKQSQQSVMYLRVVFGRIYTFIIALLFGMATNV

SEQ ID NO: 925356 - protein, 156 aa, Homo sapiens
MVPCESGPAVAAPHGLFSVGFLCVCRSPEERGVNCMVDAAHNHQGALRTRGGGQDNKGGLRTTKANSGAQEMLRTAGSIENQQEVLRTPGGAPDTRGCSGHQDALRKQGGAPDTRVPQNHQGALRTPGGIQDHQGMPRTIRGRSGHQTVLRNTRWP

SEQ ID NO: 925357 - protein, 127 aa, Homo sapiens
MTSCREELPSLLRTGKTTGRLAAGRSYLLCLELNTQPVNLPTERSYSLGVSSEMLECFMKLVFALLTHHMAAYLILSRCRTRTWAKSPLATEGSGQKKQHPSDPETTMQYEKKKMHSFGTTESKALL

SEQ ID NO: 925358 - protein, 147 aa, Homo sapiens
MSHIALELSQGSSLLQCLEAQTQVVSVFAGAQCEVQLVESGGGLVQPGGSLRLSCPDSGFTFSNHYMSWVRQAPGKGLEWISYISGDSGYTNYADSVKGRFTISRDNANNSPYLQMNSLRAEDTAVYYCVKHTARGSQSTYCHLFNS

SEQ ID NO: 925359 - protein, 145 aa, Homo sapiens
MAVLAVIGGIDGRLCLGGQIVHDEFGEGTVTGITPKGKITVQFSDMRTCHICPLNQLKPPQRHEEGFSNLEELEIVKRIRTQLPYERVQLMFNVNAMAILKDDQTGLHPHPFHGQGVDKDEELLVLLSGRAQFKPLWCKGQLYSH

SEQ ID NO: 925360 - protein, 160 aa, Homo sapiens
MCLVNQGLLTTTRGYSGHQGVLRKPGSSVQCEVQLVQSGGGLVQPGGSLRLSCAGSGFTFSSYAMHWVRQAPGKGLEWVSAIGTGGGTYYADSVKGRFTISRDNAKNSLYLQMNSLRAEDMAVYYCARDTIDAYRDEKPSTIVTRIRVLRKLRDTCKEAI

SEQ ID NO: 925361 - protein, 153 aa, Homo sapiens
MITAHYSLNFPGLSITSLPSLKVVTVSWSHNLPVITGAPVAVSSPKDLFGDRGQQPVYCLQGMPLHEITALMTVQDQVTNGTIRCTPGRRPALIQPPDAYPGCTPCEALLIHSLGLGLCLAGELPGQPADRTQTPELNQGRCWEHTGKRPVTV

SEQ ID NO: 925362 - protein, 141 aa, Homo sapiens
MSVMLSSDVLTSVRPKTRARFRGSIWAAGKAGHCQHPELSPPSLWPLRPLSPTTSSPVPSLEGGHPLVWAWRCLMSRAQARFQPLSSPGPAAMSSAQPAHLYRAALSAKLEDGNASDTGSRGSLPLESPQKLRRWLSGGKH

SEQ ID NO: 925363 - protein, 139 aa, Homo sapiens
MGTSIRVVRKLRGARKATTLHKGNHNNKRIISVKISAQQLPVQPYTDVNLVIDASSLGSFSSKCHSDAAYDKNCVFQCSHVLVKPSETLSFTCAASGFLIITSTSSWSWICQPPGKELKWVRCFPCSCAVLSEFLHPEF

SEQ ID NO: 925364 - protein, 148 aa, Homo sapiens
MGSHLAQGQVYKCCPRAYAWTWGPTSPLGPSAAGLLEFARGPLQTLFAWVSAALAAEQWVFVNRECCCLIVPLEVLSQRNTRPCSGVHVQVCYIGNLCVTGIWHTDSFINQVLDSKNASLGVFNGNILHLFCHVMTCTINALITTGNN

SEQ ID NO: 925365 - protein, 162 aa, Homo sapiens
MHEKKDENNDHDDDDDNHGSDSSNDNDCEEAGEDGGDDDDSNDGEPGDDGCGGGDDNDGNDGGDDGGDDDDGNDSDGGGDGGGGGHGGGGDGGGGGDDNDGNDGDDGGGDDGGGDDDDVVMVVMMEDDGAGSDAGGDAGGADGAAVITITTIITTTITAIIM

SEQ ID NO: 925366 - protein, 147 aa, Homo sapiens
MHHKCAWVAQGLLAPTLCPWSPALSSVLTHGARLGVNSRDRQLAVLRTALCFNHQILPEASCFLIPQDESPPRGSQSPEWRHIQLSHEYACTPAVSRAQCQMAVTLQAKQEKGLSLVEESGQAGVCCSNGRLTNLSGFAQSRMFLKS

SEQ ID NO: 925367 - protein, 122 aa, Homo sapiens
MKGRSLSSHPRGLPQFSNSRLRVGELEPRAQFTLHLCTWTMASPPWFSLLTAMGKQLCVSGREEFWLGNTAASAGALVRTPWTDSARRTPQQPQINFYSYRLAQPVLERHRNGITQHVPYCI

SEQ ID NO: 925368 - protein, 143 aa, Homo sapiens
MYSLKTVTYVDTQRVLPANPAPTSEYYPRDGHTSNFDSQCIWKNTRFLNRVLDVDALTCCDGKFTVFATAFLLADITSPSFSSLLPRLDKTSKSPVFSLSCTLGSHGSFEEIPPRLPCVVPGPVTLASLVLVTDETLSPIQTR

SEQ ID NO: 925369 - protein, 151 aa, Homo sapiens
MGGGCCPFSAVPKRMAPPWSLGNVRSHYPSDITASREIFHLHFPVPNTGINTKGVTHGSFTSRFQAPGGNFHITLRKVVSGEPSGAWGVVCSAHVVSGRAEELMASVGWMFVKLVPCGRHRGSVSDHCADLSEVSLGHNGRKRQGPYPVKK

SEQ ID NO: 925370 - protein, 115 aa, Homo sapiens
MRLALASGLHSPPLPFILTTITTTTNIIIINNTNNNTITTNTNNFITTNYNNINIININIIITNIAIINTNTTPVTNTNNTITLNTNNTITTNNITSTNTSTTTLSSPTATPALS

SEQ ID NO: 925371 - protein, 160 aa, Homo sapiens
MHQTSDLESPDFFNTLYPGRQHMSPWSPTAAYTNTGGFIDDNSLQVGQGLGTGAREGHCCARMEKTPGKLAGQTSSFLAVEEGKCAQNGLALGLWKNHSHRPSQASLGFAGHHWASLDITEQHWATLDIWVSLGFTGHHWASLGIWISLGIIEHHWTLRH

SEQ ID NO: 925372 - protein, 137 aa, Homo sapiens
MLKATSSLGSFSAALIPTFPMAPGFRPGADASAKVLKELNSAPHWEKVAQQLLCMEDLLLRPAAWMGQCLKMIVPFMDEEMEAQEVICQQPYQAQAAGWTSVSACEVRDGPTDSVLLGPLGTSDREGSVHSSAQSDL

SEQ ID NO: 925373 - protein, 141 aa, Homo sapiens [sequence omitted]

SEQ ID NO: 925374 - protein, 212 aa, Homo sapiens
MGIIIGVFNNSSIKDTLLKGFHRLESGLPEIKEVVQRIDEDDDDNKGNNHNDGDGDDGDNDDDGDDQGDDDGDDECNGDGDDGDDDGNGDGDGDGDGDGDGNADGDSGGDGNGDGDGDDGDDGDGDDSDDDGSGDDHGDDDNRDDGDDDDGHHGDNDGDNDDGDHGDDHDDDGGGHDDGMVIMMVICEAIEHKVGKQCASSSLFRISTKVET

SEQ ID NO: 925375 - protein, 374 aa, Homo sapiens
MSSAPEKQQPPHGGGGGGGGGGGAAMDPASSGPSKAKKTNAGIRRPEKPPYSYIALIVMAIQSSPTKRLTLSEIYQFLQSRFPFFRGSYQGWKNSVRHNLSLNECFIKLPKGLGRPGKGHYWTIDPASEFMFEEGSFRRRPRGFRRKCQALKPMYSMMNGLGFNHLPDTYGFQGSAGGLSCPPNSLALEGGLGMMNGHLPGNVDGMALPSHSVPHLPSNGGHSYMGGCGGAAAGEYPHHDSSVPASPLLPTGAGGVMEPHAVYSGSAAAWPPSASAALNSGASYIKQQPLSPCNPAANPLSGSLSTHSLEQPYLHQNSHNAQPSCKLSWEPRRLSPEVESDAADQLGEPSTSVFEPQAEGSTAPKCSAHSPFEE

SEQ ID NO: 925376 - protein, 217 aa, Homo sapiens
MSPRGSGRWETTFPSLHLLPVAPRVESAPAMQIIVAVLLDTRPKLNKWQFLKDASGPAKEPSTNQVTSLLNVVRSMPGNQGKKSEKLELEGEEEPRGRGHPATSQGIDYDLHMQVQPFYYVVHKTHFVQDLKGRGAVTFFLLGRSTQDARCYIRQLVHATCPADSARWLGAATALSLFSHLTPGGRDLSCARRNGIVACQAPILFQFCLYAPINLCA

SEQ ID NO: 925377 - protein, 156 aa, Homo sapiens
MCSVQVGSGFYRLLWTKVRTVWGWAARWRGARWFSGWAVQFLLANTVMVEALPEKHRVVGQSVPAWPPGQKLTSSCHNLAKERRAQSLVTSPEGPGPAIFSGYGFLLGAFALVAMGHQVSLDLIVITRTAGERPASIIQLPPTGSPPRHMGIQDGI

SEQ ID NO: 925378 - protein, 159 aa, Homo sapiens
MPLRVLQNSVFRGRVGGSPLADTLGTQRMMSSGLAPTVPINRREGGRDGRRARLLPDGARGVNRRPSPAWKSPGLSSDPPSPPTGGLQNHEKVRLCWTVARTRNTHPAALKDAGLSAFGSPVPLQGTLRLLFDWILTAALRNLHHDSDLTDGDPDTQRD

SEQ ID NO: 925379 - protein, 489 aa, Homo sapiens
MRKVRSFPGHRAKLLLQPRLSEPPHSYLHGCTPKMPPGACYTQMPNQNRRESELLIWSLPPFRSRLQCHLHQEALCSLNSGPPLLGAPSGLCQPHPLCEQLHEGSDCLSLTSQHLGLPHLDFLKVPTSSCPRWSGVGAAGAIGPCSLASIPGKIRIASREEETVTIPMNPSASPCNALFTLVEHDHPLHASSCSGASSQSLAFEVRLSPGSFQVKLHLFLSSQCLWGKLPGYSLWRRQNAGGRAGNNPGLLAVAGLQIPESVGLEGKLCAQSTYAKSTSVFNRIQSAGHRSSIWSPGVGRPGLRNRTRGCGGVSASFCVCRPTVFRQEQHLLHARRVRAQRVHQGTEWGGSVPSQLVRVGVGNEEISAMASEGAENHGKSTQGDYGRRDMREQSETPALQTGVEAGRETHQCMPAVYTDGLSRKTGCSITSYVNLRGSVSSAVLSGHFPSKGSKLKKAGIRLMTLVSSFNAWRTYCIQGRTAPVGICRE

SEQ ID NO: 925380 - protein, 169 aa, Homo sapiens
MSGVNTQGLNLLSGEEAGVCAEQAPRGLYYSKRQGHPDFILPGRRERSFLLLVVTHLHVTFGIQAFWVSGSLMMPCRGPEVEMSLLVAVAPGHTYGIFQDRHWSEWNFHGSVIGITKILIVPTGSSPKYFFLVDFVVKSLLIDNLAAGPDISMFGTCPKAGLPDLVNLV

SEQ ID NO: 925381 - protein, 140 aa, Homo sapiens
MAALLVEFTTLWKAKQWTSYAGDTFLSVHGGHITQLQISFEGGDTSTRSPRGHRKTFHAHSKRAVKDLYKENCKTLLKEITDDTSKGRHIPCSWMGLGVGAGSICVSLRGQGACLSDWGLLICPAEEEEEHQGHNTVPPR

SEQ ID NO: 925382 - protein, 224 aa, Homo sapiens
MLILEGEQLWPPVHSWTPGWPRRTTHHPVGGGPGGNGVQALIPPQGNPPGLIPALSLECLMKLSWSTIWEFQERLFQSWAPEDNVVLRNLQTSVKELTRKHWDLPPPGGLQHQVSSQVTLWGSQWWGVPWPYQPSYLAFLLHLFLLYSKKVKWVCHSSGQALSVCVRDMRCRQAGAVGRTPQLPSPSFHIVPITPSKGPEGHWGSQIQVWKTPPLPPSSRIPHS

SEQ ID NO: 925383 - protein, 433 aa, Homo sapiens
MTAASRANPYSIVSLEEDGLHLVTMSGANGFGNGKVHTRRRCRNRFVKKNGQCNIAFANMDEKSQRYLADMFTTCVDIRWRYMLLIFSLAFLASWLLFGIIFWVIAVAHGDLEPAEGHGRTPCVMQVHGFMAAFLFSIETQTTIGYGLRCVTEECLVAVFMVVAQSIVGCIIDSFMIGAIMAKMARPKKRAHTLLFSHNAVVALRDGKLCLMWRVGNLRKSHIVEAHVRAQLIKPRVTEEGEYIPLDQIDIDVGFDKGLDRIFLVSPITILHEIDEASPLFGISRQDLETDDFEIVVILEGMVEATAMTTQARSSYLANEILWGHRFEPVLFEEKNQYKIDYSHFHKTYEVPSTPRCSAKDLVENKFLLPSANSFCYENELAFLSRDEEDEADGDQDGRSRDGLSPQARHDFDRLQAGGGVLEQRPYRRGSEI

SEQ ID NO: 925384 - protein, 134 aa, Homo sapiens
MTVEDSAWLVVRSKAIILLKLRMEEDFLGDSRKLPCVSMAHGPAALVRAVRIWLRKHSLEAWEWVTARLLGFSDAACDLLIVWSSLTLRRTELQPSALCCARGEEEITDTKFLLLDPMAGTGVQDLLIFLGEGS

SEQ ID NO: 925385 - protein, 139 aa, Homo sapiens [sequence omitted]

SEQ ID NO: 925386 - protein, 196 aa, Homo sapiens
MSLHLSETQFPHLQIGAGSGRIAGGFNRTLQHGTGWHTSCWEENKGDAAFSFSLSPGEEASNVFQGGACPRGSHRHCGCLLDGRSDNGSSSSHRDSNVCQALSWPCLFESSSCPQIGVIKPVSQMRKSRHRKVKWIAQIHTMSKDVALGMSDASSPAVFSKLAASGASGYQAQEPSGYQANCFVYVMALNLHNHHT

SEQ ID NO: 925387 - protein, 172 aa, Homo sapiens
MCDFGISGYWVDSVAKTMDAGCKPYMACPSWVISSWTTSAEDTGGLCRSRPALIVRRALGACSQPERINPELNQKGYNVKSDVWSLGITMVLCGAGACPWWSVDWRDGKTTRMCPPARARKLCRRRVEGRCHQQRQVFVLRSLPFIMVMTAGSEGPCAGASEFSVLPGRGQG

SEQ ID NO: 925388 - protein, 138 aa, Homo sapiens
MGCNRTTLTELWQEEKRQRDRKCHLSLSCPNSCLHAEIRLQTYPNWGSDPNSKSYHQGDFWKVLRLLRAQSLHECNSCFRGETLEIIKIPTRGNWIDHEHIPEMKESTTETKMLYFEITQIAIGKGLLYPGEWLGSFS

SEQ ID NO: 925389 - protein, 119 aa, Homo sapiens
MKYVRLNFTFLDQSNVNGNSHFIFSALIGSSCILHFGNYQTAEHGEFYRTHFKGGAWKIPQDEDRLKGQGKATVKAKNSHSPGRMRVRVETCCLVSPNKSQQKGHNWQVFPFTFHYYPG

SEQ ID NO: 925390 - protein, 165 aa, Homo sapiens
MWPRLLPSVTSASKPHSYLRKVLLQRNLVSSPPQAAGALCSMQYPLATCGFELLKHGWSKLRYAISVQYTSDFEDIHKVLKPSRIQAGMKATLKGTGRGHRGGPDTPRGMQGGHPGGGKANAANFPLPTGEFSLLLIYKMGTCKSLTQKHKLPEVGFWYKADDDF

SEQ ID NO: 925391 - protein, 149 aa, Homo sapiens
MMTMVALQTVPGSLDKKSQFRCQAVGKSVTDNTAAKPCKTSTPRMSSETSGLPNPHVALVFQCPASRHLGQFSYQAEKALHFRQLQQVIQRLLHTHRGSVHCLPCFHWGSSKQHHCDRVPQLMLRPRSRPGSPQGLKTHSPPSILVASC

SEQ ID NO: 925392 - protein, 454 aa, Homo sapiens
MDDKSIQKPGFGAPRFGGSRAGPLSGKKFGNPGEKLVKKKWNLDELPKFEKNFYQEHPDLARRTACLVLAPTRELAQQVQQVAAEYCRACRLKSTCIYGGAPKGPQIRDLERECGKTNLRRTTYLVLDEADRMLDMGFEPQIRKIVDQIRPDRQTLMWSATWPKEVRQLAEDFLKDYIHINIGALELSANHNILQIVDVCHDVEKDEKLIRLMEEIMSEKENKTIVFVETKRRYVEDVKFVINYDYPNSSEDYIHRIGRTARSTKTGTAYTFFTPNNIKQVSDLISVLREANQAINPKLLQLVEDRGSDIIDQFAIVFLTGRSRGRGGMKDDRRDRYSAGKRGGFNTFRDRENYDRGYSSLLKRDFGAKTQNGVYSAANYTNGSFGSNFVSAGIQTSFRTGNPTGTYQNGYDSTQQYGSNVPNMHNGMNQQAYAYPATAAAPMIGYPMPTGYSQ

SEQ ID NO: 925393 - protein, 223 aa, Homo sapiens
MGVGEAREELEGSVTLRYIGAGTLGARAARRLVSPLTRNRTGAAASRLPTCLQQWPRGALRKRLYKGLSPALPSREENRRRAQEETVPAGGRSCRSGGLLGAGLGGDCWRGGAWGSEGWALEIRGSTLLRCLDSGFRPGASRGLVGSWAAMESTLGAGIVIAEALQNQLAWLENVWLWITFLGDPKILFLFYFPAAYYASRRVGIAVLWISLITEWLNLIFKW

SEQ ID NO: 925394 - protein, 155 aa, Homo sapiens
MHVTVGAALAEYPVCLLVLTQEPWTYLAEELVREEAPPTDLQIFAMSQPAHVAWTCGNVSTIMTDLRAVPVPVRRQPMAGACSLRWCLQPLRRPITKWPSCSSEKPLGHVKSGGARTRVPERHGLETAHQCLLDAFWTWGSPDGIERDKQEGAKD

SEQ ID NO: 925395 - protein, 169 aa, Homo sapiens [sequence omitted]

SEQ ID NO: 925396 - protein, 135 aa, Homo sapiens
MCYCHWTSCPTATAPSVRGAWSPSSPHPLQEFSVLDKQHLPFAQAADVTCCLPPLTECEGDGSLLLSLWLYEAQIAGAYGIIYCENEADGEPLGSGLEMVSSDRTVGKTGHFPSEGPPAQGKCQGMNVSAPREIE

SEQ ID NO: 925397 - protein, 145 aa, Homo sapiens
MQLWVAGSNQCPGITPDTNLVPDLTASRCPPPTDGPGCPPAGGDITARELTMFHYQYKRTLAADVLLSEGVATSLRVSLQMISSHLHPGTNLGCRKLKCMLPLIMNGSIIFAESLPSLSLQIESAIQDGRRPHSTISIKRANEAS

SEQ ID NO: 925398 - protein, 140 aa, Homo sapiens
MCPIPSSVGGAPWPPSTFGGLAKDIGRHRDALTEVSIWTIAFDLPNNLISQGVEKMTSGSATLKSILTIKELTSQLESHLRVAQSEVHCHLRVAQSEVHCEERPCEETVEKVVIYKPGREPSPEARTVSALILDFQFLEL

SEQ ID NO: 925399 - protein, 219 aa, Homo sapiens [sequence omitted]

SEQ ID NO: 925400 - protein, 202 aa, Homo sapiens
MAADFTQRRDRCITGMSTLLLRGNVEFSVGRAAATSLESILSLMCAPGMLNNLPRVILKTYQSLPAFGKSLDKQFAIEGSCSLLLEGAWVQLMTMDINLQGGFLQSASSSNLDPSDDIWSIIFNLGHQILGMALMNQSVLRDRLLKMKKVQEIMWCEERLKDQRTFCLEMQTGFVREMHAIEEEAEVELKPKGARYREYTFL

SEQ ID NO: 925401 - protein, 142 aa, Homo sapiens
MVEREREREGRRGRRRREEEEEEEEEEEEEEEEEENKNENKNKNKKNKNENKNKNRNNKKRRKMIRTKMSMMQRVRNPEIDRNRELSTDTGAPPEARAMSPWWPGLAWPGGLHPFGPSREEHVAAEPPEVSKGSKCRSQERF

SEQ ID NO: 925402 - protein, 128 aa, Homo sapiens
MDPTGQSTNFCLQILLAFLCTTLPSPLSGRPRPICASKMALSDPPFWVHMLVQSSPIAKRTDLNSQKDIVEVTACDLQGEIITDIATSTLLSRSLPMGEACWYDTQVALWRGSCVATAVIQARCDELR

SEQ ID NO: 925403 - protein, 134 aa, Homo sapiens
MRAKWLPFVPVIASLQNVPIRPPLYHKCQRDICHLQSPESCERSPEGIERTSTLQVPRTNTFSLQARRQFGCQRQDVVTPTLKHFQGYNLPEAGKSVYLLNLLIYAIAVTLFILQGYCKDKGRSTHVATSIYTL

SEQ ID NO: 925404 - protein, 140 aa, Homo sapiens
MDPVLPVLESCEVKSETEGPRIPGANGVSLSLPESWRTRSDDDQGQEKMDVSVQAERANSPFSQHHNYFLCLLTQRHEEPKVARWQAVSTSSSMESLLCLLVKVFLSLELRPLGQQGIKEAMLCGILDKKQCCVEYYDSV

SEQ ID NO: 925405 - protein, 137 aa, Homo sapiens
MRKKHQYQATGKKLIFLECCLSSGLVPGGPKSNDKCSHKRHTEKRHREKRKRPCEDEDSDWSYAARCQGCLKPLEAGTGKEGFSSRAFGSQQQLQEEEEEEEGRGGGGGEEQEEGGGGEGEGEESLSSSFIPRLLVT

SEQ ID NO: 925406 - protein, 156 aa, Homo sapiens
MPGVSLANVSQKERLFHPARSLIKGEKIKFINQTFDSENGCYLGRILGHWLTRDYLGKLGHRIPFFYSLSKSSYLTLHQDAQLSNVPSIEDIGLSVLKPEWSWAHQGTGCLNERRKHLKSIQGFLSTKPANSLNLSAIIFRPITKTRQLPKRKRDT

SEQ ID NO: 925407 - protein, 325 aa, Homo sapiens
MGLYIAVIFYYKDNILVTNEDQVPIVEIDDSHTSSITQDFLWFTKLSCMWEDIRWLRQSIPISSSSSTVLQTRQKMLAATAQLQNLLGTHNLGRVYYEPIKDRHGNILIVTIREVEMLYSFFNGKWMQISKLQSQRKSLSTPEEPTALDILLITIQDILSYHKRSHQRLFPGLYLGYLKLCSSVDQIKVLVTQKLPNILCHVKIRENNNISREEWEWIQKLSGSESMESVDHTSDCPMQLFFYELQMAVKALLQQINIPLHQARNFRLYTQEVLEMGHNVSFLLLLPASDDVCTAPGQNNPYTPHSGFLNLPLQMFELGIVACFT

SEQ ID NO: 925408 - protein, 134 aa, Homo sapiens [sequence omitted]

SEQ ID NO: 925409 - protein, 136 aa, Homo sapiens
MNAREIRLLEMPEESRYGARTKGKDILGHPGYGKEAQSFTKSGTCQLKKDKFLASMPSPSPSVPMADMTLPFFFNSCAVALGSFEPLLQWIVVLMALYGSMSEISILVQHPWDNTYYLNGCNLVHAPRLLILCIMR

SEQ ID NO: 925410 - protein, 154 aa, Homo sapiens
MRATRHCPTATSRHERIGLVIAFENINYDMSCMRNLRDVMFRETGGAVAEKSAEIGCLQERTLEKPAVHGDRQQVFWGGVVAYGRLNPDGIWTRKRSRRLPMVPQDIYSSMPGSIFFITENEKVFLEVSRHNTDFMGPSKEDNVETKEYKPTSC

SEQ ID NO: 925411 - protein, 174 aa, Homo sapiens [sequence omitted]

SEQ ID NO: 925412 - protein, 159 aa, Homo sapiens
MELKVKAQELREECRSLRSRCDQLEERVSVMEDEMNEMKREGKFREKRIKGNEQSLQEIWDYVKRLNLHLIGVPERDGGVWNQAGKHSARYCPGELPQSSKAGQHSDSGNTLQDIVQENFPNLARQANIQIQEIQRTPQRYSSRRATPRHIIVRSPKLK

SEQ ID NO: 925413 - protein, 340 aa, Homo sapiens
MAAAEDEFLPPPRLPELFDSSKQLLDEVEGATEPTGSRIVQEKVFKGLDLLDKVAKMLSQLDLFSRNEDLEEITSTDLKYLMVPAFQGALTMKQVNPRKRLDHLQQAREHFIKYLTQCHYYRVAEFELPQTKTNSAENHGAITSTAYPSLVAMASQRQAKIERYKQKKVLEHKLSTMKSAVESGQADNERVREYYLLHLQRWIDISLEEIESIDQEIKILGEKDSSREASTSNSCHQKRPPMKPFILTRNMAQAKVFGAGYPSLASMTVSDWYDQHQKHGVLPDQGIAKATPEEFRKATQQQEDQEKEEEDDEQTLQRAREWDDWKDTHPRGYGNRQNMG

SEQ ID NO: 925414 - protein, 602 aa, Homo sapiens
MLRLGGPGGMSQAASLLLRDRRLQKLPGPCSFNIFHPDVWPKHDKPPWESCPAASVITEQLEANLSKNNRALSVLRRIKSGSVVANRANQGKENSENITTPEVFPRLYHLIPDGEITSIKINQVDPSESLSIMLMGGSETPLVRIIQHIYHDGANARDDQLLPGDIILNVNGMDISKVSHNYALHLLRQPYQKFCSRNSGQALDAYRPQDDSCHVICNKSSPKEQLGIKLVCKVDEPGVFIFNVLDGIAGPLHHCMDLCNAKKVESCTMIQCPALKNAAPCVVACLTPTSLLLEVAGLCCILMVPAVFISHNNGSSGLSGVAAAITLAAAGRHSWDCTLHGAGGNLGQVEAPPLLSWWGRSSLGAATTAQTVAADLGLPGHGAGRGPTPPGQLQSTPTTAVDPGIPALLGAQEGSPCPSRLGSTWLPPAVGTHFDLGAKLGPSPGTVKAWPGQKGPEGSGPGYQFHGPKWELVVLFPDPPMAAHGPIGTHFLPLRPIKPPDSARAEQMLGKPAAERSYPFQGLLSAESFRERWDDLPAEGATHSRASSELVYHSIKLLFTLLTLHLSTYLIPPGCGTRTWDLLNGRSERSITQTELKHAPCL

SEQ ID NO: 925415 - protein, 148 aa, Homo sapiens
METMGAGWHPGKSPDLASGCLRWILALQLPTYLALQISASSFVKRVCSNDCFNRALMFCLINKDCNRPDKDITKHTLPLSVLTRGLCGHKKSWTSTAHNSCLDKRLASASKDSAYIKDSSLQSCDAAELPKPDQNILFVHIALPGLAY

SEQ ID NO: 925416 - protein, 154 aa, Homo sapiens
MMMMIAPKRGIIAGCHHLKVRLGLEGLSPSSSAWLLVGGSVPLNRVLECPHNTSAGILQGENPKDAGGHCNAFGDPALGVTHHHLHLTPLGKQTTGVTGHEDWRKAREGRKEKLPVGRDLVAAGRWLRVTYFHGKPAPVRYRDGGPNAGGSRAI

SEQ ID NO: 925417 - protein, 176 aa, Homo sapiens
MCDLVSDLVGFSEMFKVPAKQYKSIHPTLEIDIEGELQNLKEIGELLQTKGREFGVTIGRKRRCGWLDLVLLKYAHIINGFTALEVTKLNILDMFMEIKVGVAYKLDGQIIPHIPANQEVLKLKFNIRLHENGTQTYQMQGHLKNYLLMHKTMFDLLKMSFKFQLNGLVLKQMMKT

SEQ ID NO: 925418 - protein, 139 aa, Homo sapiens
MLPFPEGGAWSESVLGLADMGDPLERRTSPKEQQAWVPPSLGFLGPCDGGKGSLIPHSRRPLLRMESDGETSREKDIPVVEVGGVENEAKQFQGVSRFTLQEWCPKLEVLCQLQILPVMSKNGFPSGRWQWSSPTGNMA

SEQ ID NO: 925419 - protein, 160 aa, Homo sapiens [sequence omitted]

SEQ ID NO: 925420 - protein, 166 aa, Homo sapiens
MAEGEGEARHIFPSMVEQEREKGEVPHIFKPSDLMKTHSLSQEQQGEFHPHDSVTSHQGPPPALVKVFPHSRDESSLTPPLDGASTLYREKSVWEEEYIDAAIFGKYNPATQIKHLAEYNEMGWNKWQRLSNCWEHSRKNIEAQKTFKGQTPCGQGKLYLKWVNES

SEQ ID NO: 925421 - protein, 142 aa, Homo sapiens
MRSLLYANCVSIELFHKKGTASERVLCQEKEVGCGRWSGGKEDQKWLATPGAVAQACNPSTLGGQENCRESPQLSQGAYKMPFALAGLMFAARLGQETWGAEDIKDLDEPNAKSSVAFQPLPPMPHNYPKIFSSCTNLKTAP

SEQ ID NO: 925422 - protein, 143 aa, Homo sapiens
MNTYRREKGGCCKDTQKNQNWNWKSERKWPQGPPPSPAQVHCQAGGVPQALAQGPLAVHAVLSQWAVVYEQTGPVRKSSDSSRDRQNEGQSSELRPSQLLCTEWTPLGSQEDDSSLVRCRNMKDHPLGTGRPLGPWLLLPTWL

SEQ ID NO: 925423 - protein, 164 aa, Homo sapiens
MQYSLLIAVQTSLLLGQLDAIILNRTPHLTSNSGTGPKALGVTSYSGCLRAWLIIPHSMAYTGSLFLVFQRALLPAFADENHSFLEQISYFCSLQEKPQIHKLTQCLLTGGIGVRRWPGLHLPALPWNLLQSPAPGPGVCVHFQDEGSWLWQDAHTTNFRSNKN

SEQ ID NO: 925424 - protein, 118 aa, Homo sapiens
MALWTQQEPDRHSPCSPKVYGLQGKAGRCSINCNTNSCAIATMMSITRKCRGHVTEYNKGWRWQRLRCEHTFDMQTNQSRAHTQTLTTCPSHPRAKCQTTREIPYTLEPAKITHTCQS

SEQ ID NO: 925425 - protein, 138 aa, Homo sapiens
MISSSPPEDVIQALEEKKPTPKESGNSQELARGPQERTPCGPALREGEAAAVEGPCPSQESLSQEENPEPTEDERSEEKGGVEVLESCQGSSNGAQDQEASEQFGSPVAERGKRLPGVAGQYLFKCLINVKKEFSTSR

SEQ ID NO: 925426 - protein, 143 aa, Homo sapiens
MRGAQPDVQVRWHVRDVVRHSYSHGSMDGSWIPGIAGGVPDTHLTSSTSALSDGLLALLLPISAHSATFPFDGDRSGGGQGRMETPYTFLLKAAGDSGSSSVAPEALQVPCHMAAVLLAALTGPAGATAFLSPPPKLGDGFPP

SEQ ID NO: 925427 - protein, 148 aa, Homo sapiens
MTMSSSVRGLPWPRISPAYVASSLELTLTASGTTWPRHKRNLIVKKPQTNPNRGTFFKITSQTLKNVKFMKDDENTEEAFQIKGRSDNRARPAIQDFLLLLRTPLGQNPMTFQNYKSDLKYSRWTIVCFTVHLLKDIWVSSFYYNEYK

SEQ ID NO: 925428 - protein, 145 aa, Homo sapiens
MFGHFLPPCERLEGAEFGYFSSYKLDGKDDFKDLWRQQICCLFGHQISLSLLNEIFTGYKILSWQDFPPKNFEDVVFWHLLLLNKGCTGSTMLASAWLLERPQETDNHGKRRSGSWRTSHGRSKSKRERGEMPHTFKQQHLHQLK

SEQ ID NO: 925429 - protein, 150 aa, Homo sapiens
MGRNQSRKAENSKNQSTSSPPKDCSSSPATEQSWTENDFDKLTEVGFRRSVITNFSELKEHVRTHLKEAKSLEKRLDEWLTRINSVEKTINDLMELKTMARELHDACTSFNSRFDQVEEKKSNPKTHNCQIHQGGNQGKNVKDSQRERSS

SEQ ID NO: 925430 - protein, 804 aa, Homo sapiens
MCHASGHCWPSVAAGAFGPRLYSFSDALFLYKSNEALGPFASKDAEANPVEVCTWWRSVPCGGVYPVDVCTLWRYGSYEGVYHVEVCTLWRCVPCGGVYPVEVWILWRCVSCGGVYPVEVCILWRCVPCGGMDPVEVCTQWRHVPCGGVYPMEVCTLWRCVPCGGMDPVEVCTLWRYGSCGGVYPVEVCTLWRCVSCGGVYPVEVWILWRCVPSAGMYPVEVCTLWRSVPCGGVYPVEVWILWRCVPCGGLYPVEVCTLWRYGSCGGVYPVEVWILWRCVPCAGMYPVEVCTLWRCVPCGVEYPMEVCTLWRCVPCGGVYPVEVWILWRCVPYGTMDPVEVSALWRCVPCTLWRCVPVEVCILWRHVPCGGVYPVEVCPCGGMDPVEVCTQWRCVPCGGVYPVEVCTLWRCGSCGGVYPVEMCTLLRYGSCGGVYPVEVCTLWRCGSCGGMDPAEVCTLWRYGSCGGVYPVEVCPCGGMDPVEVCTQWSCVPCGGVYPVEVCILWRCVPCGDVYPFEVWILWRCVPCGSVYPVEVWILWRYVFCGGVYPVMVWILWRCVPSGGVYPVEVWILRRCVPYGGMDPVEVCTLWRCVSCGGVYPVEVCTLWRYGSCGGVYSVEVCTLWRCGSCGEVCTLWRYGFCGDVYPLEMCTLWSYGSCGGVYPVEVCTLWRYGSCGDVYPVDVRILWRCVPCGDVYPVEVWILWRCVSCGVMDPVELYTLWKYGSSGGVYTCGSMFTYGSMYPVEVCSPVEVCSPVEVYTPLEMCTPVEGVPCGDVYTYEGVYSVEVCTLWSLRDQPYWVLPTP

SEQ ID NO: 925431 - protein, 148 aa, Homo sapiens
MREERAASPLSPAWEEPAGVSGGPGPLPACTTRGQQSVVAAASAGEGAGAVEGHLGVAGSMPVHFLIKFKAQESEDRGSSGWIVGSCRLWGTVPWAAVFFFCQAAVDTEPRSLALRPALSAATCSRRAHTAEKQRQPSGRAASSLLDI

SEQ ID NO: 925432 - protein, 134 aa, Homo sapiens
MGSSRTTLSQGWCVLVGLRGAPAAGLGLSSIGCAVDLLSLELESCSGVIPGKLKIGFPVLEWRQEDGSHEQGTLWLEGNKDGRQCQGEEKTQELSIFRNSSSVAAPDLVITRNGSPMNEVGFLSPFLPPHISSR

SEQ ID NO: 925433 - protein, 137 aa, Homo sapiens
MPGRRLASWWRGRAPGDPKSAEEETGGSREMEDPGARAGSAHAWEETLASSASPRQPAPAMASGAGGSWGRSPPQSAVPTPLSWAVPPAPPQPGRVKEDLLELMMLQNAQMHQLLLSRLVAGALQPRPASPCPQGLS

SEQ ID NO: 925434 - protein, 472 aa, Homo sapiens
MAPGSRTSLLLAFALLCLPWLQEAGAVQTVPLSRLFDHAMLQAHRAHQLAIDTYQEFEETYIPKDQKYSFLHDSQTSFCFSDSIPTPSNMEETQQKSNLELLRISLLLIESWLEPVRFLRSMFANNLVYDTSDSDDYHLLKDLEEGIQTLMGRLEDGSRRTGQILKQTYSKFDTNSHNHDALLKNYGLLYCFRKDMDKVETFLRMVQCRSVEGSWTWGSPPPPHPHPPPPPPPSPRPAPAPAPRLRVLWTAHLAAMAAGSRTSLLLAFGLLCLSWLQEGSAFPTIPLSRLFDNAMLRARRLYQLAYDTYQEFEEAYILKEQKYSFLQNPQTSLCFSESIPTPSNRVKTQQKSNLELLRISLLLIQSWLEPVQLLRSVFANSLVYGASDSNVYRHLKDLEEGIQTLMWRLEDGSPRTGQIFNQSYSKFDTKSHNDDALLKNYGLLYCFRKDMDKVETFLRIVQCRSVEGSCGF

SEQ ID NO: 925435 - protein, 163 aa, Homo sapiens
MPGLGAEAVPASAVVVSVRLILLVTAQEGQLVLVAEGILRAAAGRRGHLIGLVEVRVVDLVQVLLLKEHGLKAVTPQDLIGQIGAAGLGGHGCGLHHAFQDDHDLKVVRLQVLPADAEERAGLVNLVQDGDGRHQKDAVQAVNLLCTHPLLNPKQPQICFLSL

SEQ ID NO: 925436 - protein, 182 aa, Homo sapiens
MGEALPFLCILFYFLEEWFVVLLEEVLHVPFLLAGRPGADKISIWLSSGPSAAGLLEFARGPLQTLFAWVSAAEAAEQQILVNSKCCCLIVPLEVLSQRSTQLWKALQKPTEVTVPYEKMLQDQSALIVQGLPEGVAFKHPENYYLATLKWILENTAGISFIIKRHFPGSGSCDSKGRIRRS

SEQ ID NO: 925437 - protein, 117 aa, Homo sapiens
MCDYACSGGKLQPSAPISTSYWSHLKAEGKFIISVRLRYLGGVGWARRGVRGDSLKDAKIQPGNKLAPGTSGSAESWSIGPFVTGSFPSTANAFKVHLHGTRAKFMLLSYLTLCSYF

SEQ ID NO: 925438 - protein, 131 aa, Homo sapiens
MQILAHGQCDLRQVTLPASVSLRALICKMEIIHLVPELSIHRLIESSKLPWKTGIFSKLHFAVEKSDVKAVLMAAKQPCRNPAQICLDLEPGLCPVTGLSTNTNIHSLGKGSPLGPQDEDNNAYFDSCCED

SEQ ID NO: 925439 - protein, 163 aa, Homo sapiens
MKRTHFFDVATDTEEKVVLGAEPAPAVCISLPALHFQRQPLIKAGPRMCGHSKTEQRFGGLLGQTIGNAGAMSTPERGQKNNNMNIHDFQICVQKRKMKEWLLEGGGQMLHVDVIAGNDPCDPTLGPGAFHTAEPVQLLGGMRTEAQNPNYRCSLSYYGITSQ

SEQ ID NO: 925440 - protein, 137 aa, Homo sapiens [sequence omitted]

SEQ ID NO: 925441 - protein, 139 aa, Homo sapiens
MPWIGLGPRVLLDLVYHSFLELLLVLCFYPHGFWGFRQFLACGSIIPSFICLHMAFSLVAVASPLPVKTPVIGFTVHSKSAMWLHLREGVGQPGEDVSQQQCYPAGQLVIFTIKQDSNKDRMRNPVVKTQYIILTPGSP

SEQ ID NO: 925442 - protein, 209 aa, Homo sapiens
MRCTDWPSHQSLLVSALIVQTLCSAQPSSLSPAHLAGHLGQLVNPWAQLLLWCKQGGAQGYFAPQMMPSRGRKGGCLEPGSLQKAWRRSPGYPELSCTSLSTTDCPLGSAPSAGAQLPARGVASGVGISQPLTPRRHVLDTVWVESRACLLICLARGTGFGLLVTFSKNGRVSSFCLPCLKASLAPGTRVLFLHDPISTIILMYLFLPV

SEQ ID NO: 925443 - protein, 149 aa, Homo sapiens
MQSLLHKQLVGLHDFPAVRFWEVAILRSCCLLCGRRRRKGRRPGKEQRESDAAYEITGPIQDHPVILDSFGRFLLGVRGSVSVTLQAPALEALTLQWRNLRKILERQLASLFAMTVHLLPSHVDLLPQLLPLAPMVLATDGLRKPSCGV

SEQ ID NO: 925444 - protein, 211 aa, Homo sapiens
MPSTKGRLRALHFVFVNTITIITIVFLISTLITTITIVTIITSITTTITNITIITTITTNITIIITLITIITTITALTPIITSIIIDEGTCATLEDLFFIKSLLLNKYLLLYIIAVTIITIIIINIITTIITITTTIIIVITMNTTIIITTSISIIIIIITIIFITTIIVITIVTIIVIITTIIPTTAIFIIILMVLDISLQLSGPQFPYL

SEQ ID NO: 925445 - protein, 278 aa, Homo sapiens
MGEDFAQFCFPQGMETEQGLSNTECPRGSSTRFSAAIAPSIPDRASSSRGLMEEPPDPALLSWKKQAPLVQHCLTLFPIIDPGAWGVDIKMDTVLTLRGTCFGGDSPCAQSHGTVWVCMPLAPLKMANGNTKLRCDDSACDKWGRRGHRSTERQSLLKVTQLATHSLVCSSSSRLREPLPRMQLSQSGLELPKPPRGPTPPGPEVQRENGAGAGSHSNHWGESRSLPASFMPLACAADNGGMKPWLCGELADISASSLSKRLYQGSLAEFPLPGDPAK

SEQ ID NO: 925446 - protein, 117 aa, Homo sapiens
MCGGAVSGPAERGTGILKGTRGSLEAPKMIANSAGAQALKTPGAGRNWSPINGENTTKGIIKEIIQGSFLALKNMNLQIKGPTKWSKQGVFVRSCTTNCSQGDPEWARLDPHTGETS

SEQ ID NO: 925447 - protein, 181 aa, Homo sapiens
MVEPSPPCPKFCLFFNPSSKSQPTPARPHFLGSAQSGSLPVPAGNCLELKSELAQQVMGSTRHKGPGSCMCLHGNGQPAQNLCALTGFLYSKESGSVRVKPSPNLPGFARAFYLLILMANRCLWREMSASRGLPLLLVNYVALVKSHNSLEPWFSHLSRGGLMFTLQIPQEFCEGWMMQYS

SEQ ID NO: 925448 - protein, 156 aa, Homo sapiens
MEVNANVAQHLLSADIRLARGGCHSNSHQFSLAGETQVYNSIMFLMVTAKKDSVRVKADGHSLNCLPSELLAALPPLAKGFQGDPKVVFISGSPERNTNKEESTVPQVRVQGPPLVTKNHSQGKGKGHKPWRRIFGSVHPTFCSSHTNTTHNLQTS

SEQ ID NO: 925449 - protein, 151 aa, Homo sapiens
MKAAGSETVPCKATGVETPKTMGTYLLHQCDLDVNTPEHGSRFCGSIKGSITLNIRQVQKKPLLIYQCLDSSFFASVFWTSLAQFIWHWEPDLVFSPAFKGTPGLRQPLVLLMEGAKLIPTLYKIHSRVYYLQTLDREGATSQMERAVLHP

SEQ ID NO: 925450 - protein, 139 aa, Homo sapiens
MFIHISPTFPGLVSAVTIFFYFRQELLVNGGSTTATTFTQLCRGNQRLSLANSVENNILKLLQEENQCLIHTFYSQPNQTFSYIYEELEETQQPFTVLFTKLTHGFHGAYMMHVCLIKSQYCAKYSLAYFYFHMHYVNK

SEQ ID NO: 925451 - protein, 139 aa, Homo sapiens
MNTNKETTDTAMYLRVEGRRRKRSRKDKYQKSVHDVAKSAEAELTRQVSPLAGFSIRALRVDESSQGTVFVWNGGGNTAVIAKISEDSGPAPGSVPYDQEEMSQHASFTRGGEGNGKKHSTFPRDLHRGLTFFLPILEL

SEQ ID NO: 925452 - protein, 242 aa, Homo sapiens
MKAWENFQAPQLQVCWSLLVVHSRPYLPGYHQQRLQNSKYCCLILPLEASSQRGSHQMPARALQYEVSVSPYWEVSPSPATRGAVRQGRLSLLKLCSQLSLPPGALSQGDGGFIYKSLTGAAVFCSQMPCPQRCNLERQSALLSCDCSTSSENFKPMDLSLLGSLGEGPTEPSTRGNLLVCQLQRPWEKHSIWAGVYLSSWYSVSQLPLARKGKSPNPLCFPDSSISYSFGILGSDYLTNST

SEQ ID NO: 925453 - protein, 185 aa, Homo sapiens
MALDSEGQEIPSSHFCLSIGSCAVPGREQHEAREEPTTNSWSTQVTAQEAPVDLATAQGPEMTRMVSPTLCVLDDSGGSSRMVLPKSLESWSHEGGVVLKRLQFRPIWEVRSASARPPHLGCEERLCPATTPSGKWGAPLPGHPIWDVRSTSARPPFVWEVRSASARPPHLGSEERLCPAAPSGK

SEQ ID NO: 925454 - protein, 245 aa, Homo sapiens
MSALRVVPDSKSGGWPSVTEGSGKEPGKYPRPDNGGFRGAWMAGHSPLCEAELTAKLEHTQHHLQTPSIPGTQRAVAPNPPPGRQALWLVPTQPAECLSALGVDPPLHTPNLGGLRTAVLPTHSTTVLPGQPPVMVGSRHSSVSPPHRQLLQEPQLSGPPLPMARLCCLCLRPILMTEPPGSPSIAAPQRCSGSDSGPLAPPGHRRLSPAFCLPDCAVLWALNSPSLREPFISLGEGPLGQGNPV

SEQ ID NO: 925455 - protein, 232 aa, Homo sapiens
MRRTPPSTPATERLPRAAWGLGGVLGSDTGDIQAASAEGALDLQQQGMNGECSPQRGTTSLSVAPAKSSGVISTPPFDPQRQSVEASCYVVRTLEQSYGEAHVLSGSQPARNGVGFGAATQFSDGDPRLKERVVMFPRLPSDSGRVAIRTQVILTPSQELSLQRLSHRRSLVLISKVAGEPGEGRGVLAHLRPGCQSVTPCLHGSEEAPAHVGERVLCVKNGPRQPERERLH

SEQ ID NO: 925456 - protein, 146 aa, Homo sapiens
MPNGQLLVQSPHCTDKEIEAQRGIVTLPRMINEHWSQLQVTSCTVPIQRVSLSFEALNLDIDFSSTTMEVLDGIFFRKKAVSSTLEIYLGPVLPSCVHWSSTFNFLQELFLYTYNLAVWHKRPSFWPGLALTCCPRYTPLFLAFDL

SEQ ID NO: 925457 - protein, 238 aa, Homo sapiens
MRTALALIPGSSCPELWPLGSLFIVFWPVAKGSGQQSNLPSSLEGDGISSKAVCYTSILEKIVWYKSCQCLCSEGLQNCGRPTENVWQISKGEDIEGCNICIDLPGFPSDHHPPQYPSSPKSFFLEVIMFYRVADRNTTPCNKKSVWSFRERWPALVGAMGEHHGFCKVKLNFCLGVHVVQGKLTALPAMMGAHDWSTLINGFHAAGHSSGDFDWDGIESIDQVRKNAHLDNIESFYP

SEQ ID NO: 925458 - protein, 183 aa, Homo sapiens
MDPGSVSASSALVYTRSFFLSWRMIGRLTSFAGHFYRKGESIKEGLPQPICTQEMNPLANPDIEAKTEFFIPAAAGSPGPAHLQQDIPFLPLPWAHSFSRTPISLSEKAKAFTMDFETLWDLALSHLSDPCYCHCPLPYPAPATPASPTQGLDVKFSFNLVHSSPSEVTHEATEGTVNINQQN

SEQ ID NO: 925459 - protein, 244 aa, Homo sapiens
MKNVYFEANCGHVQHFGSPPKTVGLYRTRDVAQGGALLFGRSHDHLLVLLLGLAAGTCWQDPNCSPTPSWFLASACMSSAHKMLGSTLGYGSFQKLNSRSNWCLLDNSIQLHSFRTSRCSAWSCSLQHVFHLPMREQGSPHPSAVWTVLPPSVPTIGIRALRLLTVKLDLVEVAGLLLGQQGRVGILPGIHFVNKEGAEPVAFVVLGIEMQHSRSCNIPSTGLGLPVATVTLQRCCTATKPWVR

SEQ ID NO: 925460 - protein, 147 aa, Homo sapiens
MTPGSLPPDICQRWHQGVSLGAIDQHWARGLQPAGPVPHTPRTNLLTKELADAADFYQRVSGGPPEGLDAGSQNGGISMMEDGDFWRSDIKRHLLDTHTDQVEGLIELQILPFYNPEEFKHSPVTIPANFIPNPASFADLQILCKGE

SEQ ID NO: 925461 - protein, 215 aa, Homo sapiens
MPLFRLLGLHVDDCVCVLRQLHTRSGIHKRFCGLKGFLPERHNPGQLIHQNQLIDRVYKGIPMNIRGPVWSVLLNIQEIKLKNPGRYQIMKERGKRSSEHIHHIDLDVRTTLRNHVFFRDRYGAKQRELFYILLAYSEYNPREVLAKVGWAGHCDTEPIPHMTQMKVESVGLYEETNKEARGPVPPPGFLEIPGVEVNALAPNGPGYRGPLVPPL

SEQ ID NO: 925462 - protein, 147 aa, Homo sapiens
MEGGINFKVTQRTPVRTGLNVGFPLGSLGSWEPSPRLPPQPRRNEVSPQAATAPRSLTPLRAPRCWAARTEPAAVVPVSLATGIGHFRYHGRHSSQIKARVAHPLERTGGQRTDAPLPFPACFSPVLALAQVPRRRRLPSRLPGTAK

SEQ ID NO: 925463 - protein, 217 aa, Homo sapiens
MHIREGGRWLEGSDRADSGSPFQEPRYPSSGPFPIPQASFPCPCLLVLGIHGHSTLLQYRGQEHHVLFTGRCLLVDPTLLVLVVSKKSPNALEASQPGIRERRTSAAGGWARGLRAARHARISCHPAGLSAGDQWGRTLRAEEPRPPTAPGGLWGVRGGSRVRVRGGVGVAVGGKSMGLYFCLSACWDLQFVRTFHISRIFTESLPRPRLFWTPNQA

SEQ ID NO: 925464 - protein, 1193 aa, Homo sapiens
MAAGSGGSGGSGGGPGPGPGGGGGPSGSGSGPGSNGGLGSGGELHPRTGRLVSLSACGRTARRQQPGQEFNHGLVLSREPLRDGRVFTVRIDRKVNSWSGSIEIGVTALDPSVLDFPSSATGLKGGSWVVSGCSVLRDGRSVLEEYGQDLDQLGEGDRVGVERTVAGELRLWVNGRDCGVAATGLPPRVWAVVDLYGKCTQITVLPPEPGFSPPTPIPTPPLEPLAPTEDSALAEQGTSADEAFMVSPAQARPETFPNSLESHNDFANMELSEVVSNTILSAYNGGLLNVNLSSPPAGEGLGSSGAATSPILTSNDALLFHEKCGTLIKLSNNNKTAERRRPLDEFNNGVVMTNRPLRDNEMFEIRIDKLVDKWSGSIEIGVTTHNPNSLEYPATMTNLQSGTSPGQGRGCRPGVAEGKEAPYPNPSVHYHPGTIMMSGCGILTNGKGTRREYCEFSLDELQEGDHIGLTRKSNSALHFFINGIDQGVATPLTPPVVYGVVDLYGMAVKVTIVHNNNHSDRLRRNNAILRALSPEGALRRAAPAAQAEPERLLFHPNCGQKAAITHEGRTALRPHATDDFNHGVVLSSRALRDGEVFQVRIDKMVDKWAGSIEIGVTTHNPAYLQLPSTMTNLRSGTWMMTGNGVMHNGTTILDEYGHNLDRLKAGDTVGVVRREDGTLHFFVNGMTQGPAAWNVPPGVYAVVDLYGQAAQATIVDDVGAGGSDLRFHQLHGSNAVITNGGRTALRHNCRSEFNDAIVISNRALRDGELFEIVIQKMVDRWSGSIEAGVTAIRPEDLEFPNTMTDIDYDTWMLSGTAIMQDGNTMRNNYGCDLDALGTGARIGMMRTAKGDLHYFINGQDQGAACSGLPPEVYAVVDLYGQCVQVSITNATGPMDNSLATSNTATEKSFPLHSPVAGVAHRFHSTCGKNVTLEEDGTRAVRAAGYAHGLVFSTKELRAEEVFEVKVEELDEKWAGSLRLGLTTLAPGEMGPGAGGGGPGLPPSLPELRTKTTWMVSSCEVRRDGQLQRMNYGRNLERLGVGSRVGVRRGADDTMHILVDGEDMGPAATGIAKNVWAVLDLYGPVRGVSIVSSTRLEESEGTQPPSPSSDTGSEGEEDDEGEEHGLGGQNEVGIIPTTLEFLENHGKNILLSNGNRTATRVASYNQGIVVINQPLVPQLLVQKKVPFCYKLKDM

SEQ ID NO: 925465 - protein, 136 aa, Homo sapiens
MLLSPQAYEGRGQCTASPKPRLPSLEEADGLIFRCSPYPPIMPMPGEAISDREENKRQLVGHDTYNLSGKTMTFWTQKIHFFSYTTSTASFSTVQVLNFWYLGFGIKFKHSIHGTMHITPLSEGRKHLYDNAGPMI

SEQ ID NO: 925466 - protein, 145 aa, Homo sapiens
MDASLSLRLQHATSLPTRKQPSAFVGSDTLPGATLPSPPHMDVLLHSGSEATAGYFLNIQGHEKPFLYIIPCGPHRHPKALLRPLLWWNFRMKRRLTQRFQKLGQRGAHTTTCLLSSSHFLQWSHHKVPASRATAGNPGPQGLMA

SEQ ID NO: 925467 - protein, 154 aa, Homo sapiens
MGASENWLFLDMPRGLFPRTSLELDEECHGRCNAPSPHLPAEENELFPGPVRIFVIIFLVILSVFCICGLAKCFCRNCREPEPDSPVDCRGPLELPSIIPPERVRVSLSAPPPPYSEVILKPSLGPTPTEPPPPYSFRPEEYTGDQRGIDNPAF

SEQ ID NO: 925468 - protein, 142 aa, Homo sapiens
MPSSGNFKIPFTGPKGFLWSVFTENAYIAKCGRGLGSNFNAAGDSDPATSHVLPHKGPSTAVDSGTMQHSRPLLMPKPSLPQYSWDPLGPTDLFPWVILVPCASASTAHLALSSYCPLCRNLSQPPTAPPSSSLALAQTLPQ

SEQ ID NO: 925469 - protein, 149 aa, Homo sapiens
MNTRTLYVRKRACDLPRFIPKMPLRTKVTIQLLEHFRNKLEEGTGLPAETTDRFSRRTFKGLFGLNCSQALDSLLSDTVEEIGWLSKELHKGFIEDLTKAKKLQHLSDLWAYTIDTSDPDDKRQFGFCRVSGTAGTFFFFSSTPSMVLA

SEQ ID NO: 925470 - protein, 138 aa, Homo sapiens
MKSGELGQLKLEFSLAPPPTLSYFPNSFLSETSPSALSNLLGEKKWLSSVQQMMNRRKALAGPRLARGTQGPQFKESVLRTWERVNASLSQYPQCFTCCAVESSTWETFQEGTKRGGEGGETWAMNLKQIRALEEEMR

SEQ ID NO: 925471 - protein, 181 aa, Homo sapiens
MRTGARGIFTAYYAIEVTKEPEHMAALAKNSDWVDQFRVKFLGSVQVPYHKGDVVLSAAMQKIATTRRLTVHFNPPSSCVLEISVRGVKIGIKADDSQEAKGNKCSHFFQLKNISFRGYHPKNNKYFGFITKHLADHRFACHVFVSEDSTKALAESVGRAFQQFHKQFVEYTCPTENIYLE

SEQ ID NO: 925472 - protein, 360 aa, Homo sapiens
MTQNKVLYLGKVKALAPTDEACSEIVGSMLSPIRDPIEIQTPCQRVPKKCILCQGYSRKVWEQLKGRHCYPPPGPQCRAVFCMWRQFGLMVKEGQAHSNCSVNGIIGGVLWMSACDWLNDQRGLKILVMESVVQINCYTDPECGKPWSLKLFSLHILEQTRQFLPGIASVCPSVSSHTLTSDKMILDLIISPSDPYGNNNELFPVSIPKFISNPGYAFPLTCGSAVLPSASQFPSCPRFLCRTHLPTGCTSCEGKDWQTVGSFHFRNGPSTSLGEEFSSPDPDLVSWHPLGKWVLEDKPGIQKYMFVDLFIHVANHFLSAYHGPVSDPTSKAAFTQGSSHTMLVRVKVWTNCQEAACQYA

SEQ ID NO: 925473 - protein, 163 aa, Homo sapiens
MGRCPGKWQTCSKQHAAFPSDAQGHLGGGRDAWGFSSTPQHLRGQPKLSLQVTSQTPGNHNTYDDDDDDDDDDDDTYLKDCPEGSQRCLQGTCMEQAPLLWQVLGEHYLLPGPGAMALRDPASPTWRSCRSCAQSVLVVRLRRVTSFCSPGTSFWVLFSAYVK

SEQ ID NO: 925474 - protein, 116 aa, Homo sapiens
MEWSPPGHTVTLMKRQKCHCFVKNGLEAKENILITFEKADTLWHQGLTSNECITEKIRHLCKCVCFHESADLQRILRSITNCFSNKIGLVEGVAAVDTNCFSDAVQVGMKCESCQH

SEQ ID NO: 925475 - protein, 144 aa, Homo sapiens
MTLSRRVTQKVLRNVFALTGRQAVDFLGFGVGLGQGEALWTQEPLSSAQPAGFLSLSAKQKAHPSLCVTTASFPPPTIGFPCQGKSHNLEAVVILNTVAYSGREGKHLFQKLPSLFQKAGSWKEGFSCQGPEQLLTEKGAGYTD

SEQ ID NO: 925476 - protein, 157 aa, Homo sapiens
MRYKRTKAALTIIRYYRRYKVKSYIHEVARRFHGVKTMRDYGKHVKWPSPPKVLRRFEEALQTIFNRWRASQLIKSIPASDLPQVRAKVAAVEMLKGQRADLGLQRAWEGNYLASKPDTPQTSGTFVPVANELKRKDKYMNVLFSCHVRKKTFLVGV

SEQ ID NO: 925477 - protein, 137 aa, Homo sapiens
MAPFLVAKSTVQMALKEDSGKQRGLLTGNDSGINRECWHGVAHILATEVPILNTAARVILLRPKPDHVTSLLKLCSGYFPEQKSQSPSYSVHGPMWSDTVSSPPHLPLSSPLLAPAILASLLDPTQARHPLVSGLLC

SEQ ID NO: 925478 - protein, 154 aa, Homo sapiens
MTVPPSWQELSQPDDCLGKLRFNEVKYLVQGKNKNLGGGGAGLVVSWTLEELVLTRQRGPFQGPSSTSEHQARSLYPNKRRNLLRKELVKPLRLLLCSGLAPSLKVPENGTVLILGDGFHAQVGFSSINDAAEFRVVADAMKVIGFNLRRSNSG

SEQ ID NO: 925479 - protein, 140 aa, Homo sapiens
MQITEGKRNKMCACTNDQRWNGYSVHSQQEGELIAGQKNCLLGFAVKRNRHGAAAEEFDGVCVLHTDDLERPLHTKGNDARGKEEWTTTEVNKQSRLGHDCGKPDRCFPVSNRQTNPLGILFECRLLFSSSGIDPEILCF

SEQ ID NO: 925480 - protein, 138 aa, Homo sapiens
MILIRQLPEPLRSDLSAVLELSTGPAGGLGSSCKGARGFEWDLNPAHVGESKKLFSPEDAGPRSILESDAHVLSSVPLLAAGCVASLEVLTCLRGLHIASLFFPASCLSPFFAGPIHPPTPILPHSPPCLLPLFPVLI

SEQ ID NO: 925481 - protein, 972 aa, Homo sapiens
MSVDYQASFVGHPPGSAYPKLNFVEDSKVVLGDSKEGAFAYVHHLTLYDLEARGFVRPFCMAYISADQHKIMQQFQELSAEFSRASECLKTGNRKAFAGELEKKLKDLDYTRTVLHTETEIQKKANDKGFYSSQAIEKANELASVEKSIIEHQDLLKQIRSYPHRKLKGHDLCPGEMEHIQDQASQASTTSNPDESADTDLYTCRPAYTPKLIKAKSTKCFDKKLKTLEELCDTEYFTQTLAQLSHIEHMFRGDLCYLLTSQIDRALLKQQHITNFLFEDFVEVDDRMVEKQESIPSKPSQDRPPSSSLEECPIPKVLISVGSYKSSVESVLIKMEQELGDEEYKEVEVTELSSFDPQENLDYLDMDMKGSISSGESIEVLGTEKSTSVLSKSDSQASLTVPLSPQVVRSKAVSHRTISEDSIEVLSTCPSEALIPDDFKASYPSAINEEESYPDGNEGAIRFQASISPPELGETEEGSIENTPSQIDSSCCIGKESDGQLVLPSTPAHTHSDEDGVVSSPPQRHRQKDQGFRVDFSVENANPSSRDNSCEGFPAYELDPSHLLASRDISKTSLDNYSDTTSYVSSVASTSSDRIPSAYPAGLSSDRHKKRAGQNALKFIRQYPFAHPAIYSLLSGRTLVVLGEDEAIVRKLVTALAIFVPSYGCYAKPVKHWASSPLHIMDFQKWKLIGLQRVASPAGAGTLHALSRYSRYTSILDLDNKTLRCPLYRGTLVPRLADHRTQIKRGSTYYLHVQSMLTQLCSKAFLYTFCHHLHLPTHDKETEELVASRQMSFLKLTLGLVNEDVRVVQYLAELLKLHYMQESPGTSHPMLSIAGHLSGKMNEGDSQVTVVVWWKTGGQNTHRLLQTQMQPFICFLEPTVLGEALDQPVGSVSSTLSAVLATFTWERSACERALGLTPHTLSPGTSRVFTSPSVKRAQVTKANERMSTDLPRGEGLQTRVNMAEATLQLPPT

SEQ ID NO: 925482 - protein, 470 aa, Homo sapiens
MTMPVNGAHKDADLWSSHDKMLAQPLKDSDVEVYNIIKKESNRQRVGLELIASENFASRAVLEALGSCLNNKYSEGYPGQRYYGGTEFIDELETLCQKRALQAYKLDPQCWGVNVQPYSGSPANFAVYTALVEPHGRIMGLDLPDGGHLTHGFMTDKKKISATSIFFESMPYKVNPDTGYINYDQLEENARLFHPKLIIAGTSCYSRNLEYARLRKIADENGAYLMADMAHISGLVAAGVVPSPFEHCHVVTTTTHKTLRGCRAGMIFYRKGVKSVDPKTGKEILYNLESLINSAVFPGLQGGPHNHAIAGVAVALKQAMTLEFKVYQHQVVANCRALSEALTELGYKIVTGGSDNHLILVDLRSKGTDGGRAEKVLEACSIACNKNTCPGDRSALRPSGLRLGTPALTSRGLLEKDFQKVAHFIHRELTLQIQSDTGVRATLKEFKERLAGDKYQAAVQALREELKCKT

SEQ ID NO: 925483 - protein, 202 aa, Homo sapiens [sequence omitted]

SEQ ID NO: 925484 - protein, 202 aa, Homo sapiens
MERGAGAKLLPLLLLLRATGFTCAQTDGRNGYTAVIEVTSGGPWGDWAWPEMCPDGFFASGFSLKVEPPQGIPGDDTALNGIRLHCARGNVLGNTHVVESQSGSWGEWSEPLWCRGGAYLVAFSLRVEAPTTLGDNTAANNVRFRCSDGEELQGPGLSWGDFGDWSDHCPKGACGLQTKIQGPRGLGDDTALNDARLFCCRS

SEQ ID NO: 925485 - protein, 181 aa, Homo sapiens
MLKGNAHWRILDSIFQCFIIDKAPLHACSHQRASFPDIEPCPGLSQGERVPAHWAKPTHHPTKPEAWRPASTAEQGLRVMLQSCLWSTQPRLSEFPAGGSLGTSGCRLSSVPGTETPALSRLWGWLMAGTTVLTGLVCFRNLANCERLIEVEDMMVMGRKPDPMCVFTYVQSLYNHLRRFE

SEQ ID NO: 925486 - protein, 385 aa, Homo sapiens
MGPSPGAWGTLLPAHERTKLQCAHPPGETPLALAACTNQPEIVQLLMEHEQTDITSRDSRGNNILHALVTVAEDFKTQNDFVKRMYDMILLRSGNWELETTRNNDGLTPLQLAAKMGKAEILKYILSREIKEKRLRSLSRKFTDWAYGPVSSSLYDLTNVDTTTDNSVLEITVYNTNIDNRHEMLTLEPLHTLLHMKWKKFAKHMFFLSFCFYFFYNITLTLVSYYRPREEEAIPHPLALTHKMGWLQLLGRMFVLIWAMCISVKEGIAIFLLRPSDLQSILSDAWFHFVFFIQAVLVILSVFLYLFAYKEYLACLVLAMALGWANMLYYTRGFQSMGMYSVMIQKGEENLGLEQKQKASWRRQDPVLSLGASGGFGWGKGEWPK

SEQ ID NO: 925487 - protein, 487 aa, Homo sapiens
MADYLISGGTRYQPEDGLTAQQLFASADDLTYNDFLILPGFIDFLAGEVDLTSALTRKITLKTPLISFPTDTVIEADMAIAMALMGGIGFIHHNCTPEFQANKVQKVKKFEQGFITDPVVLSPLHTVGDVLEAKMRHGFSGIPITETGTIGSKLVGILTSRDIDFLAEKDHTPSSVSKKGKLPVVNDHDELVAIIARTDLKKNRDYPLASKDSHKQLLCGAVVGTCEDDKFRLGLLTQAGVDVIVLDSSQGNSVYQIAMVRYIKQKYPHLQVIGRNVVTAAQAKNLIDAGVDGLHVGMGCGSICITLEMMACGRTHGTAVYKVAEYAWRFGVPIIADGGIQTVGHVVKALALGASTVMMGSLLATTTEASGEYFFSDGVPLKKYQGMGSVDAMEKSSSSQKRYFSEADKVKFSQGILGSIQDKGSIQKFVPYLIAGIQHSCQDIGARSLAVLRSMMYSGELKFEKGTVSAQIEGGVHGLHSYERWLY

SEQ ID NO: 925488 - protein, 147 aa, Homo sapiens
MSVGPGAEAWGRWTFDCTDETRIQKGLSNDVGNVELCLPCSSHNTEQSSDPRWVGFSLHTGQAVLRQPAPAEGPHVQLNSDMLHLEVASALTGRGLSPTRLLLTSEAHHQPPWESMHKKSPMTTQKKMGEKSLLWIEINDRDITAYT

SEQ ID NO: 925489 - protein, 637 aa, Homo sapiens
MIPTAYCICIQVLVRRPHSLSSELTGTCSLLGPDLRPQAQANFFDLDARVDTGDCYSNKEGGGEDDVNTARQRRATGRRRRRKTRRRRKDEEEEEAGTEIAIILDGSGSIDPPDFQRAKDFISNMMRNFYEKCFECNFALVQYGGVIQTEFDLRDSQDVMASLARVQNITQVGSVTKNCLSHATRLVSVGAAGIILAMPRVSVASLMEEVAGQNRRRRELGLQPFPGRERTDSIFTSSHGSRRKASKVMVVLTDGGIFEDPLNLTTVINSPKMQGVERFAIGVGEEFKSARTARELNLIASDPDETHAFKVTNYMALDGLLSKLRYNIISMEGTVGDALHYQLAQIGFSAQILDEVLLGAVGAFDWSGGALLYDTRSRRGRFLNQTAAAAADAEAAQYSYLGHFEGLTGKVPGPRERPGGSTRCVHSHTTLAPGYAVAVLHKTCSLSYVAGAPQYKHHGAVFELQKEGKRGQLPASAGGRAVSKLICNDPNWMGSYFGSELCPVDIDMDGSTDFLLVAAPFYHVHGEEGRVYVYRLSEQDKLTDVAIGAPLEGFGADDGASFGSVYIYNGHWDGLSASPSQRIRASTVAPGLQYFGMSMAGGFDISGERPCRHHRGHSGPGGCVPHLPELLLTVIPK

SEQ ID NO: 925490 - protein, 135 aa, Homo sapiens
MANGIRASGSTGDDDAGLGEADLSFSRRSREAHFVGCKKFEYLRLPCWGGHMYVLWSHGLLADSNDFQARGERKSILARAKVLGQEGDAERRPEKLQSGEQGEARERHGAQTLQGALVNEPGSTRLEMALEGETV

SEQ ID NO: 925491 - protein, 145 aa, Homo sapiens
MAKTQFSFWEKEEQVKKNMKESKGLQAKTQVDILKPPGKLRGNRLPAPPGSWGKWHHEDPSLHRGVLGHISLQQSSLRAADVRMCVGPQHWQHSCGLTPPALLQPSFILTRLPGLSSPSGPAGGFIPATSETAQELCLAASRFHK

SEQ ID NO: 925492 - protein, 137 aa, Homo sapiens
MWYVQLECDLWVAEPFLLIKHFNIILRSHQALLPAAAKHRQWQPSLLCPLLTPEPGSSDFPSKSNPLIPQINMCQRDPLSWQDPVRTSSASESSKGSLHILLLKTQKKFALENELLPMHLRVKVMLPTAHCMTNSGI

SEQ ID NO: 925493 - protein, 131 aa, Homo sapiens
MGCKDVTIREMQSAKDSRQPTVQGIANTGALRKSSRLTWDSQLCQMLDIACSQMLDHAALEILLNHHSKQKVILYMNDPKRAGPLPLKPSSPVVEIPVYEDPPQPVMVGDLASTAIPFLHTPKDKYRSFAF

SEQ ID NO: 925494 - protein, 145 aa, Homo sapiens
MRNGFKIHPGSYDLGLSNLLEVPESLRCGVRQDEGLKGSPEETCYQVRGIEQGHAGVLEGASRESGESRKYTPYPELQGGGGHKLRWSQEIRAAGAAWEMRTEVHMNVSKRASRDSGARAGGRPPASTWAQSTAVGVWMPQGVNL

SEQ ID NO: 925495 - protein, 136 aa, Homo sapiens
MANEQLLFNYWTQLYFNSLLTAVKQNSYSEFYNSKPHKKTTILEATCIPWLLSPIFHLRSQQQYIDHEERAHPSPGEVVGEAICGNKAMNLTRNVLKIVYMEMNTHCPLHFLDDKLEKKNPKNEVVLFVLTSDLGN

SEQ ID NO: 925496 - protein, 135 aa, Homo sapiens
MELDMQSIQDIIAKKLSGGQKRKLTLGIAILGDPQVLLLDEPTAGLDPFSRHRVWSLLKEHKVDRLILFSTQFMDEADILAASTCHWLQQVTWGVTLQSYMAKYVDKGRGEESGHPWKVLRHWISYGECSEFLRP

SEQ ID NO: 925497 - protein, 390 aa, Homo sapiens
MIQRDLQIQGERAIPDKLEEEKKKEKEEKEKKVEEEKEGEKEEKEEKEKENKEKKEKERKKRRKRKKRNRRMRRKKTRKEEERIRRKEKNKEEEKKRRWRGKMEEGREEEEYPWGAGRPLHMQTAHTKGRIMDTGYWEYANASCNHLEGSEKDMKMWESLELPTDLLNSFDQKPDSNMDNKVQAEVVSDEDQELAGNWSKGGSCYVLAKRLAAFCPFPRDLWNFELEKDDLGCLEEEISKQQTIQEPDNVIEKKNPSSSEEKFKLAVEICISNEVLNVNPQDNGENVSRACQWSSQQPLPSQAGRLREKWFCGPGPGSPCCVQPRDLVLCVPATVAVAEMGQRRASAVASKGASLKPWQLLGSVEPAGEQKSRIEVWEPLPRFQRMYENA

SEQ ID NO: 925498 - protein, 176 aa, Homo sapiens
MIQQIKVEIRCQKPRAQQGAMPGRKGGYLCTGGCSCCIFPAVKLHFSEATDLGAFISLKPTFNNNKLRESGELFTNVWNSDRYLLVLLDHSNKHYKFYCGDASNIDVIDDEINDCSTAVLIREIKCRWSQGSKLLLGRNAWVGCYRCNESSAESSFEELYSQSNLNPKLGGNSTSW

SEQ ID NO: 925499 - protein, 145 aa, Homo sapiens
MCQKYHFNIKIINIKHFKSAAELHAYWNQGLDLELWPREKNGHLPSLSLSCEWSPLYVSFQANGPLWHQPCGNNISGLPHLISFFPRQYAAAYAKVETVENTHYFMWEPEKMEISSDEQTGMFPTVINKASTRPDLKSNTPTAEN

SEQ ID NO: 925500 - protein, 343 aa, Homo sapiens
MINGSQGGMQLACLNKFMGWQTEELYGDFEDLETGDVHKGKSGPDTQRNKEEIDPDKEESAKKKHLDKKRKLKEMFDEEYDEGESTYFDDLKGEMQKQAQLNRTEFEDQDDEARVPYEGFRPGVYVRVEIENVPCEFVQNFDPHYPIILGGLGNSEGNVGDVQVGPFAAYLVPKALWISPPSIILHSHPPQMHLKKHRWYKKILKSRDPIIFSVGWRRFQTIPLYYIEDHNGRQRLLKYTPQHMHCGAAFWEGAFRASFEDKLLMSDIVFMRTWYPVSIPAFYNPVTSLLKPVGEKDTWSGMWTTGQLRLAYGVRLKANKDSLYKSLRSKLQGMGVTLDMGVT

SEQ ID NO: 925501 - protein, 415 aa, Homo sapiens
MRQAEARVTLRAPLLLLGLWVLLTPVRCSQGHPSWHYASSKVVIPRKETHHGKDLQFLGWLSYSLHFGGQRHIIHMRRKHLLWPRHLLVTTQDDQGALQMDDPYIPPDCYYLSYLEEVPLSMVTVDMCCGGLRGIMKLDDLAYEIKPLQDSRRLEHVSQIVAEPNATGPTFRDGDNEETNPLFSEANDSMNPRISNWLYSSHRGNIKGHVQCSNSYCRVDDNITTCSKEVVQMFSLSDSIVQNIDLRPIQNICDLPEYCHGTTVTCPANFYMQDGTPCTEEGYCYHGNCTDRNVLCKVIFGVSAEEAPEVCYDINLESYRFGHCTRRQTALNNQACAGIDKFCGRLQCTSVTHLPRLQEHVSFHHSVTGGFQCFGLDDHRATDTTDVGCVIDGTPCVHGNFCNNTSVFYYFVGER

SEQ ID NO: 925502 - protein, 124 aa, Homo sapiens
MNLGNTKGVLCTVQGVTAKSCNPSKGPANLPHGHRFRPWKVTRGSALSHNCSVDQQLLSTSSLFTLLSVIPFCCLLIEFSAYTLLQVIVVAFTANQWTRSIRVFGNFAVHWTSVPDTVGPGIIH

SEQ ID NO: 925503 - protein, 152 aa, Homo sapiens
MTRARSYKSLEQSSFLELTEGRNHFSLLLLLLLLLVVVVFFFFFFFFFFFFFFFFFFFFFFFSSSPSPSPPSPSPSSSSSSSSSSSSSSSSSSSSSFFFETDENAPTTNALSPKASCLQTDSKQETICRCLIPPLPPPIGTDPELTAETPTQ

SEQ ID NO: 925504 - protein, 240 aa, Homo sapiens
MMTMAVLWNRKGGKADFIPLDGIPANVIQRGKQYQAAALVMLKMEPPGKLLPMVIQAVSTGGGGHVQLLHWAAAQLTCCSLCCPDDLAACGLLGLPPPSPLGRCVEIVHLLHQRDDTVRVDPELQAWDQEIMEVGLCQAQDRVLPFWGQDPTLSSHLPSSTQESICIPFPPPQTQDTSRDLRTVLLGDPGHQPYPHPTPVTDAPELPYPGAQPGQSHSCEGVCRSLLGLMFSLHVCLLFT

SEQ ID NO: 925505 - protein, 184 aa, Homo sapiens
MKHFQVSFFLSSILYNEWHLLQVGHPENLTRHVPHRPGAVSGEQSPPVFRGTDTGAQCEVQLVESGGGLVQPGGSLRLSCPASGFTFSNHYMSWVRQAPRKGLEWVSYISGDSGYTNYAETHSEGKSVRAQAQTSLKGSQRPPGGARTLCTGLSPGQVQVLLRAGFLSWPGAASSSTYCHLFDS

SEQ ID NO: 925506 - protein, 147 aa, Homo sapiens
MGPAEPGPGVHQVQLLSWPLPGVTSNKPYTEEAADEFQQELTRKTLRKLGLEAHFLNLIMAVLRPFNIILETLRSATKQEKEIKDINIGNKEVKLYVFSDDIITHIEDLKKPFKQLPEPISECSKVRGNEVTMQKSITFLYAVLNNF

SEQ ID NO: 925507 - protein, 568 aa, Homo sapiens
MHGRLAQCLLEHTGHWKHSVVAEGAVGQRFQQQVTGNDSAPLTWYLSARPRRKHAEFLLSHHTTGCMDEYTGELFALGGSASNQGCASSQDSASSQGCARNQDSASSQGCARNQDSASNQGCASSQGCASNQGCASSQDSASSQGCARNQDSASSQGCARNQDSASSQGCASSQDSASSQGCARNQDSASNQGCASSQGCASNQGCASSQDSASSQGCARNQDSASSQGCASSQGCASNQGCASSQGSASNQESASSQGSASSQGCASSQGSASNQESASSQDSASSQGSASSQGCASSQGSASNQDSASSQGCARNQDSASNQGCASSQGCASNQGCASSQDSASSQGCARNQDSASSQGCASSQGCASSQGCASNQGCASSQGSASNQESASSQGSASSQGCASSQGSASNQESASSQDSASSQGSASSQGCASSQGSASNQESASSQGSASSQGCASSQGSASNQESASSQGSASSQGCARSQDSASSQGCASSQGCALNPCCRGQSSKASLGPCGFFSARRNLQEHPAPCQMGAFTPGNILFIISCCVSAYFSNELSHKRESLG

SEQ ID NO: 925508 - protein, 329 aa, Homo sapiens
MLPPGRTLGGGDGPAPAGLGHEDPAGNLVLTAHRSRGVEGETASAVLVQHSMEVGGGGEEHASPNPWGPVSAACKLRLQEEACSSAPLTTSRCENVGATPPTTSCSENVDAAPLTTSRSENMDAAPLTTSCSENVNSAPLTTSRPENVDTAPLTTSCSENVDAAPLTTSCSENVDAAPLTASCSENVDAAPLIMSHSKIMDIALLIMSCSENMDAAPLIMSRFKNVNTAPLTTSRPENVDAAPLTTSCSENVDAAPLIMSHSKIMDIALLIMSCSKNNYTQYIPLSIYDLQTWMGSPSIFVYDCSNAGLIVKSFKQFALQREQELEEQK

SEQ ID NO: 925509 - protein, 246 aa, Homo sapiens
MQLAEPQAPRANLVPHGYDPREGAHGYDPREGARGYDPREGARGYDSGEGARGYDPREGARGYDSGEGARGYDPREGARGYDPREAGFPDVCSALSREETLEWVAPLRSWFSRRLLSSQQRGDLGVAGFPDVCSALSREETLEWVTPLRSWFSRRLLSSQQRRPWSVQLLSAAGFPDVCSVLSREETLECAAPLCSWFSQRLLSSQQRGDPGMGSSFLKAGYAIVSLSLAESRVFMGFKGEEVCAD

SEQ ID NO: 925510 - protein, 144 aa, Homo sapiens
MTLSPRVFLGFSWPLGFGEEDHRGECPSGPVIMRVHAVGMADPWWRWPGSLAEVEQTRLRGCDMQKINKIALLGSTFVKLASSTEAVISEEGLLRGHICEASIFHRSCHQRGEPSAFSVALALWAESLRGRRSMHLSLFVKTFS

SEQ ID NO: 925511 - protein, 195 aa, Homo sapiens
MTASAGSSSPPPASLHLGPLALPPAWFPWGAALLCQPSLCFQSHPPACPRMPSSSLSPPSVPPAGAFLLLIRGPVSSPSLSRLARCWFVALPWTLLPGVQTFELCFPSTAGPSPAPARPQLISLHSPFFAEQLTAFQVWLTMGVENRNPPEQLPIVLQCSSPTTGKLLPLHGSPGPMLLTRWLLRGSRAGRPPGA

SEQ ID NO: 925512 - protein, 923 aa, Homo sapiens
MQCNGMEPLRVEWIGMEWNGMKGNGINPRGMEWNGMQWNGMECNGLEWNTPEWNGIEWNGMEWNQPQWNGIEWNGMEWNGMEWNAMEWIGIKPSVMEWNGMEMEWNGMELKRMEWNAMEWNGMEWNGMEWNGKESTRVELTVMDRNGMEWNGMEWNGMGRNGIEWNGKEWIGVEWNGMEWNGMEWNGINASVIEWNGMEWNGAEWNGIDLNAMESPGIEWNGMESNRMERNGMEWTAVEWNGMESTCVECNAKEWNGTEWNGMEWNGMEWNGINKSGMEGNGIEWNGIGMERNGIEENGMEWNGMERNGMECSAMESTRVELRNQHEWNEMERNLTEWNGMEWNPIQCKGMEWNGIEWNGMEWNGMEWNGKNSSGMEWNAKVEWIGMEWNGMKGNGINPRGMEWNGMQWNGMECNGLEWNTPEWNGIEWNGMEWIQPQWNGIEWNGMEWNGMEWNGMECNGMEWNQTECNGMEWNGKEWNGMKSTRNEIEWIGINLSGMEWNGIEENGMECNGMEWNGMEWKGINQSGIDCNGPEWNGMEWNGMEWNGMGRNGIEWNGKEWIRVEWNGMEWNGMEWNGINASVIEWNGMEWNGAEWNGIDLNAMESPGIEWNGMESNRMERNGMEWTAVEWNGMESTCVECNAKEWNGTEWNGMEWNGMEWNQQKWNGTDGMEWHGIEENGMECNGMEWNGMEWNGKESTRVELTVMDRNGMEWNGMEWNGKEWNRMEWKGMDWSGMEWNGMEWNGMVSIQVNGMERNGMEWNGMEWNQQKWNGREWNRMEWNAMELKAKESTRMELNGIECNGMEWNAVEWNGMEWNGMEWNGMEWNGMEWNGMEWNGISQSGIELNGTELNGINPSGMEWNGKEWNQPEWNGIEWNGMEWNQPEWNGMEWKGMEWNGINPSEMEWKRTEWNLMEWNGMEST

SEQ ID NO: 925513 - protein, 184 aa, Homo sapiens
MACNGINRVQWNGMKWNAMQWNGTNKSGMDWNGMEWNEREWNQPEWNGMEWNAMEWNTPEWNGIEWNGMEWNQPQWNGMEWNGMEWNGMEWDGMGWNQTENGMKWNGMEWNGMEWNGIEWNGVDWNQSEWNGKEWKGMELKRIEWNGTEWNGMEWNGMQCNGINQSGIECNGSKWNGMEWNKPE

SEQ ID NO: 925514 - protein, 135 aa, Homo sapiens
MTGKHGHAKVHLVGTDIFTGKKYGDICLSTHNMDVPSIKRNDFQLIGIQDGHLSLLQDSMEVREDFRLHEGDLGKETEQKYSCGEEILIMVLSAMTEEAAAAIKAPRASGRALPPRALPFPAGSLPDTFVKIKPE

SEQ ID NO: 925515 - protein, 523 aa, Homo sapiens
MSIDIDMDMDIDMDMDIDMDIDMDIDMDRLEMDMDVDIDIDVDMDIDMDVDIDKDIDMDRLDMDIDVDMAIDVDTDIDMDRLNMDMDIDMDMDIDMDIDMDRLKMDMDVDMDIDVDMDIDMDVDIDKDIDMDIDIDMDIDMDRLDMDIDVNMDIDVDMDIDMDVDIDKDIDMDIDMDIDMDRLDMDIDVNMDIDVDMDVDMDVDIDKDIDMDIDMDRLDMDIDVDIDIDMDIDMDRLDMDIDVDMDIDMDRLNMDMDIDMDIDMDIDMDRLEMDMDVDMDIDMDVDIDKDIDMDIDMDRLDMDIDVDMAIDVDMDIDMDRLNMDMDIDMDMDIDMDIDMDRLEMDMDVDMDMDVDMDIDMDVDIDKDIDMDIDIDMDIDMDIDMDRLDMDIDVNMDIDVDMDIDMDVDIDKDMDMDIDIDMDIDMDRLDMDIDVDIDIDMDIDMDRLAMDIDVDIDIDMDIDVDIDIDMDIDMDMDVDIDMDMDVDIAMVVDIDINMYRLDMDMDVDMDMDMDINMDTDIDIS

SEQ ID NO: 925516 - protein, 153 aa, Homo sapiens
MSQYDCLLGSPRRVLLGTSCALTYGHWESQILWSHPSVTMGSTLVFNQRQTRTFEDKSSPIKPDIWKEAGYICVKEDREAGPRDLGHSCTKPCWALTEGCFGWGQVLLPWHFWSAALVARERGAGAGSGSSVSKPGNGMGCGQCPHLHLPLRP

SEQ ID NO: 925517 - protein, 125 aa, Homo sapiens
MLKVKGWKTAQVYFWLLIQCSLEDVASIAVFTFHRQGTPHGRHSLQGPRSTALHAQREPSATRSLQVASPGGETKSGLWLSLLAMVKDFTSAGKTVPLAQTPSRTKGQTVKHGLEPSSPNCHFYW

SEQ ID NO: 925518 - protein, 136 aa, Homo sapiens
MPSRCCDSHSVVECSQGAVERRHGAVTVTVLLNAVTVSLNAVTVLVVECSQGAVERRHGAVTVTVLLNAVTVSLNAAMDSQNPDVSSPTHFLAVALSPVAHLWSDPADHTHRLTSKTRGQFSICHMENNLADPLPM

SEQ ID NO: 925519 - protein, 148 aa, Homo sapiens
MERRVVACFPRWLIIDSFLGLSLATLLHNQADRSTKVTKLPSADFLKDFGFYECPGPGDGQYGHYAVPCSMILCHLGLKQSRLGRSLGKAEDEQLGTPQQRECSAFLTRRSNHGLEGQKDLSLNRSSETCCGATVTQVIRMCKQPPAI

SEQ ID NO: 925520 - protein, 153 aa, Homo sapiens
MESQADIQDFSQLASGSRCKGEVASGLPSTEGCSAACKPTDSQSPDSDANTSRSGANIRAGELSHHRTAVSGDRSTKLPSAQGTASLASDQQLGPHVPKAAAAMFDKLERSYVQIKSPQPASAILPLGTGVVGRYACKIPTAPRVPGNGAAGQ

SEQ ID NO: 925521 - protein, 122 aa, Homo sapiens
MVKTTALGWLCPHPNLILNYSCHNPYVSWRNQVEIIDSWGQFPSSCSHDSEFLQDVMVIYGVSPFTQPLFFFSSTMIPFPGAAKILWIREHCGCSFNIIETEGSLTVSFQDGVCGPSLSLEH

SEQ ID NO: 925522 - protein, 223 aa, Homo sapiens
MARLGALLLAAALGALLIFALLAAAVASDYWYILEVADAGNGSAWPGRAELLSSHSGLWRICEGQNGCIPLVDPFASESLDVSTSVQHLILLHRAVIVVLPLSLVLLVCGWICGLLSSLAQSVSLLLFTGCYFLLGSVLTLAGVSIYISYSHLAFAETVQQYGPQHMQGVRVSFGWSMALAWGSCALEAFSGTLLLSAAWTLSLSPPICGHLSPQQVGGRGGD

SEQ ID NO: 925523 - protein, 241 aa, Homo sapiens
MSTLSHTGQKGRGPISIQISQLSSLVKSGAKFTVSVERTVAGQGDDVSPYFKTEPVRTQVHLEGNRLVLTCMAEGSWPLEFKWLHNNRELTKFSLEYRGQRCLDRMVCTTVHRSRGGVGHRDSLTAAVAVAVTVAPCSLSRTLPSPGDSCCGAWVQWRGGLCSNLGSVKEGTSSIYGKFRGDHKCTTEPKSELPEPWQFLEPQDLDQELDIARPSFLQVAQLCPPLVSFMAMVVVLLQRRT

SEQ ID NO: 925524 - protein, 296 aa, Homo sapiens
MRIFVKTLTGKIITLEVEPSATIENVKAKIQDKEGNPCDQQRLIFAGKQREDGRSLSDYNIQKESTLHLVLRRRGGMQIFVKTLTGKTITLEVEPSDTIENVKAKIQDKEGIPPDQQRLIFAGKQLEDGRSLSDYNIQKESTLHLVLRLRGGMQIFVKTLTGKTITLEVEPSDTIENVKAKIQDKEGIPPISRGSSLQASSWKMAKESTLHLVLRLRGGMKIFVKTLTGKTITLEVEPSDTIENVKAKIQDEEGIPPDQQRLIFAGKKLEDGRTLSDYSIQKESTLHLVLRLRGGC

SEQ ID NO: 925525 - protein, 1945 aa, Homo sapiens
MFLLHIAFPEHQCCEHSCCGMDVCVSHGIPEQSCCHLSVCPSNRIPEPCYDGLYYSPSHRIPEHGYEEQCYEGLNACPTRRIPEHPSCEESCCDLSVSPSNRIPEHCYEGLNYSPSHRIPEHSCYEHCYEHLIYCPSHRIPEHSCCGLNICPSHRIPEHCYEGLYVCPARIQKNPSCGLDDCPSHRIPEHCCWILSVSPSHRIPEHCCWILRVFPLHKIPENSYMGLYVYPSQRIPEHCYEGLNVCPSHRIPEHCYREHCCWDLSVCPSSMIPEPCYVGLNVCPSHRIPEHCYEGPNVCPAHRIPEHSCCVLIVFSSHRIPEQCYENPEPSCCCLNVCPSLRFPEYCCWVLSVCPSRTIPEHCYVGLNVCPSHRVPEHCYEGLNICPTLRFPEHPSYGLNDWPSHRILVHCFWVLRDSLSHRISGHCCWGLNVCPSHRIPENCYEVLNYSPSHRIPEHSSCGLNVCPLLRIPEQCCWVLSVCPSRTIPEHWIPEHCCWVLSVCPSHTIPEHWYVGLNVCPSHRIPEHYYECLNVCSSHRIPEHSCCGLNVCPSLRIPEHSCCGLNVCPSLRIPEHCCWVLSICPSRRDPEQCYMGLSVSPRYGIPEHCYESLNVCPSHRIPEHCYEGLNDCTSHRIPEHSCSRLNVCPSNRIPEHCCYFLSVYPSHRMPEHCCWGLRFCLSHNIPELCCWVLSVCPYHTIPEHCCEVLNVCPSHRIPGHYCCEHCYESLNVCPSRKIPEHCYEDLNVCLTRRIPEHPSCGLNDCPTQSILQQCHWVLSVVPQIEFRTLLRGTPEHCYEGLNVGPSHRIPEHCYKRLNYSPSHRIPELTCWSLNVCSSLTIPEHSCCGLNVCPSLRITEHCCWIQSACPSSTIAEHCYLGLSACPSHRTPEHCYEGLNVGPSHRIPEHCYKRLNYSPSHRIPEHTCWNLNVCSSLTIPEHSCCGLNVCPSLRITEHCCWIQSACPSSTIAEHCYLGLSACPSHRTPEHCYEGLNVGPSHRIPEHCYKRLNYSPSHRIPEHTCWNLNVCSSLTIPEHSCCGLNVCPSLRITEHCCWIQSACPSSTIAEHCYLGLSACPSHRIPEHCYKGLNVCPVHRTPEHTCCVLNVIPEPCCWVLMASPSHRIPENCCECLNDCKSQRIPIPEHCCWVLSVFPSYRIPEHSYEEQWYEVLNACSTRRIPEHPSFGLNDCPSHWIPEHCWVRSVCLSHRIREQCYEEQCCCGLNVCPSHRIPEHCYEDLNVCLSHRILEHCSRVLNICPSHRIPDHYCCGLNVCPLHRISQHCYEGLNVCPLNRIPENSCCAVNVYSSHRIPEHCCFGLKGCPSQRIPKLWIPKQSCCLLSVCPSNGVREHCYEGLNYSPSHRIPEHGYEGLNVCPSHMIPEYSCCEHCYECPNVCSSHRITEHCCWVLCISHSHRIPEHCYEGLNICSSHNIPEHCQESLNVYPSDKITEQCYEAQNVCSSHRIPEHYCSEQCYEGLNGCPTLRIPEHPSCGLNNCPSHRIPEHCCWVLSVCPSHRIPEHCYDGLNVCPSNRIPEHCYEGINYSPSHRIPEHSCCCLNICSPLSIQEHSCCSLSVCPSLRIPEHYCWVLSVCPSGTIPQHCHVGLYVCLLRRIPEQCYEGLNVFLAHRTPEHSCCVLNVFSYDRIPEECYECLNACRTCRIPENPSCGLNDCPSHRIPEHCCWVFRVCPYHSIPEHCDEGLNICHSHRIPEHCYWVLSVCPSQRIPEQCCCEQCYQGLNVFPTLRIPEHLSCVLNDCPSHRIPEHCCWVLSVSPSHTIPEHCYEEQCYEGLNVCPTNRIPEHTSCGLNDCPSHGIPEQCYWVLNVCPSCRIPEHYCWGLNICPSSRIPEDYCCGFQNTPALVWVFVPKIGFQNTAAAIPEHCCWFLSVSPSRRIPVHCYECLNDCTSQRIKEHSCSGLNVCPSDRIPEHCCKVLSVCPSHEIPEH

SEQ ID NO: 925526 - protein, 700 aa, Homo sapiens
MECNGMGWNQLERNEMEWNGMEWKQPEWNAIEWNGMEWNEINSSGMDWNGVEWNGTAWNAMESTTMEWNGMDWNGIERNQPEWNGMEWKEWNGMEWKLKEWNGKETTRVEWNAMECNGMEWNGMERKQSEWNGMQWNGMEWNGMEFLESNGMEWNKYEWNGMEWNGIEWNGINSSGKECNGKEWNGMEWNGMQWNARVWNGVNASGMEWNGIECHGMEWNIMEWIEWNGMEWNGMESTRVEWNGMEWNKHEWSGMEWNGMEWNGINSSGMKCNVMEWNGMEWKGMEWNGIEWNQFECNECNGMEWNQLERNGMEWNGMEWNGMEGIRINWNGRERNEMEWNGMEWNGIESTPVEWSGMEWIIMEWKGINPGGMEWNGMEWNGMEWNGMERNGMESPQWKGTEWNGKEWKGMERNGMQWNQPEWTGMEWNGMEWNGMESTQEWNGINMTGMEGNGKEWNGMEWNGIEWNGMESAQVEWNGMEWNGMEWNGTERKNGMEWNGMECNGMECNGMEWNQPEWNGMEWTWNGMEWKGMEWNQPEWNGLECNGMESTRVERNGMESNRMEWKGMECNGMQWYGMESTRVEWNGMESNAMEWNGMQWNGNGMEWNEINRIGMEWNATEWNGINWKGIKWNGMEWNGMEWNRMEWNQLEGKNGMEWNEINPIGMEWNAMEGNGINRKRMKWSGMEWNGMEWNGMELTE

SEQ ID NO: 925527 - protein, 154 aa, Homo sapiens
MAILKGKNSLHTCLRGGAYRGRQASWSCCGLHPVPAAWLLCLPKKAWAMAGPTPPASLPPCSLISECCPSNQQDSIGIRPSEPGAGHNLLVCRFPSLLEKYSIRVRVTLFSRCHLSPLSLTRKGNSLTPCASRGNASPCFGSHTVRCTHCFSLP

SEQ ID NO: 925528 - protein, 356 aa, Homo sapiens
MRPELPIPNWVLSDSCSHKVGHAQQHSIIKWKWCISDWAQAGPGGHNGQKLKIFVPCVSVDQQVTSAEEDFDNQVDKMTRSVDTTQPLSSDTPVIQGGLPLTKAELSVATAECPICQQQQQRLTVNPLYGIISWGDRPATRWIDRMVGRPFEVAITTSTRLQYFAGPGHHTPEGHVCSESAPNVWYCFSHSQDSQIQDSRGGCESGTTHYDALAKCLLSVPMTLGSALLVILAPEGRTLLPGDTITIPLNWKLRWPLGRFGVLLPLSQQAKNGVTVLAAVIDPDYQDEVSPLLHNGSEEEYAWNIGDPLGRLLVLSCTLIKVNGKLYPIQVGLQMVQILSGSRPAEVLAEGKGNTE

SEQ ID NO: 925529 - protein, 217 aa, Homo sapiens
MTSIGAGADSEENPDSGGRHFRACVVTEAFPGPKSAEVPGAQECLGRRPSLGSCSCAWGVPALATWKGLGSHLSPAATGSIECAALAVTPRCVFPAVVHGRGAGGMGALANAAQMNLMLLGPILQDPAASADGLPDVVGSEIEAAMEGLHLAVGPAQPLGGGGAVRCLGDTGNGVLPPPLLLLLLLLTTLPMRPKRYWHDGNCHSRWPAAPINSVHI

SEQ ID NO: 925530 - protein, 200 aa, Homo sapiens
MESKRIIEWTRMESSNEIEWNNPWTRMQSSSNGIDGIIIQWKLMESKSYGIEWKHHRIETNGIIMKLKWMDSSSNGFEWNHRMKLIEIIIKWNRMASLNGIEWNHHQMEMNGIITEWNRMDSLNGIRWDHRMDLNGIIEWTRKESLLNGIEWNHRMVSNGIIIKWNRMESPNRIEWNNHRMDSNGIILKWNRRELSNAIE

SEQ ID NO: 925531 - protein, 245 aa, Homo sapiens
MESKRIIEWTRMESSNEIEWNNPWTRMQSSSNGIEWNRRMDSNGINIERNRMESSSDGNEWNHYRMESNGIMKWNQMESSSNGIKYNYGMKSNMETNGIIIEWNRMESLNGIEWNHLQMEMNGIIKQWIRMDSLNGIRRNHRMDLNGIIEWTRMESLLNGIESNHRMVSNGIIINWNRMESPNRIEWNNHQMDSNGIILKWNQMELSNGPNGIIECNQIESSNGLEWNHRMEWNGIVNELEWNHH

SEQ ID NO: 925532 - protein, 1040 aa, Homo sapiens
MQWNGMESTGKESKGTEWNGMERNGMERKRMECNGMQWYGMESTRVEWNGMEWNEMECNGMKCNVMEWNGMEWNGMEWNGMECNGMEWNGINTSGMECNGMEGNGKKWNGMEWNGLEWRGMEWNGTEWIGIEWNGLEWNGMELNQPDWNGMECNGMEGNQQERNEMEWNGMEWNGMEWNGMESTRVECNGMEWNGMESTRVEWIGMEMEWNGIERNQPEWNGMEWNEWNGMERILMEWNGKETTRVEWNAMECNGEEWNGMEWNGMEWNGIQCNGNKPSGIGKEWNGKEWNGKERMECNRMQWYGMEATRVEWNDMEWNEMEWNGMEWNGMEWNGMESTQLEWNGMEWNRMEWNGMALERNGMERNGMERKEWNAIECNGMEWSQPEWNGMEWNGMKWNGMECNGMEWNGINSSGMEGNGREWNGQEWNGMKWNGMECNGIINKGMECNGREWNGINTSGMEWNGMEWNGMECNGMEWNGMEGNGMEWTGMEWNGMKSSRLEWNGINWKGMKWNGMECNGLEWNGINASGMQWNGMEWNGINPSGMDWNREWNGMQWNGMESTGKESKGTEWNGMEWNGMEWNGKEWNGMKWNGIDWNTINSIGKECNGKEWNGKERNGMQWYGMESTRVEWNAIMEWNEIEWNGIQWNGVEWNKHQWNGMQWNAVEWKEMEWNGIEWNGMELNQPDWNGMECNGMEWHQLQRNEMEWNGMNGMEWNGIHPSRMQWNGKEWNGINQGGMDWNGVEGNGTACNAMESSRMDWNGIERNQPEWNGMEWNEWNGMERILMEWNGKETTRVEWNAMECNGMEWNGMEWNGMEWNGIQCNGNKPRMEWNGMEWNQPEWSGMEWNGNEWNGMEWKRMEWNGMERNGMERTRVEWNGMEWNGMERNGIYPIGMEWNGMERNGMYPIGMEWNGMEWNGMACNKHDWNGMEWNGIEWNGMERNGIECNGINSSGKEWNGKEWNGTDRMECNRMEWYGMESTRVEWNGMEWNEMEWNGMQWKGVEWNKQQWNGMEWKGMEWKGMEWNGMEWNAMERSGME

SEQ ID NO: 925533 - protein, 793 aa, Homo sapiens
MESNRMEWNGMDWNGIERNQPEWNGMEWNGMEWNEWKGMEWKLMEWNGKETTRVERNGMEWKGNNPSGTEWNGMQWNGIEFNVVETNRVECNVMERTGMEWNGLESTRLQCNGMEWNGLEWNGMEWNGTDWNGMERNGMEWKGMEWNGKEWNELEWNGMQFNGMEWNGINPSGVEWNGMEMNGMEWKLMEWNANNPSGMECNGMEWNGMEWNGIQQNGNTPSEMSWNGKDLNVMEWIGVNPIRKQWNGMEWNGMEGNGMECNGMEWKGMEWNGRDWNGMEWIRMEWNGMKSTRLEWNGMQSEWNGNEWNGMEWNGMEWNGMEWNGMQCNGTERNEPEWNGMEWNRMEWKGTEQNGMEWNGMNTSGMERNGMDWNIMEWNQPEWNRMEWNGMEWNGMGRNGMEWHGIEWNGTERNGMEWNGMQWIGIKQMEWNGMEWNGMEWNRMESIRVQCNGIEWNGMEWNGINQSTMQWKEIEMNRMEWNGMEWNGMEWNGMEWNQPEWNGMEWNLTAWNGMEWTEINPSGMEWNGMDWNAMEWKGINPSRMKWNGMEWKGIQWNGIEWNGMERNGMERNGINMSGMEWNGLEWNKHEWNGMEWNGMEWNGIEWNGINSSGKERDGKQWNGKESNGMHWNEMSGVEKNEMEWNGMQWNGVEWNKHQWNGMEWNGMEWNGMEWNGMAWKGMEWTGLKWNGMERNAMEWNGINWKGMKWNGMEWNGMELNGMEWNQHEWNAMQWNGMECNKINPSGMHRNRVEWKGQAWNAMESTRMEWNGMERNGMEWNGMEWNGMEWSGMD

SEQ ID NO: 925534 - protein, 321 aa, Homo sapiens
MESSNGIFIEWTLMESSNGLKWNHRMDSNVIIIEWYRMESLNGLKWNNHQMESNGIIIRWKRMESSSNGIEWNYQMESDGIIIKWNKIESSNEIEWNHHQTDLSRIIIEWNKIESLNGLQWSHHRNHHRMETNRIIKGTRMELSGIIIKWNPMESSNGIEWNHHRLELNGTIEWTRVESLENGNHRMKSNGFIIEWNQMELSLNAIEWNHYRMESNGIINKWNPMDSSSNRKNGISKGLEWNHRMHSNGIITKWSQMESLKGIKWNHHRMKSNGIIEWTRMETSPDAIERNHGMHLKGIIKYTHMEPTLSGIERNLRMELN

SEQ ID NO: 925535 - protein, 146 aa, Homo sapiens
MEWIGMEWKAVETAGTEFNEMEWNGMERNKPEWNGTEWNAMEWNGMESTPVEWNGMEWNGMEWNGMEWNGMECNGINWNGMEWNGMEWNQREWNGMEWNGLEWNGRQWKQQERNLMKWNGMEWNGINLSGMEWNGMQWNGMEWNQP

SEQ ID NO: 925536 - protein, 174 aa, Homo sapiens
MDSSGIIIKWNPMESSNGIEWNHHRLELNGTIEWTRVESLENGNHRMKSNGFIIEWNQMELSLNAIEWNHYRMESNGIINKWNPMDSSSNRKMEYQKDSNGIIECTRMESSPNGESWNALESNHRIYSYGTNIEWNRKKSSNGIELNHRMDSNGIIIEWNRMESSSNGIEWNHQ

SEQ ID NO: 925537 - protein, 209 aa, Homo sapiens
MPEQASSQLISVPKPGKPWTSWEGLITLLRDEPIAEALTGLQADVEILEWICRQKTKPLYKYQPSWGTSGLAGRRHCPHIAPKTAESVRGSVGEVGEVCLRYIQERLADKVGGEPCRLGPGLGPAGEETCWQSLAEATVSEAVESQLQCQFRQASEGRHRTSSLPSLSPPLPGSLEPGGVSCQDTSRMLPVLSLTTARSAQALCNILNC

SEQ ID NO: 925538 - protein, 149 aa, Homo sapiens
MQGVGHCHSPTEGILCRPHHHSRSFFGRIGVLRNFGKQRCKPGQLGPPGGLEDKVLQWTLKNYPPTVKPKGFFCQECHSQVCSKSSPPFICACGRQRPDGRAEHLGSEDRPFMYQPHLGTSRQYCARPVGCEIVGGGVYLSSVQQWSGN

SEQ ID NO: 925539 - protein, 139 aa, Homo sapiens
MFLIAGLVPKSLIAFTLVQRFSIEWVETEMLLTFLPCTGQFPQQRMILPKLSIALLLRNRFQWKRQARRHMKENREGNYRAGGKAGVSLGYKEGKEPWMCTLRDQPLGLEPSASGPEMKARYYHYNHDHDNDYDDFKIH

SEQ ID NO: 925540 - protein, 137 aa, Homo sapiens
MVKGEANTSFFTWWQPEKCRVKDGGKPFIKPSDLTRTHLLSREQHGGVERNRGPCGVVQMAKPRKGDGEFPLVPSVSRDTIQKPGPRIGNFRNLPGALFYCSRTGTKATRQSPSHSYLLFIQTMRFLPMVTTAPSPM

SEQ ID NO: 925541 - protein, 153 aa, Homo sapiens
MNNQSLPLLTNGIVIGMGRRVLGLLHKGMGQCGYLLIRPAKDFHGSPNHLRLGGLKGKKWFPGPGPGPSCCVQPRDLVSYTLAAPAMAKRGQATDHAVASESVSHKAWWHTHGIEPMGAQKSRIKVRESLPRFLMCEKPGCSDRNLLQGWSLH

SEQ ID NO: 925542 - protein, 163 aa, Homo sapiens
MARGACFPFTFHHDCKFPKVSQSCFLLSCRTVSQLNLFSLHIIQSQLVLYSSGDTGFMELFRENSQGRSLVKLELQHLTLLGLFSRMPGGSSSHSLELVHEALPWFRGHLLRPGDQGLLVVQVEYQRKPHLLHPEVSQIVRKLHKHPRSIVNERTKISITAMD

SEQ ID NO: 925543 - protein, 155 aa, Homo sapiens
MGYLRCAASRCSQIGTLGKASRRDAQIRLAPIHGLDSSFLSRSDSLDRPNQPSGAGQTWEDLLSLAMLHCSHSYAKPTGLCTGCNSVPANSPSSSPSQFKCLHVLWDFLQIDFWRSVEPVLVVTAGVYCWHVIYMFKPQPPILQNVTIFGDLVIT

SEQ ID NO: 925544 - protein, 165 aa, Homo sapiens
MMIDAKHKILENVKPDNATEKKNSFSGEKFKPAAEIHILNKEPNVNHQDNGEMSPGHVKDLHSILSHHRPRRLGEKNSFLGNVQGPPAVAVQKENVGSEPPHRVPPGALPSGAVKRGPQSSRPQSSRSTDSLHSFQVEKPQTLKAIHESWAGAAQDHQGPPLASV

SEQ ID NO: 925545 - protein, 189 aa, Homo sapiens
MRIDYIYIHNQMDIEGYNSGKKLQNTSQSQTCTKKVMVILWWSAAGLIHYSSLNPGKTITSEKYAQQIHEMHQKLQCLQMALVYRNGPILLHNARLHVTQLTLQKLNELGDGVLPHLLCSPDLSPTNYHFFKHLDNVLQGKHFHDHQDVENAFQELLESQSTDFHTMEINKFITHWQKCVDFNCSYFDS

SEQ ID NO: 925546 - protein, 239 aa, Homo sapiens
MTLLNFLKHILVTWPPYELRCLCFRKSHTGIEFCQTTSRGYDESSCYLFWAAPQKQKEDSSASELLTLSSKLIPMGKIIQGQQKVPLRPLVTKETVKVEEGENKEFPETRECNLKELFHFLHQYHQLLKEPLLKRILKGHKNISVERILEVGKLKQAFYKEVVSPFSECFMGMDMMSGWGTLPRSSIVKLKPANKVLMEATVRVDGIQVSVQYEVYDGIEGHKEVWQFQKGWEFIACSS

SEQ ID NO: 925547 - protein, 162 aa, Homo sapiens
MADLSLEKLVITDLLKPTSVNSSNSLSSCQTGKFKSAEAVCCLLYRYALPPEVESREEIGLAELQWGPPNSSFPAALFTLESLIHSKTLTLFNSTKAERDEEAAKEKFEASRSCFLRFKETSYLHNIKVQGEAASTNIEVVGSYTEGLLRSSVGDEGGYTKQ

SEQ ID NO: 925548 - protein, 152 aa, Homo sapiens
MVQGPSASDLLEFAGVPLQILIAWLSPAEAAEQQILLPDPSSGSFAPEDEDSHMLPEWLLGAWIKNRSTGAIIAIVNHEGMTSPQTTYDLLLNLPYTEERGIPDLLSVVEYEVHADAITVTVRIPEYQTMRGLTMSPSPPSRRGTTQGLPCY

SEQ ID NO: 925549 - protein, 152 aa, Homo sapiens
MKLWTFVVNVTVLKGGSDPKSEQQQDLLGGAKEQSFLSVEGDPSGLPLLARWPAVIPLFVHAHILLIDPFYRALTGPFYRVLIGPFYRVLIGPFYKPLASHRALIAAFYNPSYRLLIGAFYNPLVRQKSSPSPHQPRSPSSGNLCNFELVWQ

SEQ ID NO: 925550 - protein, 143 aa, Homo sapiens
MQGWERCRFLSPGNCLGFEQEEAAAHPGTLTPTPSAVNKIKQFLKDKPELVDVKVGVRTRGCNGLSYTVEYTKTKGNSDEVIQDEARVFIEKKAQLTPLGTEMDYVEDKLSSELCSITQHELVAVETPLAIGSRKAGGNLGAH

SEQ ID NO: 925551 - protein, 137 aa, Homo sapiens
MLGVSFRPYSSYAFPCLEMSLKEQRLVPVPSSGTCDLKRRQTDARGTLATDCHSQLVGLWGTSLGTKLSRLPSSSRGKAQPLAIEMYAALQPPRELSVLGSWESQYWLLSLTQGAQTGLHSRKSQLWCWSPLSPGVQ

SEQ ID NO: 925552 - protein, 147 aa, Homo sapiens
MNFTELKEHVLTRRKEAKNLAHPIPGHNIDPDLEKECSGGLGLRSRLWLQFKSQIQFGSEATWVPRHEALCSDDSRPWNSRTWQSRLCETRCNSSKDPRMAEHSYCLGPGRQVAAQRQCTVSALTWGTDSSWQSRDHYSEMQDATST

SEQ ID NO: 925553 - protein, 149 aa, Homo sapiens
MGLLYRALAMMPNGKGEDQTIKAEDEDYIKKQQRRSKELTENEHSDVCASFSTWTSRKNITSWHKASAQKWAFAAEMCDILNSMMNDTYGTLGNLKSLRYVDLLQYFGDMSCKRHTNLNRLLTFSTADGFCGLIPKWSLQWSLIERTSI

SEQ ID NO: 925554 - protein, 151 aa, Homo sapiens
MLPKAVLPARRERASPFSRSHRSFAQTSGALLLLLLLLLLLEAGGGWEQGTKAVSSSDVNLQTLAGSRTWNLQLRKERDISDTQTQRKGPCAETAVMQPQAKECLGPTEAGRGKGGFCPGAFGGSVALLTLQLQTSGLQNCDRKVSVVFRH

SEQ ID NO: 925555 - protein, 167 aa, Homo sapiens
MSISWLPVKSDHNTMISVKVGVCVYVYACVCVCDCESVYVGKCVRVCEHVYECVYLCIHQLSDPPVTNPIVHSSIYSFLFIPTANSKAKHPSSFTQRSQQFLKKALDPNLSSLSFNPSTSSCWGFTPRTPLSSSIYQVPSDMQSISPTSSHSSNPSASSASLLQSLL

SEQ ID NO: 925556 - protein, 158 aa, Homo sapiens
MIVATAFQGAQMCPFCPANYISSPYPRVQGGLQAQLSCMPLRPCVFSYVLLSGDGSELSIPPTQWSAEDGVLVQTRLKTTFAKCENECVVLSDSFFYEKDLPSHTSAASHMAHASVPVVPSSVSIAPEDYPSKLSKSSKTKKVTLRSYHNQEEAKDLL

SEQ ID NO: 925557 - protein, 211 aa, Homo sapiens
MKVKNKKKKKKEKEEEEEKKKEKEEEKKKEEEEEEGKKKKKKKKKKKKKKEKEKEKEKEKEKEKEKKKKKKKKEKEKEKEKEKEKKKKKKKKKKKKKKKKKEEEEEEEEEEEEKEKKKKKKEKEEEEKKKKEEEEEGKKKKKKKKKKKKKEEEEEEEEKKQKQKQKKKKKKKKKKEEEEEGRKEGKGRRKEEGRRRRRRRRRTRRRRKRRK

SEQ ID NO: 925558 - protein, 186 aa, Homo sapiens
MRGVIHKERVRGEGTGEGILGREKSTFKGPEVEKTAYQVLKHQEPPEKDAAGLLIHIDDDDDNNEDEAADQCGEAGREECSPGLVLTLGVLVAFSDSIVQFIQSTKYIFHGAQLLGSTNWDRRSQPLVDQSISQFSFVLISLEEKVVAEAAPCVRKTTVPGLWLQPLFPLAFPYGSVVRSPIPNVK

SEQ ID NO: 925559 - protein, 199 aa, Homo sapiens [sequence omitted]

SEQ ID NO: 925560 - protein, 154 aa, Homo sapiens
MKAEINLGQPKHICFLSACLSHPKYTCLRWQHDKAPFLLSNGLQASGLLFLLPGLCTKLCQFMVGPVHHLPQCNNHLFECPSSSRPKGANVLLKVPDNGDRFNPKDIVQLLVLTEEKPSKMESHSVARLEYNGTNLAHCNLRLLGSRDSPASAS

SEQ ID NO: 925561 - protein, 170 aa, Homo sapiens
MHLCPSPYKINILGQLHIKILIPRWKIESKCLWRFQGPFLLYSEDSSYDTNSRISGWIREKMENGCCKGVNCLECCRQPGSEVAYVAENDGACSEENTKGVAKQPFDKDISMAVTHRSKQPLQPKPERDAIITAEKLQLELKRTEKVKQNKGRQLDFWDATGQVRRAIWL

SEQ ID NO: 925562 - protein, 175 aa, Homo sapiens
MGGQLKINGKCGGILVEVHLQKCSNRKVGAVSEGAMVVATGKHFSRAAEAVLQICVARQGPWERPAEEVVQIRLAPSHGNRGIIPSGIMSFSPLAPKELTQWADVRTPLAMSQTQTIEHWPTPTKEKQSEMQRVPYGFQLQGIRQGERTTAVEVLDDIIFQHKAVSSTFNICCLV

SEQ ID NO: 925563 - protein, 151 aa, Homo sapiens
MLPCVSELIIFKCSRERHKQSREIFKQEAIGLALSLGNSFWSRSRELSEVEDAVEMSNRMQTEDSPLDLAINWIMEVGSEEEKWEKLDAEFDHFVVDMKPFVLKLPHRTVTIFAIDIGLFTLSCSRVDRHSVIMSCQTVERSYCDASSHMS

SEQ ID NO: 925564 - protein, 149 aa, Homo sapiens
MQLPQIIHESDSHKERNAADIHTSREVNPSLVEPLDENPGPSAAGLLEFSGGPLQTLFAWVSPVEAAEQQRLLSVPSSGSFVPEGHPPDASRSSPISYFLLSPTGNILKFQIPTNDLFKSTLSLAHYTQRCFHILRLYFTFRYQNLYYL

SEQ ID NO: 925565 - protein, 317 aa, Homo sapiens
MEWNGVESTRSEWNGMELNGIQWKGRECNGINCNGMVMNGMERNGIESNGMEWSGMEWNGMEWNQRELNAITMEWNGMQRNGMEWNGMQRNVMEWIGMEWNGTEWIPDKWNGMEWNGKDLNGMEWNGMEWNGMESSVTELNGRQWNRINPKGMDYNLLEWKGTEWNCMEWNGINTSGMECNVMEWNGMEWNGMEWNSMELSRVELKGMEWNGMVSTGMELIGMQLNGINPKGMDGMEWNGMGRNGMEWNQPERNAVEWNGMEWNGMDWNGMEWNQHDWNGMEWIQPECIRMDWNGMEWNGINKSGMEWNGMEWNAME

SEQ ID NO: 925566 - protein, 3004 aa, Homo sapiens
MECTAMECNGTEWNAMQWKGMEWNGMEWNGMEWNKQEWNAMEWYGMKRNGMEWNKSEWNGKEWNGMEWNGMEWNGLEWNGMEWNGNNWNGMEWNGMESTRIEWNEMNGIEWNGLEWNGMEWNGMEWNGINPKWHGMEWKGMEWNRMEWNGMEWNGIVWNQTDWNGMEWNGMEWNGMEWNGMESSRVKRNGMEWNGINPSGMEWNEIEWNGMVWNGMEWNGMEWNKSYSNGMEWNGINASGMEWNGMEWNGMEWNGINEKGIEWHGMEWNLSEWNGMEWNGMERNNRMEWNGMEWNGMEWNGMEWNRMEWNGINPPGNEWNKMERNGMECNQTEWNGMEWNGMEWNGINPTGTEWNKTERNGMEWNQPNGIESTRVECCIMEWNGMEWNAMEWNQPEWNGMQWNIMGCKGMEWKQPDWNGFEFNGINPSGMEWNGREWNGMESNGVECNGMEWNRMEWKRIEWNGMEWNGMDLNGMEWNGIKRVEWNGMEWNGIECNGMEFNRINSSAMEWNGMEWNGMESNRVEWNGMEWFAIEWNGIESNRVEWSGMEWNGMEFNAVNPSGMWIGMERNGMQRNQPEWNGMDWNGMEWHGMESNPVEWNILELNGIESTQVEWNGMEWIEMDRNGMEQNVVNQRGMECNGLEWNAMESTRVEWSEWCGMEGNGMQRNGNNMSAMELKGMAWNGMEWNGMEWNGVESTRMEWNGRNGMEWNEMEWNGMECKGINTSGMEWNGMECNGLESSRVQWNGMEWNGMEWNGMEWNGMEWSGINPSGMEWNGMEWNGREGKGRECNGINCNGMVWNRMERKGMEWNEMESTRVECNGMERNGMEWNGMEWNGVEWNGINWNGMEWNGMEWKGMEWNGLELTRVEWNGMEWKGITWNAMVFNGMEWNWTEWNGVESTPVEWNGPEWKGMERKEWNGMECNGMEGNGRKLSGMEWNGMEWNGIKRKGIECKAMESNQPERNGLQFNGVEWNGMEWYGMGWNQHKWNGMEWNGNGMEWNGINPSGMEWNGMEWNGINPSGTEWNGMEWNGMEWNGMAWNGMEWNGVESTRVEWNARNGMEWNGIEWNGMEWNGINMSGKEWNGIEWIGINPSGMERNGMEWNGLEGNKPVSIGMEWNRMEWNGMESTRVEWKGMEWNGMEWNAMEWKQHECNGIEWNGMEWNGIEWNGVESTPVEWNARNGIEWNEMEWNGMEWNGMEWNGINTSGMEWNGMQWIGIMSSTMEWNGMERNEMEWNQPERNGMEWNGMEWNGMEWNGIECNGIKCNGMVWNGMERNGMEWNGMEWDQLECNGMERNGMEWNGMERNGMEWNGMEWNGMERNPLDFNGVEWNGMEWKAMELNGLESTRVEWNGMEWNGMEWNGITWKAMWNGMEWNGMERNGMEWNHPEWKVMYWNGMKWNGMESIRVERCGMEWNGMEWNGMEWNGMEWKGINPCGLQTNRMEWIGMKWHGINTSGMEWKSGMEWNGVEWNGMEWNGMEWNLMQSTRVEWWGMEWNGMEWKGMEWNGMECKGINWNAMESTRVEWNGMEWNEIEWNQSQWSAMEWNGIERNGRESNRVKWEGMEWNGMEWNGMEWNGINPMDRNGKEWNGIESTGVEWNGLEWNGMESNQVEWNILELNGIESTQVEWNGMEWNGMDRNGMEQNVVNPSGMECNGLEWNVMESTRVEWNGMERNQPEWNWNQPEWNGMERMEWNGKKWNGMKWNGINTSGMEWNGMECNALESSQVQWNGMEWNGMEWNGMDWNQPEWNGMESNGMEGKGREENAMESTWNGMECNGKEWNGMDWNQPEWNGMEWNGTESPGMQWCLMEWNGIEWNGIEWSGINPSGMEWTGMERNGMESTGMTWYLMAWKGMEWNGNNQSGNQWNGTEWNVRNGMELNGVNAIGMKWNGTEWNGMEWSGKESTQVEWNGLEWNAMELNGEESNRVEWNGMEWKWNETEWNGMKLEWNGMEREGMEWNGMEWNGMEWNQPEWNAVEWNGMEWNGMEWNGMECNGMEYNGMESTRLEWNGMEWNQPECIRMDWNGMEWNGNNPSGMEWNGMECNGMEWNGINPMEWNARNGMEWNGMETTLVEWSGMECNGLESSRVKWNGMEWSGINPSGMEWKGMEWNGMEWNGMEWKGMEWNGMERNGMEWNGMEWNGKEWNGMEWNGMEWKGARKGMEWNGNNHSGIQWNGTEWNGRNGMEVKGVNAIGMKWNGTEWNRMEWNQPNWNGMEWNGMEWNGMEWKEINPLAWNGIEWNGMQWNGMEWNRREWNGIKRSGKQWNGMETNVTEWNGINTNEKESKGMEWNCMEWNGIEPKRVEWNGIERNGMEYNQKTRWNEMEWNGMEWNGMEWNGMEWNGMEWNSTRGMELNGMEWNGMGWNGIEWTEAQWKRMEWNEMECNAMEWKGINRIGMEWNGTEWNGMEWNGINPKWIGMKWNEPEWNATEWKGMEWNGMEWNEMEWNPLDCNEVEWNGMEWNGSESTRMEWNGMEWNGMEWNGMESPGMQWCLMEWNGIEWNGMQWNQPQWNGMEWNGKEWNGVNWNDMVFNGMERNGMECKQPKRNSLEWNGMEWKEWNGIEWMEWNAMDWIRMEWNLPEWNGMKSNGMEWNGMEWNGMEWNGMEWNGMESTRVECNVLEWNEMEWNGINPSGIWNGVECNGMEWNGMEWNGMEWNGLNHCGKEWNGMIWNAMEWKGINCIGMEWNGAEWNGMEWNGLKPSGKEWNGMIWNAMEWKGINCIGMEWNGVEWNGMEWNGMESTRVGMERNGKNGMEWNGMEWNGMEWNGMESIQEERNGMEWDRMEWNHPSGMEWNGVEWNQPEWNGTNWNGMEWNGIKPSSTECNGMEGNGMEWKGMEWNLIKWNGMQWNGMEWNLIKWNGMQWNGMEWKQVEWNGMEWNGMEWNGMEWNGIQWNQATMEWNRMEWNGIEWNGMEWNPHKWNGMEWNGKEWNGMEWNGMEWNQPEWNAVQWNRMERKGMERNAMEWNGINTIGMEWNGMEWNGKEWNGINTSVLEWIGMEWSGME

SEQ ID NO: 925567 - protein, 137 aa, Homo sapiens
MTWSPPQGPSSLYLHLGSGFSRGIWRGAHKHSVHCCGLISSFASSGPLKVRDEGTQPSKGRADGAAVENAGRRGIRDAPQCLLLLTWRRLGSRVRRKVAFNIQVEKVSKVNLLPTRIHSSTLNNSRKVEATQASIYR

SEQ ID NO: 925568 - protein, 146 aa, Homo sapiens
MWHQISLGLTLRLWDMYLLEGQVLMPIRSIAFKVQKKRLMKTSRSGLLACFRNQFFHTWATDDDTVLKHLRASTKKLTRKQGDLPPPSGLQCHVPSHVTLWGSQYVPLADAADEVSHRATEKAKPASKVKGGGLELMAISSTVQEK
